United States Patent Application Publication US 2026/0226133 A1 - sequence listing, part 5

SEQ ID NO: 6534 - DNA, 2610 bp, synthetic construct
  source 1..2610: mol_type = other DNA
atggccttaccagtgaccgccttgctcctgccgctggccttgctgctccacgccgccaggccggaagtgcagctggttgaatctggcggaggactggttcagcctggcggatctctgagactgtcttgtgccgccagcggcttcagcttcagcgacttttggatgagctgggtccgacaggcccctggcaaaggacttgaatgggtcgccacaatcagccaggccggcagcgagaaggactacgtggactctgtgaagggcagattcaccatcagccgggacaacgccaagaagtccctgtacctccagatgaacagcctgagagccgaggacaccgccgtgtactattgtgcctctggcgtgtacagcttcgactacagaggccagggcaccctggtcacagtctcttctggtaccggcggaggcggatctggcggcggaggtagcggtggcggaggatctgaattcgagatcgtgctgacacagagccctggcaccctgagcctgtctccaggcgaaagagccacactgagctgtcgggccagccagagcgtgtccagctcttacctggcctggtatcagcagaagcccggccaggctccccggctgctgatctacggaacaagcagcagagccaccggcatccccgacagattttctggcagcggctccggcaccgacttcaccctgacaatcagcagactggaacccgaggacttcgccgtgtactactgccagcagtacggcagcagccccttcacctttggcggaggcaccaaggtggaaatcaagagactcgagatccagaaccctgatcctgccgtgtaccagctgcgggatagcaagagcagcgacaagagcgtgtgtctgttcaccgacttcgacagccagaccaacgtgtcccagagcaaggactccgacgtgtacatcaccgataagtgcgtgctggacatgcggagcatggacttcaagagcaactccgccgtggcctggtccaacaagtccgatttcgcctgcgccaacgccttcaacaacagcattatccccgaggacacattcttcccaagccccgagagcagcgactccaccgaccacgtgaagcccaaagagacagagaacaccaagcagcccagcaagagctgccacaagcccaaggccatcgtgcacaccgagaaagtgaacatgatgagcctgaccgtgctgggcctgcggatgctgttcgccaaaaccgtggccgtgaacttcctgctgaccgccaagctgttcttcctcctcaccgcccgcgccaagagaagcggatctggcgtgaagcagaccctgaatttcgacctgctgaagctggctggcgacgtggaatccaacccaggccctactagtatggactggatttggcgcatccttttccttgtcggcgctgctaccggcgcgcattccttcgaacaggtgcaactccaggaatctggccccggactggctaagcccagcgagacactgagcctgacctgtaccgtgtccggcgacagcatcaccagctactactggtcctggatcagacagccccctggcaagggcctggaatggatcggctacatctactacagcggcagcaccaactacaaccccagcctgaagtccagagtgaccatcagcgtggacaccagcaagaaccagttctccctgaagctgagcagcgtgacagccgccgacaccgccgtgtattattgcgccagagatcagcggagaatcgccgctgccggcacccacttttacggcatggatgtgtggggccagggcaccaccgtgaccgtgtcatctacgcgtgaggacctgaagaacgtgttcccacctgaggtggccgtgttcgagcctagcgaggccgagatcagccacacccagaaagccaccctcgtgtgcctggctaccggcttctaccccgaccatgtggaactgtcttggtgggtcaacggcaaagaggtgcacagcggcgtgtgtaccgacccccagccactgaaagaacagcccgccctgaacgacagccggtactgcctgagcagcagactgagagtgtccgccaccttctggcagaacccccggaaccacttcagatgccaggtgcagttctacggcctgagcgagaacgacgagtggacccaggacagagccaagcccgtgacccagatcgtgtctgccgaagcctggggcagagccgatgatgtgattaagatccactggcaggaaaagaagtccaacaccatcctgggcagccaggaaggcaacaccatgaagaccaacgacacctacatgaagttcagctggctgaccgtgcccgagaagtccctggacaaagaacacagatgcatcgtgcggcacgaaaacaacaagaacggcgtggaccaggaaatcatcttcccacccatcaagaccgatgtgattacaatggaccccaaggacaactgctccaaggacgccaacgataccctgctgctccagctgaccaacaccagcgcctactacatgtacttgttgctgctgctgaagtccgtggtgtacttcgccatcatcacatgctgcctgctgatggctatggtcaagcggaaggacagccgggga

SEQ ID NO: 6535 - DNA, 2586 bp, synthetic construct
  source 1..2586: mol_type = other DNA
atggccttaccagtgaccgccttgctcctgccgctggccttgctgctccacgccgccaggccggaagtgcagctggttgaatctggcggaggactggttcagcctggcggatctctgagactgtcttgtgccgccagcggcttcagcttcagcgacttttggatgagctgggtccgacaggcccctggcaaaggacttgaatgggtcgccacaatcagccaggccggcagcgagaaggactacgtggactctgtgaagggcagattcaccatcagccgggacaacgccaagaagtccctgtacctccagatgaacagcctgagagccgaggacaccgccgtgtactattgtgcctctggcgtgtacagcttcgactacagaggccagggcaccctggtcacagtctcttctggtaccggcggaggcggatctggcggcggaggtagcggtggcggaggatctgaattcgacatcctgctgacccagagccccgtgatcctgtccgtgtctcctggcgagagagtgtccttcagctgtcgggccagccagagcatcggcaccaacatccactggtatcagcagcggaccaacggcagccccagactgctgattaagtacgccagcgagtccatcagcggcatccccagcagattttccggcagcggctccggcaccgacttcaccctgagcatcaacagcgtggaaagcgaggacattgccgactactactgccagcagaacaacaactggcccaccaccttcggagccggcaccaagctggaactgaagctcgagatccagaaccctgatcctgccgtgtaccagctgcgggatagcaagagcagcgacaagagcgtgtgtctgttcaccgacttcgacagccagaccaacgtgtcccagagcaaggactccgacgtgtacatcaccgataagtgcgtgctggacatgcggagcatggacttcaagagcaactccgccgtggcctggtccaacaagtccgatttcgcctgcgccaacgccttcaacaacagcattatccccgaggacacattcttcccaagccccgagagcagcgactccaccgaccacgtgaagcccaaagagacagagaacaccaagcagcccagcaagagctgccacaagcccaaggccatcgtgcacaccgagaaagtgaacatgatgagcctgaccgtgctgggcctgcggatgctgttcgccaaaaccgtggccgtgaacttcctgctgaccgccaagctgttcttcctcctcaccgcccgcgccaagagaagcggatctggcgtgaagcagaccctgaatttcgacctgctgaagctggctggcgacgtggaatccaacccaggccctactagtatggactggatttggcgcatccttttccttgtcggcgctgctaccggcgcgcattccttcgaacaggtgcagctgaagcagagcggacctggcctggtgcagcctagccagagcctgtccatcacctgtaccgtgtccggcttcagcctgaccaactacggcgtgcactgggtgcgccagagccctggaaaaggactggaatggctgggagtgatttggagcggcggcaacaccgactacaacacccccttcaccagcagactgtctatcaacaaggacaacagcaagagccaggtgttcttcaagatgaacagcctccagagcaacgacaccgccatctactactgtgctagagccctgacctactatgactacgagttcgcctactggggccagggcacactcgtgacagtgtctgctacgcgtgaggacctgaagaacgtgttcccacctgaggtggccgtgttcgagcctagcgaggccgagatcagccacacccagaaagccaccctcgtgtgcctggctaccggcttctaccccgaccatgtggaactgtcttggtgggtcaacggcaaagaggtgcacagcggcgtgtgtaccgacccccagccactgaaagaacagcccgccctgaacgacagccggtactgcctgagcagcagactgagagtgtccgccaccttctggcagaacccccggaaccacttcagatgccaggtgcagttctacggcctgagcgagaacgacgagtggacccaggacagagccaagcccgtgacccagatcgtgtctgccgaagcctggggcagagccgatgatgtgattaagatccactggcaggaaaagaagtccaacaccatcctgggcagccaggaaggcaacaccatgaagaccaacgacacctacatgaagttcagctggctgaccgtgcccgagaagtccctggacaaagaacacagatgcatcgtgcggcacgaaaacaacaagaacggcgtggaccaggaaatcatcttcccacccatcaagaccgatgtgattacaatggaccccaaggacaactgctccaaggacgccaacgataccctgctgctccagctgaccaacaccagcgcctactacatgtacttgttgctgctgctgaagtccgtggtgtacttcgccatcatcacatgctgcctgctgatggctatggtcaagcggaaggacagccgggga

SEQ ID NO: 6536 - DNA, 2565 bp, synthetic construct
  source 1..2565: mol_type = other DNA
atggccttaccagtgaccgccttgctcctgccgctggccttgctgctccacgccgccaggccggaagtgcagctggttgaatctggcggaggactggttcagcctggcggatctctgagactgtcttgtgccgccagcggcttcagcttcagcgacttttggatgagctgggtccgacaggcccctggcaaaggacttgaatgggtcgccacaatcagccaggccggcagcgagaaggactacgtggactctgtgaagggcagattcaccatcagccgggacaacgccaagaagtccctgtacctccagatgaacagcctgagagccgaggacaccgccgtgtactattgtgcctctggcgtgtacagcttcgactacagaggccagggcaccctggtcacagtctcttctggtaccggcggaggcggatctggcggcggaggtagcggtggcggaggatctgaattcatgacccagagccccaagttcctgctggtgtctgccggcgacagagtgaccctgacatgcaaggccagccagagcgtgaacaacgacgtgtactggtatcagcaggaacccggccagtcccccaagctgctgatctactgggccagcaccagagaaagcggcgtgcccgatagattcaccggcagcggctctggcaccgacttcaccctgacaatcagcagcgtgcaggccgaggacctggccgtgtactactgcaagcagagctacaacctgtacaccttcggcggaggcaccaagctggaaatcaagagactcgagatccagaaccctgatcctgccgtgtaccagctgcgggatagcaagagcagcgacaagagcgtgtgtctgttcaccgacttcgacagccagaccaacgtgtcccagagcaaggactccgacgtgtacatcaccgataagtgcgtgctggacatgcggagcatggacttcaagagcaactccgccgtggcctggtccaacaagtccgatttcgcctgcgccaacgccttcaacaacagcattatccccgaggacacattcttcccaagccccgagagcagcgactccaccgaccacgtgaagcccaaagagacagagaacaccaagcagcccagcaagagctgccacaagcccaaggccatcgtgcacaccgagaaagtgaacatgatgagcctgaccgtgctgggcctgcggatgctgttcgccaaaaccgtggccgtgaacttcctgctgaccgccaagctgttcttcctcctcaccgcccgcgccaagagaagcggatctggcgtgaagcagaccctgaatttcgacctgctgaagctggctggcgacgtggaatccaacccaggccctactagtatggactggatttggcgcatccttttccttgtcggcgctgctaccggcgcgcattccttcgaagaatctggaagaggactggtgcagcctggcggcagcagaaagctgtcttgtgccgccagcggcttcaccttcagcaccagcggaatgcactgggtgcgccaggcccctgagaagggactggaatgggtggcctacatcagctccggcagcaccaccatctaccacgccgataccgtgaagggccggttcaccatcagccgggacaaccccaagaataccctgttcctccagatgaccagcctgcggagcgaggacaccgccatgtactattgctgcgccagaagcggccagttcggcaactacttcgactactggggccagggcaccaccctgaccgtgtcatctacgcgtgaggacctgaagaacgtgttcccacctgaggtggccgtgttcgagcctagcgaggccgagatcagccacacccagaaagccaccctcgtgtgcctggctaccggcttctaccccgaccatgtggaactgtcttggtgggtcaacggcaaagaggtgcacagcggcgtgtgtaccgacccccagccactgaaagaacagcccgccctgaacgacagccggtactgcctgagcagcagactgagagtgtccgccaccttctggcagaacccccggaaccacttcagatgccaggtgcagttctacggcctgagcgagaacgacgagtggacccaggacagagccaagcccgtgacccagatcgtgtctgccgaagcctggggcagagccgatgatgtgattaagatccactggcaggaaaagaagtccaacaccatcctgggcagccaggaaggcaacaccatgaagaccaacgacacctacatgaagttcagctggctgaccgtgcccgagaagtccctggacaaagaacacagatgcatcgtgcggcacgaaaacaacaagaacggcgtggaccaggaaatcatcttcccacccatcaagaccgatgtgattacaatggaccccaaggacaactgctccaaggacgccaacgataccctgctgctccagctgaccaacaccagcgcctactacatgtacttgttgctgctgctgaagtccgtggtgtacttcgccatcatcacatgctgcctgctgatggctatggtcaagcggaaggacagccgggga

SEQ ID NO: 6537 - DNA, 2580 bp, synthetic construct
  source 1..2580: mol_type = other DNA
atggccttaccagtgaccgccttgctcctgccgctggccttgctgctccacgccgccaggccggaagtgcagctggttgaatctggcggaggactggttcagcctggcggatctctgagactgtcttgtgccgccagcggcttcagcttcagcgacttttggatgagctgggtccgacaggcccctggcaaaggacttgaatgggtcgccacaatcagccaggccggcagcgagaaggactacgtggactctgtgaagggcagattcaccatcagccgggacaacgccaagaagtccctgtacctccagatgaacagcctgagagccgaggacaccgccgtgtactattgtgcctctggcgtgtacagcttcgactacagaggccagggcaccctggtcacagtctcttctggtaccggcggaggcggatctggcggcggaggtagcggtggcggaggatctgaattccagagcccatctagcctggctgtgtctgccggcgagaaagtgaccatgagctgcaagagcagccagagcctgctgaacagccggacccggaagaactacctggcctggtatcagcagaagcccggccagagccccaagctgctgatctactgggccagcaccagagaaagcggcgtgcccgatagattcaccggctctggcagcggcaccgacttcaccctgacaatcagcagcgtgcaggccgaggacctggccgtgtactactgcaagcagagcaacctgtacaccttcggcggaggcaccaagctggaaatcaagctcgagatccagaaccctgatcctgccgtgtaccagctgcgggatagcaagagcagcgacaagagcgtgtgtctgttcaccgacttcgacagccagaccaacgtgtcccagagcaaggactccgacgtgtacatcaccgataagtgcgtgctggacatgcggagcatggacttcaagagcaactccgccgtggcctggtccaacaagtccgatttcgcctgcgccaacgccttcaacaacagcattatccccgaggacacattcttcccaagccccgagagcagcgactccaccgaccacgtgaagcccaaagagacagagaacaccaagcagcccagcaagagctgccacaagcccaaggccatcgtgcacaccgagaaagtgaacatgatgagcctgaccgtgctgggcctgcggatgctgttcgccaaaaccgtggccgtgaacttcctgctgaccgccaagctgttcttcctcctcaccgcccgcgccaagagaagcggatctggcgtgaagcagaccctgaatttcgacctgctgaagctggctggcgacgtggaatccaacccaggccctactagtatggactggatttggcgcatccttttccttgtcggcgctgctaccggcgcgcattccttcgaacaggtgcagctggaagagtctggacccgagcttgtgaagcctggggccagcgtgaagctgtcctgtaaagccagcggctacaccttcaccgagtacatcatccactgggtcaagcagcggagcggccagggcctggaatggatcggctggttttaccctggctccggcagcatcaagtacaacgagaagttcaaggacaaggccaccctgaccgccgacaagtccagcagcaccgtgtacatggaactgagcggcctgaccagcgaggacagcgccgtgtatttctgcgccagacacgacggctacagctacttcgactattggggccagggcaccacactgaccgtgtcctctacgcgtgaggacctgaagaacgtgttcccacctgaggtggccgtgttcgagcctagcgaggccgagatcagccacacccagaaagccaccctcgtgtgcctggctaccggcttctaccccgaccatgtggaactgtcttggtgggtcaacggcaaagaggtgcacagcggcgtgtgtaccgacccccagccactgaaagaacagcccgccctgaacgacagccggtactgcctgagcagcagactgagagtgtccgccaccttctggcagaacccccggaaccacttcagatgccaggtgcagttctacggcctgagcgagaacgacgagtggacccaggacagagccaagcccgtgacccagatcgtgtctgccgaagcctggggcagagccgatgatgtgattaagatccactggcaggaaaagaagtccaacaccatcctgggcagccaggaaggcaacaccatgaagaccaacgacacctacatgaagttcagctggctgaccgtgcccgagaagtccctggacaaagaacacagatgcatcgtgcggcacgaaaacaacaagaacggcgtggaccaggaaatcatcttcccacccatcaagaccgatgtgattacaatggaccccaaggacaactgctccaaggacgccaacgataccctgctgctccagctgaccaacaccagcgcctactacatgtacttgttgctgctgctgaagtccgtggtgtacttcgccatcatcacatgctgcctgctgatggctatggtcaagcggaaggacagccgggga

SEQ ID NO: 6538 - DNA, 2589 bp, synthetic construct
  source 1..2589: mol_type = other DNA
atggccttaccagtgaccgccttgctcctgccgctggccttgctgctccacgccgccaggccggaagtgcagctggttgaatctggcggaggactggttcagcctggcggatctctgagactgtcttgtgccgccagcggcttcagcttcagcgacttttggatgagctgggtccgacaggcccctggcaaaggacttgaatgggtcgccacaatcagccaggccggcagcgagaaggactacgtggactctgtgaagggcagattcaccatcagccgggacaacgccaagaagtccctgtacctccagatgaacagcctgagagccgaggacaccgccgtgtactattgtgcctctggcgtgtacagcttcgactacagaggccagggcaccctggtcacagtctcttctggtaccggcggaggcggatctggcggcggaggtagcggtggcggaggatctgaattcgacatccagatgacccagagccccagcagcctgtctgcctctctgggcgagagagtgtccctgacctgtcgggccacacaggaactgagcggctacctgtcttggctgcagcagaagcccgacggcaccatcaagcggctgatctacgccgccagcaccctggatagcggcgtgcccaagagattcagcggcaacagaagcggcagcgactacagcctgaccatcagctccctggaaagcgaggacttcgccgactactactgcctgcagtacgccatctacccctacaccttcggcggaggcaccaagctggaaatcaagctcgagatccagaaccctgatcctgccgtgtaccagctgcgggatagcaagagcagcgacaagagcgtgtgtctgttcaccgacttcgacagccagaccaacgtgtcccagagcaaggactccgacgtgtacatcaccgataagtgcgtgctggacatgcggagcatggacttcaagagcaactccgccgtggcctggtccaacaagtccgatttcgcctgcgccaacgccttcaacaacagcattatccccgaggacacattcttcccaagccccgagagcagcgactccaccgaccacgtgaagcccaaagagacagagaacaccaagcagcccagcaagagctgccacaagcccaaggccatcgtgcacaccgagaaagtgaacatgatgagcctgaccgtgctgggcctgcggatgctgttcgccaaaaccgtggccgtgaacttcctgctgaccgccaagctgttcttcctcctcaccgcccgcgccaagagaagcggatctggcgtgaagcagaccctgaatttcgacctgctgaagctggctggcgacgtggaatccaacccaggccctactagtatggactggatttggcgcatccttttccttgtcggcgctgctaccggcgcgcattccttcgaagaggtgcaactgcagcagtctggccccgagcttgtgaagcctggcgcctccgtgaagatgagctgcaaggccagcggctacacctttaccagctacttcatccactgggtcaagcagaaacccggccagggcctggaatggatcggcttcatcaacccttacaacgacggcagcaagtacaacgagaagttcaagggcaaggccaccctgaccagcgacaagagcagcagcaccgcctacatggaactgtccagcctgacatccgaggacagcgccgtgtactactgcaccagggacgacggctactacggctacgccatggactactggggccagggaacaagcgtcaccgtgtcctctacgcgtgaggacctgaagaacgtgttcccacctgaggtggccgtgttcgagcctagcgaggccgagatcagccacacccagaaagccaccctcgtgtgcctggctaccggcttctaccccgaccatgtggaactgtcttggtgggtcaacggcaaagaggtgcacagcggcgtgtgtaccgacccccagccactgaaagaacagcccgccctgaacgacagccggtactgcctgagcagcagactgagagtgtccgccaccttctggcagaacccccggaaccacttcagatgccaggtgcagttctacggcctgagcgagaacgacgagtggacccaggacagagccaagcccgtgacccagatcgtgtctgccgaagcctggggcagagccgatgatgtgattaagatccactggcaggaaaagaagtccaacaccatcctgggcagccaggaaggcaacaccatgaagaccaacgacacctacatgaagttcagctggctgaccgtgcccgagaagtccctggacaaagaacacagatgcatcgtgcggcacgaaaacaacaagaacggcgtggaccaggaaatcatcttcccacccatcaagaccgatgtgattacaatggaccccaaggacaactgctccaaggacgccaacgataccctgctgctccagctgaccaacaccagcgcctactacatgtacttgttgctgctgctgaagtccgtggtgtacttcgccatcatcacatgctgcctgctgatggctatggtcaagcggaaggacagccgggga

SEQ ID NO: 6539 - DNA, 2604 bp, synthetic construct
  source 1..2604: mol_type = other DNA
atggccttaccagtgaccgccttgctcctgccgctggccttgctgctccacgccgccaggccggaagtgcagctggttgaatctggcggaggactggttcagcctggcggatctctgagactgtcttgtgccgccagcggcttcagcttcagcgacttttggatgagctgggtccgacaggcccctggcaaaggacttgaatgggtcgccacaatcagccaggccggcagcgagaaggactacgtggactctgtgaagggcagattcaccatcagccgggacaacgccaagaagtccctgtacctccagatgaacagcctgagagccgaggacaccgccgtgtactattgtgcctctggcgtgtacagcttcgactacagaggccagggcaccctggtcacagtctcttctggtaccggcggaggcggatctggcggcggaggtagcggtggcggaggatctgaattcgacaccatcgtgctgacacagagccctgcttccctggccgtgtccctgggacagagagccaccatctcttgcagagccagcgagagcgtggacagctacggcaacagcttcatgcactggtatcagcagaagcccggccagccccccaagctgctgatctacctggcctccaacctggaaagcggcgtgcccgccagattttctggcagcggcagcagaaccgacttcaccctgaccatcgaccccgtggaagccgatgatgccgccacctactactgccagcagaacaactacgacccctggaccttcggcggaggcaccaagctggaaatcaagctcgagatccagaaccctgatcctgccgtgtaccagctgcgggatagcaagagcagcgacaagagcgtgtgtctgttcaccgacttcgacagccagaccaacgtgtcccagagcaaggactccgacgtgtacatcaccgataagtgcgtgctggacatgcggagcatggacttcaagagcaactccgccgtggcctggtccaacaagtccgatttcgcctgcgccaacgccttcaacaacagcattatccccgaggacacattcttcccaagccccgagagcagcgactccaccgaccacgtgaagcccaaagagacagagaacaccaagcagcccagcaagagctgccacaagcccaaggccatcgtgcacaccgagaaagtgaacatgatgagcctgaccgtgctgggcctgcggatgctgttcgccaaaaccgtggccgtgaacttcctgctgaccgccaagctgttcttcctcctcaccgcccgcgccaagagaagcggatctggcgtgaagcagaccctgaatttcgacctgctgaagctggctggcgacgtggaatccaacccaggccctactagtatggactggatttggcgcatccttttccttgtcggcgctgctaccggcgcgcattccttcgaagaagtgcaactccagcagagcggccctgagcttgtgaagcctggcgcttccgtgaagatgagctgcaaggccagcggctacaccttcaccagctacgtgatgcactgggtcaagcagaaacctggacagggcctggaatggatcggctacatcaacccctacaacgacggcaccaagtacaacgagaagttcaagggcaaggccaccctgacaagcgacaccagcagcagcaccgcctacatggaactgaacagcctgaccagcgaggacagcgccgtgtacttctgcgccagacccatctacttcgacaacgactacttcgattactggggccagggcaccaccctgaaggtgtcctctacgcgtgaggacctgaagaacgtgttcccacctgaggtggccgtgttcgagcctagcgaggccgagatcagccacacccagaaagccaccctcgtgtgcctggctaccggcttctaccccgaccatgtggaactgtcttggtgggtcaacggcaaagaggtgcacagcggcgtgtgtaccgacccccagccactgaaagaacagcccgccctgaacgacagccggtactgcctgagcagcagactgagagtgtccgccaccttctggcagaacccccggaaccacttcagatgccaggtgcagttctacggcctgagcgagaacgacgagtggacccaggacagagccaagcccgtgacccagatcgtgtctgccgaagcctggggcagagccgatgatgtgattaagatccactggcaggaaaagaagtccaacaccatcctgggcagccaggaaggcaacaccatgaagaccaacgacacctacatgaagttcagctggctgaccgtgcccgagaagtccctggacaaagaacacagatgcatcgtgcggcacgaaaacaacaagaacggcgtggaccaggaaatcatcttcccacccatcaagaccgatgtgattacaatggaccccaaggacaactgctccaaggacgccaacgataccctgctgctccagctgaccaacaccagcgcctactacatgtacttgttgctgctgctgaagtccgtggtgtacttcgccatcatcacatgctgcctgctgatggctatggtcaagcggaaggacagccgggga

SEQ ID NO: 6540 - DNA, 2589 bp, synthetic construct
  source 1..2589: mol_type = other DNA
atggccttaccagtgaccgccttgctcctgccgctggccttgctgctccacgccgccaggccggaagtgcagctggttgaatctggcggaggactggttcagcctggcggatctctgagactgtcttgtgccgccagcggcttcagcttcagcgacttttggatgagctgggtccgacaggcccctggcaaaggacttgaatgggtcgccacaatcagccaggccggcagcgagaaggactacgtggactctgtgaagggcagattcaccatcagccgggacaacgccaagaagtccctgtacctccagatgaacagcctgagagccgaggacaccgccgtgtactattgtgcctctggcgtgtacagcttcgactacagaggccagggcaccctggtcacagtctcttctggtaccggcggaggcggatctggcggcggaggtagcggtggcggaggatctgaattcgacatccagatgacccagagccccagcagcctgtctgccagcgtgggcgacagagtgaccatcacatgcaaggccagccaggacgtgggaatcgccgtggcctggtatcagcagaaacccggcaaggtgcccaagctgctgatctactgggccagcaccagacacaccggcgtgcccgatagattttccggcagcggctccggcaccgacttcaccctgacaatcagctccctccagcccgaggacgtggcaacctactactgccagcagtacagcagctacccctacaccttcggccagggcaccaaggtggaaatcaagagactcgagatccagaaccctgatcctgccgtgtaccagctgcgggatagcaagagcagcgacaagagcgtgtgtctgttcaccgacttcgacagccagaccaacgtgtcccagagcaaggactccgacgtgtacatcaccgataagtgcgtgctggacatgcggagcatggacttcaagagcaactccgccgtggcctggtccaacaagtccgatttcgcctgcgccaacgccttcaacaacagcattatccccgaggacacattcttcccaagccccgagagcagcgactccaccgaccacgtgaagcccaaagagacagagaacaccaagcagcccagcaagagctgccacaagcccaaggccatcgtgcacaccgagaaagtgaacatgatgagcctgaccgtgctgggcctgcggatgctgttcgccaaaaccgtggccgtgaacttcctgctgaccgccaagctgttcttcctcctcaccgcccgcgccaagagaagcggatctggcgtgaagcagaccctgaatttcgacctgctgaagctggctggcgacgtggaatccaacccaggccctactagtatggactggatttggcgcatccttttccttgtcggcgctgctaccggcgcgcattccttcgaagaagtgcaactggtggaatcaggcggcggactggtgcagcctggcggatctctgagactgagctgtgccgccagcggcttcgacttcagccggtactggatgagctgggtgcgccaggcccctggcaaaggactggaatggatcggcgagatcaaccccgacagcagcaccatcaactacgcccccagcctgaaggacaagttcatcatcagccgggacaacgccaagaacagcctgtacctccagatgaactccctgcgggccgaggacaccgccgtgtactattgcgccagacccgacggcaactactggtacttcgacgtgtggggccagggaaccctcgtgaccgtgtcatctacgcgtgaggacctgaagaacgtgttcccacctgaggtggccgtgttcgagcctagcgaggccgagatcagccacacccagaaagccaccctcgtgtgcctggctaccggcttctaccccgaccatgtggaactgtcttggtgggtcaacggcaaagaggtgcacagcggcgtgtgtaccgacccccagccactgaaagaacagcccgccctgaacgacagccggtactgcctgagcagcagactgagagtgtccgccaccttctggcagaacccccggaaccacttcagatgccaggtgcagttctacggcctgagcgagaacgacgagtggacccaggacagagccaagcccgtgacccagatcgtgtctgccgaagcctggggcagagccgatgatgtgattaagatccactggcaggaaaagaagtccaacaccatcctgggcagccaggaaggcaacaccatgaagaccaacgacacctacatgaagttcagctggctgaccgtgcccgagaagtccctggacaaagaacacagatgcatcgtgcggcacgaaaacaacaagaacggcgtggaccaggaaatcatcttcccacccatcaagaccgatgtgattacaatggaccccaaggacaactgctccaaggacgccaacgataccctgctgctccagctgaccaacaccagcgcctactacatgtacttgttgctgctgctgaagtccgtggtgtacttcgccatcatcacatgctgcctgctgatggctatggtcaagcggaaggacagccgggga

SEQ ID NO: 6541 - DNA, 2589 bp, synthetic construct
  source 1..2589: mol_type = other DNA
atggccttaccagtgaccgccttgctcctgccgctggccttgctgctccacgccgccaggccggaagtgcagctggttgaatctggcggaggactggttcagcctggcggatctctgagactgtcttgtgccgccagcggcttcagcttcagcgacttttggatgagctgggtccgacaggcccctggcaaaggacttgaatgggtcgccacaatcagccaggccggcagcgagaaggactacgtggactctgtgaagggcagattcaccatcagccgggacaacgccaagaagtccctgtacctccagatgaacagcctgagagccgaggacaccgccgtgtactattgtgcctctggcgtgtacagcttcgactacagaggccagggcaccctggtcacagtctcttctggtaccggcggaggcggatctggcggcggaggtagcggtggcggaggatctgaattcgacatcgtgatgacccagagccagaagagcatgagcaccagcgtgggcgacagagtgagcatcacctgcaaggccagccaggacgtgatcaccggcgtggcctggtaccagcagaagcccggccagagccccaagctgctgatctacagcgccagctacagatacaccggcgtgcccgacagattcaccggcagcggcagcggcaccgacttcaccttcaccatcagcaacgtgcaggccgaggacctggccgtgtactactgccagcagcactacagcacccccctgaccttcggcgccggcaccaagctggagctgaagctcgagatccagaaccctgatcctgccgtgtaccagctgcgggatagcaagagcagcgacaagagcgtgtgtctgttcaccgacttcgacagccagaccaacgtgtcccagagcaaggactccgacgtgtacatcaccgataagtgcgtgctggacatgcggagcatggacttcaagagcaactccgccgtggcctggtccaacaagtccgatttcgcctgcgccaacgccttcaacaacagcattatccccgaggacacattcttcccaagccccgagagcagcgactccaccgaccacgtgaagcccaaagagacagagaacaccaagcagcccagcaagagctgccacaagcccaaggccatcgtgcacaccgagaaagtgaacatgatgagcctgaccgtgctgggcctgcggatgctgttcgccaaaaccgtggccgtgaacttcctgctgaccgccaagctgttcttcctcctcaccgcccgcgccaagagaagcggatctggcgtgaagcagaccctgaatttcgacctgctgaagctggctggcgacgtggaatccaacccaggccctactagtatggactggatttggcgcatccttttccttgtcggcgctgctaccggcgcgcattccttcgaacaggtgcagctgcagcagcccggcgccgagctggtgagacccggcgccagcgtgaagctgagctgcaaggccagcggctacagcttcaccacctactggatgaactgggtgaagcagagacccggccagggcctggagtggatcggcatgatccaccccagcgacagcgagaccagactgaaccagaagttcaaggacaaggccaccctgaccgtggacaagagcagcagcaccgcctacatgcagctgagcagccccaccagcgaggacagcgccgtgtactactgcgccagaagcaccatgatcgccaccagagccatggactactggggccagggcaccagcgtgaccgtgagcagcacgcgtgaggacctgaagaacgtgttcccacctgaggtggccgtgttcgagcctagcgaggccgagatcagccacacccagaaagccaccctcgtgtgcctggctaccggcttctaccccgaccatgtggaactgtcttggtgggtcaacggcaaagaggtgcacagcggcgtgtgtaccgacccccagccactgaaagaacagcccgccctgaacgacagccggtactgcctgagcagcagactgagagtgtccgccaccttctggcagaacccccggaaccacttcagatgccaggtgcagttctacggcctgagcgagaacgacgagtggacccaggacagagccaagcccgtgacccagatcgtgtctgccgaagcctggggcagagccgatgatgtgattaagatccactggcaggaaaagaagtccaacaccatcctgggcagccaggaaggcaacaccatgaagaccaacgacacctacatgaagttcagctggctgaccgtgcccgagaagtccctggacaaagaacacagatgcatcgtgcggcacgaaaacaacaagaacggcgtggaccaggaaatcatcttcccacccatcaagaccgatgtgattacaatggaccccaaggacaactgctccaaggacgccaacgataccctgctgctccagctgaccaacaccagcgcctactacatgtacttgttgctgctgctgaagtccgtggtgtacttcgccatcatcacatgctgcctgctgatggctatggtcaagcggaaggacagccgggga

SEQ ID NO: 6542 - DNA, 2607 bp, synthetic construct
  source 1..2607: mol_type = other DNA
atggccttaccagtgaccgccttgctcctgccgctggccttgctgctccacgccgccaggccggaagtgcagctggttgaatctggcggaggactggttcagcctggcggatctctgagactgtcttgtgccgccagcggcttcagcttcagcgacttttggatgagctgggtccgacaggcccctggcaaaggacttgaatgggtcgccacaatcagccaggccggcagcgagaaggactacgtggactctgtgaagggcagattcaccatcagccgggacaacgccaagaagtccctgtacctccagatgaacagcctgagagccgaggacaccgccgtgtactattgtgcctctggcgtgtacagcttcgactacagaggccagggcaccctggtcacagtctcttctggtaccggcggaggcggatctggcggcggaggtagcggtggcggaggatctgaattccagagcgtgctgacacagcctccatccgtgtctggcgctccaggccagagagtgaccatctcctgtaccggcagcggcagcaacatcggagccccctacgacgtgtcctggtatcagcaactgcctggcaccgcccccaagctgctgatctaccacaacaacaagcggcccagcggcgtgcccgatagattcagcggctctaagagcggcaccagcgccagcctggctatcactggactccaggccgaggacgaggccgactactactgtgccacagtggaagccggcctgagcggctctgtgtttggcggcggaacaaagctgaccgtgctgggagctctcgagatccagaaccctgatcctgccgtgtaccagctgcgggatagcaagagcagcgacaagagcgtgtgtctgttcaccgacttcgacagccagaccaacgtgtcccagagcaaggactccgacgtgtacatcaccgataagtgcgtgctggacatgcggagcatggacttcaagagcaactccgccgtggcctggtccaacaagtccgatttcgcctgcgccaacgccttcaacaacagcattatccccgaggacacattcttcccaagccccgagagcagcgactccaccgaccacgtgaagcccaaagagacagagaacaccaagcagcccagcaagagctgccacaagcccaaggccatcgtgcacaccgagaaagtgaacatgatgagcctgaccgtgctgggcctgcggatgctgttcgccaaaaccgtggccgtgaacttcctgctgaccgccaagctgttcttcctcctcaccgcccgcgccaagagaagcggatctggcgtgaagcagaccctgaatttcgacctgctgaagctggctggcgacgtggaatccaacccaggccctactagtatggactggatttggcgcatccttttccttgtcggcgctgctaccggcgcgcattccttcgaacaggtgcaactggtgcagagcggagccgaagtgaagaaacctggggccagcgtgaaggtgtcctgcaaggtgtccggctacaccctgaccgagctgagcattcactgggtgcgccaggcccctggcaagggactggaatggatgggcggcttcgaccccgaagagaacgagatcgtgtacgcccagcggttccagggcagagtgacaatgaccgaggacaccagcaccgacaccgcctacatggaactgagcagcctgcggagcgaggataccgccgtgtactactgcgccatcgtgggcagcttcagccctctgacactgggcctgtggggccagggaactatggtcaccgtgtccagcacgcgtgaggacctgaagaacgtgttcccacctgaggtggccgtgttcgagcctagcgaggccgagatcagccacacccagaaagccaccctcgtgtgcctggctaccggcttctaccccgaccatgtggaactgtcttggtgggtcaacggcaaagaggtgcacagcggcgtgtgtaccgacccccagccactgaaagaacagcccgccctgaacgacagccggtactgcctgagcagcagactgagagtgtccgccaccttctggcagaacccccggaaccacttcagatgccaggtgcagttctacggcctgagcgagaacgacgagtggacccaggacagagccaagcccgtgacccagatcgtgtctgccgaagcctggggcagagccgatgatgtgattaagatccactggcaggaaaagaagtccaacaccatcctgggcagccaggaaggcaacaccatgaagaccaacgacacctacatgaagttcagctggctgaccgtgcccgagaagtccctggacaaagaacacagatgcatcgtgcggcacgaaaacaacaagaacggcgtggaccaggaaatcatcttcccacccatcaagaccgatgtgattacaatggaccccaaggacaactgctccaaggacgccaacgataccctgctgctccagctgaccaacaccagcgcctactacatgtacttgttgctgctgctgaagtccgtggtgtacttcgccatcatcacatgctgcctgctgatggctatggtcaagcggaaggacagccgggga

SEQ ID NO: 6543 - DNA, 2607 bp, synthetic construct
  source 1..2607: mol_type = other DNA
atggccttaccagtgaccgccttgctcctgccgctggccttgctgctccacgccgccaggccggaagtgcagctggttgaatctggcggaggactggttcagcctggcggatctctgagactgtcttgtgccgccagcggcttcagcttcagcgacttttggatgagctgggtccgacaggcccctggcaaaggacttgaatgggtcgccacaatcagccaggccggcagcgagaaggactacgtggactctgtgaagggcagattcaccatcagccgggacaacgccaagaagtccctgtacctccagatgaacagcctgagagccgaggacaccgccgtgtactattgtgcctctggcgtgtacagcttcgactacagaggccagggcaccctggtcacagtctcttctggtaccggcggaggcggatctggcggcggaggtagcggtggcggaggatctgaattccagagcgtgctgacacagcctccatccgtgtctggcgctccaggccagagagtgaccatctcctgtaccggcagcggcagcaacatcggagccccctacgacgtgtcctggtatcagcaactgcctggcaccgcccccaagctgctgatctaccacaacaacaagcggcccagcggcgtgcccgatagattcagcggctctaagagcggcaccagcgccagcctggctatcactggactccaggccgaggacgaggccgactactactgccagagctacgacagcagcagcatcagcaccatcttcggcggaggcaccaagctgacagtgctgggagctctcgagatccagaaccctgatcctgccgtgtaccagctgcgggatagcaagagcagcgacaagagcgtgtgtctgttcaccgacttcgacagccagaccaacgtgtcccagagcaaggactccgacgtgtacatcaccgataagtgcgtgctggacatgcggagcatggacttcaagagcaactccgccgtggcctggtccaacaagtccgatttcgcctgcgccaacgccttcaacaacagcattatccccgaggacacattcttcccaagccccgagagcagcgactccaccgaccacgtgaagcccaaagagacagagaacaccaagcagcccagcaagagctgccacaagcccaaggccatcgtgcacaccgagaaagtgaacatgatgagcctgaccgtgctgggcctgcggatgctgttcgccaaaaccgtggccgtgaacttcctgctgaccgccaagctgttcttcctcctcaccgcccgcgccaagagaagcggatctggcgtgaagcagaccctgaatttcgacctgctgaagctggctggcgacgtggaatccaacccaggccctactagtatggactggatttggcgcatccttttccttgtcggcgctgctaccggcgcgcattccttcgaacaggtgcaactggtgcagagcggagccgaagtgaagaaacctggggccagcgtgaaggtgtcctgcaaggtgtccggctacaccctgaccgagctgagcattcactgggtgcgccaggcccctggcaagggactggaatggatgggcggcttcgaccccgaagagaacgagatcgtgtacgcccagcggttccagggcagagtgacaatgaccgaggacaccagcaccgacaccgcctacatggaactgagcagcctgcggagcgaggataccgccgtgtactactgtgccatcgtgggcagcttcagcggaatcgcctacagaccttggggccagggcacaatggtcaccgtgtctagcacgcgtgaggacctgaagaacgtgttcccacctgaggtggccgtgttcgagcctagcgaggccgagatcagccacacccagaaagccaccctcgtgtgcctggctaccggcttctaccccgaccatgtggaactgtcttggtgggtcaacggcaaagaggtgcacagcggcgtgtgtaccgacccccagccactgaaagaacagcccgccctgaacgacagccggtactgcctgagcagcagactgagagtgtccgccaccttctggcagaacccccggaaccacttcagatgccaggtgcagttctacggcctgagcgagaacgacgagtggacccaggacagagccaagcccgtgacccagatcgtgtctgccgaagcctggggcagagccgatgatgtgattaagatccactggcaggaaaagaagtccaacaccatcctgggcagccaggaaggcaacaccatgaagaccaacgacacctacatgaagttcagctggctgaccgtgcccgagaagtccctggacaaagaacacagatgcatcgtgcggcacgaaaacaacaagaacggcgtggaccaggaaatcatcttcccacccatcaagaccgatgtgattacaatggaccccaaggacaactgctccaaggacgccaacgataccctgctgctccagctgaccaacaccagcgcctactacatgtacttgttgctgctgctgaagtccgtggtgtacttcgccatcatcacatgctgcctgctgatggctatggtcaagcggaaggacagccgggga

SEQ ID NO: 6544 - DNA, 2571 bp, synthetic construct
  source 1..2571: mol_type = other DNA
atggccttaccagtgaccgccttgctcctgccgctggccttgctgctccacgccgccaggccggaagtgcagctggttgaatctggcggaggactggttcagcctggcggatctctgagactgtcttgtgccgccagcggcttcagcttcagcgacttttggatgagctgggtccgacaggcccctggcaaaggacttgaatgggtcgccacaatcagccaggccggcagcgagaaggactacgtggactctgtgaagggcagattcaccatcagccgggacaacgccaagaagtccctgtacctccagatgaacagcctgagagccgaggacaccgccgtgtactattgtgcctctggcgtgtacagcttcgactacagaggccagggcaccctggtcacagtctcttctggtaccggcggaggcggatctggcggcggaggtagcggtggcggaggatctgaattcgacatccagatgacccagagccccagcagcctgtctgccagcgtgggcgacagagtgaccatcacctgtagagccagccagggcatcagaaacaacctggcctggtatcagcagaagcccggcaaggcccccaagcggctgatctacgccgccagcaatctccagagcggcgtgcccagcagattcacaggctctggcagcggcaccgagttcaccctgatcgtgtctagcctccagcccgaggacttcgccacctactactgcctccagcaccacagctaccccctgacatctggcggaggcaccaaggtggaactcgagatccagaaccctgatcctgccgtgtaccagctgcgggatagcaagagcagcgacaagagcgtgtgtctgttcaccgacttcgacagccagaccaacgtgtcccagagcaaggactccgacgtgtacatcaccgataagtgcgtgctggacatgcggagcatggacttcaagagcaactccgccgtggcctggtccaacaagtccgatttcgcctgcgccaacgccttcaacaacagcattatccccgaggacacattcttcccaagccccgagagcagcgactccaccgaccacgtgaagcccaaagagacagagaacaccaagcagcccagcaagagctgccacaagcccaaggccatcgtgcacaccgagaaagtgaacatgatgagcctgaccgtgctgggcctgcggatgctgttcgccaaaaccgtggccgtgaacttcctgctgaccgccaagctgttcttcctcctcaccgcccgcgccaagagaagcggatctggcgtgaagcagaccctgaatttcgacctgctgaagctggctggcgacgtggaatccaacccaggccctactagtatggactggatttggcgcatccttttccttgtcggcgctgctaccggcgcgcattccttcgaagaggtgcaggtgctggaaagtggcggaggactggtgcagcctggcggctctctgagactgtcttgtgccgccagcggcttcaccttcagcagctacgccatgagctgggtgcgccaggcccctggaaaaggactggaatgggtgtccgccatcagcggctctggcgggtctaccaactacgccgatagcgtgaagggccggttcaccatcagccgggacaacagcaagaacaccctgtacctccagatgaacagcctgcgggccgaggacaccgccgtgtattattgtgccggcagcagcgggtggagcgagtattggggacagggcaccctcgtgaccgtgtcctctacgcgtgaggacctgaagaacgtgttcccacctgaggtggccgtgttcgagcctagcgaggccgagatcagccacacccagaaagccaccctcgtgtgcctggctaccggcttctaccccgaccatgtggaactgtcttggtgggtcaacggcaaagaggtgcacagcggcgtgtgtaccgacccccagccactgaaagaacagcccgccctgaacgacagccggtactgcctgagcagcagactgagagtgtccgccaccttctggcagaacccccggaaccacttcagatgccaggtgcagttctacggcctgagcgagaacgacgagtggacccaggacagagccaagcccgtgacccagatcgtgtctgccgaagcctggggcagagccgatgatgtgattaagatccactggcaggaaaagaagtccaacaccatcctgggcagccaggaaggcaacaccatgaagaccaacgacacctacatgaagttcagctggctgaccgtgcccgagaagtccctggacaaagaacacagatgcatcgtgcggcacgaaaacaacaagaacggcgtggaccaggaaatcatcttcccacccatcaagaccgatgtgattacaatggaccccaaggacaactgctccaaggacgccaacgataccctgctgctccagctgaccaacaccagcgcctactacatgtacttgttgctgctgctgaagtccgtggtgtacttcgccatcatcacatgctgcctgctgatggctatggtcaagcggaaggacagccgggga

SEQ ID NO: 6545 - DNA, 2589 bp, synthetic construct
  source 1..2589: mol_type = other DNA
atggccttaccagtgaccgccttgctcctgccgctggccttgctgctccacgccgccaggccggaagtgcagctggttgaatctggcggaggactggttcagcctggcggatctctgagactgtcttgtgccgccagcggcttcagcttcagcgacttttggatgagctgggtccgacaggcccctggcaaaggacttgaatgggtcgccacaatcagccaggccggcagcgagaaggactacgtggactctgtgaagggcagattcaccatcagccgggacaacgccaagaagtccctgtacctccagatgaacagcctgagagccgaggacaccgccgtgtactattgtgcctctggcgtgtacagcttcgactacagaggccagggcaccctggtcacagtctcttctggtaccggcggaggcggatctggcggcggaggtagcggtggcggaggatctgaattcgacgagatccagctggtgcagagcggagccgaagtgaagaagcctggcgagagcctgcggatcagctgcaagggcagcggcttcaacatcgaggactactacatccactgggtgcgccagatgcccggcaagggcctggaatggatgggcagaatcgaccccgagaacgacgagactaagtacggccccatcttccagggccacgtgaccatcagcgccgacaccagcatcaacaccgtgtacctccagtggtccagcctgaaggccagcgacaccgccatgtactactgcgcctttagaggcggcgtgtactggggccagggcaccacagtgacagtgtctagcctcgagatccagaaccctgatcctgccgtgtaccagctgcgggatagcaagagcagcgacaagagcgtgtgtctgttcaccgacttcgacagccagaccaacgtgtcccagagcaaggactccgacgtgtacatcaccgataagtgcgtgctggacatgcggagcatggacttcaagagcaactccgccgtggcctggtccaacaagtccgatttcgcctgcgccaacgccttcaacaacagcattatccccgaggacacattcttcccaagccccgagagcagcgactccaccgaccacgtgaagcccaaagagacagagaacaccaagcagcccagcaagagctgccacaagcccaaggccatcgtgcacaccgagaaagtgaacatgatgagcctgaccgtgctgggcctgcggatgctgttcgccaaaaccgtggccgtgaacttcctgctgaccgccaagctgttcttcctcctcaccgcccgcgccaagagaagcggatctggcgtgaagcagaccctgaatttcgacctgctgaagctggctggcgacgtggaatccaacccaggccctactagtatggactggatttggcgcatccttttccttgtcggcgctgctaccggcgcgcattccttcgaagatgtcgtgatgacccagagccccgacagcctggctgtgtctctgggagagagagccaccatcaactgcaagtccagccagtccctgctggacagcgacggcaagacctacctgaactggctccagcagaagcccggccagccccccaagagactgatctccctggtgtccaagctggactccggcgtgcccgatagattttccggctctggcagcggcaccgacttcaccctgacaatcagctcccttcaggccgaggacgtggccgtgtactattgctggcagggcacacacttccccggcacctttggcggaggcaccaaggtggaaatcaagacgcgtgaggacctgaagaacgtgttcccacctgaggtggccgtgttcgagcctagcgaggccgagatcagccacacccagaaagccaccctcgtgtgcctggctaccggcttctaccccgaccatgtggaactgtcttggtgggtcaacggcaaagaggtgcacagcggcgtgtgtaccgacccccagccactgaaagaacagcccgccctgaacgacagccggtactgcctgagcagcagactgagagtgtccgccaccttctggcagaacccccggaaccacttcagatgccaggtgcagttctacggcctgagcgagaacgacgagtggacccaggacagagccaagcccgtgacccagatcgtgtctgccgaagcctggggcagagccgatgatgtgattaagatccactggcaggaaaagaagtccaacaccatcctgggcagccaggaaggcaacaccatgaagaccaacgacacctacatgaagttcagctggctgaccgtgcccgagaagtccctggacaaagaacacagatgcatcgtgcggcacgaaaacaacaagaacggcgtggaccaggaaatcatcttcccacccatcaagaccgatgtgattacaatggaccccaaggacaactgctccaaggacgccaacgataccctgctgctccagctgaccaacaccagcgcctactacatgtacttgttgctgctgctgaagtccgtggtgtacttcgccatcatcacatgctgcctgctgatggctatggtcaagcggaaggacagccgggga

SEQ ID NO: 6546 - DNA, 2610 bp, synthetic construct
  source 1..2610: mol_type = other DNA
atggccttaccagtgaccgccttgctcctgccgctggccttgctgctccacgccgccaggccggaagtgcagctggttgaatctggcggaggactggttcagcctggcggatctctgagactgtcttgtgccgccagcggcttcagcttcagcgacttttggatgagctgggtccgacaggcccctggcaaaggacttgaatgggtcgccacaatcagccaggccggcagcgagaaggactacgtggactctgtgaagggcagattcaccatcagccgggacaacgccaagaagtccctgtacctccagatgaacagcctgagagccgaggacaccgccgtgtactattgtgcctctggcgtgtacagcttcgactacagaggccagggcaccctggtcacagtctcttctggtaccggcggaggcggatctggcggcggaggtagcggtggcggaggatctgaattcgacgagcttgtgatgacccagagccccagcagcctgacagtgacagccggcgagaaagtgaccatgagctgcaagagcagccagagcctgctgaacagcggcaaccagaagaactacctgacctggtatcagcagaagcccggccagccccccaagctgctgatctactgggccagcaccagagaaagcggcgtgcccgatagattcaccggctctggcagcggcaccgacttcaccctgacaatcagcagcgtgcaggccgaggacctggccgtgtactactgccagaacgactacagctaccccctgaccttcggagccggcaccaagctggaaatcaagctcgagatccagaaccctgatcctgccgtgtaccagctgcgggatagcaagagcagcgacaagagcgtgtgtctgttcaccgacttcgacagccagaccaacgtgtcccagagcaaggactccgacgtgtacatcaccgataagtgcgtgctggacatgcggagcatggacttcaagagcaactccgccgtggcctggtccaacaagtccgatttcgcctgcgccaacgccttcaacaacagcattatccccgaggacacattcttcccaagccccgagagcagcgactccaccgaccacgtgaagcccaaagagacagagaacaccaagcagcccagcaagagctgccacaagcccaaggccatcgtgcacaccgagaaagtgaacatgatgagcctgaccgtgctgggcctgcggatgctgttcgccaaaaccgtggccgtgaacttcctgctgaccgccaagctgttcttcctcctcaccgcccgcgccaagagaagcggatctggcgtgaagcagaccctgaatttcgacctgctgaagctggctggcgacgtggaatccaacccaggccctactagtatggactggatttggcgcatccttttccttgtcggcgctgctaccggcgcgcattccttcgaagaagtgcagctgctggaacagtctggcgccgaacttgtgcggcctggcaccagcgtgaagatcagctgtaaagccagcggctacgccttcaccaactactggctgggctgggtcaagcagaggcctggacacggcctggaatggatcggcgacatctttcccggctccggcaacatccactacaacgagaagttcaagggcaaggccaccctgaccgccgacaagtctagcagcaccgcctacatgcagctgtccagcctgacctttgaggacagcgccgtgtatttctgtgcccggctgcggaactgggacgagcccatggattattggggccagggcaccaccgtgaccgtgtctagtacgcgtgaggacctgaagaacgtgttcccacctgaggtggccgtgttcgagcctagcgaggccgagatcagccacacccagaaagccaccctcgtgtgcctggctaccggcttctaccccgaccatgtggaactgtcttggtgggtcaacggcaaagaggtgcacagcggcgtgtgtaccgacccccagccactgaaagaacagcccgccctgaacgacagccggtactgcctgagcagcagactgagagtgtccgccaccttctggcagaacccccggaaccacttcagatgccaggtgcagttctacggcctgagcgagaacgacgagtggacccaggacagagccaagcccgtgacccagatcgtgtctgccgaagcctggggcagagccgatgatgtgattaagatccactggcaggaaaagaagtccaacaccatcctgggcagccaggaaggcaacaccatgaagaccaacgacacctacatgaagttcagctggctgaccgtgcccgagaagtccctggacaaagaacacagatgcatcgtgcggcacgaaaacaacaagaacggcgtggaccaggaaatcatcttcccacccatcaagaccgatgtgattacaatggaccccaaggacaactgctccaaggacgccaacgataccctgctgctccagctgaccaacaccagcgcctactacatgtacttgttgctgctgctgaagtccgtggtgtacttcgccatcatcacatgctgcctgctgatggctatggtcaagcggaaggacagccgggga

SEQ ID NO: 6547 - DNA, 2613 bp, synthetic construct
  source 1..2613: mol_type = other DNA
atggccttaccagtgaccgccttgctcctgccgctggccttgctgctccacgccgccaggccggaagtgcagctggttgaatctggcggaggactggttcagcctggcggatctctgagactgtcttgtgccgccagcggcttcagcttcagcgacttttggatgagctgggtccgacaggcccctggcaaaggacttgaatgggtcgccacaatcagccaggccggcagcgagaaggactacgtggactctgtgaagggcagattcaccatcagccgggacaacgccaagaagtccctgtacctccagatgaacagcctgagagccgaggacaccgccgtgtactattgtgcctctggcgtgtacagcttcgactacagaggccagggcaccctggtcacagtctcttctggtaccggcggaggcggatctggcggcggaggtagcggtggcggaggatctgaattcgacgagctgcagatgacccagagccctagcagcctgtctgccagcgtgggcgacagagtgaccatcacctgtagagccagccagagcatcagcagctacctgaactggtatcagcagaagcccggccagccccccaaactgctgatctactgggccagcaccagagaaagcggcgtgcccgatagattcagcggcagcgagagcggcaccaactacaccctgaccatcagctccctgcagcccgaggacttcgccacctacttttgccagcagagcgacagcctgcccatcacctttggacagggcacccggctggacattcagctcgagatccagaaccctgatcctgccgtgtaccagctgcgggatagcaagagcagcgacaagagcgtgtgtctgttcaccgacttcgacagccagaccaacgtgtcccagagcaaggactccgacgtgtacatcaccgataagtgcgtgctggacatgcggagcatggacttcaagagcaactccgccgtggcctggtccaacaagtccgatttcgcctgcgccaacgccttcaacaacagcattatccccgaggacacattcttcccaagccccgagagcagcgactccaccgaccacgtgaagcccaaagagacagagaacaccaagcagcccagcaagagctgccacaagcccaaggccatcgtgcacaccgagaaagtgaacatgatgagcctgaccgtgctgggcctgcggatgctgttcgccaaaaccgtggccgtgaacttcctgctgaccgccaagctgttcttcctcctcaccgcccgcgccaagagaagcggatctggcgtgaagcagaccctgaatttcgacctgctgaagctggctggcgacgtggaatccaacccaggccctactagtatggactggatttggcgcatccttttccttgtcggcgctgctaccggcgcgcattccttcgaagaggtgcaactgctggaatctgggggcggagtggtgcagcctggcagaagcctgagactgagctgtgccgccagcggcttcaccttcagctcctacggaatgcactgggtgcgccaggcccctggcaaaggactggaatgggtggccgtgatctcctacgacggcagcaacaagtactacgccgacagcgtgaagggccggttcaccatcagccgggacaacagcaagaacaccctgtacctgcagatgaacagcctgcgggccgaggacaccgccgtgtactactgcgccaaggatatgggctggggcagcggctggcggccttactactactacggcatggacgtgtggggccagggcaccaccgtgacagtgtcatctacgcgtgaggacctgaagaacgtgttcccacctgaggtggccgtgttcgagcctagcgaggccgagatcagccacacccagaaagccaccctcgtgtgcctggctaccggcttctaccccgaccatgtggaactgtcttggtgggtcaacggcaaagaggtgcacagcggcgtgtgtaccgacccccagccactgaaagaacagcccgccctgaacgacagccggtactgcctgagcagcagactgagagtgtccgccaccttctggcagaacccccggaaccacttcagatgccaggtgcagttctacggcctgagcgagaacgacgagtggacccaggacagagccaagcccgtgacccagatcgtgtctgccgaagcctggggcagagccgatgatgtgattaagatccactggcaggaaaagaagtccaacaccatcctgggcagccaggaaggcaacaccatgaagaccaacgacacctacatgaagttcagctggctgaccgtgcccgagaagtccctggacaaagaacacagatgcatcgtgcggcacgaaaacaacaagaacggcgtggaccaggaaatcatcttcccacccatcaagaccgatgtgattacaatggaccccaaggacaactgctccaaggacgccaacgataccctgctgctccagctgaccaacaccagcgcctactacatgtacttgttgctgctgctgaagtccgtggtgtacttcgccatcatcacatgctgcctgctgatggctatggtcaagcggaaggacagccgggga

SEQ ID NO: 6548 - DNA, 2604 bp, synthetic construct
  source 1..2604: mol_type = other DNA
atggccttaccagtgaccgccttgctcctgccgctggccttgctgctccacgccgccaggccggaagtgcagctggttgaatctggcggaggactggttcagcctggcggatctctgagactgtcttgtgccgccagcggcttcagcttcagcgacttttggatgagctgggtccgacaggcccctggcaaaggacttgaatgggtcgccacaatcagccaggccggcagcgagaaggactacgtggactctgtgaagggcagattcaccatcagccgggacaacgccaagaagtccctgtacctccagatgaacagcctgagagccgaggacaccgccgtgtactattgtgcctctggcgtgtacagcttcgactacagaggccagggcaccctggtcacagtctcttctggtaccggcggaggcggatctggcggcggaggtagcggtggcggaggatctgaattcgacgacatccaaatgacacagagtccttctagtttgagtgcgagcgtgggggacagggtgaccattacctgcagggccagccagagcataagctcataccttaattggtaccagcaaaaaccaggtaaggcccctaagctcctgatctacgcggcctcttcacttcaatctggggtcccttcccgcttcagtggctccggcagcggcaccgacttcacgctcactatatcaagtctgcagcctgaggatctcgccacctattactgtcaacaaagttattccacccctttcacctttggaccgggcacgaaagtggatattaagctcgagatccagaaccctgatcctgccgtgtaccagctgcgggatagcaagagcagcgacaagagcgtgtgtctgttcaccgacttcgacagccagaccaacgtgtcccagagcaaggactccgacgtgtacatcaccgataagtgcgtgctggacatgcggagcatggacttcaagagcaactccgccgtggcctggtccaacaagtccgatttcgcctgcgccaacgccttcaacaacagcattatccccgaggacacattcttcccaagccccgagagcagcgactccaccgaccacgtgaagcccaaagagacagagaacaccaagcagcccagcaagagctgccacaagcccaaggccatcgtgcacaccgagaaagtgaacatgatgagcctgaccgtgctgggcctgcggatgctgttcgccaaaaccgtggccgtgaacttcctgctgaccgccaagctgttcttcctcctcaccgcccgcgccaagagaagcggatctggcgtgaagcagaccctgaatttcgacctgctgaagctggctggcgacgtggaatccaacccaggccctactagtatggactggatttggcgcatccttttccttgtcggcgctgctaccggcgcgcattccttcgaagtgcacgaggtccagcttgtgcagtccggggcagaggtcaagaagcctggttctagcgtaaaagtgagttgcaaagcctcaggtgggacattttcatcctacgcgatcagttgggttagacaggctcctggtcaagggctggaatggatgggcggaattattccaatcttcggaacagcgaattacgcgcagaagttccagggtagagtaaccatcactgctgacaagtccacctccaccgcatacatggaattgtctagtctccggagcgaggatacggcggtgtattattgtgctacgttcgccctgtttggcttccgcgaacaggctttcgacatctgggggcagggcacgacagtcacggttagtagtacgcgtgaggacctgaagaacgtgttcccacctgaggtggccgtgttcgagcctagcgaggccgagatcagccacacccagaaagccaccctcgtgtgcctggctaccggcttctaccccgaccatgtggaactgtcttggtgggtcaacggcaaagaggtgcacagcggcgtgtgtaccgacccccagccactgaaagaacagcccgccctgaacgacagccggtactgcctgagcagcagactgagagtgtccgccaccttctggcagaacccccggaaccacttcagatgccaggtgcagttctacggcctgagcgagaacgacgagtggacccaggacagagccaagcccgtgacccagatcgtgtctgccgaagcctggggcagagccgatgatgtgattaagatccactggcaggaaaagaagtccaacaccatcctgggcagccaggaaggcaacaccatgaagaccaacgacacctacatgaagttcagctggctgaccgtgcccgagaagtccctggacaaagaacacagatgcatcgtgcggcacgaaaacaacaagaacggcgtggaccaggaaatcatcttcccacccatcaagaccgatgtgattacaatggaccccaaggacaactgctccaaggacgccaacgataccctgctgctccagctgaccaacaccagcgcctactacatgtacttgttgctgctgctgaagtccgtggtgtacttcgccatcatcacatgctgcctgctgatggctatggtcaagcggaaggacagccgggga

SEQ ID NO: 6549 - DNA, 2598 bp, synthetic construct
  source 1..2598: mol_type = other DNA
atggccttaccagtgaccgccttgctcctgccgctggccttgctgctccacgccgccaggccggaagtgcagctggttgaatctggcggaggactggttcagcctggcggatctctgagactgtcttgtgccgccagcggcttcagcttcagcgacttttggatgagctgggtccgacaggcccctggcaaaggacttgaatgggtcgccacaatcagccaggccggcagcgagaaggactacgtggactctgtgaagggcagattcaccatcagccgggacaacgccaagaagtccctgtacctccagatgaacagcctgagagccgaggacaccgccgtgtactattgtgcctctggcgtgtacagcttcgactacagaggccagggcaccctggtcacagtctcttctggtaccggcggaggcggatctggcggcggaggtagcggtggcggaggatctgaattcgacatcgtgctgacccagagccctctgagcctggccgtgtctctgggacagcctgccatcatcagctgcaaggccagccagagcgtgtcctttgccggcacctctctgatgcactggtatcaccagaagcccggccagcagcccagactgctgatctacagagccagcaacctggaagccggcgtgcccgatagattttccggcagcggcagcaagaccgacttcaccctgaccatcagccccgtggaagccgaagatgccgccacctactactgccagcagagcagagagtacccctacaccttcggcggaggcaccaagctggaaatcaagaggctcgagatccagaaccctgatcctgccgtgtaccagctgcgggatagcaagagcagcgacaagagcgtgtgtctgttcaccgacttcgacagccagaccaacgtgtcccagagcaaggactccgacgtgtacatcaccgataagtgcgtgctggacatgcggagcatggacttcaagagcaactccgccgtggcctggtccaacaagtccgatttcgcctgcgccaacgccttcaacaacagcattatccccgaggacacattcttcccaagccccgagagcagcgactccaccgaccacgtgaagcccaaagagacagagaacaccaagcagcccagcaagagctgccacaagcccaaggccatcgtgcacaccgagaaagtgaacatgatgagcctgaccgtgctgggcctgcggatgctgttcgccaaaaccgtggccgtgaacttcctgctgaccgccaagctgttcttcctcctcaccgcccgcgccaagagaagcggatctggcgtgaagcagaccctgaatttcgacctgctgaagctggctggcgacgtggaatccaacccaggccctactagtatggactggatttggcgcatccttttccttgtcggcgctgctaccggcgcgcattccttcgaacaggtccaactggtgcagagcggagccgaggtcgtgaagcctggcgcttccgtgaagattagctgcaaagccagcggctacacctttaccggctactttatgaactgggtcaagcagagccctggccagagcctggaatggatcggcagaatccacccctacgacggcgacaccttctacaaccagaagttccagggcaaggccaccctgacagtggacaagagcagcaacaccgcccacatggaactgctgagcctgaccagcgaggacttcgccgtgtactactgcaccagatacgacggcagccgggctatggactattggggccagggcaccaccgtgaccgtgtctagtacgcgtgaggacctgaagaacgtgttcccacctgaggtggccgtgttcgagcctagcgaggccgagatcagccacacccagaaagccaccctcgtgtgcctggctaccggcttctaccccgaccatgtggaactgtcttggtgggtcaacggcaaagaggtgcacagcggcgtgtgtaccgacccccagccactgaaagaacagcccgccctgaacgacagccggtactgcctgagcagcagactgagagtgtccgccaccttctggcagaacccccggaaccacttcagatgccaggtgcagttctacggcctgagcgagaacgacgagtggacccaggacagagccaagcccgtgacccagatcgtgtctgccgaagcctggggcagagccgatgatgtgattaagatccactggcaggaaaagaagtccaacaccatcctgggcagccaggaaggcaacaccatgaagaccaacgacacctacatgaagttcagctggctgaccgtgcccgagaagtccctggacaaagaacacagatgcatcgtgcggcacgaaaacaacaagaacggcgtggaccaggaaatcatcttcccacccatcaagaccgatgtgattacaatggaccccaaggacaactgctccaaggacgccaacgataccctgctgctccagctgaccaacaccagcgcctactacatgtacttgttgctgctgctgaagtccgtggtgtacttcgccatcatcacatgctgcctgctgatggctatggtcaagcggaaggacagccgggga

SEQ ID NO: 6550 - DNA, 2589 bp, synthetic construct
  source 1..2589: mol_type = other DNA
atggccttaccagtgaccgccttgctcctgccgctggccttgctgctccacgccgccaggccggaagtgcagctggttgaatctggcggaggactggttcagcctggcggatctctgagactgtcttgtgccgccagcggcttcagcttcagcgacttttggatgagctgggtccgacaggcccctggcaaaggacttgaatgggtcgccacaatcagccaggccggcagcgagaaggactacgtggactctgtgaagggcagattcaccatcagccgggacaacgccaagaagtccctgtacctccagatgaacagcctgagagccgaggacaccgccgtgtactattgtgcctctggcgtgtacagcttcgactacagaggccagggcaccctggtcacagtctcttctggtaccggcggaggcggatctggcggcggaggtagcggtggcggaggatctgaattcgacgacgttgtgatgacccagacccccctgagcctgcctgtgacacctggcgaacctgccagcatcagctgtcggagcagccagagcctggtgcacagaaacggcaacacctacctgcactggtatctccagaagcccggccagagccccaagctgctgatccacaaggtgtccaacagattcagcggcgtgcccgacagattctccggcagcggctctggcaccgacttcaccctgaagatcagccgggtggaagccgaggacctgggcgtgtacttctgtagccagagcacccatgtgccccccctgacatttggagccggcaccaagctggaactgaagctcgagatccagaaccctgatcctgccgtgtaccagctgcgggatagcaagagcagcgacaagagcgtgtgtctgttcaccgacttcgacagccagaccaacgtgtcccagagcaaggactccgacgtgtacatcaccgataagtgcgtgctggacatgcggagcatggacttcaagagcaactccgccgtggcctggtccaacaagtccgatttcgcctgcgccaacgccttcaacaacagcattatccccgaggacacattcttcccaagccccgagagcagcgactccaccgaccacgtgaagcccaaagagacagagaacaccaagcagcccagcaagagctgccacaagcccaaggccatcgtgcacaccgagaaagtgaacatgatgagcctgaccgtgctgggcctgcggatgctgttcgccaaaaccgtggccgtgaacttcctgctgaccgccaagctgttcttcctcctcaccgcccgcgccaagagaagcggatctggcgtgaagcagaccctgaatttcgacctgctgaagctggctggcgacgtggaatccaacccaggccctactagtatggactggatttggcgcatccttttccttgtcggcgctgctaccggcgcgcattccttcgaagaagtgcagctggtgcagtctggcgctgaggtggaaaagcctggggccagcgtgaagattagctgcaaggccagcggcagcagcttcaccggctacaacatgaactgggtgcgccagaacatcggcaagagcctggaatggatcggagccatcgacccctactacggcggcaccagctacaaccagaagttcaagggcagagccaccctgaccgtggacaagagcaccagcaccgcctacatgcacctgaagtccctgcggagcgaggacaccgccgtgtactactgtgtgtccggcatggaatattggggccagggcaccagcgtgaccgtgtctagtacgcgtgaggacctgaagaacgtgttcccacctgaggtggccgtgttcgagcctagcgaggccgagatcagccacacccagaaagccaccctcgtgtgcctggctaccggcttctaccccgaccatgtggaactgtcttggtgggtcaacggcaaagaggtgcacagcggcgtgtgtaccgacccccagccactgaaagaacagcccgccctgaacgacagccggtactgcctgagcagcagactgagagtgtccgccaccttctggcagaacccccggaaccacttcagatgccaggtgcagttctacggcctgagcgagaacgacgagtggacccaggacagagccaagcccgtgacccagatcgtgtctgccgaagcctggggcagagccgatgatgtgattaagatccactggcaggaaaagaagtccaacaccatcctgggcagccaggaaggcaacaccatgaagaccaacgacacctacatgaagttcagctggctgaccgtgcccgagaagtccctggacaaagaacacagatgcatcgtgcggcacgaaaacaacaagaacggcgtggaccaggaaatcatcttcccacccatcaagaccgatgtgattacaatggaccccaaggacaactgctccaaggacgccaacgataccctgctgctccagctgaccaacaccagcgcctactacatgtacttgttgctgctgctgaagtccgtggtgtacttcgccatcatcacatgctgcctgctgatggctatggtcaagcggaaggacagccgggga

SEQ ID NO: 6551 - DNA, 2583 bp, synthetic construct
  source 1..2583: mol_type = other DNA
atggccttaccagtgaccgccttgctcctgccgctggccttgctgctccacgccgccaggccggaagtgcagctggttgaatctggcggaggactggttcagcctggcggatctctgagactgtcttgtgccgccagcggcttcagcttcagcgacttttggatgagctgggtccgacaggcccctggcaaaggacttgaatgggtcgccacaatcagccaggccggcagcgagaaggactacgtggactctgtgaagggcagattcaccatcagccgggacaacgccaagaagtccctgtacctccagatgaacagcctgagagccgaggacaccgccgtgtactattgtgcctctggcgtgtacagcttcgactacagaggccagggcaccctggtcacagtctcttctggtaccggcggaggcggatctggcggcggaggtagcggtggcggaggatctgaattcgacgagatcgtgatgacccagacccctgccaccctgtctgtgtctgccggcgagagagtgaccattacctgcaaggccagccagagcgtgtccaacgacgtgacctggtatcagcagaagcccggccaggcccccagactgctgatctacagcgccagcaacagatacagcggcgtgcccgccagattttccggcagcggctacggcaccgagttcaccttcaccatcagcagcgtgcagagcgaggacttcgccgtgtacttctgtcagcaagactacagcagcttcggccagggcaccaagctggaaatcaagaggctcgagatccagaaccctgatcctgccgtgtaccagctgcgggatagcaagagcagcgacaagagcgtgtgtctgttcaccgacttcgacagccagaccaacgtgtcccagagcaaggactccgacgtgtacatcaccgataagtgcgtgctggacatgcggagcatggacttcaagagcaactccgccgtggcctggtccaacaagtccgatttcgcctgcgccaacgccttcaacaacagcattatccccgaggacacattcttcccaagccccgagagcagcgactccaccgaccacgtgaagcccaaagagacagagaacaccaagcagcccagcaagagctgccacaagcccaaggccatcgtgcacaccgagaaagtgaacatgatgagcctgaccgtgctgggcctgcggatgctgttcgccaaaaccgtggccgtgaacttcctgctgaccgccaagctgttcttcctcctcaccgcccgcgccaagagaagcggatctggcgtgaagcagaccctgaatttcgacctgctgaagctggctggcgacgtggaatccaacccaggccctactagtatggactggatttggcgcatccttttccttgtcggcgctgctaccggcgcgcattccttcgaacaggtgcagctggtggaatctggacctggcgtggtgcagcctggcagaagcctgagaatcagctgtgccgtgtccggcttcagcgtgaccaactacggcgtgcactgggtgcgccagccacctggaaaaggactggaatggctgggcgtgatctgggctggcggcatcaccaactacaacagcgccttcatgtcccggctgaccatctccaaggacaacagcaagaacaccgtgtacctccagatgaacagcctgcgggccgaggacaccgccatgtactactgtgcttccagaggcggccactacggctacgccctggattattggggccagggaaccctcgtgaccgtgtcctctacgcgtgaggacctgaagaacgtgttcccacctgaggtggccgtgttcgagcctagcgaggccgagatcagccacacccagaaagccaccctcgtgtgcctggctaccggcttctaccccgaccatgtggaactgtcttggtgggtcaacggcaaagaggtgcacagcggcgtgtgtaccgacccccagccactgaaagaacagcccgccctgaacgacagccggtactgcctgagcagcagactgagagtgtccgccaccttctggcagaacccccggaaccacttcagatgccaggtgcagttctacggcctgagcgagaacgacgagtggacccaggacagagccaagcccgtgacccagatcgtgtctgccgaagcctggggcagagccgatgatgtgattaagatccactggcaggaaaagaagtccaacaccatcctgggcagccaggaaggcaacaccatgaagaccaacgacacctacatgaagttcagctggctgaccgtgcccgagaagtccctggacaaagaacacagatgcatcgtgcggcacgaaaacaacaagaacggcgtggaccaggaaatcatcttcccacccatcaagaccgatgtgattacaatggaccccaaggacaactgctccaaggacgccaacgataccctgctgctccagctgaccaacaccagcgcctactacatgtacttgttgctgctgctgaagtccgtggtgtacttcgccatcatcacatgctgcctgctgatggctatggtcaagcggaaggacagccgggga

SEQ ID NO: 6552 - DNA, 2589 bp, synthetic construct
  source 1..2589: mol_type = other DNA
atggccttaccagtgaccgccttgctcctgccgctggccttgctgctccacgccgccaggccggaagtgcagctggttgaatctggcggaggactggttcagcctggcggatctctgagactgtcttgtgccgccagcggcttcagcttcagcgacttttggatgagctgggtccgacaggcccctggcaaaggacttgaatgggtcgccacaatcagccaggccggcagcgagaaggactacgtggactctgtgaagggcagattcaccatcagccgggacaacgccaagaagtccctgtacctccagatgaacagcctgagagccgaggacaccgccgtgtactattgtgcctctggcgtgtacagcttcgactacagaggccagggcaccctggtcacagtctcttctggtaccggcggaggcggatctggcggcggaggtagcggtggcggaggatctgaattcgacatccagatgacccagaccgccagcagcctgcctgcctctctgggcgacagagtgaccatctcctgtagcgccagccaggacatcagcaactacctgaactggtatcagcagaaacccgacggcaccgtgaagctgctgatcttctacagcagcaacctgcacagcggcgtgcccagcagattttctggcggcggaagcggcaccgactacagcctgaccatcagcaatctggaacccgaggacattgccacctacttttgccaccagtacagcaagctgccctggacctttggcggaggcaccaagctggaaatcaagagactcgagatccagaaccctgatcctgccgtgtaccagctgcgggatagcaagagcagcgacaagagcgtgtgtctgttcaccgacttcgacagccagaccaacgtgtcccagagcaaggactccgacgtgtacatcaccgataagtgcgtgctggacatgcggagcatggacttcaagagcaactccgccgtggcctggtccaacaagtccgatttcgcctgcgccaacgccttcaacaacagcattatccccgaggacacattcttcccaagccccgagagcagcgactccaccgaccacgtgaagcccaaagagacagagaacaccaagcagcccagcaagagctgccacaagcccaaggccatcgtgcacaccgagaaagtgaacatgatgagcctgaccgtgctgggcctgcggatgctgttcgccaaaaccgtggccgtgaacttcctgctgaccgccaagctgttcttcctcctcaccgcccgcgccaagagaagcggatctggcgtgaagcagaccctgaatttcgacctgctgaagctggctggcgacgtggaatccaacccaggccctactagtatggactggatttggcgcatccttttccttgtcggcgctgctaccggcgcgcattccttcgaagaagtgaccctggtggaaagcggcggagacttcgtgaagcctggcggctctctgaaggtgtcctgtgccgccagcggcttcgcctttagccactacgccatgagctgggtgcgccagacccctgccaagagactggaatgggtggcctacatcagcagcggcggctccggcacctactactccgatagcgtgaagggccggttcaccatcagccgggacaacgccaagaacaccctgtacctccagatgcggagcctgcggagcgaggacagcgccatgtatttctgcaccagagtgaagctgggcacctattacttcgactcttggggccagggcaccaccctgaccgtgtcatctacgcgtgaggacctgaagaacgtgttcccacctgaggtggccgtgttcgagcctagcgaggccgagatcagccacacccagaaagccaccctcgtgtgcctggctaccggcttctaccccgaccatgtggaactgtcttggtgggtcaacggcaaagaggtgcacagcggcgtgtgtaccgacccccagccactgaaagaacagcccgccctgaacgacagccggtactgcctgagcagcagactgagagtgtccgccaccttctggcagaacccccggaaccacttcagatgccaggtgcagttctacggcctgagcgagaacgacgagtggacccaggacagagccaagcccgtgacccagatcgtgtctgccgaagcctggggcagagccgatgatgtgattaagatccactggcaggaaaagaagtccaacaccatcctgggcagccaggaaggcaacaccatgaagaccaacgacacctacatgaagttcagctggctgaccgtgcccgagaagtccctggacaaagaacacagatgcatcgtgcggcacgaaaacaacaagaacggcgtggaccaggaaatcatcttcccacccatcaagaccgatgtgattacaatggaccccaaggacaactgctccaaggacgccaacgataccctgctgctccagctgaccaacaccagcgcctactacatgtacttgttgctgctgctgaagtccgtggtgtacttcgccatcatcacatgctgcctgctgatggctatggtcaagcggaaggacagccgggga

SEQ ID NO: 6553 - DNA, 2595 bp, synthetic construct
  source 1..2595: mol_type = other DNA
atggccttaccagtgaccgccttgctcctgccgctggccttgctgctccacgccgccaggccggaagtgcagctggttgaatctggcggaggactggttcagcctggcggatctctgagactgtcttgtgccgccagcggcttcagcttcagcgacttttggatgagctgggtccgacaggcccctggcaaaggacttgaatgggtcgccacaatcagccaggccggcagcgagaaggactacgtggactctgtgaagggcagattcaccatcagccgggacaacgccaagaagtccctgtacctccagatgaacagcctgagagccgaggacaccgccgtgtactattgtgcctctggcgtgtacagcttcgactacagaggccagggcaccctggtcacagtctcttctggtaccggcggaggcggatctggcggcggaggtagcggtggcggaggatctgaattccagttcgtgctgacccagagcccttctgcctctgctgccctgggagcctctgccaagctgacctgtacactgagcagcgcccacaagacctacaccatcgactggtatcagcagcagaagggaaaggcccccagatacctgatccaagtgaagtccgacggcacctacacaaaggccaccggcgtgcccgatagattcagcggcagtagcagcggagccgatagatacctgattatccccagcgtgcaggccgacgacgaggccgattactactgcggcaccgattacaccggcggctacgtgttcggcggaggcacacaactgaccgtgacactcgagatccagaaccctgatcctgccgtgtaccagctgcgggatagcaagagcagcgacaagagcgtgtgtctgttcaccgacttcgacagccagaccaacgtgtcccagagcaaggactccgacgtgtacatcaccgataagtgcgtgctggacatgcggagcatggacttcaagagcaactccgccgtggcctggtccaacaagtccgatttcgcctgcgccaacgccttcaacaacagcattatccccgaggacacattcttcccaagccccgagagcagcgactccaccgaccacgtgaagcccaaagagacagagaacaccaagcagcccagcaagagctgccacaagcccaaggccatcgtgcacaccgagaaagtgaacatgatgagcctgaccgtgctgggcctgcggatgctgttcgccaaaaccgtggccgtgaacttcctgctgaccgccaagctgttcttcctcctcaccgcccgcgccaagagaagcggatctggcgtgaagcagaccctgaatttcgacctgctgaagctggctggcgacgtggaatccaacccaggccctactagtatggactggatttggcgcatccttttccttgtcggcgctgctaccggcgcgcattccttcgaagagcaactgaaagagtctggcggcggactgttcaagcccaccgataccctgaccctgacctgcaccgtgtccggcttcagcctgagctactacggcgtgaactgggtgcgccaggcccctggcaatggcctggaatggatcggcacaatcggcggcagcggcgacacctactatgcctcttgggccaagtccagaagcaccatcatcagaaacaccaacgagaacaccgtgaccctgaagatgaccagcctgacagccgccgacaccgccacctacttttgcgtcagatacgccaacatcggctacgagtatttcaacgtgtggggacccggcaccctcgtgaccgtgtcatctacgcgtgaggacctgaagaacgtgttcccacctgaggtggccgtgttcgagcctagcgaggccgagatcagccacacccagaaagccaccctcgtgtgcctggctaccggcttctaccccgaccatgtggaactgtcttggtgggtcaacggcaaagaggtgcacagcggcgtgtgtaccgacccccagccactgaaagaacagcccgccctgaacgacagccggtactgcctgagcagcagactgagagtgtccgccaccttctggcagaacccccggaaccacttcagatgccaggtgcagttctacggcctgagcgagaacgacgagtggacccaggacagagccaagcccgtgacccagatcgtgtctgccgaagcctggggcagagccgatgatgtgattaagatccactggcaggaaaagaagtccaacaccatcctgggcagccaggaaggcaacaccatgaagaccaacgacacctacatgaagttcagctggctgaccgtgcccgagaagtccctggacaaagaacacagatgcatcgtgcggcacgaaaacaacaagaacggcgtggaccaggaaatcatcttcccacccatcaagaccgatgtgattacaatggaccccaaggacaactgctccaaggacgccaacgataccctgctgctccagctgaccaacaccagcgcctactacatgtacttgttgctgctgctgaagtccgtggtgtacttcgccatcatcacatgctgcctgctgatggctatggtcaagcggaaggacagccgggga

SEQ ID NO: 6554 - DNA, 2610 bp, synthetic construct
  source 1..2610: mol_type = other DNA
atggccttaccagtgaccgccttgctcctgccgctggccttgctgctccacgccgccaggccggaagtgcagctggttgaatctggcggaggactggttcagcctggcggatctctgagactgtcttgtgccgccagcggcttcagcttcagcgacttttggatgagctgggtccgacaggcccctggcaaaggacttgaatgggtcgccacaatcagccaggccggcagcgagaaggactacgtggactctgtgaagggcagattcaccatcagccgggacaacgccaagaagtccctgtacctccagatgaacagcctgagagccgaggacaccgccgtgtactattgtgcctctggcgtgtacagcttcgactacagaggccagggcaccctggtcacagtctcttctggtaccggcggaggcggatctggcggcggaggtagcggtggcggaggatctgaattccagttcgtgctgacccagagcccttctgtgtctgccgccctgggagcctctgccaagctgacctgtacactgagcagcgcccacaagacctacaccatcgactggtatcagcagcagcagggcgaggcccccagatacctgatgcaagtgaagtccgacggcagctacaccaagggcaccggcgtgcccgatagattcagcggcagtagcagcggagccgatagatacctgattatccccagcgtgcaggccgacgacgaggccggatatgtgtgcggcgctgacgacaatggcggctacgtgttcggcggaggcacccaactgacagtgacactcgagatccagaaccctgatcctgccgtgtaccagctgcgggatagcaagagcagcgacaagagcgtgtgtctgttcaccgacttcgacagccagaccaacgtgtcccagagcaaggactccgacgtgtacatcaccgataagtgcgtgctggacatgcggagcatggacttcaagagcaactccgccgtggcctggtccaacaagtccgatttcgcctgcgccaacgccttcaacaacagcattatccccgaggacacattcttcccaagccccgagagcagcgactccaccgaccacgtgaagcccaaagagacagagaacaccaagcagcccagcaagagctgccacaagcccaaggccatcgtgcacaccgagaaagtgaacatgatgagcctgaccgtgctgggcctgcggatgctgttcgccaaaaccgtggccgtgaacttcctgctgaccgccaagctgttcttcctcctcaccgcccgcgccaagagaagcggatctggcgtgaagcagaccctgaatttcgacctgctgaagctggctggcgacgtggaatccaacccaggccctactagtatggactggatttggcgcatccttttccttgtcggcgctgctaccggcgcgcattccttcgaacagagcgtgaaagagtctgagggcggcctgttcaagcccaccgataccctgaccctgacctgcaccgtgtccggcttcagcctgagcagacacgccctgacatgggtgcgccaggcccctggaaatggcctggaatggatcggagccatcgacaacgccggcaccacctactatgcctcttgggccaagtccagaagcaccatcacccggaacaccgacctgcacaccgtgaccctgaagatgaccagcctgaccgccagcgacaccgccacctacttttgcgccagagtgttctacgacatcaacagcggctactacctggacggcatggacctgtggggacctggcacacttgtgaccgtgtccagcacgcgtgaggacctgaagaacgtgttcccacctgaggtggccgtgttcgagcctagcgaggccgagatcagccacacccagaaagccaccctcgtgtgcctggctaccggcttctaccccgaccatgtggaactgtcttggtgggtcaacggcaaagaggtgcacagcggcgtgtgtaccgacccccagccactgaaagaacagcccgccctgaacgacagccggtactgcctgagcagcagactgagagtgtccgccaccttctggcagaacccccggaaccacttcagatgccaggtgcagttctacggcctgagcgagaacgacgagtggacccaggacagagccaagcccgtgacccagatcgtgtctgccgaagcctggggcagagccgatgatgtgattaagatccactggcaggaaaagaagtccaacaccatcctgggcagccaggaaggcaacaccatgaagaccaacgacacctacatgaagttcagctggctgaccgtgcccgagaagtccctggacaaagaacacagatgcatcgtgcggcacgaaaacaacaagaacggcgtggaccaggaaatcatcttcccacccatcaagaccgatgtgattacaatggaccccaaggacaactgctccaaggacgccaacgataccctgctgctccagctgaccaacaccagcgcctactacatgtacttgttgctgctgctgaagtccgtggtgtacttcgccatcatcacatgctgcctgctgatggctatggtcaagcggaaggacagccgggga

SEQ ID NO: 6555 - DNA, 2592 bp, synthetic construct
  source 1..2592: mol_type = other DNA
atggccttaccagtgaccgccttgctcctgccgctggccttgctgctccacgccgccaggccggaagtgcagctggttgaatctggcggaggactggttcagcctggcggatctctgagactgtcttgtgccgccagcggcttcagcttcagcgacttttggatgagctgggtccgacaggcccctggcaaaggacttgaatgggtcgccacaatcagccaggccggcagcgagaaggactacgtggactctgtgaagggcagattcaccatcagccgggacaacgccaagaagtccctgtacctccagatgaacagcctgagagccgaggacaccgccgtgtactattgtgcctctggcgtgtacagcttcgactacagaggccagggcaccctggtcacagtctcttctggtaccggcggaggcggatctggcggcggaggtagcggtggcggaggatctgaattcgacatccagatgacccagagccccagcagcctgtctgccagcgtgggcgacagagtgaccatcacctgtagagccagccagggcatcagctcttggctggcctggtatcagcagaagcccgagaaggcccccaagagcctgatctacgccgcctctagtctccagagcggcgtgcccagcagattttctggcagcggctccggcaccgacttcaccctgacaatcagctccctccagcccgaggacttcgccacctactactgccagcagtacaacagctacccccccacctttggcggaggcaccaaggtggaaatcaagctcgagatccagaaccctgatcctgccgtgtaccagctgcgggatagcaagagcagcgacaagagcgtgtgtctgttcaccgacttcgacagccagaccaacgtgtcccagagcaaggactccgacgtgtacatcaccgataagtgcgtgctggacatgcggagcatggacttcaagagcaactccgccgtggcctggtccaacaagtccgatttcgcctgcgccaacgccttcaacaacagcattatccccgaggacacattcttcccaagccccgagagcagcgactccaccgaccacgtgaagcccaaagagacagagaacaccaagcagcccagcaagagctgccacaagcccaaggccatcgtgcacaccgagaaagtgaacatgatgagcctgaccgtgctgggcctgcggatgctgttcgccaaaaccgtggccgtgaacttcctgctgaccgccaagctgttcttcctcctcaccgcccgcgccaagagaagcggatctggcgtgaagcagaccctgaatttcgacctgctgaagctggctggcgacgtggaatccaacccaggccctactagtatggactggatttggcgcatccttttccttgtcggcgctgctaccggcgcgcattccttcgaagaagtgcaactggtggaatcaggcggcggactggtgcagcctggcgagtctctgagactgagctgtgtggcctccggcttcaccttcagccggtacaagatgaactgggtgcgccaggcccctggcaagggactggaatgggtgtcctacatcagccgcagcggcagagacatctactacgccgacagcgtgaagggccggttcaccatcagcagagacaacgccaagaacagcctgtacctccagatgaactccctgcgggacgaggacaccgccgtgtactactgtgccggaaccgtgaccacctattactacttcggcatggacgtgtggggccacggcaccaccgtgacagtgtcatctacgcgtgaggacctgaagaacgtgttcccacctgaggtggccgtgttcgagcctagcgaggccgagatcagccacacccagaaagccaccctcgtgtgcctggctaccggcttctaccccgaccatgtggaactgtcttggtgggtcaacggcaaagaggtgcacagcggcgtgtgtaccgacccccagccactgaaagaacagcccgccctgaacgacagccggtactgcctgagcagcagactgagagtgtccgccaccttctggcagaacccccggaaccacttcagatgccaggtgcagttctacggcctgagcgagaacgacgagtggacccaggacagagccaagcccgtgacccagatcgtgtctgccgaagcctggggcagagccgatgatgtgattaagatccactggcaggaaaagaagtccaacaccatcctgggcagccaggaaggcaacaccatgaagaccaacgacacctacatgaagttcagctggctgaccgtgcccgagaagtccctggacaaagaacacagatgcatcgtgcggcacgaaaacaacaagaacggcgtggaccaggaaatcatcttcccacccatcaagaccgatgtgattacaatggaccccaaggacaactgctccaaggacgccaacgataccctgctgctccagctgaccaacaccagcgcctactacatgtacttgttgctgctgctgaagtccgtggtgtacttcgccatcatcacatgctgcctgctgatggctatggtcaagcggaaggacagccgggga

SEQ ID NO: 6556 - DNA, 2595 bp, synthetic construct
  source 1..2595: mol_type = other DNA
atggccttaccagtgaccgccttgctcctgccgctggccttgctgctccacgccgccaggccggaagtgcagctggttgaatctggcggaggactggttcagcctggcggatctctgagactgtcttgtgccgccagcggcttcagcttcagcgacttttggatgagctgggtccgacaggcccctggcaaaggacttgaatgggtcgccacaatcagccaggccggcagcgagaaggactacgtggactctgtgaagggcagattcaccatcagccgggacaacgccaagaagtccctgtacctccagatgaacagcctgagagccgaggacaccgccgtgtactattgtgcctctggcgtgtacagcttcgactacagaggccagggcaccctggtcacagtctcttctggtaccggcggaggcggatctggcggcggaggtagcggtggcggaggatctgaattcgacatccagatgacccagagccccagcagcctgtctgccagcgtgggcgacagagtgaccatcacctgtagagccagccagggcatcagctcttggctggcctggtatcagcagaagcccgagaaggcccccaagagcctgatctacgccgcctctagtctccagagcggcgtgcccagcagattttctggcagcggctccggcaccgacttcaccctgacaatcagctccctccagcccgaggacttcgccacctactactgccagcagtacaacagctaccctcccacctttggcggaggcaccaaggtggaaatcaagctcgagatccagaaccctgatcctgccgtgtaccagctgcgggatagcaagagcagcgacaagagcgtgtgtctgttcaccgacttcgacagccagaccaacgtgtcccagagcaaggactccgacgtgtacatcaccgataagtgcgtgctggacatgcggagcatggacttcaagagcaactccgccgtggcctggtccaacaagtccgatttcgcctgcgccaacgccttcaacaacagcattatccccgaggacacattcttcccaagccccgagagcagcgactccaccgaccacgtgaagcccaaagagacagagaacaccaagcagcccagcaagagctgccacaagcccaaggccatcgtgcacaccgagaaagtgaacatgatgagcctgaccgtgctgggcctgcggatgctgttcgccaaaaccgtggccgtgaacttcctgctgaccgccaagctgttcttcctcctcaccgcccgcgccaagagaagcggatctggcgtgaagcagaccctgaatttcgacctgctgaagctggctggcgacgtggaatccaacccaggccctactagtatggactggatttggcgcatccttttccttgtcggcgctgctaccggcgcgcattccttcgaagaagtgcaactggtggaatccgggggaggctctgtgcagcctggcgagtctctgagactgagctgtgtggcctccggcttcaccttcagccggtacaagatgaactgggtgcgccaggcccctggcaagggactggaatgggtgtcctacatcagccgcagcggcagagacatctactacgccgacagcgtgaagggccggttcaccatcagcagagacaacgccaagaacagcctgtacctccagatgaactccctgcgggacgaggacaccgccgtgtactactgtgccggaaccgtgaccacctattactacgacttcggcatggacgtgtggggccagggcacaaccgtgacagtgtctagcacgcgtgaggacctgaagaacgtgttcccacctgaggtggccgtgttcgagcctagcgaggccgagatcagccacacccagaaagccaccctcgtgtgcctggctaccggcttctaccccgaccatgtggaactgtcttggtgggtcaacggcaaagaggtgcacagcggcgtgtgtaccgacccccagccactgaaagaacagcccgccctgaacgacagccggtactgcctgagcagcagactgagagtgtccgccaccttctggcagaacccccggaaccacttcagatgccaggtgcagttctacggcctgagcgagaacgacgagtggacccaggacagagccaagcccgtgacccagatcgtgtctgccgaagcctggggcagagccgatgatgtgattaagatccactggcaggaaaagaagtccaacaccatcctgggcagccaggaaggcaacaccatgaagaccaacgacacctacatgaagttcagctggctgaccgtgcccgagaagtccctggacaaagaacacagatgcatcgtgcggcacgaaaacaacaagaacggcgtggaccaggaaatcatcttcccacccatcaagaccgatgtgattacaatggaccccaaggacaactgctccaaggacgccaacgataccctgctgctccagctgaccaacaccagcgcctactacatgtacttgttgctgctgctgaagtccgtggtgtacttcgccatcatcacatgctgcctgctgatggctatggtcaagcggaaggacagccgggga

SEQ ID NO: 6557 - DNA, 2589 bp, synthetic construct
  source 1..2589: mol_type = other DNA
atggccttaccagtgaccgccttgctcctgccgctggccttgctgctccacgccgccaggccggaagtgcagctggttgaatctggcggaggactggttcagcctggcggatctctgagactgtcttgtgccgccagcggcttcagcttcagcgacttttggatgagctgggtccgacaggcccctggcaaaggacttgaatgggtcgccacaatcagccaggccggcagcgagaaggactacgtggactctgtgaagggcagattcaccatcagccgggacaacgccaagaagtccctgtacctccagatgaacagcctgagagccgaggacaccgccgtgtactattgtgcctctggcgtgtacagcttcgactacagaggccagggcaccctggtcacagtctcttctggtaccggcggaggcggatctggcggcggaggtagcggtggcggaggatctgaattccagtctgtgctgacacagcctccatctgcctctggcacacctggacagagagtgaccatcagctgtagcggcagcagaagcaacgtcggcggcaactacgtgttctggtatcagcaggtcccaggcgctacccctaagctgctgatctacagaagcaatcagcggcctagcggcgtgcccgatagatttgccggaagcaagagcggcagctctgccagccttgccatctctggactgagaagcgaggacgaggccgactactactgtgccacctgggatgatagcctgagcggcttcgtgtttggcaccggcaccaaagtgacagtgcttggtctcgagatccagaaccctgatcctgccgtgtaccagctgcgggatagcaagagcagcgacaagagcgtgtgtctgttcaccgacttcgacagccagaccaacgtgtcccagagcaaggactccgacgtgtacatcaccgataagtgcgtgctggacatgcggagcatggacttcaagagcaactccgccgtggcctggtccaacaagtccgatttcgcctgcgccaacgccttcaacaacagcattatccccgaggacacattcttcccaagccccgagagcagcgactccaccgaccacgtgaagcccaaagagacagagaacaccaagcagcccagcaagagctgccacaagcccaaggccatcgtgcacaccgagaaagtgaacatgatgagcctgaccgtgctgggcctgcggatgctgttcgccaaaaccgtggccgtgaacttcctgctgaccgccaagctgttcttcctcctcaccgcccgcgccaagagaagcggatctggcgtgaagcagaccctgaatttcgacctgctgaagctggctggcgacgtggaatccaacccaggccctactagtatggactggatttggcgcatccttttccttgtcggcgctgctaccggcgcgcattccttcgaagttcagctggttgaatctggcggcggactggttaagcctggcggatctctgagactgtcttgtgccgccagcggcttcaccttcagcgattactacatgagctggatcagacaggcccctggcaaaggactggaatgggtgtcctacatcagcagcagcggctccaccatctactacgccgatagcgtgaagggcagattcaccatcagccgggacaacgccaagaacagcctgtacctccagatgaactccctgagagccgaggacaccgccgtgtactattgcgccagaggctacggcaaagcctacgatcaatggggccagggcacactggtcaccgtttcttctacgcgtgaggacctgaagaacgtgttcccacctgaggtggccgtgttcgagcctagcgaggccgagatcagccacacccagaaagccaccctcgtgtgcctggctaccggcttctaccccgaccatgtggaactgtcttggtgggtcaacggcaaagaggtgcacagcggcgtgtgtaccgacccccagccactgaaagaacagcccgccctgaacgacagccggtactgcctgagcagcagactgagagtgtccgccaccttctggcagaacccccggaaccacttcagatgccaggtgcagttctacggcctgagcgagaacgacgagtggacccaggacagagccaagcccgtgacccagatcgtgtctgccgaagcctggggcagagccgatgatgtgattaagatccactggcaggaaaagaagtccaacaccatcctgggcagccaggaaggcaacaccatgaagaccaacgacacctacatgaagttcagctggctgaccgtgcccgagaagtccctggacaaagaacacagatgcatcgtgcggcacgaaaacaacaagaacggcgtggaccaggaaatcatcttcccacccatcaagaccgatgtgattacaatggaccccaaggacaactgctccaaggacgccaacgataccctgctgctccagctgaccaacaccagcgcctactacatgtacttgttgctgctgctgaagtccgtggtgtacttcgccatcatcacatgctgcctgctgatggctatggtcaagcggaaggacagccgggga

SEQ ID NO: 6558 - DNA, 2586 bp, synthetic construct
  source 1..2586: mol_type = other DNA
atggccttaccagtgaccgccttgctcctgccgctggccttgctgctccacgccgccaggccggaagtgcagctggttgaatctggcggaggactggttcagcctggcggatctctgagactgtcttgtgccgccagcggcttcagcttcagcgacttttggatgagctgggtccgacaggcccctggcaaaggacttgaatgggtcgccacaatcagccaggccggcagcgagaaggactacgtggactctgtgaagggcagattcaccatcagccgggacaacgccaagaagtccctgtacctccagatgaacagcctgagagccgaggacaccgccgtgtactattgtgcctctggcgtgtacagcttcgactacagaggccagggcaccctggtcacagtctcttctggtaccggcggaggcggatctggcggcggaggtagcggtggcggaggatctgaattccagtctgtggtcacacagccacctagcatgtctgccgctccaggccagcaagtgaccatctcttgtagcggcggcaacagcaacatcgagcggaactacgtgtcctggtatctgcaactgcctggcacagcccctaagctggtcatcttcgacaacgacagacggcccagcggcatccccgatagattttctggcagcaagagcggcaccagcgccacactgggaattaccggacttcagacaggcgacgaggccgactactactgtggcacatgggactctagcctgagaggctgggttttcggcggaggcacaaagctgacagtgcttggtctcgagatccagaaccctgatcctgccgtgtaccagctgcgggatagcaagagcagcgacaagagcgtgtgtctgttcaccgacttcgacagccagaccaacgtgtcccagagcaaggactccgacgtgtacatcaccgataagtgcgtgctggacatgcggagcatggacttcaagagcaactccgccgtggcctggtccaacaagtccgatttcgcctgcgccaacgccttcaacaacagcattatccccgaggacacattcttcccaagccccgagagcagcgactccaccgaccacgtgaagcccaaagagacagagaacaccaagcagcccagcaagagctgccacaagcccaaggccatcgtgcacaccgagaaagtgaacatgatgagcctgaccgtgctgggcctgcggatgctgttcgccaaaaccgtggccgtgaacttcctgctgaccgccaagctgttcttcctcctcaccgcccgcgccaagagaagcggatctggcgtgaagcagaccctgaatttcgacctgctgaagctggctggcgacgtggaatccaacccaggccctactagtatggactggatttggcgcatccttttccttgtcggcgctgctaccggcgcgcattccttcgaagtgcagctcgttgagtctggcggcggactgattcaacctggcggaagcctgagactgagctgtgccgcttccggcttcaccttcagcaactacgccatgaactgggttcgacaggcccctggcaaaggactggaatgggtgtccaccatcaacggcagaggcagcagcaccatctacgccgattctgtgaagggcagattcaccatcagccgggacaacagcaagaacaccctgtacctccagatgaactccctgagagccgaggacaccgccacctattactgtgcccggtacatcagcagaggactgggcgattcttggggccagggcacactggttacagtgacgcgtgaggacctgaagaacgtgttcccacctgaggtggccgtgttcgagcctagcgaggccgagatcagccacacccagaaagccaccctcgtgtgcctggctaccggcttctaccccgaccatgtggaactgtcttggtgggtcaacggcaaagaggtgcacagcggcgtgtgtaccgacccccagccactgaaagaacagcccgccctgaacgacagccggtactgcctgagcagcagactgagagtgtccgccaccttctggcagaacccccggaaccacttcagatgccaggtgcagttctacggcctgagcgagaacgacgagtggacccaggacagagccaagcccgtgacccagatcgtgtctgccgaagcctggggcagagccgatgatgtgattaagatccactggcaggaaaagaagtccaacaccatcctgggcagccaggaaggcaacaccatgaagaccaacgacacctacatgaagttcagctggctgaccgtgcccgagaagtccctggacaaagaacacagatgcatcgtgcggcacgaaaacaacaagaacggcgtggaccaggaaatcatcttcccacccatcaagaccgatgtgattacaatggaccccaaggacaactgctccaaggacgccaacgataccctgctgctccagctgaccaacaccagcgcctactacatgtacttgttgctgctgctgaagtccgtggtgtacttcgccatcatcacatgctgcctgctgatggctatggtcaagcggaaggacagccgggga

SEQ ID NO: 6559 - DNA, 2589 bp, synthetic construct
  source 1..2589: mol_type = other DNA
atggccttaccagtgaccgccttgctcctgccgctggccttgctgctccacgccgccaggccggaagtgcagctggttgaatctggcggaggactggttcagcctggcggatctctgagactgtcttgtgccgccagcggcttcagcttcagcgacttttggatgagctgggtccgacaggcccctggcaaaggacttgaatgggtcgccacaatcagccaggccggcagcgagaaggactacgtggactctgtgaagggcagattcaccatcagccgggacaacgccaagaagtccctgtacctccagatgaacagcctgagagccgaggacaccgccgtgtactattgtgcctctggcgtgtacagcttcgactacagaggccagggcaccctggtcacagtctcttctggtaccggcggaggcggatctggcggcggaggtagcggtggcggaggatctgaattcgacgtcgtgatgacccagacccctctgagcctgcctgtgtccctgggcgatcaggccagcatcagctgtagaagcagccagagcctggtgcacagcaacggcaacacctacctgcactggtatctccagaagcccggccagagccccaagctgctgatctacaaggtgtccaacagattcagcggcgtgcccgacagattctccggcagcggctctggcaccgacttcaccctgaagatcagccgggtggaagccgaggacctgggcgtgtacttctgtagccagaacacccccgtgccccccaagtttggcagcggcaccaagctggaaatcaagctcgagatccagaaccctgatcctgccgtgtaccagctgcgggatagcaagagcagcgacaagagcgtgtgtctgttcaccgacttcgacagccagaccaacgtgtcccagagcaaggactccgacgtgtacatcaccgataagtgcgtgctggacatgcggagcatggacttcaagagcaactccgccgtggcctggtccaacaagtccgatttcgcctgcgccaacgccttcaacaacagcattatccccgaggacacattcttcccaagccccgagagcagcgactccaccgaccacgtgaagcccaaagagacagagaacaccaagcagcccagcaagagctgccacaagcccaaggccatcgtgcacaccgagaaagtgaacatgatgagcctgaccgtgctgggcctgcggatgctgttcgccaaaaccgtggccgtgaacttcctgctgaccgccaagctgttcttcctcctcaccgcccgcgccaagagaagcggatctggcgtgaagcagaccctgaatttcgacctgctgaagctggctggcgacgtggaatccaacccaggccctactagtatggactggatttggcgcatccttttccttgtcggcgctgctaccggcgcgcattccttcgaacaggtgcagctccagcagtctggcgctgaactcgtgcggcctggcgcttctgtgaagctgtcttgcaaggccagcggctacaccttcaacgactacgagatgcactgggtcaagcagacccctgtgcacggcctgaagtggatcggagccctggaacccaagaccggcgataccgcctacagccagaagttcaagggcaaggccaccctgaccgccgacaagagcagcagcacagcctacatggaactgcggagcctgaccagcgaggacagcgccgtgtactactgcaccagctgctactactacacctacagcggccagggcaccctcgtgacagtgtctgctacgcgtgaggacctgaagaacgtgttcccacctgaggtggccgtgttcgagcctagcgaggccgagatcagccacacccagaaagccaccctcgtgtgcctggctaccggcttctaccccgaccatgtggaactgtcttggtgggtcaacggcaaagaggtgcacagcggcgtgtgtaccgacccccagccactgaaagaacagcccgccctgaacgacagccggtactgcctgagcagcagactgagagtgtccgccaccttctggcagaacccccggaaccacttcagatgccaggtgcagttctacggcctgagcgagaacgacgagtggacccaggacagagccaagcccgtgacccagatcgtgtctgccgaagcctggggcagagccgatgatgtgattaagatccactggcaggaaaagaagtccaacaccatcctgggcagccaggaaggcaacaccatgaagaccaacgacacctacatgaagttcagctggctgaccgtgcccgagaagtccctggacaaagaacacagatgcatcgtgcggcacgaaaacaacaagaacggcgtggaccaggaaatcatcttcccacccatcaagaccgatgtgattacaatggaccccaaggacaactgctccaaggacgccaacgataccctgctgctccagctgaccaacaccagcgcctactacatgtacttgttgctgctgctgaagtccgtggtgtacttcgccatcatcacatgctgcctgctgatggctatggtcaagcggaaggacagccgggga

SEQ ID NO: 6560 - DNA, 2586 bp, synthetic construct
  source 1..2586: mol_type = other DNA
atggccttaccagtgaccgccttgctcctgccgctggccttgctgctccacgccgccaggccggaagtgcagctggttgaatctggcggaggactggttcagcctggcggatctctgagactgtcttgtgccgccagcggcttcagcttcagcgacttttggatgagctgggtccgacaggcccctggcaaaggacttgaatgggtcgccacaatcagccaggccggcagcgagaaggactacgtggactctgtgaagggcagattcaccatcagccgggacaacgccaagaagtccctgtacctccagatgaacagcctgagagccgaggacaccgccgtgtactattgtgcctctggcgtgtacagcttcgactacagaggccagggcaccctggtcacagtctcttctggtaccggcggaggcggatctggcggcggaggtagcggtggcggaggatctgaattcgacatccaactgacccagagccccagcagcctgtctgcctctgtgggcgacagagtgaccatcacctgtagagccagccagggcatcagaaacgacctgggctggtatcagcagaagcccggcaaggcccccaagcggctgatctatgctgccagctccctccagaatggcgtgcccagcagattttccggcagcggctctggcaccgagttcaccctgaccatcagctccctccagcccgaggacttcgccacctactactgcctccagcacaacacctaccccgccttcggccagggcaccaaggtggaaatcaagagactcgagatccagaaccctgatcctgccgtgtaccagctgcgggatagcaagagcagcgacaagagcgtgtgtctgttcaccgacttcgacagccagaccaacgtgtcccagagcaaggactccgacgtgtacatcaccgataagtgcgtgctggacatgcggagcatggacttcaagagcaactccgccgtggcctggtccaacaagtccgatttcgcctgcgccaacgccttcaacaacagcattatccccgaggacacattcttcccaagccccgagagcagcgactccaccgaccacgtgaagcccaaagagacagagaacaccaagcagcccagcaagagctgccacaagcccaaggccatcgtgcacaccgagaaagtgaacatgatgagcctgaccgtgctgggcctgcggatgctgttcgccaaaaccgtggccgtgaacttcctgctgaccgccaagctgttcttcctcctcaccgcccgcgccaagagaagcggatctggcgtgaagcagaccctgaatttcgacctgctgaagctggctggcgacgtggaatccaacccaggccctactagtatggactggatttggcgcatccttttccttgtcggcgctgctaccggcgcgcattccttcgaacaggtgcaactccaggaatctggccctggcctcgtgaagcctagccagaccctgagcctgacctgtaccgtgtctggcggcagcatcagcagcttcaactactactggtcctggatcagacaccaccctggcaagggcctggaatggatcggctacatctactacagcggcagcacctacagcaaccccagcctgaagtcccgcgtgaccatctccgtggacaccagcaagaaccagtttagcctgaccctgtccagcgtgacagccgccgataccgccgtgtactactgcgccagaggctacaactggaactacttcgactactggggccagggaaccctcgtgaccgtgtctagtacgcgtgaggacctgaagaacgtgttcccacctgaggtggccgtgttcgagcctagcgaggccgagatcagccacacccagaaagccaccctcgtgtgcctggctaccggcttctaccccgaccatgtggaactgtcttggtgggtcaacggcaaagaggtgcacagcggcgtgtgtaccgacccccagccactgaaagaacagcccgccctgaacgacagccggtactgcctgagcagcagactgagagtgtccgccaccttctggcagaacccccggaaccacttcagatgccaggtgcagttctacggcctgagcgagaacgacgagtggacccaggacagagccaagcccgtgacccagatcgtgtctgccgaagcctggggcagagccgatgatgtgattaagatccactggcaggaaaagaagtccaacaccatcctgggcagccaggaaggcaacaccatgaagaccaacgacacctacatgaagttcagctggctgaccgtgcccgagaagtccctggacaaagaacacagatgcatcgtgcggcacgaaaacaacaagaacggcgtggaccaggaaatcatcttcccacccatcaagaccgatgtgattacaatggaccccaaggacaactgctccaaggacgccaacgataccctgctgctccagctgaccaacaccagcgcctactacatgtacttgttgctgctgctgaagtccgtggtgtacttcgccatcatcacatgctgcctgctgatggctatggtcaagcggaaggacagccgggga

SEQ ID NO: 6561 - DNA, 2592 bp, synthetic construct
  source 1..2592: mol_type = other DNA
atggccttaccagtgaccgccttgctcctgccgctggccttgctgctccacgccgccaggccggaagtgcagctggttgaatctggcggaggactggttcagcctggcggatctctgagactgtcttgtgccgccagcggcttcagcttcagcgacttttggatgagctgggtccgacaggcccctggcaaaggacttgaatgggtcgccacaatcagccaggccggcagcgagaaggactacgtggactctgtgaagggcagattcaccatcagccgggacaacgccaagaagtccctgtacctccagatgaacagcctgagagccgaggacaccgccgtgtactattgtgcctctggcgtgtacagcttcgactacagaggccagggcaccctggtcacagtctcttctggtaccggcggaggcggatctggcggcggaggtagcggtggcggaggatctgaattcgacgacatcgtgctgacccagagccccgccagcctggccgtgagcctgggccagagcgtgaccatcagctgcagagccagcgagagcgtggagtactacggcaccagcctgatgcagtggtaccagcagaagcccggccagccccccaagctgctgatctacgccaccagcaacgtggagagcggcgtgcccgccagattcagcggcagcggcagcggcaccgacttcagcctgaacatccaccccgtggaggaggacgacatcgccatgtacttctgccagcagagcagaaagctgcccagcaccttcggcggcggcaccaagctggagatcaagctcgagatccagaaccctgatcctgccgtgtaccagctgcgggatagcaagagcagcgacaagagcgtgtgtctgttcaccgacttcgacagccagaccaacgtgtcccagagcaaggactccgacgtgtacatcaccgataagtgcgtgctggacatgcggagcatggacttcaagagcaactccgccgtggcctggtccaacaagtccgatttcgcctgcgccaacgccttcaacaacagcattatccccgaggacacattcttcccaagccccgagagcagcgactccaccgaccacgtgaagcccaaagagacagagaacaccaagcagcccagcaagagctgccacaagcccaaggccatcgtgcacaccgagaaagtgaacatgatgagcctgaccgtgctgggcctgcggatgctgttcgccaaaaccgtggccgtgaacttcctgctgaccgccaagctgttcttcctcctcaccgcccgcgccaagagaagcggatctggcgtgaagcagaccctgaatttcgacctgctgaagctggctggcgacgtggaatccaacccaggccctactagtatggactggatttggcgcatccttttccttgtcggcgctgctaccggcgcgcattccttcgaagacgtgagactgcaggagagcggccccggccaggtgaagcccagccagaccgtgagcctgacctgcagcgtgaccggctacagcatcaccaacggcaaccactggtggaactggatcagacaggtgagcggcagcaagctggagtggatcggctacatcagcagcagcggcagcaccgacagcaaccccagcctgaagagcagaatcagcatcaccagagacaccagcaagaaccagctgttcctgcagctgaacagcgtgaccaccgaggacatcgccacctactactgcgccagaggctactacttcgactactggggccagggcaccaccctgaccgtgagcagcacgcgtgaggacctgaagaacgtgttcccacctgaggtggccgtgttcgagcctagcgaggccgagatcagccacacccagaaagccaccctcgtgtgcctggctaccggcttctaccccgaccatgtggaactgtcttggtgggtcaacggcaaagaggtgcacagcggcgtgtgtaccgacccccagccactgaaagaacagcccgccctgaacgacagccggtactgcctgagcagcagactgagagtgtccgccaccttctggcagaacccccggaaccacttcagatgccaggtgcagttctacggcctgagcgagaacgacgagtggacccaggacagagccaagcccgtgacccagatcgtgtctgccgaagcctggggcagagccgatgatgtgattaagatccactggcaggaaaagaagtccaacaccatcctgggcagccaggaaggcaacaccatgaagaccaacgacacctacatgaagttcagctggctgaccgtgcccgagaagtccctggacaaagaacacagatgcatcgtgcggcacgaaaacaacaagaacggcgtggaccaggaaatcatcttcccacccatcaagaccgatgtgattacaatggaccccaaggacaactgctccaaggacgccaacgataccctgctgctccagctgaccaacaccagcgcctactacatgtacttgttgctgctgctgaagtccgtggtgtacttcgccatcatcacatgctgcctgctgatggctatggtcaagcggaaggacagccgggga

SEQ ID NO: 6562 - DNA, 2589 bp, synthetic construct
  source 1..2589: mol_type = other DNA
atggccttaccagtgaccgccttgctcctgccgctggccttgctgctccacgccgccaggccggaagtgcagctggttgaatctggcggaggactggttcagcctggcggatctctgagactgtcttgtgccgccagcggcttcagcttcagcgacttttggatgagctgggtccgacaggcccctggcaaaggacttgaatgggtcgccacaatcagccaggccggcagcgagaaggactacgtggactctgtgaagggcagattcaccatcagccgggacaacgccaagaagtccctgtacctccagatgaacagcctgagagccgaggacaccgccgtgtactattgtgcctctggcgtgtacagcttcgactacagaggccagggcaccctggtcacagtctcttctggtaccggcggaggcggatctggcggcggaggtagcggtggcggaggatctgaattcgacatccagatgacccagagccccagcagcctgtctgccagcgtgggcgacagagtgaccatcacctgtagagccagccaggacgtgaacaccgccgtggcctggtatcagcagaagcctggcaaggcccccaagctgctgatctacagcgccagcttcctggaaagcggcgtgcccagcagattcagcggaagcagaagcggcaccgacttcaccctgaccatcagctccctccagcccgaggacttcgccacctactactgccagcagcactacaccacccctcccaccttcggccagaccaaggtggaaatcaagagactcgagatccagaaccctgatcctgccgtgtaccagctgcgggatagcaagagcagcgacaagagcgtgtgtctgttcaccgacttcgacagccagaccaacgtgtcccagagcaaggactccgacgtgtacatcaccgataagtgcgtgctggacatgcggagcatggacttcaagagcaactccgccgtggcctggtccaacaagtccgatttcgcctgcgccaacgccttcaacaacagcattatccccgaggacacattcttcccaagccccgagagcagcgactccaccgaccacgtgaagcccaaagagacagagaacaccaagcagcccagcaagagctgccacaagcccaaggccatcgtgcacaccgagaaagtgaacatgatgagcctgaccgtgctgggcctgcggatgctgttcgccaaaaccgtggccgtgaacttcctgctgaccgccaagctgttcttcctcctcaccgcccgcgccaagagaagcggatctggcgtgaagcagaccctgaatttcgacctgctgaagctggctggcgacgtggaatccaacccaggccctactagtatggactggatttggcgcatccttttccttgtcggcgctgctaccggcgcgcattccttcgaagaagtgcaactggtggaatctggcggcggactggtgcagcctggcggatctctgagactgagctgtgccgccagcggcttcaacatcaaggacacctacatccactgggtgcgccaggcccctggaaagggactggaatgggtggcccggatctaccccaccaacggctacaccagatacgccgacagcgtgaagggccggttcaccatcagcgccgacaccagcaagaataccgcctacctccagatgaacagcctgcgggccgaggataccgccgtgtactactgctcaagatggggaggcgacggcttctacgctatggacgtgtggggccagggcacccttgtgaccgtgtcatctacgcgtgaggacctgaagaacgtgttcccacctgaggtggccgtgttcgagcctagcgaggccgagatcagccacacccagaaagccaccctcgtgtgcctggctaccggcttctaccccgaccatgtggaactgtcttggtgggtcaacggcaaagaggtgcacagcggcgtgtgtaccgacccccagccactgaaagaacagcccgccctgaacgacagccggtactgcctgagcagcagactgagagtgtccgccaccttctggcagaacccccggaaccacttcagatgccaggtgcagttctacggcctgagcgagaacgacgagtggacccaggacagagccaagcccgtgacccagatcgtgtctgccgaagcctggggcagagccgatgatgtgattaagatccactggcaggaaaagaagtccaacaccatcctgggcagccaggaaggcaacaccatgaagaccaacgacacctacatgaagttcagctggctgaccgtgcccgagaagtccctggacaaagaacacagatgcatcgtgcggcacgaaaacaacaagaacggcgtggaccaggaaatcatcttcccacccatcaagaccgatgtgattacaatggaccccaaggacaactgctccaaggacgccaacgataccctgctgctccagctgaccaacaccagcgcctactacatgtacttgttgctgctgctgaagtccgtggtgtacttcgccatcatcacatgctgcctgctgatggctatggtcaagcggaaggacagccgggga

SEQ ID NO: 6563 - DNA, 2586 bp, synthetic construct
  source 1..2586: mol_type = other DNA
atggccttaccagtgaccgccttgctcctgccgctggccttgctgctccacgccgccaggccggaagtgcagctggttgaatctggcggaggactggttcagcctggcggatctctgagactgtcttgtgccgccagcggcttcagcttcagcgacttttggatgagctgggtccgacaggcccctggcaaaggacttgaatgggtcgccacaatcagccaggccggcagcgagaaggactacgtggactctgtgaagggcagattcaccatcagccgggacaacgccaagaagtccctgtacctccagatgaacagcctgagagccgaggacaccgccgtgtactattgtgcctctggcgtgtacagcttcgactacagaggccagggcaccctggtcacagtctcttctggtaccggcggaggcggatctggcggcggaggtagcggtggcggaggatctgaattcgaccagagcgtgctgacacagcctcctagcgtgtcagtggcccctggcaagaccgccagaatcccctgcgagggcaactacatcggcagcagcaacgtgcactggtatcagcagaagcccggccaggctcccgtgctcgtgatccacttcgacagcgacagacccagcggcatccccgacagattcagcggcagcaacagcggcaacatggctaccctgaccatcagcagagtggaagccggggacgaggccgactactactgtcaagtgtgggagaaccacggctgggtgttcggcggaggcaccaagctgacagtgctgtctctcgagatccagaaccctgatcctgccgtgtaccagctgcgggatagcaagagcagcgacaagagcgtgtgtctgttcaccgacttcgacagccagaccaacgtgtcccagagcaaggactccgacgtgtacatcaccgataagtgcgtgctggacatgcggagcatggacttcaagagcaactccgccgtggcctggtccaacaagtccgatttcgcctgcgccaacgccttcaacaacagcattatccccgaggacacattcttcccaagccccgagagcagcgactccaccgaccacgtgaagcccaaagagacagagaacaccaagcagcccagcaagagctgccacaagcccaaggccatcgtgcacaccgagaaagtgaacatgatgagcctgaccgtgctgggcctgcggatgctgttcgccaaaaccgtggccgtgaacttcctgctgaccgccaagctgttcttcctcctcaccgcccgcgccaagagaagcggatctggcgtgaagcagaccctgaatttcgacctgctgaagctggctggcgacgtggaatccaacccaggccctactagtatggactggatttggcgcatccttttccttgtcggcgctgctaccggcgcgcattccttcgaagaggtgcaactggtggaaacaggcggcggactggtgcagcctggcgagtctctgagactgagctgtgccgccagcggcttcaccttcagcgactacgagatgaactgggtgcgccaggcccctggaaagggcctggaatgggtgtcctacatcagcagctccggcagcaccatctactacgccgacagcgtgaagggccggtttaccatctaccgggacaacgccaagaacagcctgtacctccagatgaactccctgcgggccgaggacaccgccctgtactattgtgccagagcctggggcgtgggaccccctgattattggggacagggcaccctcgtgaccgtgtcctctacgcgtgaggacctgaagaacgtgttcccacctgaggtggccgtgttcgagcctagcgaggccgagatcagccacacccagaaagccaccctcgtgtgcctggctaccggcttctaccccgaccatgtggaactgtcttggtgggtcaacggcaaagaggtgcacagcggcgtgtgtaccgacccccagccactgaaagaacagcccgccctgaacgacagccggtactgcctgagcagcagactgagagtgtccgccaccttctggcagaacccccggaaccacttcagatgccaggtgcagttctacggcctgagcgagaacgacgagtggacccaggacagagccaagcccgtgacccagatcgtgtctgccgaagcctggggcagagccgatgatgtgattaagatccactggcaggaaaagaagtccaacaccatcctgggcagccaggaaggcaacaccatgaagaccaacgacacctacatgaagttcagctggctgaccgtgcccgagaagtccctggacaaagaacacagatgcatcgtgcggcacgaaaacaacaagaacggcgtggaccaggaaatcatcttcccacccatcaagaccgatgtgattacaatggaccccaaggacaactgctccaaggacgccaacgataccctgctgctccagctgaccaacaccagcgcctactacatgtacttgttgctgctgctgaagtccgtggtgtacttcgccatcatcacatgctgcctgctgatggctatggtcaagcggaaggacagccgggga

SEQ ID NO: 6564 - DNA, 2610 bp, synthetic construct
  source 1..2610: mol_type = other DNA
atggccttaccagtgaccgccttgctcctgccgctggccttgctgctccacgccgccaggccggaagtgcagctggttgaatctggcggaggactggttcagcctggcggatctctgagactgtcttgtgccgccagcggcttcagcttcagcgacttttggatgagctgggtccgacaggcccctggcaaaggacttgaatgggtcgccacaatcagccaggccggcagcgagaaggactacgtggactctgtgaagggcagattcaccatcagccgggacaacgccaagaagtccctgtacctccagatgaacagcctgagagccgaggacaccgccgtgtactattgtgcctctggcgtgtacagcttcgactacagaggccagggcaccctggtcacagtctcttctggtaccggcggaggcggatctggcggcggaggtagcggtggcggaggatctgaattcgacatccagatgacccagagccccagcagcctgtctgccagcgtgggcgataccgtgaccatcacctgtcaggccaacggctacctgaactggtatcagcagcggagaggcaaggcccccaagctgctgatctacgacggcagcaagctggaaagaggcgtgcccagcagattcagcggcagaagatggggccaggagtacaacctgaccatcaacaacctccagcccgaggatattgccacatacttttgccaggtgtacgagttcgtggtgcccggcacacggctggacctgaagagaacagtggctgctcctctcgagatccagaaccctgatcctgccgtgtaccagctgcgggatagcaagagcagcgacaagagcgtgtgtctgttcaccgacttcgacagccagaccaacgtgtcccagagcaaggactccgacgtgtacatcaccgataagtgcgtgctggacatgcggagcatggacttcaagagcaactccgccgtggcctggtccaacaagtccgatttcgcctgcgccaacgccttcaacaacagcattatccccgaggacacattcttcccaagccccgagagcagcgactccaccgaccacgtgaagcccaaagagacagagaacaccaagcagcccagcaagagctgccacaagcccaaggccatcgtgcacaccgagaaagtgaacatgatgagcctgaccgtgctgggcctgcggatgctgttcgccaaaaccgtggccgtgaacttcctgctgaccgccaagctgttcttcctcctcaccgcccgcgccaagagaagcggatctggcgtgaagcagaccctgaatttcgacctgctgaagctggctggcgacgtggaatccaacccaggccctactagtatggactggatttggcgcatccttttccttgtcggcgctgctaccggcgcgcattccttcgaacaggtgcagctgctccagtctggcgctgccgtgacaaagcctggcgcttctgtgcgggtgtcctgtgaagccagcggctacaacatccgggactacttcatccactggtggcggcaggctccaggccagggactccagtgggtgggatggatcaaccccaagaccggccagcccaacaaccccagacagttccagggcagagtgtccctgaccagacacgccagctgggacttcgacaccttcagcttctacatggatctgaaggccctgcggagcgacgataccgccgtgtacttctgcgccagacagagaagcgactactgggatttcgacgtgtggggcagcggcacccaagtgacagtgtctagcgccagcaccaagggacccacgcgtgaggacctgaagaacgtgttcccacctgaggtggccgtgttcgagcctagcgaggccgagatcagccacacccagaaagccaccctcgtgtgcctggctaccggcttctaccccgaccatgtggaactgtcttggtgggtcaacggcaaagaggtgcacagcggcgtgtgtaccgacccccagccactgaaagaacagcccgccctgaacgacagccggtactgcctgagcagcagactgagagtgtccgccaccttctggcagaacccccggaaccacttcagatgccaggtgcagttctacggcctgagcgagaacgacgagtggacccaggacagagccaagcccgtgacccagatcgtgtctgccgaagcctggggcagagccgatgatgtgattaagatccactggcaggaaaagaagtccaacaccatcctgggcagccaggaaggcaacaccatgaagaccaacgacacctacatgaagttcagctggctgaccgtgcccgagaagtccctggacaaagaacacagatgcatcgtgcggcacgaaaacaacaagaacggcgtggaccaggaaatcatcttcccacccatcaagaccgatgtgattacaatggaccccaaggacaactgctccaaggacgccaacgataccctgctgctccagctgaccaacaccagcgcctactacatgtacttgttgctgctgctgaagtccgtggtgtacttcgccatcatcacatgctgcctgctgatggctatggtcaagcggaaggacagccgggga

SEQ ID NO: 6565 - DNA, 2628 bp, synthetic construct
  source 1..2628: mol_type = other DNA
atggccttaccagtgaccgccttgctcctgccgctggccttgctgctccacgccgccaggccggaagtgcagctggttgaatctggcggaggactggttcagcctggcggatctctgagactgtcttgtgccgccagcggcttcagcttcagcgacttttggatgagctgggtccgacaggcccctggcaaaggacttgaatgggtcgccacaatcagccaggccggcagcgagaaggactacgtggactctgtgaagggcagattcaccatcagccgggacaacgccaagaagtccctgtacctccagatgaacagcctgagagccgaggacaccgccgtgtactattgtgcctctggcgtgtacagcttcgactacagaggccagggcaccctggtcacagtctcttctggtaccggcggaggcggatctggcggcggaggtagcggtggcggaggatctgaattccagtctgccctgacacagcctcctagcgcctctggctctcccggccagagcatcaccatcagctgtaccggcaccagcaacaacttcgtgtcctggtatcagcagcacgccggcaaggcccccaagctcgtgatctacgacgtgaacaagcggcccagcggcgtgcccgatagattcagcggcagcaagagcggcaacaccgccagcctgacagtgtctggcctccagaccgatgacgaggccgtgtactactgcggcagcctcgtgggcaactgggacgtgatctttggcggaggcaccaagctgaccgtgctgctcgagatccagaaccctgatcctgccgtgtaccagctgcgggatagcaagagcagcgacaagagcgtgtgtctgttcaccgacttcgacagccagaccaacgtgtcccagagcaaggactccgacgtgtacatcaccgataagtgcgtgctggacatgcggagcatggacttcaagagcaactccgccgtggcctggtccaacaagtccgatttcgcctgcgccaacgccttcaacaacagcattatccccgaggacacattcttcccaagccccgagagcagcgactccaccgaccacgtgaagcccaaagagacagagaacaccaagcagcccagcaagagctgccacaagcccaaggccatcgtgcacaccgagaaagtgaacatgatgagcctgaccgtgctgggcctgcggatgctgttcgccaaaaccgtggccgtgaacttcctgctgaccgccaagctgttcttcctcctcaccgcccgcgccaagagaagcggatctggcgtgaagcagaccctgaatttcgacctgctgaagctggctggcgacgtggaatccaacccaggccctactagtatggactggatttggcgcatccttttccttgtcggcgctgctaccggcgcgcattccttcgaacagccccagctccaggaatctggccccacactggtggaagccagcgagacactgagcctgacctgtgccgtgtccggcgattctaccgccgcctgcaatagcttctggggctgggtgcgccagcctcctggaaagggactggaatgggtgggaagcctgagccactgcgccagctattggaaccggggctggacctaccacaaccccagcctgaagtccagactgaccctggccctggacacccccaagaacctggtgttcctgaagctgaacagcgtgacagccgccgacaccgccacctactactgtgccagatttggcggcgaggtgctgcggtacaccgactggcctaaacctgcctgggtggacctgtggggcagaggaacactcgtgaccgtgtccagcacgcgtgaggacctgaagaacgtgttcccacctgaggtggccgtgttcgagcctagcgaggccgagatcagccacacccagaaagccaccctcgtgtgcctggctaccggcttctaccccgaccatgtggaactgtcttggtgggtcaacggcaaagaggtgcacagcggcgtgtgtaccgacccccagccactgaaagaacagcccgccctgaacgacagccggtactgcctgagcagcagactgagagtgtccgccaccttctggcagaacccccggaaccacttcagatgccaggtgcagttctacggcctgagcgagaacgacgagtggacccaggacagagccaagcccgtgacccagatcgtgtctgccgaagcctggggcagagccgatgatgtgattaagatccactggcaggaaaagaagtccaacaccatcctgggcagccaggaaggcaacaccatgaagaccaacgacacctacatgaagttcagctggctgaccgtgcccgagaagtccctggacaaagaacacagatgcatcgtgcggcacgaaaacaacaagaacggcgtggaccaggaaatcatcttcccacccatcaagaccgatgtgattacaatggaccccaaggacaactgctccaaggacgccaacgataccctgctgctccagctgaccaacaccagcgcctactacatgtacttgttgctgctgctgaagtccgtggtgtacttcgccatcatcacatgctgcctgctgatggctatggtcaagcggaaggacagccgggga

SEQ ID NO: 6566 - DNA, 2583 bp, synthetic construct
  source 1..2583: mol_type = other DNA
atggccttaccagtgaccgccttgctcctgccgctggccttgctgctccacgccgccaggccggaagtgcagctggttgaatctggcggaggactggttcagcctggcggatctctgagactgtcttgtgccgccagcggcttcagcttcagcgacttttggatgagctgggtccgacaggcccctggcaaaggacttgaatgggtcgccacaatcagccaggccggcagcgagaaggactacgtggactctgtgaagggcagattcaccatcagccgggacaacgccaagaagtccctgtacctccagatgaacagcctgagagccgaggacaccgccgtgtactattgtgcctctggcgtgtacagcttcgactacagaggccagggcaccctggtcacagtctcttctggtaccggcggaggcggatctggcggcggaggtagcggtggcggaggatctgaattcgagatcgtgctgacacagagccctggcaccctgagcctgtctccaggcgagacagccatcatcagctgccggacaagccagtacggcagcctggcctggtatcagcagaggccaggacaggcccccagactcgtgatctacagcggcagcacaagagccgccggaatccccgatagattcagcggctccagatggggacccgactacaacctgaccatcagcaacctggaaagcggcgacttcggcgtgtactactgccagcagtacgagttcttcggccagggcaccaaggtgcaggtggacatcaaaagactcgagatccagaaccctgatcctgccgtgtaccagctgcgggatagcaagagcagcgacaagagcgtgtgtctgttcaccgacttcgacagccagaccaacgtgtcccagagcaaggactccgacgtgtacatcaccgataagtgcgtgctggacatgcggagcatggacttcaagagcaactccgccgtggcctggtccaacaagtccgatttcgcctgcgccaacgccttcaacaacagcattatccccgaggacacattcttcccaagccccgagagcagcgactccaccgaccacgtgaagcccaaagagacagagaacaccaagcagcccagcaagagctgccacaagcccaaggccatcgtgcacaccgagaaagtgaacatgatgagcctgaccgtgctgggcctgcggatgctgttcgccaaaaccgtggccgtgaacttcctgctgaccgccaagctgttcttcctcctcaccgcccgcgccaagagaagcggatctggcgtgaagcagaccctgaatttcgacctgctgaagctggctggcgacgtggaatccaacccaggccctactagtatggactggatttggcgcatccttttccttgtcggcgctgctaccggcgcgcattccttcgaacaggtgcagctggtgcagtctggcggccagatgaagaaacccggcgagagcatgagaatcagctgtcgggcctccggctacgagttcatcgactgcaccctgaactggatcagactggcccctggcaagcggcctgagtggatgggatggctgaagcctagaggcggagccgtgaactacgccagacctctccagggcagagtgaccatgaccagggacgtgtacagcgataccgccttcctggaactgcggagcctgaccgtggatgataccgccgtgtacttctgcaccagaggcaagaactgcgattacaactgggacttcgagcactggggcagaggcacccctgtgatcgtgtctagcacgcgtgaggacctgaagaacgtgttcccacctgaggtggccgtgttcgagcctagcgaggccgagatcagccacacccagaaagccaccctcgtgtgcctggctaccggcttctaccccgaccatgtggaactgtcttggtgggtcaacggcaaagaggtgcacagcggcgtgtgtaccgacccccagccactgaaagaacagcccgccctgaacgacagccggtactgcctgagcagcagactgagagtgtccgccaccttctggcagaacccccggaaccacttcagatgccaggtgcagttctacggcctgagcgagaacgacgagtggacccaggacagagccaagcccgtgacccagatcgtgtctgccgaagcctggggcagagccgatgatgtgattaagatccactggcaggaaaagaagtccaacaccatcctgggcagccaggaaggcaacaccatgaagaccaacgacacctacatgaagttcagctggctgaccgtgcccgagaagtccctggacaaagaacacagatgcatcgtgcggcacgaaaacaacaagaacggcgtggaccaggaaatcatcttcccacccatcaagaccgatgtgattacaatggaccccaaggacaactgctccaaggacgccaacgataccctgctgctccagctgaccaacaccagcgcctactacatgtacttgttgctgctgctgaagtccgtggtgtacttcgccatcatcacatgctgcctgctgatggctatggtcaagcggaaggacagccgggga

SEQ ID NO: 6567 - DNA, 2613 bp, synthetic construct
  source 1..2613: mol_type = other DNA
atggccttaccagtgaccgccttgctcctgccgctggccttgctgctccacgccgccaggccggaagtgcagctggttgaatctggcggaggactggttcagcctggcggatctctgagactgtcttgtgccgccagcggcttcagcttcagcgacttttggatgagctgggtccgacaggcccctggcaaaggacttgaatgggtcgccacaatcagccaggccggcagcgagaaggactacgtggactctgtgaagggcagattcaccatcagccgggacaacgccaagaagtccctgtacctccagatgaacagcctgagagccgaggacaccgccgtgtactattgtgcctctggcgtgtacagcttcgactacagaggccagggcaccctggtcacagtctcttctggtaccggcggaggcggatctggcggcggaggtagcggtggcggaggatctgaattcgagctggtgctgacacagagccctggcaccctgtctctgtctgccggcgaaagagccaccctgagctgtagagccagccagagcgtgtcctctggcagcctggcttggtatcagcagaagccaggccaggcccccagactgctgatctacggcgcttctaccagagccaccggcatccccgatagattcagcggctctggctccggcaccgacttcaccctgacaatcggcagactggaacccgaggacctggccgtgtactactgccagcagtacggcaccagcccctacacattcggccagggcaccaagctggaaatcctcgagatccagaaccctgatcctgccgtgtaccagctgcgggatagcaagagcagcgacaagagcgtgtgtctgttcaccgacttcgacagccagaccaacgtgtcccagagcaaggactccgacgtgtacatcaccgataagtgcgtgctggacatgcggagcatggacttcaagagcaactccgccgtggcctggtccaacaagtccgatttcgcctgcgccaacgccttcaacaacagcattatccccgaggacacattcttcccaagccccgagagcagcgactccaccgaccacgtgaagcccaaagagacagagaacaccaagcagcccagcaagagctgccacaagcccaaggccatcgtgcacaccgagaaagtgaacatgatgagcctgaccgtgctgggcctgcggatgctgttcgccaaaaccgtggccgtgaacttcctgctgaccgccaagctgttcttcctcctcaccgcccgcgccaagagaagcggatctggcgtgaagcagaccctgaatttcgacctgctgaagctggctggcgacgtggaatccaacccaggccctactagtatggactggatttggcgcatccttttccttgtcggcgctgctaccggcgcgcattccttcgaactggaacagagcggagccgaagtgaagaaacccggcagcagcgtgcaggtgtcctgcaaagcaagcggcggcaccttctctatgtacggcttcaactgggtgcgccaggctcctggacacggcctggaatggatgggcggcatcatccccatcttcggcacctccaactacgcccagaaattccggggcagagtgaccttcaccgccgaccaggccacaagcaccgcctacatggaactgaccaacctgcggagcgacgacaccgccgtgtattattgcgccagagacttcggccccgactgggaggatggcgacagctacgatggcagcggcagaggcttcttcgacttctggggccagggaacccttgtgaccgtgtcctcaacgcgtgaggacctgaagaacgtgttcccacctgaggtggccgtgttcgagcctagcgaggccgagatcagccacacccagaaagccaccctcgtgtgcctggctaccggcttctaccccgaccatgtggaactgtcttggtgggtcaacggcaaagaggtgcacagcggcgtgtgtaccgacccccagccactgaaagaacagcccgccctgaacgacagccggtactgcctgagcagcagactgagagtgtccgccaccttctggcagaacccccggaaccacttcagatgccaggtgcagttctacggcctgagcgagaacgacgagtggacccaggacagagccaagcccgtgacccagatcgtgtctgccgaagcctggggcagagccgatgatgtgattaagatccactggcaggaaaagaagtccaacaccatcctgggcagccaggaaggcaacaccatgaagaccaacgacacctacatgaagttcagctggctgaccgtgcccgagaagtccctggacaaagaacacagatgcatcgtgcggcacgaaaacaacaagaacggcgtggaccaggaaatcatcttcccacccatcaagaccgatgtgattacaatggaccccaaggacaactgctccaaggacgccaacgataccctgctgctccagctgaccaacaccagcgcctactacatgtacttgttgctgctgctgaagtccgtggtgtacttcgccatcatcacatgctgcctgctgatggctatggtcaagcggaaggacagccgggga

SEQ ID NO: 6568 - DNA, 2553 bp, synthetic construct
  source 1..2553: mol_type = other DNA
atggccttaccagtgaccgccttgctcctgccgctggccttgctgctccacgccgccaggccggaagtgcagctggttgaatctggcggaggactggttcagcctggcggatctctgagactgtcttgtgccgccagcggcttcagcttcagcgacttttggatgagctgggtccgacaggcccctggcaaaggacttgaatgggtcgccacaatcagccaggccggcagcgagaaggactacgtggactctgtgaagggcagattcaccatcagccgggacaacgccaagaagtccctgtacctccagatgaacagcctgagagccgaggacaccgccgtgtactattgtgcctctggcgtgtacagcttcgactacagaggccagggcaccctggtcacagtctcttctggtaccggcggaggcggatctggcggcggaggtagcggtggcggaggatctgaattcgacatccagatgacccagagccccagcagcctgtctgccagcgtgggcgacagagtgaccatcacctgtcaggccagccaggacatcaacaactacctgaactggtatcagcagaagcccggcaaggcccccaagctgctgatctacgacgccagcaatctgcagaccggcgtgcccagcagattttccggctctggcagcggcaccgacttcaccttcaccatcgaggacattgccacctactactgccagcagtacaccttcggccctggcaccaaggtggacatcaaactcgagatccagaaccctgatcctgccgtgtaccagctgcgggatagcaagagcagcgacaagagcgtgtgtctgttcaccgacttcgacagccagaccaacgtgtcccagagcaaggactccgacgtgtacatcaccgataagtgcgtgctggacatgcggagcatggacttcaagagcaactccgccgtggcctggtccaacaagtccgatttcgcctgcgccaacgccttcaacaacagcattatccccgaggacacattcttcccaagccccgagagcagcgactccaccgaccacgtgaagcccaaagagacagagaacaccaagcagcccagcaagagctgccacaagcccaaggccatcgtgcacaccgagaaagtgaacatgatgagcctgaccgtgctgggcctgcggatgctgttcgccaaaaccgtggccgtgaacttcctgctgaccgccaagctgttcttcctcctcaccgcccgcgccaagagaagcggatctggcgtgaagcagaccctgaatttcgacctgctgaagctggctggcgacgtggaatccaacccaggccctactagtatggactggatttggcgcatccttttccttgtcggcgctgctaccggcgcgcattccttcgaagaagtgcaactgctggaatctggcggcggactggtgcagcctggcggatctctgagactgagctgtgccgccagcggcttcacctttagctggtacagcatgacctgggtgcgccaggcccctggcaaaggactggaatgggtgtccagcatcgtgccctggggcgatttcacccagtacgccgatagcgtgaagggccggttcaccatcagccgggacaacagcaagaacaccctgtacctgcagatgaacagcctgcgggccgaggacaccgccgtgtactattgtgccaagggacctggctggggcagcttcgatctgtggggcagaggaacccttgtgaccgtgtccagcacgcgtgaggacctgaagaacgtgttcccacctgaggtggccgtgttcgagcctagcgaggccgagatcagccacacccagaaagccaccctcgtgtgcctggctaccggcttctaccccgaccatgtggaactgtcttggtgggtcaacggcaaagaggtgcacagcggcgtgtgtaccgacccccagccactgaaagaacagcccgccctgaacgacagccggtactgcctgagcagcagactgagagtgtccgccaccttctggcagaacccccggaaccacttcagatgccaggtgcagttctacggcctgagcgagaacgacgagtggacccaggacagagccaagcccgtgacccagatcgtgtctgccgaagcctggggcagagccgatgatgtgattaagatccactggcaggaaaagaagtccaacaccatcctgggcagccaggaaggcaacaccatgaagaccaacgacacctacatgaagttcagctggctgaccgtgcccgagaagtccctggacaaagaacacagatgcatcgtgcggcacgaaaacaacaagaacggcgtggaccaggaaatcatcttcccacccatcaagaccgatgtgattacaatggaccccaaggacaactgctccaaggacgccaacgataccctgctgctccagctgaccaacaccagcgcctactacatgtacttgttgctgctgctgaagtccgtggtgtacttcgccatcatcacatgctgcctgctgatggctatggtcaagcggaaggacagccgggga

SEQ ID NO: 6569 - DNA, 2583 bp, synthetic construct
  source 1..2583: mol_type = other DNA
atggccttaccagtgaccgccttgctcctgccgctggccttgctgctccacgccgccaggccggaagtgcagctggttgaatctggcggaggactggttcagcctggcggatctctgagactgtcttgtgccgccagcggcttcagcttcagcgacttttggatgagctgggtccgacaggcccctggcaaaggacttgaatgggtcgccacaatcagccaggccggcagcgagaaggactacgtggactctgtgaagggcagattcaccatcagccgggacaacgccaagaagtccctgtacctccagatgaacagcctgagagccgaggacaccgccgtgtactattgtgcctctggcgtgtacagcttcgactacagaggccagggcaccctggtcacagtctcttctggtaccggcggaggcggatctggcggcggaggtagcggtggcggaggatctgaattcgacatccagatgacccagagccccagcagcctgtctgccagcgtgggcgacagagtgaccatcacctgtaccgccagcctgagcgtgtccagcacctacctgcactggtatcagcagaagcccggcagcagccccaagctgtggatctacagcaccagcaacctggcctccggcgtgcccagcagattttctggcagcggctctggcaccagctacaccctgaccatcagctccctccagcccgaggacttcgccacctactactgccaccagtaccacagaagccccctgacctttggcggaggcaccaaggtggaaatcaagagactcgagatccagaaccctgatcctgccgtgtaccagctgcgggatagcaagagcagcgacaagagcgtgtgtctgttcaccgacttcgacagccagaccaacgtgtcccagagcaaggactccgacgtgtacatcaccgataagtgcgtgctggacatgcggagcatggacttcaagagcaactccgccgtggcctggtccaacaagtccgatttcgcctgcgccaacgccttcaacaacagcattatccccgaggacacattcttcccaagccccgagagcagcgactccaccgaccacgtgaagcccaaagagacagagaacaccaagcagcccagcaagagctgccacaagcccaaggccatcgtgcacaccgagaaagtgaacatgatgagcctgaccgtgctgggcctgcggatgctgttcgccaaaaccgtggccgtgaacttcctgctgaccgccaagctgttcttcctcctcaccgcccgcgccaagagaagcggatctggcgtgaagcagaccctgaatttcgacctgctgaagctggctggcgacgtggaatccaacccaggccctactagtatggactggatttggcgcatccttttccttgtcggcgctgctaccggcgcgcattccttcgaagaagtgcaactggtggaatctggcggcggactggtgcagcctggcggatctctgagactgagctgtgccgccagcggcttcagcctgaccaaatacggcgtgcactgggtgcgccaggcccctggaaaaggactggaatgggtgggagtgaagtgggctggcggctccaccgactacaacagcgccctgatgagccggttcaccatcagcaaggacaacgccaagaacagcctgtacctccagatgaactccctgcgggccgaggacaccgccgtgtactactgtgccagagatcaccgggacgctatggactactggggccagggaacactcgtgaccgtgtcctctacgcgtgaggacctgaagaacgtgttcccacctgaggtggccgtgttcgagcctagcgaggccgagatcagccacacccagaaagccaccctcgtgtgcctggctaccggcttctaccccgaccatgtggaactgtcttggtgggtcaacggcaaagaggtgcacagcggcgtgtgtaccgacccccagccactgaaagaacagcccgccctgaacgacagccggtactgcctgagcagcagactgagagtgtccgccaccttctggcagaacccccggaaccacttcagatgccaggtgcagttctacggcctgagcgagaacgacgagtggacccaggacagagccaagcccgtgacccagatcgtgtctgccgaagcctggggcagagccgatgatgtgattaagatccactggcaggaaaagaagtccaacaccatcctgggcagccaggaaggcaacaccatgaagaccaacgacacctacatgaagttcagctggctgaccgtgcccgagaagtccctggacaaagaacacagatgcatcgtgcggcacgaaaacaacaagaacggcgtggaccaggaaatcatcttcccacccatcaagaccgatgtgattacaatggaccccaaggacaactgctccaaggacgccaacgataccctgctgctccagctgaccaacaccagcgcctactacatgtacttgttgctgctgctgaagtccgtggtgtacttcgccatcatcacatgctgcctgctgatggctatggtcaagcggaaggacagccgggga

SEQ ID NO: 6570 - DNA, 2595 bp, synthetic construct
  source 1..2595: mol_type = other DNA
atggccttaccagtgaccgccttgctcctgccgctggccttgctgctccacgccgccaggccggaagtgcagctggttgaatctggcggaggactggttcagcctggcggatctctgagactgtcttgtgccgccagcggcttcagcttcagcgacttttggatgagctgggtccgacaggcccctggcaaaggacttgaatgggtcgccacaatcagccaggccggcagcgagaaggactacgtggactctgtgaagggcagattcaccatcagccgggacaacgccaagaagtccctgtacctccagatgaacagcctgagagccgaggacaccgccgtgtactattgtgcctctggcgtgtacagcttcgactacagaggccagggcaccctggtcacagtctcttctggtaccggcggaggcggatctggcggcggaggtagcggtggcggaggatctgaattcgacatccagatgacccagagccccagcagcctgtctgccagcgtgggcgacagagtgaccatcacatgcaaggccagccaggacgtgggaacagccgtggcctggtatcagcagaagcctggcaaggcccccaagctgctgatctacagcgccagctacagatccaccggcgtgcccagcagattttccggctctggcagcggcaccgacttcaccctgaccatctctagcctccagcccgaggacttcgccacctactactgccagcaccactactccgccccctggacatttggcggaggcaccaaggtggaaatcaagctcgagatccagaaccctgatcctgccgtgtaccagctgcgggatagcaagagcagcgacaagagcgtgtgtctgttcaccgacttcgacagccagaccaacgtgtcccagagcaaggactccgacgtgtacatcaccgataagtgcgtgctggacatgcggagcatggacttcaagagcaactccgccgtggcctggtccaacaagtccgatttcgcctgcgccaacgccttcaacaacagcattatccccgaggacacattcttcccaagccccgagagcagcgactccaccgaccacgtgaagcccaaagagacagagaacaccaagcagcccagcaagagctgccacaagcccaaggccatcgtgcacaccgagaaagtgaacatgatgagcctgaccgtgctgggcctgcggatgctgttcgccaaaaccgtggccgtgaacttcctgctgaccgccaagctgttcttcctcctcaccgcccgcgccaagagaagcggatctggcgtgaagcagaccctgaatttcgacctgctgaagctggctggcgacgtggaatccaacccaggccctactagtatggactggatttggcgcatccttttccttgtcggcgctgctaccggcgcgcattccttcgaagaagtgcaactggtggaatcaggcggcggactggtgcagcctggcggatctctgagactgagctgtgccgccagcggcttcaccttcagcagaaacggcatgagctgggtgcgccaggcccctggaaaaggactggaatgggtggcaaccgtgtccagcggcggcagctacatctactacgccgacagcgtgaagggccggttcaccatctccagagacaacgccaagaacagcctgtacctccagatgaactccctgcgggccgaggacaccgccgtgtactattgtgccagacagggcaccaccgccctggctaccagattcttcgatgtgtggggccagggcaccctcgtgaccgtgtcatctacgcgtgaggacctgaagaacgtgttcccacctgaggtggccgtgttcgagcctagcgaggccgagatcagccacacccagaaagccaccctcgtgtgcctggctaccggcttctaccccgaccatgtggaactgtcttggtgggtcaacggcaaagaggtgcacagcggcgtgtgtaccgacccccagccactgaaagaacagcccgccctgaacgacagccggtactgcctgagcagcagactgagagtgtccgccaccttctggcagaacccccggaaccacttcagatgccaggtgcagttctacggcctgagcgagaacgacgagtggacccaggacagagccaagcccgtgacccagatcgtgtctgccgaagcctggggcagagccgatgatgtgattaagatccactggcaggaaaagaagtccaacaccatcctgggcagccaggaaggcaacaccatgaagaccaacgacacctacatgaagttcagctggctgaccgtgcccgagaagtccctggacaaagaacacagatgcatcgtgcggcacgaaaacaacaagaacggcgtggaccaggaaatcatcttcccacccatcaagaccgatgtgattacaatggaccccaaggacaactgctccaaggacgccaacgataccctgctgctccagctgaccaacaccagcgcctactacatgtacttgttgctgctgctgaagtccgtggtgtacttcgccatcatcacatgctgcctgctgatggctatggtcaagcggaaggacagccgggga

SEQ ID NO: 6571 - DNA, 2583 bp, synthetic construct
  source 1..2583: mol_type = other DNA
atggccttaccagtgaccgccttgctcctgccgctggccttgctgctccacgccgccaggccggaagtgcagctggttgaatctggcggaggactggttcagcctggcggatctctgagactgtcttgtgccgccagcggcttcagcttcagcgacttttggatgagctgggtccgacaggcccctggcaaaggacttgaatgggtcgccacaatcagccaggccggcagcgagaaggactacgtggactctgtgaagggcagattcaccatcagccgggacaacgccaagaagtccctgtacctccagatgaacagcctgagagccgaggacaccgccgtgtactattgtgcctctggcgtgtacagcttcgactacagaggccagggcaccctggtcacagtctcttctggtaccggcggaggcggatctggcggcggaggtagcggtggcggaggatctgaattcgacatccagatgacccagagcccccctagcctgtctgcctctgtgggcggcaaagtgaccatcacatgcaaggccagccaggacatcgaccgctacatggcctggtatcaggacaagcccggcaagggacccaagctgctgatccacgataccagcaccctccagcccggcatccccagcagattttctggcagcggctccggcagagactacagcttcagcatcagcaacctggaacccgaggacattgccacctactactgcctccagtacgacaacctgtggaccttcggcggaggcaccaagctggaaatcaagagactcgagatccagaaccctgatcctgccgtgtaccagctgcgggatagcaagagcagcgacaagagcgtgtgtctgttcaccgacttcgacagccagaccaacgtgtcccagagcaaggactccgacgtgtacatcaccgataagtgcgtgctggacatgcggagcatggacttcaagagcaactccgccgtggcctggtccaacaagtccgatttcgcctgcgccaacgccttcaacaacagcattatccccgaggacacattcttcccaagccccgagagcagcgactccaccgaccacgtgaagcccaaagagacagagaacaccaagcagcccagcaagagctgccacaagcccaaggccatcgtgcacaccgagaaagtgaacatgatgagcctgaccgtgctgggcctgcggatgctgttcgccaaaaccgtggccgtgaacttcctgctgaccgccaagctgttcttcctcctcaccgcccgcgccaagagaagcggatctggcgtgaagcagaccctgaatttcgacctgctgaagctggctggcgacgtggaatccaacccaggccctactagtatggactggatttggcgcatccttttccttgtcggcgctgctaccggcgcgcattccttcgaacaggtgcaactggtgcagagcggagccgagcttgtgaagcctggcgcttccgtgaagatgagctgcaaagccagcggctacatcttcaccaactacaacatccactgggtcaagaagtccccaggccagggcctggaatggatcggagccatctaccccggaaacggcgacgccccttacagccagaagttccaggacagagccaccctgaccgccgacaccagcagcagcaccacctacatggaactgagcagcctgaccagcgaggacagcgccgtgtactattgcgtgcgggccaactgggatgtggccttcgcctattggggccagggcacactggtgtccgtgtcctctacgcgtgaggacctgaagaacgtgttcccacctgaggtggccgtgttcgagcctagcgaggccgagatcagccacacccagaaagccaccctcgtgtgcctggctaccggcttctaccccgaccatgtggaactgtcttggtgggtcaacggcaaagaggtgcacagcggcgtgtgtaccgacccccagccactgaaagaacagcccgccctgaacgacagccggtactgcctgagcagcagactgagagtgtccgccaccttctggcagaacccccggaaccacttcagatgccaggtgcagttctacggcctgagcgagaacgacgagtggacccaggacagagccaagcccgtgacccagatcgtgtctgccgaagcctggggcagagccgatgatgtgattaagatccactggcaggaaaagaagtccaacaccatcctgggcagccaggaaggcaacaccatgaagaccaacgacacctacatgaagttcagctggctgaccgtgcccgagaagtccctggacaaagaacacagatgcatcgtgcggcacgaaaacaacaagaacggcgtggaccaggaaatcatcttcccacccatcaagaccgatgtgattacaatggaccccaaggacaactgctccaaggacgccaacgataccctgctgctccagctgaccaacaccagcgcctactacatgtacttgttgctgctgctgaagtccgtggtgtacttcgccatcatcacatgctgcctgctgatggctatggtcaagcggaaggacagccgggga

SEQ ID NO: 6572 - DNA, 2586 bp, synthetic construct
  source 1..2586: mol_type = other DNA
atggccttaccagtgaccgccttgctcctgccgctggccttgctgctccacgccgccaggccggaagtgcagctggttgaatctggcggaggactggttcagcctggcggatctctgagactgtcttgtgccgccagcggcttcagcttcagcgacttttggatgagctgggtccgacaggcccctggcaaaggacttgaatgggtcgccacaatcagccaggccggcagcgagaaggactacgtggactctgtgaagggcagattcaccatcagccgggacaacgccaagaagtccctgtacctccagatgaacagcctgagagccgaggacaccgccgtgtactattgtgcctctggcgtgtacagcttcgactacagaggccagggcaccctggtcacagtctcttctggtaccggcggaggcggatctggcggcggaggtagcggtggcggaggatctgaattcgacatccagatgacccagagccctgccagcctgtctgcctctgtgggcgagacagtgaccatcacctgtcgggtgtccggcaacatccacaactacctggcctggtatcagcagaagcagggcaagagcccccaactgctggtgtacaacgccaagaccctggccgatggcgtgcccagcagattttctggctctggcagcggcacccagtacagcctgaagatcaacagcctccagcccgaggacttcggcagctactactgccagcacttctggtccaacccctacaccttcggcggaggcaccaagctggaaatcaagctcgagatccagaaccctgatcctgccgtgtaccagctgcgggatagcaagagcagcgacaagagcgtgtgtctgttcaccgacttcgacagccagaccaacgtgtcccagagcaaggactccgacgtgtacatcaccgataagtgcgtgctggacatgcggagcatggacttcaagagcaactccgccgtggcctggtccaacaagtccgatttcgcctgcgccaacgccttcaacaacagcattatccccgaggacacattcttcccaagccccgagagcagcgactccaccgaccacgtgaagcccaaagagacagagaacaccaagcagcccagcaagagctgccacaagcccaaggccatcgtgcacaccgagaaagtgaacatgatgagcctgaccgtgctgggcctgcggatgctgttcgccaaaaccgtggccgtgaacttcctgctgaccgccaagctgttcttcctcctcaccgcccgcgccaagagaagcggatctggcgtgaagcagaccctgaatttcgacctgctgaagctggctggcgacgtggaatccaacccaggccctactagtatggactggatttggcgcatccttttccttgtcggcgctgctaccggcgcgcattccttcgaacaggtgcaactccagcagtctggcgcttccgtgaaggtgtcctgcaaggccagcgaactcgtgcggcctggcacaggctacgccttcaccaattacctgatcgagtgggtcaagcagaggcccggacagggcctggaatggatcggagtgattaacccaggcagcggcggcaccaactacaacgagaagttcaagggcaaggccaccctgaccgccgacaagagcagcagcacagcctacatgcaactgagcagcctgaccagcgacgacagcgccgtgtacttctgcgcccggtacagaagctacgactggtacttcgacgtgtggggagccggcaccaccgtgacagtgtcatctacgcgtgaggacctgaagaacgtgttcccacctgaggtggccgtgttcgagcctagcgaggccgagatcagccacacccagaaagccaccctcgtgtgcctggctaccggcttctaccccgaccatgtggaactgtcttggtgggtcaacggcaaagaggtgcacagcggcgtgtgtaccgacccccagccactgaaagaacagcccgccctgaacgacagccggtactgcctgagcagcagactgagagtgtccgccaccttctggcagaacccccggaaccacttcagatgccaggtgcagttctacggcctgagcgagaacgacgagtggacccaggacagagccaagcccgtgacccagatcgtgtctgccgaagcctggggcagagccgatgatgtgattaagatccactggcaggaaaagaagtccaacaccatcctgggcagccaggaaggcaacaccatgaagaccaacgacacctacatgaagttcagctggctgaccgtgcccgagaagtccctggacaaagaacacagatgcatcgtgcggcacgaaaacaacaagaacggcgtggaccaggaaatcatcttcccacccatcaagaccgatgtgattacaatggaccccaaggacaactgctccaaggacgccaacgataccctgctgctccagctgaccaacaccagcgcctactacatgtacttgttgctgctgctgaagtccgtggtgtacttcgccatcatcacatgctgcctgctgatggctatggtcaagcggaaggacagccgggga

SEQ ID NO: 6573 - DNA, 2583 bp, synthetic construct
  source 1..2583: mol_type = other DNA
atggccttaccagtgaccgccttgctcctgccgctggccttgctgctccacgccgccaggccggaagtgcagctggttgaatctggcggaggactggttcagcctggcggatctctgagactgtcttgtgccgccagcggcttcagcttcagcgacttttggatgagctgggtccgacaggcccctggcaaaggacttgaatgggtcgccacaatcagccaggccggcagcgagaaggactacgtggactctgtgaagggcagattcaccatcagccgggacaacgccaagaagtccctgtacctccagatgaacagcctgagagccgaggacaccgccgtgtactattgtgcctctggcgtgtacagcttcgactacagaggccagggcaccctggtcacagtctcttctggtaccggcggaggcggatctggcggcggaggtagcggtggcggaggatctgaattcgacatccagatgacccagagcttcagcagcctgagcgccagcgtgggcgacagagtgaccatcacctgtagagccagccaggacatcagcaactacctgaactggtatcagcagaagcccggcaaggcccccaagctgctgatctactacaccagcagactgcacagcggcgtgcccagcagattttctggcagcggctccggcaccgactacaccctgacaatcagctccctgcagcccgaggacttcgctacctacttctgtcagcaaggcaacaccctgccctggacctttggcggaggcaccaagctggaaatcaagagactcgagatccagaaccctgatcctgccgtgtaccagctgcgggatagcaagagcagcgacaagagcgtgtgtctgttcaccgacttcgacagccagaccaacgtgtcccagagcaaggactccgacgtgtacatcaccgataagtgcgtgctggacatgcggagcatggacttcaagagcaactccgccgtggcctggtccaacaagtccgatttcgcctgcgccaacgccttcaacaacagcattatccccgaggacacattcttcccaagccccgagagcagcgactccaccgaccacgtgaagcccaaagagacagagaacaccaagcagcccagcaagagctgccacaagcccaaggccatcgtgcacaccgagaaagtgaacatgatgagcctgaccgtgctgggcctgcggatgctgttcgccaaaaccgtggccgtgaacttcctgctgaccgccaagctgttcttcctcctcaccgcccgcgccaagagaagcggatctggcgtgaagcagaccctgaatttcgacctgctgaagctggctggcgacgtggaatccaacccaggccctactagtatggactggatttggcgcatccttttccttgtcggcgctgctaccggcgcgcattccttcgaagaagtgcaactggtgcagtccggcggagggctggtgcagagcggaggatctctgagactgagctgcagagccagcggctacaccttcacccggtactggatgctgtgggtgcgccagaggccaggcaagggactggaatgggtggccgagatcaacccccggaacgaccggaccaactacaacgagaagttcaagacccggttcaccatcagcgtggacagaagcaagaacaccctgtacctgcagatggacagcctgcgggccgaggataccgccgtgtacttttgtgctctgggaggcggctacgctatggactactggggccagggaacccttgtgaccgtgtcctctacgcgtgaggacctgaagaacgtgttcccacctgaggtggccgtgttcgagcctagcgaggccgagatcagccacacccagaaagccaccctcgtgtgcctggctaccggcttctaccccgaccatgtggaactgtcttggtgggtcaacggcaaagaggtgcacagcggcgtgtgtaccgacccccagccactgaaagaacagcccgccctgaacgacagccggtactgcctgagcagcagactgagagtgtccgccaccttctggcagaacccccggaaccacttcagatgccaggtgcagttctacggcctgagcgagaacgacgagtggacccaggacagagccaagcccgtgacccagatcgtgtctgccgaagcctggggcagagccgatgatgtgattaagatccactggcaggaaaagaagtccaacaccatcctgggcagccaggaaggcaacaccatgaagaccaacgacacctacatgaagttcagctggctgaccgtgcccgagaagtccctggacaaagaacacagatgcatcgtgcggcacgaaaacaacaagaacggcgtggaccaggaaatcatcttcccacccatcaagaccgatgtgattacaatggaccccaaggacaactgctccaaggacgccaacgataccctgctgctccagctgaccaacaccagcgcctactacatgtacttgttgctgctgctgaagtccgtggtgtacttcgccatcatcacatgctgcctgctgatggctatggtcaagcggaaggacagccgggga

SEQ ID NO: 6574 - DNA, 2586 bp, synthetic construct
  source 1..2586: mol_type = other DNA
atggccttaccagtgaccgccttgctcctgccgctggccttgctgctccacgccgccaggccggaagtgcagctggttgaatctggcggaggactggttcagcctggcggatctctgagactgtcttgtgccgccagcggcttcagcttcagcgacttttggatgagctgggtccgacaggcccctggcaaaggacttgaatgggtcgccacaatcagccaggccggcagcgagaaggactacgtggactctgtgaagggcagattcaccatcagccgggacaacgccaagaagtccctgtacctccagatgaacagcctgagagccgaggacaccgccgtgtactattgtgcctctggcgtgtacagcttcgactacagaggccagggcaccctggtcacagtctcttctggtaccggcggaggcggatctggcggcggaggtagcggtggcggaggatctgaattcgacatccagatgacacagtctccggcgtcactgtccgcctccgtgggggagactgtgactattatttgtagggcatcagttaacatctactcttatttggcctggtaccagcagaagcaaggcaagagtcctcagctgctggtgtataatgcgaagatcctggcagagggcgtgccgagccggttctccggcagcggctcaggtacccaattttccctcaagatcaattcactgcagccagaggactttggcagttactattgtcaacaccactacggcacattcactttcgggtccggtacaaaattggagattaagcgactcgagatccagaaccctgatcctgccgtgtaccagctgcgggatagcaagagcagcgacaagagcgtgtgtctgttcaccgacttcgacagccagaccaacgtgtcccagagcaaggactccgacgtgtacatcaccgataagtgcgtgctggacatgcggagcatggacttcaagagcaactccgccgtggcctggtccaacaagtccgatttcgcctgcgccaacgccttcaacaacagcattatccccgaggacacattcttcccaagccccgagagcagcgactccaccgaccacgtgaagcccaaagagacagagaacaccaagcagcccagcaagagctgccacaagcccaaggccatcgtgcacaccgagaaagtgaacatgatgagcctgaccgtgctgggcctgcggatgctgttcgccaaaaccgtggccgtgaacttcctgctgaccgccaagctgttcttcctcctcaccgcccgcgccaagagaagcggatctggcgtgaagcagaccctgaatttcgacctgctgaagctggctggcgacgtggaatccaacccaggccctactagtatggactggatttggcgcatccttttccttgtcggcgctgctaccggcgcgcattccttcgaacaggtacagttgaaagaaagcgggcctggactggtagcgccttcccaatctctctccatcacgtgcaccatctctggcttctccctgacttcctatggagttcactgggtgaggcagccccccggcaagggactggaatggctggtcgtcatctggtccgacgggtccacaacctacaactccgctctgaaaagtcggctctctatttctaaagataatagcaagagccaggtgtttctgaaaatgaactctctgcagaccgatgatacggccatttactactgcgcttcacactatggctcaaccttggcattcgcttcctggggccacggaacactggtgaccgtttccgcagccacgcgtgaggacctgaagaacgtgttcccacctgaggtggccgtgttcgagcctagcgaggccgagatcagccacacccagaaagccaccctcgtgtgcctggctaccggcttctaccccgaccatgtggaactgtcttggtgggtcaacggcaaagaggtgcacagcggcgtgtgtaccgacccccagccactgaaagaacagcccgccctgaacgacagccggtactgcctgagcagcagactgagagtgtccgccaccttctggcagaacccccggaaccacttcagatgccaggtgcagttctacggcctgagcgagaacgacgagtggacccaggacagagccaagcccgtgacccagatcgtgtctgccgaagcctggggcagagccgatgatgtgattaagatccactggcaggaaaagaagtccaacaccatcctgggcagccaggaaggcaacaccatgaagaccaacgacacctacatgaagttcagctggctgaccgtgcccgagaagtccctggacaaagaacacagatgcatcgtgcggcacgaaaacaacaagaacggcgtggaccaggaaatcatcttcccacccatcaagaccgatgtgattacaatggaccccaaggacaactgctccaaggacgccaacgataccctgctgctccagctgaccaacaccagcgcctactacatgtacttgttgctgctgctgaagtccgtggtgtacttcgccatcatcacatgctgcctgctgatggctatggtcaagcggaaggacagccgggga

SEQ ID NO: 6575 - DNA, 2610 bp, synthetic construct
  source 1..2610: mol_type = other DNA
atggccttaccagtgaccgccttgctcctgccgctggccttgctgctccacgccgccaggccggaagtgcagctggttgaatctggcggaggactggttcagcctggcggatctctgagactgtcttgtgccgccagcggcttcagcttcagcgacttttggatgagctgggtccgacaggcccctggcaaaggacttgaatgggtcgccacaatcagccaggccggcagcgagaaggactacgtggactctgtgaagggcagattcaccatcagccgggacaacgccaagaagtccctgtacctccagatgaacagcctgagagccgaggacaccgccgtgtactattgtgcctctggcgtgtacagcttcgactacagaggccagggcaccctggtcacagtctcttctggtaccggcggaggcggatctggcggcggaggtagcggtggcggaggatctgaattcgacattgtgatgacccagtctcacaaattcatgtccacatcagtaggagacagggtcagcgtcacctgcaaggccagtcagaatgtgggtaataatgtagcctggtatcaacagaaaccagggcaatctcctaaagtactgatttactcggcatcctaccggtacagtggagtccctgatcgcttcacaggcagtggatctgggacagatttcactctcaccatcagtaatgtgcagtctgaagacttggcagagtatttctgtcagcaatataacacctatccattcacgttcggctcggggacaaagttggaaataaaactcgagatccagaaccctgatcctgccgtgtaccagctgcgggatagcaagagcagcgacaagagcgtgtgtctgttcaccgacttcgacagccagaccaacgtgtcccagagcaaggactccgacgtgtacatcaccgataagtgcgtgctggacatgcggagcatggacttcaagagcaactccgccgtggcctggtccaacaagtccgatttcgcctgcgccaacgccttcaacaacagcattatccccgaggacacattcttcccaagccccgagagcagcgactccaccgaccacgtgaagcccaaagagacagagaacaccaagcagcccagcaagagctgccacaagcccaaggccatcgtgcacaccgagaaagtgaacatgatgagcctgaccgtgctgggcctgcggatgctgttcgccaaaaccgtggccgtgaacttcctgctgaccgccaagctgttcttcctcctcaccgcccgcgccaagagaagcggatctggcgtgaagcagaccctgaatttcgacctgctgaagctggctggcgacgtggaatccaacccaggccctactagtatggactggatttggcgcatccttttccttgtcggcgctgctaccggcgcgcattccttcgaagaggtacagctggaggaaagcggtggaggactggtgcaacctggagggtctatgaagctctcttgcgtagcttctgggttcacgttctccaattactggatgaactgggtgcggcagtcccccgagaaaggcctggaatgggtagcagaaattcggttcaagtcccataactatgctacacactttgccgagtctgtcaaaggccggttcactattagtcgagacgacagcaagtcttcagtctacctgcagatgaataacttgcgggcagaggacacaggtatctactactgcaccaggagaatcggcaactccgactatgactggtggtactttgacgtctggggagcaggcaccagcgtgacggtgagttcagcctcaacgcgtgaggacctgaagaacgtgttcccacctgaggtggccgtgttcgagcctagcgaggccgagatcagccacacccagaaagccaccctcgtgtgcctggctaccggcttctaccccgaccatgtggaactgtcttggtgggtcaacggcaaagaggtgcacagcggcgtgtgtaccgacccccagccactgaaagaacagcccgccctgaacgacagccggtactgcctgagcagcagactgagagtgtccgccaccttctggcagaacccccggaaccacttcagatgccaggtgcagttctacggcctgagcgagaacgacgagtggacccaggacagagccaagcccgtgacccagatcgtgtctgccgaagcctggggcagagccgatgatgtgattaagatccactggcaggaaaagaagtccaacaccatcctgggcagccaggaaggcaacaccatgaagaccaacgacacctacatgaagttcagctggctgaccgtgcccgagaagtccctggacaaagaacacagatgcatcgtgcggcacgaaaacaacaagaacggcgtggaccaggaaatcatcttcccacccatcaagaccgatgtgattacaatggaccccaaggacaactgctccaaggacgccaacgataccctgctgctccagctgaccaacaccagcgcctactacatgtacttgttgctgctgctgaagtccgtggtgtacttcgccatcatcacatgctgcctgctgatggctatggtcaagcggaaggacagccgggga

SEQ ID NO: 6576 - DNA, 2589 bp, synthetic construct
  source 1..2589: mol_type = other DNA
atggccttaccagtgaccgccttgctcctgccgctggccttgctgctccacgccgccaggccggaagtgcagctggttgaatctggcggaggactggttcagcctggcggatctctgagactgtcttgtgccgccagcggcttcagcttcagcgacttttggatgagctgggtccgacaggcccctggcaaaggacttgaatgggtcgccacaatcagccaggccggcagcgagaaggactacgtggactctgtgaagggcagattcaccatcagccgggacaacgccaagaagtccctgtacctccagatgaacagcctgagagccgaggacaccgccgtgtactattgtgcctctggcgtgtacagcttcgactacagaggccagggcaccctggtcacagtctcttctggtaccggcggaggcggatctggcggcggaggtagcggtggcggaggatctgaattcgaccagatcgtgctgacccagtcccccgctattatgtccgcatcaccgggcgaaaaagtgacgatctcctgtagcgcttcatctagcgtctcctacatgtattggtatcaacagaaacctgggtctagcccaaagccgtggatctacagaaccagtaaccttgccagtggggtgccagcccgcttcagcggtagtggcagtggaacttcctatagcctcacaataagcaacatggaggctgaagatgccgctgcctattactgccagcagtaccacagttacccaaccacgttcggcgggggaactaagctcgaagtaaaactcgagatccagaaccctgatcctgccgtgtaccagctgcgggatagcaagagcagcgacaagagcgtgtgtctgttcaccgacttcgacagccagaccaacgtgtcccagagcaaggactccgacgtgtacatcaccgataagtgcgtgctggacatgcggagcatggacttcaagagcaactccgccgtggcctggtccaacaagtccgatttcgcctgcgccaacgccttcaacaacagcattatccccgaggacacattcttcccaagccccgagagcagcgactccaccgaccacgtgaagcccaaagagacagagaacaccaagcagcccagcaagagctgccacaagcccaaggccatcgtgcacaccgagaaagtgaacatgatgagcctgaccgtgctgggcctgcggatgctgttcgccaaaaccgtggccgtgaacttcctgctgaccgccaagctgttcttcctcctcaccgcccgcgccaagagaagcggatctggcgtgaagcagaccctgaatttcgacctgctgaagctggctggcgacgtggaatccaacccaggccctactagtatggactggatttggcgcatccttttccttgtcggcgctgctaccggcgcgcattccttcgaagaggtgcagctggtggaatctgggggcggcctggtccaacctaagggatcactcaagctctcttgtgcggccagcggattctctttcaatacctatgctatgaattgggtgagacaggcgcccggaaagggcctcgaatggatagcccatatccggtcaaaatcaaacaatttcgcaacctactatgcggactccgtgaaggaccgattttccatctcccgagatgcctccgagaatattctgttcctgcagatgaataacctcaagacagaggacaccgccatgtactactgtgtgcgccagggcggtgactttcccatggattactgggggcaggggaccagcgtgaccgtgagctctacgcgtgaggacctgaagaacgtgttcccacctgaggtggccgtgttcgagcctagcgaggccgagatcagccacacccagaaagccaccctcgtgtgcctggctaccggcttctaccccgaccatgtggaactgtcttggtgggtcaacggcaaagaggtgcacagcggcgtgtgtaccgacccccagccactgaaagaacagcccgccctgaacgacagccggtactgcctgagcagcagactgagagtgtccgccaccttctggcagaacccccggaaccacttcagatgccaggtgcagttctacggcctgagcgagaacgacgagtggacccaggacagagccaagcccgtgacccagatcgtgtctgccgaagcctggggcagagccgatgatgtgattaagatccactggcaggaaaagaagtccaacaccatcctgggcagccaggaaggcaacaccatgaagaccaacgacacctacatgaagttcagctggctgaccgtgcccgagaagtccctggacaaagaacacagatgcatcgtgcggcacgaaaacaacaagaacggcgtggaccaggaaatcatcttcccacccatcaagaccgatgtgattacaatggaccccaaggacaactgctccaaggacgccaacgataccctgctgctccagctgaccaacaccagcgcctactacatgtacttgttgctgctgctgaagtccgtggtgtacttcgccatcatcacatgctgcctgctgatggctatggtcaagcggaaggacagccgggga

SEQ ID NO: 6577 - DNA, 2586 bp, synthetic construct
  source 1..2586: mol_type = other DNA
atggccttaccagtgaccgccttgctcctgccgctggccttgctgctccacgccgccaggccggaagtgcagctggttgaatctggcggaggactggttcagcctggcggatctctgagactgtcttgtgccgccagcggcttcagcttcagcgacttttggatgagctgggtccgacaggcccctggcaaaggacttgaatgggtcgccacaatcagccaggccggcagcgagaaggactacgtggactctgtgaagggcagattcaccatcagccgggacaacgccaagaagtccctgtacctccagatgaacagcctgagagccgaggacaccgccgtgtactattgtgcctctggcgtgtacagcttcgactacagaggccagggcaccctggtcacagtctcttctggtaccggcggaggcggatctggcggcggaggtagcggtggcggaggatctgaattcgacgacatccagatgacccagagcagcagcagcttcagcgtgagcctgggcgacagagtgaccatcacctgcatggccagcgaggacatctacatcagactggcctggtaccagcagaagcccggcaacgcccccagactgctgatcagcgccgccaccagcctggagaccggcgtgcccagcagattcagcggcagcggcagcggcaaggactacaccctgagcatcaccagcctgcagaccgaggacgtgggcacctactactgccagcagtactggagcagcccctggaccttcggcggcggcaccaagctggagatcaacctcgagatccagaaccctgatcctgccgtgtaccagctgcgggatagcaagagcagcgacaagagcgtgtgtctgttcaccgacttcgacagccagaccaacgtgtcccagagcaaggactccgacgtgtacatcaccgataagtgcgtgctggacatgcggagcatggacttcaagagcaactccgccgtggcctggtccaacaagtccgatttcgcctgcgccaacgccttcaacaacagcattatccccgaggacacattcttcccaagccccgagagcagcgactccaccgaccacgtgaagcccaaagagacagagaacaccaagcagcccagcaagagctgccacaagcccaaggccatcgtgcacaccgagaaagtgaacatgatgagcctgaccgtgctgggcctgcggatgctgttcgccaaaaccgtggccgtgaacttcctgctgaccgccaagctgttcttcctcctcaccgcccgcgccaagagaagcggatctggcgtgaagcagaccctgaatttcgacctgctgaagctggctggcgacgtggaatccaacccaggccctactagtatggactggatttggcgcatccttttccttgtcggcgctgctaccggcgcgcattccttcgaagacgtgcagctgcaggagagcggccccggcctggtgaagcccagccagagcctgagcctgacctgcaccgtgaccggctacagcatcaccagcgactacacctggaactggatcagacagttccccggcaacaagctggagtggatgggctacatcacctacagcggcagcaccagctacaaccccagcctgaagagcagaaacagcatcaccagagacaccagcaagaaccagttcttcctgcagctgaacagcgtgaccaccgaggacaccgccacctactactgcgccagactgggcagaagatacacaatggactactggggccagggcaccagcgtgaccgtgagcagcacgcgtgaggacctgaagaacgtgttcccacctgaggtggccgtgttcgagcctagcgaggccgagatcagccacacccagaaagccaccctcgtgtgcctggctaccggcttctaccccgaccatgtggaactgtcttggtgggtcaacggcaaagaggtgcacagcggcgtgtgtaccgacccccagccactgaaagaacagcccgccctgaacgacagccggtactgcctgagcagcagactgagagtgtccgccaccttctggcagaacccccggaaccacttcagatgccaggtgcagttctacggcctgagcgagaacgacgagtggacccaggacagagccaagcccgtgacccagatcgtgtctgccgaagcctggggcagagccgatgatgtgattaagatccactggcaggaaaagaagtccaacaccatcctgggcagccaggaaggcaacaccatgaagaccaacgacacctacatgaagttcagctggctgaccgtgcccgagaagtccctggacaaagaacacagatgcatcgtgcggcacgaaaacaacaagaacggcgtggaccaggaaatcatcttcccacccatcaagaccgatgtgattacaatggaccccaaggacaactgctccaaggacgccaacgataccctgctgctccagctgaccaacaccagcgcctactacatgtacttgttgctgctgctgaagtccgtggtgtacttcgccatcatcacatgctgcctgctgatggctatggtcaagcggaaggacagccgggga

SEQ ID NO: 6578 - DNA, 2595 bp, synthetic construct
  source 1..2595: mol_type = other DNA
atggccttaccagtgaccgccttgctcctgccgctggccttgctgctccacgccgccaggccggaagtgcagctggttgaatctggcggaggactggttcagcctggcggatctctgagactgtcttgtgccgccagcggcttcagcttcagcgacttttggatgagctgggtccgacaggcccctggcaaaggacttgaatgggtcgccacaatcagccaggccggcagcgagaaggactacgtggactctgtgaagggcagattcaccatcagccgggacaacgccaagaagtccctgtacctccagatgaacagcctgagagccgaggacaccgccgtgtactattgtgcctctggcgtgtacagcttcgactacagaggccagggcaccctggtcacagtctcttctggtaccggcggaggcggatctggcggcggaggtagcggtggcggaggatctgaattcgacgacatccagatgacccagagccccagcagcctgtctgccagcgtgggcgacagagtgaccatcacctgtagagccagccagagcatcagcagctacctgaactggtatcagcagaagcccggcaaggcccccaaactgctgatctacgacgccagcaacctggaaaccggcgtgcccagcagattttccggcagcggctctggcaccgacttcaccttcaccatcagctccctccagcccgaggacattgccacctactactgccagcagtacgacaacctgcccctgacctttggcggaggcaccaaggtggacatcaagagactcgagatccagaaccctgatcctgccgtgtaccagctgcgggatagcaagagcagcgacaagagcgtgtgtctgttcaccgacttcgacagccagaccaacgtgtcccagagcaaggactccgacgtgtacatcaccgataagtgcgtgctggacatgcggagcatggacttcaagagcaactccgccgtggcctggtccaacaagtccgatttcgcctgcgccaacgccttcaacaacagcattatccccgaggacacattcttcccaagccccgagagcagcgactccaccgaccacgtgaagcccaaagagacagagaacaccaagcagcccagcaagagctgccacaagcccaaggccatcgtgcacaccgagaaagtgaacatgatgagcctgaccgtgctgggcctgcggatgctgttcgccaaaaccgtggccgtgaacttcctgctgaccgccaagctgttcttcctcctcaccgcccgcgccaagagaagcggatctggcgtgaagcagaccctgaatttcgacctgctgaagctggctggcgacgtggaatccaacccaggccctactagtatggactggatttggcgcatccttttccttgtcggcgctgctaccggcgcgcattccttcgaacaggtgcaactggtggaatctggcggcggagtggtgcagcctggcagaagcctgagactgagctgtgccgccagcggcttcacctttagcagctacgccatgcactgggtgcgccaggcccctggaaaaggcctggaatgggtggccgtgatctcctacgacggctccaacaagtattacgccgacagcgtgaagggccggttcaccatctccagagacaacagcaagaacaccctgtacctccagatgaacagcctgcgggccgaggacaccgccgtgtactattgtgccagggctcacaacagcagctcttggagcttcgactactggggccagggcaccctcgtgaccgtgtcatctacgcgtgaggacctgaagaacgtgttcccacctgaggtggccgtgttcgagcctagcgaggccgagatcagccacacccagaaagccaccctcgtgtgcctggctaccggcttctaccccgaccatgtggaactgtcttggtgggtcaacggcaaagaggtgcacagcggcgtgtgtaccgacccccagccactgaaagaacagcccgccctgaacgacagccggtactgcctgagcagcagactgagagtgtccgccaccttctggcagaacccccggaaccacttcagatgccaggtgcagttctacggcctgagcgagaacgacgagtggacccaggacagagccaagcccgtgacccagatcgtgtctgccgaagcctggggcagagccgatgatgtgattaagatccactggcaggaaaagaagtccaacaccatcctgggcagccaggaaggcaacaccatgaagaccaacgacacctacatgaagttcagctggctgaccgtgcccgagaagtccctggacaaagaacacagatgcatcgtgcggcacgaaaacaacaagaacggcgtggaccaggaaatcatcttcccacccatcaagaccgatgtgattacaatggaccccaaggacaactgctccaaggacgccaacgataccctgctgctccagctgaccaacaccagcgcctactacatgtacttgttgctgctgctgaagtccgtggtgtacttcgccatcatcacatgctgcctgctgatggctatggtcaagcggaaggacagccgggga

SEQ ID NO: 6579 - DNA, 2622 bp, synthetic construct
  source 1..2622: mol_type = other DNA
atggccttaccagtgaccgccttgctcctgccgctggccttgctgctccacgccgccaggccggaagtgcagctggttgaatctggcggaggactggttcagcctggcggatctctgagactgtcttgtgccgccagcggcttcagcttcagcgacttttggatgagctgggtccgacaggcccctggcaaaggacttgaatgggtcgccacaatcagccaggccggcagcgagaaggactacgtggactctgtgaagggcagattcaccatcagccgggacaacgccaagaagtccctgtacctccagatgaacagcctgagagccgaggacaccgccgtgtactattgtgcctctggcgtgtacagcttcgactacagaggccagggcaccctggtcacagtctcttctggtaccggcggaggcggatctggcggcggaggtagcggtggcggaggatctgaattcgacgacgtcgtgatgacccagagccctctgagcctgcctgtgtccctgggcgatcaggccagcatctcctgcagatccagccagagactggtgcacagcaacggcaacacctacctgcactggtatctgcagaagcccggccagagccccaagctgctgatctaccgggtgtccaacagattccccggcgtgcccgatagattcagcggctctggcagcggcaccgacttcaccctgaagatcagccgggtggaagccgaggacctgggcatctatttctgcagccagagcacccacgtgccctacacctttggcggaggcaccaagctggaaatcaagcggctcgagatccagaaccctgatcctgccgtgtaccagctgcgggatagcaagagcagcgacaagagcgtgtgtctgttcaccgacttcgacagccagaccaacgtgtcccagagcaaggactccgacgtgtacatcaccgataagtgcgtgctggacatgcggagcatggacttcaagagcaactccgccgtggcctggtccaacaagtccgatttcgcctgcgccaacgccttcaacaacagcattatccccgaggacacattcttcccaagccccgagagcagcgactccaccgaccacgtgaagcccaaagagacagagaacaccaagcagcccagcaagagctgccacaagcccaaggccatcgtgcacaccgagaaagtgaacatgatgagcctgaccgtgctgggcctgcggatgctgttcgccaaaaccgtggccgtgaacttcctgctgaccgccaagctgttcttcctcctcaccgcccgcgccaagagaagcggatctggcgtgaagcagaccctgaatttcgacctgctgaagctggctggcgacgtggaatccaacccaggccctactagtatggactggatttggcgcatccttttccttgtcggcgctgctaccggcgcgcattccttcgaagaagtgcggctgcagcagtctggccccgacctgattaagcctggggccagcgtgaagatgagctgcaaggccagcggctacaccttcaccggctacgtgatgcactgggtcaagcagaggccaggccagggcctggaatggatcggcttcatcaacccctacaacgacgacatccagagcaacgagcggttccggggcaaggccaccctgaccagcgataagagcagcaccaccgcctacatggaactgagcagcctgacctccgaggacagcgccgtgtactactgtgctaggggagccggctacaacttcgacggggcctacagattcttcgacttttggggccagggcaccacactgaccgtgtcctctacgcgtgaggacctgaagaacgtgttcccacctgaggtggccgtgttcgagcctagcgaggccgagatcagccacacccagaaagccaccctcgtgtgcctggctaccggcttctaccccgaccatgtggaactgtcttggtgggtcaacggcaaagaggtgcacagcggcgtgtgtaccgacccccagccactgaaagaacagcccgccctgaacgacagccggtactgcctgagcagcagactgagagtgtccgccaccttctggcagaacccccggaaccacttcagatgccaggtgcagttctacggcctgagcgagaacgacgagtggacccaggacagagccaagcccgtgacccagatcgtgtctgccgaagcctggggcagagccgatgatgtgattaagatccactggcaggaaaagaagtccaacaccatcctgggcagccaggaaggcaacaccatgaagaccaacgacacctacatgaagttcagctggctgaccgtgcccgagaagtccctggacaaagaacacagatgcatcgtgcggcacgaaaacaacaagaacggcgtggaccaggaaatcatcttcccacccatcaagaccgatgtgattacaatggaccccaaggacaactgctccaaggacgccaacgataccctgctgctccagctgaccaacaccagcgcctactacatgtacttgttgctgctgctgaagtccgtggtgtacttcgccatcatcacatgctgcctgctgatggctatggtcaagcggaaggacagccgggga

SEQ ID NO: 6580 - DNA, 2595 bp, synthetic construct
  source 1..2595: mol_type = other DNA
atggccttaccagtgaccgccttgctcctgccgctggccttgctgctccacgccgccaggccggaagtgcagctggttgaatctggcggaggactggttcagcctggcggatctctgagactgtcttgtgccgccagcggcttcagcttcagcgacttttggatgagctgggtccgacaggcccctggcaaaggacttgaatgggtcgccacaatcagccaggccggcagcgagaaggactacgtggactctgtgaagggcagattcaccatcagccgggacaacgccaagaagtccctgtacctccagatgaacagcctgagagccgaggacaccgccgtgtactattgtgcctctggcgtgtacagcttcgactacagaggccagggcaccctggtcacagtctcttctggtaccggcggaggcggatctggcggcggaggtagcggtggcggaggatctgaattcgacagctacgagctgacccagcctcctagcgtgtccgtgtctcctggacagaccgccaccatctcttgcagcggcgatcaactgggcgggaagtacggccactggtatcagaagaagcccggccagagccccgtgctggtgctgtaccaggacagaaaacggcctgccggcatccccgagagattcagcggaagcagcagcggcaacaccatcaccctgaccatcagcggcacccaggccgtggatgaggccgactactactgccaggcttgggacaccaatctgggcggcgtgttcggcggaggcaccaaagtgacagtgctgggacagctcgagatccagaaccctgatcctgccgtgtaccagctgcgggatagcaagagcagcgacaagagcgtgtgtctgttcaccgacttcgacagccagaccaacgtgtcccagagcaaggactccgacgtgtacatcaccgataagtgcgtgctggacatgcggagcatggacttcaagagcaactccgccgtggcctggtccaacaagtccgatttcgcctgcgccaacgccttcaacaacagcattatccccgaggacacattcttcccaagccccgagagcagcgactccaccgaccacgtgaagcccaaagagacagagaacaccaagcagcccagcaagagctgccacaagcccaaggccatcgtgcacaccgagaaagtgaacatgatgagcctgaccgtgctgggcctgcggatgctgttcgccaaaaccgtggccgtgaacttcctgctgaccgccaagctgttcttcctcctcaccgcccgcgccaagagaagcggatctggcgtgaagcagaccctgaatttcgacctgctgaagctggctggcgacgtggaatccaacccaggccctactagtatggactggatttggcgcatccttttccttgtcggcgctgctaccggcgcgcattccttcgaacaggtgcaactggtggaaagcggagccgaagtgaagaaacctggggccagcgtgaaggtgtcctgcaaggccagcggctacacctttaccggctactacatgcactgggtgcgccaggctccaggccagggactggaatggatgggccggatcaaccccaatagcggcggcaccaactacgcccagaaattccagggcagagtgaccatgaccagagacaccagcatcagcaccgcctacatggaactgagccggctgagaagcgacgacaccgccgtgtactactgcgccagccctagaggcagaggcagcgccttcgatatttggggccagggcacactcgtgaccgtgtcctctacgcgtgaggacctgaagaacgtgttcccacctgaggtggccgtgttcgagcctagcgaggccgagatcagccacacccagaaagccaccctcgtgtgcctggctaccggcttctaccccgaccatgtggaactgtcttggtgggtcaacggcaaagaggtgcacagcggcgtgtgtaccgacccccagccactgaaagaacagcccgccctgaacgacagccggtactgcctgagcagcagactgagagtgtccgccaccttctggcagaacccccggaaccacttcagatgccaggtgcagttctacggcctgagcgagaacgacgagtggacccaggacagagccaagcccgtgacccagatcgtgtctgccgaagcctggggcagagccgatgatgtgattaagatccactggcaggaaaagaagtccaacaccatcctgggcagccaggaaggcaacaccatgaagaccaacgacacctacatgaagttcagctggctgaccgtgcccgagaagtccctggacaaagaacacagatgcatcgtgcggcacgaaaacaacaagaacggcgtggaccaggaaatcatcttcccacccatcaagaccgatgtgattacaatggaccccaaggacaactgctccaaggacgccaacgataccctgctgctccagctgaccaacaccagcgcctactacatgtacttgttgctgctgctgaagtccgtggtgtacttcgccatcatcacatgctgcctgctgatggctatggtcaagcggaaggacagccgggga

SEQ ID NO: 6581 - DNA, 2604 bp, synthetic construct
  source 1..2604: mol_type = other DNA
atggccttaccagtgaccgccttgctcctgccgctggccttgctgctccacgccgccaggccggaagtgcagctggttgaatctggcggaggactggttcagcctggcggatctctgagactgtcttgtgccgccagcggcttcagcttcagcgacttttggatgagctgggtccgacaggcccctggcaaaggacttgaatgggtcgccacaatcagccaggccggcagcgagaaggactacgtggactctgtgaagggcagattcaccatcagccgggacaacgccaagaagtccctgtacctccagatgaacagcctgagagccgaggacaccgccgtgtactattgtgcctctggcgtgtacagcttcgactacagaggccagggcaccctggtcacagtctcttctggtaccggcggaggcggatctggcggcggaggtagcggtggcggaggatctgaattcgacaacttcatgctgacccagccccacagcgtgtccgagagccctggcaagaccgtgaccatctcctgcaccagaagcagcggctctatcgccagcaaatacgtgcagtggtatcagcagaggcccggcagcagccctaccaccgtgatctacgaggacaaccagaggcctagcggcgtgcccgatagattcagcggcagcatcgacaccagcagcaacagcgccagcctgaccatcagcggcctgagaacagaggacgaggccgactactactgccacagctacgacagcaacaaccactccgtgttcggcggaggcaccaaagtgacagtgctgggacagctcgagatccagaaccctgatcctgccgtgtaccagctgcgggatagcaagagcagcgacaagagcgtgtgtctgttcaccgacttcgacagccagaccaacgtgtcccagagcaaggactccgacgtgtacatcaccgataagtgcgtgctggacatgcggagcatggacttcaagagcaactccgccgtggcctggtccaacaagtccgatttcgcctgcgccaacgccttcaacaacagcattatccccgaggacacattcttcccaagccccgagagcagcgactccaccgaccacgtgaagcccaaagagacagagaacaccaagcagcccagcaagagctgccacaagcccaaggccatcgtgcacaccgagaaagtgaacatgatgagcctgaccgtgctgggcctgcggatgctgttcgccaaaaccgtggccgtgaacttcctgctgaccgccaagctgttcttcctcctcaccgcccgcgccaagagaagcggatctggcgtgaagcagaccctgaatttcgacctgctgaagctggctggcgacgtggaatccaacccaggccctactagtatggactggatttggcgcatccttttccttgtcggcgctgctaccggcgcgcattccttcgaagaagtgcaactggtggaaagcgggggaggcgtggtgcagccaggcggatctctgagactgagctgtgccgccagcggcttcaccttcagcagctacgccatgagctgggtgcgccaggcccctggaaaaggcctggaatgggtgtccgccatctctggctctggcggcagcacctactacgccgatagcgtgaagggccggttcagcatcagccgggacaacagcaagaacaccctgtacctccagatgaacagcctgcgggccgaggacaccgccgtgtactactgtgccagaaccagaagctccggggccttcgacatctggggccagggaacactcgtgaccgtgtcctctacgcgtgaggacctgaagaacgtgttcccacctgaggtggccgtgttcgagcctagcgaggccgagatcagccacacccagaaagccaccctcgtgtgcctggctaccggcttctaccccgaccatgtggaactgtcttggtgggtcaacggcaaagaggtgcacagcggcgtgtgtaccgacccccagccactgaaagaacagcccgccctgaacgacagccggtactgcctgagcagcagactgagagtgtccgccaccttctggcagaacccccggaaccacttcagatgccaggtgcagttctacggcctgagcgagaacgacgagtggacccaggacagagccaagcccgtgacccagatcgtgtctgccgaagcctggggcagagccgatgatgtgattaagatccactggcaggaaaagaagtccaacaccatcctgggcagccaggaaggcaacaccatgaagaccaacgacacctacatgaagttcagctggctgaccgtgcccgagaagtccctggacaaagaacacagatgcatcgtgcggcacgaaaacaacaagaacggcgtggaccaggaaatcatcttcccacccatcaagaccgatgtgattacaatggaccccaaggacaactgctccaaggacgccaacgataccctgctgctccagctgaccaacaccagcgcctactacatgtacttgttgctgctgctgaagtccgtggtgtacttcgccatcatcacatgctgcctgctgatggctatggtcaagcggaaggacagccgggga

SEQ ID NO: 6582 - DNA, 2589 bp, synthetic construct
  source 1..2589: mol_type = other DNA
atggccttaccagtgaccgccttgctcctgccgctggccttgctgctccacgccgccaggccggaagtgcagctggttgaatctggcggaggactggttcagcctggcggatctctgagactgtcttgtgccgccagcggcttcagcttcagcgacttttggatgagctgggtccgacaggcccctggcaaaggacttgaatgggtcgccacaatcagccaggccggcagcgagaaggactacgtggactctgtgaagggcagattcaccatcagccgggacaacgccaagaagtccctgtacctccagatgaacagcctgagagccgaggacaccgccgtgtactattgtgcctctggcgtgtacagcttcgactacagaggccagggcaccctggtcacagtctcttctggtaccggcggaggcggatctggcggcggaggtagcggtggcggaggatctgaattcgacatccagatgaaccagagccccagcagcctgagcgccagcctgggcgataccatcaccatcacctgtcacgccagccagaacatcaacgtgtggctgagctggtatcagcagaagcccggcaacatccccaagctgctgatctacaaggccagcaacctgcacaccggcgtgcccagcagattttctggcagcggctctggcaccggcttcaccattaccatcagctccctccagcccgaggacattgccacctactactgccagcagggccagagctacccctggacatttggcggaggcaccaagctggaaatcaagagactcgagatccagaaccctgatcctgccgtgtaccagctgcgggatagcaagagcagcgacaagagcgtgtgtctgttcaccgacttcgacagccagaccaacgtgtcccagagcaaggactccgacgtgtacatcaccgataagtgcgtgctggacatgcggagcatggacttcaagagcaactccgccgtggcctggtccaacaagtccgatttcgcctgcgccaacgccttcaacaacagcattatccccgaggacacattcttcccaagccccgagagcagcgactccaccgaccacgtgaagcccaaagagacagagaacaccaagcagcccagcaagagctgccacaagcccaaggccatcgtgcacaccgagaaagtgaacatgatgagcctgaccgtgctgggcctgcggatgctgttcgccaaaaccgtggccgtgaacttcctgctgaccgccaagctgttcttcctcctcaccgcccgcgccaagagaagcggatctggcgtgaagcagaccctgaatttcgacctgctgaagctggctggcgacgtggaatccaacccaggccctactagtatggactggatttggcgcatccttttccttgtcggcgctgctaccggcgcgcattccttcgaagaagtgcaactccagcagagcggcccagagcttgtgaagcctggcgcttccgtgaagattagctgcaaagccagcggctacagcttcaccggctacttcatgaactgggtcaagcagagccacggcaagagcctggagtacatcggcagattcaacccctacaacggcgagacactgtacaaccagaagttcaagggcaaggccaccctgaccgtggacaagagcagcagcaccgtgcacatggaactgctgagcgtgaccagcgaggacagcgccgtgtactactgtggcagaagcggcaacgacgacgctatggactattggggccagggcaccagcgtgaccgtgtctagtgctacgcgtgaggacctgaagaacgtgttcccacctgaggtggccgtgttcgagcctagcgaggccgagatcagccacacccagaaagccaccctcgtgtgcctggctaccggcttctaccccgaccatgtggaactgtcttggtgggtcaacggcaaagaggtgcacagcggcgtgtgtaccgacccccagccactgaaagaacagcccgccctgaacgacagccggtactgcctgagcagcagactgagagtgtccgccaccttctggcagaacccccggaaccacttcagatgccaggtgcagttctacggcctgagcgagaacgacgagtggacccaggacagagccaagcccgtgacccagatcgtgtctgccgaagcctggggcagagccgatgatgtgattaagatccactggcaggaaaagaagtccaacaccatcctgggcagccaggaaggcaacaccatgaagaccaacgacacctacatgaagttcagctggctgaccgtgcccgagaagtccctggacaaagaacacagatgcatcgtgcggcacgaaaacaacaagaacggcgtggaccaggaaatcatcttcccacccatcaagaccgatgtgattacaatggaccccaaggacaactgctccaaggacgccaacgataccctgctgctccagctgaccaacaccagcgcctactacatgtacttgttgctgctgctgaagtccgtggtgtacttcgccatcatcacatgctgcctgctgatggctatggtcaagcggaaggacagccgggga

SEQ ID NO: 6583 - DNA, 2592 bp, synthetic construct
  source 1..2592: mol_type = other DNA
atggccttaccagtgaccgccttgctcctgccgctggccttgctgctccacgccgccaggccggaagtgcagctggttgaatctggcggaggactggttcagcctggcggatctctgagactgtcttgtgccgccagcggcttcagcttcagcgacttttggatgagctgggtccgacaggcccctggcaaaggacttgaatgggtcgccacaatcagccaggccggcagcgagaaggactacgtggactctgtgaagggcagattcaccatcagccgggacaacgccaagaagtccctgtacctccagatgaacagcctgagagccgaggacaccgccgtgtactattgtgcctctggcgtgtacagcttcgactacagaggccagggcaccctggtcacagtctcttctggtaccggcggaggcggatctggcggcggaggtagcggtggcggaggatctgaattcgagatcgtgctgacacagagccctgccaccctgtctctgagccctggcgaaagagccaccctgagctgtagagccagccagagcgtgcggagctacctggcctggtatcagcagaagcctggacaggcccccagactgctgatctacgacgccagcaatcgggccacaggcatccccgccagattttctggctctggcagcggcaccgacttcaccctgacaatcagcagcctggaacccgaggacttcgccgtgtactactgccagcagcggagcaactggccccctacctttggacagggcaccaaggtggaaatcaagctcgagatccagaaccctgatcctgccgtgtaccagctgcgggatagcaagagcagcgacaagagcgtgtgtctgttcaccgacttcgacagccagaccaacgtgtcccagagcaaggactccgacgtgtacatcaccgataagtgcgtgctggacatgcggagcatggacttcaagagcaactccgccgtggcctggtccaacaagtccgatttcgcctgcgccaacgccttcaacaacagcattatccccgaggacacattcttcccaagccccgagagcagcgactccaccgaccacgtgaagcccaaagagacagagaacaccaagcagcccagcaagagctgccacaagcccaaggccatcgtgcacaccgagaaagtgaacatgatgagcctgaccgtgctgggcctgcggatgctgttcgccaaaaccgtggccgtgaacttcctgctgaccgccaagctgttcttcctcctcaccgcccgcgccaagagaagcggatctggcgtgaagcagaccctgaatttcgacctgctgaagctggctggcgacgtggaatccaacccaggccctactagtatggactggatttggcgcatccttttccttgtcggcgctgctaccggcgcgcattccttcgaacaactccaggtgcaggaatctggccccggactcgtgaagcccagcgagacactgagcctgacctgtaccgtgtccggcggcagcatcagcaacagctacttctcctggggctggatcagacagccccctggcaagggcctggaatggatcggcagcttctactacggcgagaaaacctactacaaccccagcctgaagtccagagccaccatcagcatcgacaccagcaagagccagttctccctgaagctgagcagcgtgacagccgccgacaccgccgtgtattattgccccagaggccccaccatgatccggggcgtgatcgactcttggggccagggaacactcgtgaccgtgtcctctacgcgtgaggacctgaagaacgtgttcccacctgaggtggccgtgttcgagcctagcgaggccgagatcagccacacccagaaagccaccctcgtgtgcctggctaccggcttctaccccgaccatgtggaactgtcttggtgggtcaacggcaaagaggtgcacagcggcgtgtgtaccgacccccagccactgaaagaacagcccgccctgaacgacagccggtactgcctgagcagcagactgagagtgtccgccaccttctggcagaacccccggaaccacttcagatgccaggtgcagttctacggcctgagcgagaacgacgagtggacccaggacagagccaagcccgtgacccagatcgtgtctgccgaagcctggggcagagccgatgatgtgattaagatccactggcaggaaaagaagtccaacaccatcctgggcagccaggaaggcaacaccatgaagaccaacgacacctacatgaagttcagctggctgaccgtgcccgagaagtccctggacaaagaacacagatgcatcgtgcggcacgaaaacaacaagaacggcgtggaccaggaaatcatcttcccacccatcaagaccgatgtgattacaatggaccccaaggacaactgctccaaggacgccaacgataccctgctgctccagctgaccaacaccagcgcctactacatgtacttgttgctgctgctgaagtccgtggtgtacttcgccatcatcacatgctgcctgctgatggctatggtcaagcggaaggacagccgggga

SEQ ID NO: 6584 - DNA, 2619 bp, synthetic construct
  source 1..2619: mol_type = other DNA
atggccttaccagtgaccgccttgctcctgccgctggccttgctgctccacgccgccaggccggaagtgcagctggttgaatctggcggaggactggttcagcctggcggatctctgagactgtcttgtgccgccagcggcttcagcttcagcgacttttggatgagctgggtccgacaggcccctggcaaaggacttgaatgggtcgccacaatcagccaggccggcagcgagaaggactacgtggactctgtgaagggcagattcaccatcagccgggacaacgccaagaagtccctgtacctccagatgaacagcctgagagccgaggacaccgccgtgtactattgtgcctctggcgtgtacagcttcgactacagaggccagggcaccctggtcacagtctcttctggtaccggcggaggcggatctggcggcggaggtagcggtggcggaggatctgaattcgacatcgtgatgacccagacccccctgagcctgcctgtgacacctggcgagcctgccagcatctcctgcagaagcagcagaagcctgctggacagcgacgacggcaacacctacctggactggtatctgcagaaacccggccagagcccccaactgctgatctacaccctgagctacagagccagcggcgtgcccgatagattttccggctctggcagcggcaccgacttcaccctgaagatcagccgggtggaagccgaggacgtgggcgtgtactactgtatgcagcgggtggaatttcccatcaccttcggccagggcaccagactggaaatcaagagactcgagatccagaaccctgatcctgccgtgtaccagctgcgggatagcaagagcagcgacaagagcgtgtgtctgttcaccgacttcgacagccagaccaacgtgtcccagagcaaggactccgacgtgtacatcaccgataagtgcgtgctggacatgcggagcatggacttcaagagcaactccgccgtggcctggtccaacaagtccgatttcgcctgcgccaacgccttcaacaacagcattatccccgaggacacattcttcccaagccccgagagcagcgactccaccgaccacgtgaagcccaaagagacagagaacaccaagcagcccagcaagagctgccacaagcccaaggccatcgtgcacaccgagaaagtgaacatgatgagcctgaccgtgctgggcctgcggatgctgttcgccaaaaccgtggccgtgaacttcctgctgaccgccaagctgttcttcctcctcaccgcccgcgccaagagaagcggatctggcgtgaagcagaccctgaatttcgacctgctgaagctggctggcgacgtggaatccaacccaggccctactagtatggactggatttggcgcatccttttccttgtcggcgctgctaccggcgcgcattccttcgaacaggtgcaactggtggaatctggcgggggagtggtgcagcctggcagatccctgagactgagctgtgccgccagcggcttcatcttcagcagatacggaatgcactgggtgcgccaggcccctggcaagggactgaaatgggtggccgtgatttggtacgacggcagcaacaagctgtacgccgacagcgtgaagggccggttcaccatcagcagagacaacagcaagaacaccctgtacctgcagatgaacagcctgcgggccgaggacaccgccgtgtactattgcgccagagactactacgacaacagccggcaccactggggcttcgactattggggccagggaacccttgtgaccgtgtcctctacgcgtgaggacctgaagaacgtgttcccacctgaggtggccgtgttcgagcctagcgaggccgagatcagccacacccagaaagccaccctcgtgtgcctggctaccggcttctaccccgaccatgtggaactgtcttggtgggtcaacggcaaagaggtgcacagcggcgtgtgtaccgacccccagccactgaaagaacagcccgccctgaacgacagccggtactgcctgagcagcagactgagagtgtccgccaccttctggcagaacccccggaaccacttcagatgccaggtgcagttctacggcctgagcgagaacgacgagtggacccaggacagagccaagcccgtgacccagatcgtgtctgccgaagcctggggcagagccgatgatgtgattaagatccactggcaggaaaagaagtccaacaccatcctgggcagccaggaaggcaacaccatgaagaccaacgacacctacatgaagttcagctggctgaccgtgcccgagaagtccctggacaaagaacacagatgcatcgtgcggcacgaaaacaacaagaacggcgtggaccaggaaatcatcttcccacccatcaagaccgatgtgattacaatggaccccaaggacaactgctccaaggacgccaacgataccctgctgctccagctgaccaacaccagcgcctactacatgtacttgttgctgctgctgaagtccgtggtgtacttcgccatcatcacatgctgcctgctgatggctatggtcaagcggaaggacagccgggga

SEQ ID NO: 6585 - DNA, 2589 bp, synthetic construct
  source 1..2589: mol_type = other DNA
atggccttaccagtgaccgccttgctcctgccgctggccttgctgctccacgccgccaggccggaagtgcagctggttgaatctggcggaggactggttcagcctggcggatctctgagactgtcttgtgccgccagcggcttcagcttcagcgacttttggatgagctgggtccgacaggcccctggcaaaggacttgaatgggtcgccacaatcagccaggccggcagcgagaaggactacgtggactctgtgaagggcagattcaccatcagccgggacaacgccaagaagtccctgtacctccagatgaacagcctgagagccgaggacaccgccgtgtactattgtgcctctggcgtgtacagcttcgactacagaggccagggcaccctggtcacagtctcttctggtaccggcggaggcggatctggcggcggaggtagcggtggcggaggatctgaattcgagatccagatgacccagagccccagcagcatgtctgccagcctgggcgacaccatcaccatcacatgccaggccacccaggacatcttcaagaacctgaactggtatcagcagaagcccggcaagccccccagcctgctgatctactatgccaccgaactggccgagggcgtgcccagcagattttctggcagcggcagcggctccgactacagcctgaccatcagcaacctggaaagcgaggacttcgccgcctactactgcctccagttcttcgagttcccattcaccttcggctccggcaccaagctggaaatgaagctcgagatccagaaccctgatcctgccgtgtaccagctgcgggatagcaagagcagcgacaagagcgtgtgtctgttcaccgacttcgacagccagaccaacgtgtcccagagcaaggactccgacgtgtacatcaccgataagtgcgtgctggacatgcggagcatggacttcaagagcaactccgccgtggcctggtccaacaagtccgatttcgcctgcgccaacgccttcaacaacagcattatccccgaggacacattcttcccaagccccgagagcagcgactccaccgaccacgtgaagcccaaagagacagagaacaccaagcagcccagcaagagctgccacaagcccaaggccatcgtgcacaccgagaaagtgaacatgatgagcctgaccgtgctgggcctgcggatgctgttcgccaaaaccgtggccgtgaacttcctgctgaccgccaagctgttcttcctcctcaccgcccgcgccaagagaagcggatctggcgtgaagcagaccctgaatttcgacctgctgaagctggctggcgacgtggaatccaacccaggccctactagtatggactggatttggcgcatccttttccttgtcggcgctgctaccggcgcgcattccttcgaacaggtgcaactccagcagtctggcgctgagcttgtgcggcctggcacctctgtgaaggtgtcctgtaaagccagcggctacgtgttcaccaactactggatcgagtggatcaagcagcggccaggccagggcctggaatggatcggcgtgatgaatccaggcagcggcgagacaacctacaacgagaagttcaagggcaaggccaccctgaccgccgacaagagcagcagcacagcctacatgcaactgtcctccctgaccagcgtggacagcgccgtgtacttctgcgccagggaccacgaccgggactactacgctatggactactggggccagggcaccagcgtgaccgtgtcatctacgcgtgaggacctgaagaacgtgttcccacctgaggtggccgtgttcgagcctagcgaggccgagatcagccacacccagaaagccaccctcgtgtgcctggctaccggcttctaccccgaccatgtggaactgtcttggtgggtcaacggcaaagaggtgcacagcggcgtgtgtaccgacccccagccactgaaagaacagcccgccctgaacgacagccggtactgcctgagcagcagactgagagtgtccgccaccttctggcagaacccccggaaccacttcagatgccaggtgcagttctacggcctgagcgagaacgacgagtggacccaggacagagccaagcccgtgacccagatcgtgtctgccgaagcctggggcagagccgatgatgtgattaagatccactggcaggaaaagaagtccaacaccatcctgggcagccaggaaggcaacaccatgaagaccaacgacacctacatgaagttcagctggctgaccgtgcccgagaagtccctggacaaagaacacagatgcatcgtgcggcacgaaaacaacaagaacggcgtggaccaggaaatcatcttcccacccatcaagaccgatgtgattacaatggaccccaaggacaactgctccaaggacgccaacgataccctgctgctccagctgaccaacaccagcgcctactacatgtacttgttgctgctgctgaagtccgtggtgtacttcgccatcatcacatgctgcctgctgatggctatggtcaagcggaaggacagccgggga

SEQ ID NO: 6586 - DNA, 2580 bp, synthetic construct
  source 1..2580: mol_type = other DNA
atggccttaccagtgaccgccttgctcctgccgctggccttgctgctccacgccgccaggccggaagtgcagctggttgaatctggcggaggactggttcagcctggcggatctctgagactgtcttgtgccgccagcggcttcagcttcagcgacttttggatgagctgggtccgacaggcccctggcaaaggacttgaatgggtcgccacaatcagccaggccggcagcgagaaggactacgtggactctgtgaagggcagattcaccatcagccgggacaacgccaagaagtccctgtacctccagatgaacagcctgagagccgaggacaccgccgtgtactattgtgcctctggcgtgtacagcttcgactacagaggccagggcaccctggtcacagtctcttctggtaccggcggaggcggatctggcggcggaggtagcggtggcggaggatctgaattcgacatcctgctgacacagagccccgccatcctgtccgtgtctccaggcgagagagtgtcctttagctgccgggccagccagaacatcggcaccagcatccactggtatcagcagcggaccaacggcagccccagactgctgattaagtacgccagcgagtccgtgtccggcatccccagcagattttctggcagcggctccggcaccgacttcaccctgagcatcaacagcgtggaaagcgaggacattgccgactactactgccagcacaccaatagctggcccaccacctttggcggaggcaccaagctggaaatcaagagactcgagatccagaaccctgatcctgccgtgtaccagctgcgggatagcaagagcagcgacaagagcgtgtgtctgttcaccgacttcgacagccagaccaacgtgtcccagagcaaggactccgacgtgtacatcaccgataagtgcgtgctggacatgcggagcatggacttcaagagcaactccgccgtggcctggtccaacaagtccgatttcgcctgcgccaacgccttcaacaacagcattatccccgaggacacattcttcccaagccccgagagcagcgactccaccgaccacgtgaagcccaaagagacagagaacaccaagcagcccagcaagagctgccacaagcccaaggccatcgtgcacaccgagaaagtgaacatgatgagcctgaccgtgctgggcctgcggatgctgttcgccaaaaccgtggccgtgaacttcctgctgaccgccaagctgttcttcctcctcaccgcccgcgccaagagaagcggatctggcgtgaagcagaccctgaatttcgacctgctgaagctggctggcgacgtggaatccaacccaggccctactagtatggactggatttggcgcatccttttccttgtcggcgctgctaccggcgcgcattccttcgaacaggtgcaactccagcagtccgacgccgagcttgtgaagcctggcgcttccgtgaagattagctgcaaggccagcggctacaccttcaccgaccacgccattcactgggtcaagcagaagcccgagcagggcctggaatggatcggctacttcagccccggcaacggcgacatcaagtacaacgagaagttcaagggcaaggccaccctgaccgccgacaagagcagcagcacagcctacatgcaactgaacagcctgaccagcgaggactccgccgtgtacttctgcaagcggagctacggcaactacgactactggggccagggcaccacactgaccgtgtctagtacgcgtgaggacctgaagaacgtgttcccacctgaggtggccgtgttcgagcctagcgaggccgagatcagccacacccagaaagccaccctcgtgtgcctggctaccggcttctaccccgaccatgtggaactgtcttggtgggtcaacggcaaagaggtgcacagcggcgtgtgtaccgacccccagccactgaaagaacagcccgccctgaacgacagccggtactgcctgagcagcagactgagagtgtccgccaccttctggcagaacccccggaaccacttcagatgccaggtgcagttctacggcctgagcgagaacgacgagtggacccaggacagagccaagcccgtgacccagatcgtgtctgccgaagcctggggcagagccgatgatgtgattaagatccactggcaggaaaagaagtccaacaccatcctgggcagccaggaaggcaacaccatgaagaccaacgacacctacatgaagttcagctggctgaccgtgcccgagaagtccctggacaaagaacacagatgcatcgtgcggcacgaaaacaacaagaacggcgtggaccaggaaatcatcttcccacccatcaagaccgatgtgattacaatggaccccaaggacaactgctccaaggacgccaacgataccctgctgctccagctgaccaacaccagcgcctactacatgtacttgttgctgctgctgaagtccgtggtgtacttcgccatcatcacatgctgcctgctgatggctatggtcaagcggaaggacagccgggga

SEQ ID NO: 6587 - DNA, 2595 bp, synthetic construct
  source 1..2595: mol_type = other DNA
atggccttaccagtgaccgccttgctcctgccgctggccttgctgctccacgccgccaggccggaagtgcagctggttgaatctggcggaggactggttcagcctggcggatctctgagactgtcttgtgccgccagcggcttcagcttcagcgacttttggatgagctgggtccgacaggcccctggcaaaggacttgaatgggtcgccacaatcagccaggccggcagcgagaaggactacgtggactctgtgaagggcagattcaccatcagccgggacaacgccaagaagtccctgtacctccagatgaacagcctgagagccgaggacaccgccgtgtactattgtgcctctggcgtgtacagcttcgactacagaggccagggcaccctggtcacagtctcttctggtaccggcggaggcggatctggcggcggaggtagcggtggcggaggatctgaattcgacatcgtgatgacccagagccccgatagcctggccgtgtctctgggagagagagccaccatcaactgcaagagcagccagagcctgctgaacagcggcgaccagaagaactacctgacctggtatcagcagaagcccggccagccccccaagctgctgatctactgggccagcaccagagaaagcggcgtgcccgatagattcagcggcagcggaagtggcaccgacttcaccctgaccatcagttctcttcaggccgaggacgtggccgtgtactactgccagaacgactacagctaccccctgaccttcggccagggcaccaaggtggaaatcaagctcgagatccagaaccctgatcctgccgtgtaccagctgcgggatagcaagagcagcgacaagagcgtgtgtctgttcaccgacttcgacagccagaccaacgtgtcccagagcaaggactccgacgtgtacatcaccgataagtgcgtgctggacatgcggagcatggacttcaagagcaactccgccgtggcctggtccaacaagtccgatttcgcctgcgccaacgccttcaacaacagcattatccccgaggacacattcttcccaagccccgagagcagcgactccaccgaccacgtgaagcccaaagagacagagaacaccaagcagcccagcaagagctgccacaagcccaaggccatcgtgcacaccgagaaagtgaacatgatgagcctgaccgtgctgggcctgcggatgctgttcgccaaaaccgtggccgtgaacttcctgctgaccgccaagctgttcttcctcctcaccgcccgcgccaagagaagcggatctggcgtgaagcagaccctgaatttcgacctgctgaagctggctggcgacgtggaatccaacccaggccctactagtatggactggatttggcgcatccttttccttgtcggcgctgctaccggcgcgcattccttcgaacaggtgcagctggtgcagtctggggccgaagtgaagaaaaccggcagcagcgtgaaggtgtcctgcaaggccagcggctacacctttaccgaccacgccattcacgtgtggcggcaggctccaggacaggccctggaatggatgggccacttcagccccggcaacaccgacatcaagtacaacgacaagttcaagggcagagtgaccctgaccgtggaccgcagcatgagcaccgcctacatggaactgagcagcctgcggagcgaggacaccgccatgtactattgcaagaccagcaccttctttttcgactactggggccagggaacaatggtcaccgtgtccagcacgcgtgaggacctgaagaacgtgttcccacctgaggtggccgtgttcgagcctagcgaggccgagatcagccacacccagaaagccaccctcgtgtgcctggctaccggcttctaccccgaccatgtggaactgtcttggtgggtcaacggcaaagaggtgcacagcggcgtgtgtaccgacccccagccactgaaagaacagcccgccctgaacgacagccggtactgcctgagcagcagactgagagtgtccgccaccttctggcagaacccccggaaccacttcagatgccaggtgcagttctacggcctgagcgagaacgacgagtggacccaggacagagccaagcccgtgacccagatcgtgtctgccgaagcctggggcagagccgatgatgtgattaagatccactggcaggaaaagaagtccaacaccatcctgggcagccaggaaggcaacaccatgaagaccaacgacacctacatgaagttcagctggctgaccgtgcccgagaagtccctggacaaagaacacagatgcatcgtgcggcacgaaaacaacaagaacggcgtggaccaggaaatcatcttcccacccatcaagaccgatgtgattacaatggaccccaaggacaactgctccaaggacgccaacgataccctgctgctccagctgaccaacaccagcgcctactacatgtacttgttgctgctgctgaagtccgtggtgtacttcgccatcatcacatgctgcctgctgatggctatggtcaagcggaaggacagccgggga

SEQ ID NO: 6588 - DNA, 2592 bp, synthetic construct
  source 1..2592: mol_type = other DNA
atggccttaccagtgaccgccttgctcctgccgctggccttgctgctccacgccgccaggccggaagtgcagctggttgaatctggcggaggactggttcagcctggcggatctctgagactgtcttgtgccgccagcggcttcagcttcagcgacttttggatgagctgggtccgacaggcccctggcaaaggacttgaatgggtcgccacaatcagccaggccggcagcgagaaggactacgtggactctgtgaagggcagattcaccatcagccgggacaacgccaagaagtccctgtacctccagatgaacagcctgagagccgaggacaccgccgtgtactattgtgcctctggcgtgtacagcttcgactacagaggccagggcaccctggtcacagtctcttctggtaccggcggaggcggatctggcggcggaggtagcggtggcggaggatctgaattcgacatccagatgacccagagccccagcagcctgtctgccagcgtgggcgacagagtgaccatcacatgcaaggccagccaggacgtgtccattgccgtggcctggtatcagcagaagcccggcaaggcccccaaggtgctgatctacagcgccagctacagatacaccggcgtgcccgacagattcagcggctctggcagcggcaccgacttcaccttcaccatcagctccctccagcccgaggatattgccgtgtactactgccagcagcactacatcacccccctgacctttggcggaggcaccaaggtggaaatcaagctcgagatccagaaccctgatcctgccgtgtaccagctgcgggatagcaagagcagcgacaagagcgtgtgtctgttcaccgacttcgacagccagaccaacgtgtcccagagcaaggactccgacgtgtacatcaccgataagtgcgtgctggacatgcggagcatggacttcaagagcaactccgccgtggcctggtccaacaagtccgatttcgcctgcgccaacgccttcaacaacagcattatccccgaggacacattcttcccaagccccgagagcagcgactccaccgaccacgtgaagcccaaagagacagagaacaccaagcagcccagcaagagctgccacaagcccaaggccatcgtgcacaccgagaaagtgaacatgatgagcctgaccgtgctgggcctgcggatgctgttcgccaaaaccgtggccgtgaacttcctgctgaccgccaagctgttcttcctcctcaccgcccgcgccaagagaagcggatctggcgtgaagcagaccctgaatttcgacctgctgaagctggctggcgacgtggaatccaacccaggccctactagtatggactggatttggcgcatccttttccttgtcggcgctgctaccggcgcgcattccttcgaacagatccaactggtgcagagcggccacgaagtgaagaaacctggggccagcgtgaaggtgtcctgcaaagccagcggctacacctttaccaactacggcatgaactgggtgcgccaggcccctggacagggcctggaatggatgggctggatcaacaccaagaccggcgagcccacctacgccgaagagttcaagggcagattcgtgttcagcctggaaaccagcgcctccaccgcctacctccagatcagctctctgaaggccgaggacaccgccatgtacttttgcggcagaggcggctacggcagcagctactggtacttcgatgtgtggggccagggcaccaccgtgaccgtgtcatctacgcgtgaggacctgaagaacgtgttcccacctgaggtggccgtgttcgagcctagcgaggccgagatcagccacacccagaaagccaccctcgtgtgcctggctaccggcttctaccccgaccatgtggaactgtcttggtgggtcaacggcaaagaggtgcacagcggcgtgtgtaccgacccccagccactgaaagaacagcccgccctgaacgacagccggtactgcctgagcagcagactgagagtgtccgccaccttctggcagaacccccggaaccacttcagatgccaggtgcagttctacggcctgagcgagaacgacgagtggacccaggacagagccaagcccgtgacccagatcgtgtctgccgaagcctggggcagagccgatgatgtgattaagatccactggcaggaaaagaagtccaacaccatcctgggcagccaggaaggcaacaccatgaagaccaacgacacctacatgaagttcagctggctgaccgtgcccgagaagtccctggacaaagaacacagatgcatcgtgcggcacgaaaacaacaagaacggcgtggaccaggaaatcatcttcccacccatcaagaccgatgtgattacaatggaccccaaggacaactgctccaaggacgccaacgataccctgctgctccagctgaccaacaccagcgcctactacatgtacttgttgctgctgctgaagtccgtggtgtacttcgccatcatcacatgctgcctgctgatggctatggtcaagcggaaggacagccgggga

SEQ ID NO: 6589 - DNA, 2598 bp, synthetic construct
  source 1..2598: mol_type = other DNA
atggccttaccagtgaccgccttgctcctgccgctggccttgctgctccacgccgccaggccggaagtgcagctggttgaatctggcggaggactggttcagcctggcggatctctgagactgtcttgtgccgccagcggcttcagcttcagcgacttttggatgagctgggtccgacaggcccctggcaaaggacttgaatgggtcgccacaatcagccaggccggcagcgagaaggactacgtggactctgtgaagggcagattcaccatcagccgggacaacgccaagaagtccctgtacctccagatgaacagcctgagagccgaggacaccgccgtgtactattgtgcctctggcgtgtacagcttcgactacagaggccagggcaccctggtcacagtctcttctggtaccggcggaggcggatctggcggcggaggtagcggtggcggaggatctgaattcgacatcgtgatgacccagagccccgatagcctggccgtgtctctgggagagagagccaccatcaactgccgggccagcaagagcgtgtccaccagcggctacagctacatgcactggtatcagcagaagcccggccagccccccaagctgctgatctacctggcctccaacctggaaagcggcgtgcccgatagattcagcggcagcggctctggcaccgacttcaccctgaccatcagttctcttcaggccgaggacgtggccgtgtactactgccagcacagcagagagctgccctacaccttcggccagggcaccaagctggaaatcaagctcgagatccagaaccctgatcctgccgtgtaccagctgcgggatagcaagagcagcgacaagagcgtgtgtctgttcaccgacttcgacagccagaccaacgtgtcccagagcaaggactccgacgtgtacatcaccgataagtgcgtgctggacatgcggagcatggacttcaagagcaactccgccgtggcctggtccaacaagtccgatttcgcctgcgccaacgccttcaacaacagcattatccccgaggacacattcttcccaagccccgagagcagcgactccaccgaccacgtgaagcccaaagagacagagaacaccaagcagcccagcaagagctgccacaagcccaaggccatcgtgcacaccgagaaagtgaacatgatgagcctgaccgtgctgggcctgcggatgctgttcgccaaaaccgtggccgtgaacttcctgctgaccgccaagctgttcttcctcctcaccgcccgcgccaagagaagcggatctggcgtgaagcagaccctgaatttcgacctgctgaagctggctggcgacgtggaatccaacccaggccctactagtatggactggatttggcgcatccttttccttgtcggcgctgctaccggcgcgcattccttcgaacaggtgcaactccaggaatctggccctggccttgtgaagcccagcgagacactgagcctgacctgtaccgtgtccggcggcagcatcagctcttacggcgtgcactggattcggcagcctccaggcaagggcctggaatggatcggcgtgatctggacctccggcgtgaccgactacaacagcgccctgatgggcagagtgaccatctccgtggacaccagcaagaaccagttcagcctgaagctgagcagcgtgacagccgccgataccgccgtgtattattgcgccagagatggcgactacgaccgctacacaatggactactggggccagggaacccttgtgaccgtgtcctctacgcgtgaggacctgaagaacgtgttcccacctgaggtggccgtgttcgagcctagcgaggccgagatcagccacacccagaaagccaccctcgtgtgcctggctaccggcttctaccccgaccatgtggaactgtcttggtgggtcaacggcaaagaggtgcacagcggcgtgtgtaccgacccccagccactgaaagaacagcccgccctgaacgacagccggtactgcctgagcagcagactgagagtgtccgccaccttctggcagaacccccggaaccacttcagatgccaggtgcagttctacggcctgagcgagaacgacgagtggacccaggacagagccaagcccgtgacccagatcgtgtctgccgaagcctggggcagagccgatgatgtgattaagatccactggcaggaaaagaagtccaacaccatcctgggcagccaggaaggcaacaccatgaagaccaacgacacctacatgaagttcagctggctgaccgtgcccgagaagtccctggacaaagaacacagatgcatcgtgcggcacgaaaacaacaagaacggcgtggaccaggaaatcatcttcccacccatcaagaccgatgtgattacaatggaccccaaggacaactgctccaaggacgccaacgataccctgctgctccagctgaccaacaccagcgcctactacatgtacttgttgctgctgctgaagtccgtggtgtacttcgccatcatcacatgctgcctgctgatggctatggtcaagcggaaggacagccgggga

SEQ ID NO: 6590 - DNA, 2598 bp, synthetic construct
  source 1..2598: mol_type = other DNA
atggccttaccagtgaccgccttgctcctgccgctggccttgctgctccacgccgccaggccggaagtgcagctggttgaatctggcggaggactggttcagcctggcggatctctgagactgtcttgtgccgccagcggcttcagcttcagcgacttttggatgagctgggtccgacaggcccctggcaaaggacttgaatgggtcgccacaatcagccaggccggcagcgagaaggactacgtggactctgtgaagggcagattcaccatcagccgggacaacgccaagaagtccctgtacctccagatgaacagcctgagagccgaggacaccgccgtgtactattgtgcctctggcgtgtacagcttcgactacagaggccagggcaccctggtcacagtctcttctggtaccggcggaggcggatctggcggcggaggtagcggtggcggaggatctgaattcgacatccagatgacccagagccccagcagcctgtctgccagcgtgggcgacagagtgaccatcacctgtagagccagccagagcatcggcaccagcctgcactggtatcagcagaagcctggcaaggcccccaagctgctgattaagttcgccagcagactgcagagcggcgtgcccagcagattttctggcagcggctccggcaccgacttcaccctgacaatcagctccctgcagcccgaggacttcgccacctactactgccagcagagccccggcttccctccaacctttggacagggcaccaagctggaaatcaagcggctcgagatccagaaccctgatcctgccgtgtaccagctgcgggatagcaagagcagcgacaagagcgtgtgtctgttcaccgacttcgacagccagaccaacgtgtcccagagcaaggactccgacgtgtacatcaccgataagtgcgtgctggacatgcggagcatggacttcaagagcaactccgccgtggcctggtccaacaagtccgatttcgcctgcgccaacgccttcaacaacagcattatccccgaggacacattcttcccaagccccgagagcagcgactccaccgaccacgtgaagcccaaagagacagagaacaccaagcagcccagcaagagctgccacaagcccaaggccatcgtgcacaccgagaaagtgaacatgatgagcctgaccgtgctgggcctgcggatgctgttcgccaaaaccgtggccgtgaacttcctgctgaccgccaagctgttcttcctcctcaccgcccgcgccaagagaagcggatctggcgtgaagcagaccctgaatttcgacctgctgaagctggctggcgacgtggaatccaacccaggccctactagtatggactggatttggcgcatccttttccttgtcggcgctgctaccggcgcgcattccttcgaacaggtgcaactggtggaatctggcggcggacttgtgaagccaggcggcagcctgagactgagctgtgccgccagcggcttcagcatcaccaccagcggctactactggacctggatcagacagttccccggcaagggcctggaatggatgggctacatcggctacaacagcaagacctactacaaccccgccctgaagtcccggatcaccatcagcagagacaacgccaagaacagcctgtacctgcagatgaactccctgagagccgaggataccgccgtgtactactgcgccagatccctgtacggcggctacaaggacgccttcgatagctggggccagggaacccttgtgaccgtgtctagcacgcgtgaggacctgaagaacgtgttcccacctgaggtggccgtgttcgagcctagcgaggccgagatcagccacacccagaaagccaccctcgtgtgcctggctaccggcttctaccccgaccatgtggaactgtcttggtgggtcaacggcaaagaggtgcacagcggcgtgtgtaccgacccccagccactgaaagaacagcccgccctgaacgacagccggtactgcctgagcagcagactgagagtgtccgccaccttctggcagaacccccggaaccacttcagatgccaggtgcagttctacggcctgagcgagaacgacgagtggacccaggacagagccaagcccgtgacccagatcgtgtctgccgaagcctggggcagagccgatgatgtgattaagatccactggcaggaaaagaagtccaacaccatcctgggcagccaggaaggcaacaccatgaagaccaacgacacctacatgaagttcagctggctgaccgtgcccgagaagtccctggacaaagaacacagatgcatcgtgcggcacgaaaacaacaagaacggcgtggaccaggaaatcatcttcccacccatcaagaccgatgtgattacaatggaccccaaggacaactgctccaaggacgccaacgataccctgctgctccagctgaccaacaccagcgcctactacatgtacttgttgctgctgctgaagtccgtggtgtacttcgccatcatcacatgctgcctgctgatggctatggtcaagcggaaggacagccgggga

SEQ ID NO: 6591 - DNA, 2613 bp, synthetic construct
  source 1..2613: mol_type = other DNA
atggccttaccagtgaccgccttgctcctgccgctggccttgctgctccacgccgccaggccggaagtgcagctggttgaatctggcggaggactggttcagcctggcggatctctgagactgtcttgtgccgccagcggcttcagcttcagcgacttttggatgagctgggtccgacaggcccctggcaaaggacttgaatgggtcgccacaatcagccaggccggcagcgagaaggactacgtggactctgtgaagggcagattcaccatcagccgggacaacgccaagaagtccctgtacctccagatgaacagcctgagagccgaggacaccgccgtgtactattgtgcctctggcgtgtacagcttcgactacagaggccagggcaccctggtcacagtctcttctggtaccggcggaggcggatctggcggcggaggtagcggtggcggaggatctgaattcgacgagatcgtgctgacccagagccctctgagcctgcctgtgacacctggcgagcctgccagcatctcctgtagaagcagccagagcctgctgcacagcatcggctacaactacctggactggtatctccagaagcccggccagagcccccaactgctgatctacctgggcagcaacagagccagcggcgtgcccgatagattttccggcagcggctccggcaccgacttcaccctgaagatcagccgggtggaagccgaggacgtgggcgtgtactactgtatgcaggccctccagacccccctgacctttggcggaggcaccaaggtggaaatcaagcggctcgagatccagaaccctgatcctgccgtgtaccagctgcgggatagcaagagcagcgacaagagcgtgtgtctgttcaccgacttcgacagccagaccaacgtgtcccagagcaaggactccgacgtgtacatcaccgataagtgcgtgctggacatgcggagcatggacttcaagagcaactccgccgtggcctggtccaacaagtccgatttcgcctgcgccaacgccttcaacaacagcattatccccgaggacacattcttcccaagccccgagagcagcgactccaccgaccacgtgaagcccaaagagacagagaacaccaagcagcccagcaagagctgccacaagcccaaggccatcgtgcacaccgagaaagtgaacatgatgagcctgaccgtgctgggcctgcggatgctgttcgccaaaaccgtggccgtgaacttcctgctgaccgccaagctgttcttcctcctcaccgcccgcgccaagagaagcggatctggcgtgaagcagaccctgaatttcgacctgctgaagctggctggcgacgtggaatccaacccaggccctactagtatggactggatttggcgcatccttttccttgtcggcgctgctaccggcgcgcattccttcgaagaagtgcaactggtggaaagcggaggcggcgtggtgcagcctggaagaagcctgagactgagctgtgccgccagcggcttcaccttccggtcctacggaatgcactgggtgcgccaggcccctggcaaaggactggaatgggtggccgtgatctcctacgacggctccaacaagtactacaccgacagcgtgaacggcagattcaccatcagcagagacaacagcaagaacaccctgtacctccagatgaacagcctgcgggccgaggacaccgccgtgtactattgtgctagaggcggaggctactacgagacaagcggccctgattactggggccagggcacactcgtgaccgtgtctagtacgcgtgaggacctgaagaacgtgttcccacctgaggtggccgtgttcgagcctagcgaggccgagatcagccacacccagaaagccaccctcgtgtgcctggctaccggcttctaccccgaccatgtggaactgtcttggtgggtcaacggcaaagaggtgcacagcggcgtgtgtaccgacccccagccactgaaagaacagcccgccctgaacgacagccggtactgcctgagcagcagactgagagtgtccgccaccttctggcagaacccccggaaccacttcagatgccaggtgcagttctacggcctgagcgagaacgacgagtggacccaggacagagccaagcccgtgacccagatcgtgtctgccgaagcctggggcagagccgatgatgtgattaagatccactggcaggaaaagaagtccaacaccatcctgggcagccaggaaggcaacaccatgaagaccaacgacacctacatgaagttcagctggctgaccgtgcccgagaagtccctggacaaagaacacagatgcatcgtgcggcacgaaaacaacaagaacggcgtggaccaggaaatcatcttcccacccatcaagaccgatgtgattacaatggaccccaaggacaactgctccaaggacgccaacgataccctgctgctccagctgaccaacaccagcgcctactacatgtacttgttgctgctgctgaagtccgtggtgtacttcgccatcatcacatgctgcctgctgatggctatggtcaagcggaaggacagccgggga

SEQ ID NO: 6592 - DNA, 2607 bp, synthetic construct
  source 1..2607: mol_type = other DNA
atggccttaccagtgaccgccttgctcctgccgctggccttgctgctccacgccgccaggccggaagtgcagctggttgaatctggcggaggactggttcagcctggcggatctctgagactgtcttgtgccgccagcggcttcagcttcagcgacttttggatgagctgggtccgacaggcccctggcaaaggacttgaatgggtcgccacaatcagccaggccggcagcgagaaggactacgtggactctgtgaagggcagattcaccatcagccgggacaacgccaagaagtccctgtacctccagatgaacagcctgagagccgaggacaccgccgtgtactattgtgcctctggcgtgtacagcttcgactacagaggccagggcaccctggtcacagtctcttctggtaccggcggaggcggatctggcggcggaggtagcggtggcggaggatctgaattcgacgacgtcgtgatgacccagagccctctgagcctgcctgtgacacctggcgagcctgccagcatctcctgtagaagcagccagagcctgctgcacagcatcggctacaactacctgcactggtttctccagaagcccggccagagcccccaactgctgatctacctgggcagcaacagagccagcggcgtgcccgatagattttccggcagcggctccggcaccgacttcaccctgaagatcagccgggtggaagccgaggacgtgggcgtgtactactgtatgcaggccctccagacccctcccacctttggacagggcaccagactggaaatcaagcggctcgagatccagaaccctgatcctgccgtgtaccagctgcgggatagcaagagcagcgacaagagcgtgtgtctgttcaccgacttcgacagccagaccaacgtgtcccagagcaaggactccgacgtgtacatcaccgataagtgcgtgctggacatgcggagcatggacttcaagagcaactccgccgtggcctggtccaacaagtccgatttcgcctgcgccaacgccttcaacaacagcattatccccgaggacacattcttcccaagccccgagagcagcgactccaccgaccacgtgaagcccaaagagacagagaacaccaagcagcccagcaagagctgccacaagcccaaggccatcgtgcacaccgagaaagtgaacatgatgagcctgaccgtgctgggcctgcggatgctgttcgccaaaaccgtggccgtgaacttcctgctgaccgccaagctgttcttcctcctcaccgcccgcgccaagagaagcggatctggcgtgaagcagaccctgaatttcgacctgctgaagctggctggcgacgtggaatccaacccaggccctactagtatggactggatttggcgcatccttttccttgtcggcgctgctaccggcgcgcattccttcgaacaactccaactccaggaaagcggccctggcctcgtgaagcctagcggcacactgagcctgacatgtgccgtgtctggcggcagcatcagcagcagcaactggtggtcttgggtgcgccagcctcctggcaagggcctggaatggatcggcgaaatctaccacagcggcagcaccaactacaaccccagcctgaagtccagagtgaccatcagcgtggacaagagcaagaaccagttctccctgaagctgagcagcgtgacagccgccgataccgccgtgtactattgcgtgggcagcccctacggcgactacgtgctggattattggggccagggcaccctcgtgaccgtgtctagtacgcgtgaggacctgaagaacgtgttcccacctgaggtggccgtgttcgagcctagcgaggccgagatcagccacacccagaaagccaccctcgtgtgcctggctaccggcttctaccccgaccatgtggaactgtcttggtgggtcaacggcaaagaggtgcacagcggcgtgtgtaccgacccccagccactgaaagaacagcccgccctgaacgacagccggtactgcctgagcagcagactgagagtgtccgccaccttctggcagaacccccggaaccacttcagatgccaggtgcagttctacggcctgagcgagaacgacgagtggacccaggacagagccaagcccgtgacccagatcgtgtctgccgaagcctggggcagagccgatgatgtgattaagatccactggcaggaaaagaagtccaacaccatcctgggcagccaggaaggcaacaccatgaagaccaacgacacctacatgaagttcagctggctgaccgtgcccgagaagtccctggacaaagaacacagatgcatcgtgcggcacgaaaacaacaagaacggcgtggaccaggaaatcatcttcccacccatcaagaccgatgtgattacaatggaccccaaggacaactgctccaaggacgccaacgataccctgctgctccagctgaccaacaccagcgcctactacatgtacttgttgctgctgctgaagtccgtggtgtacttcgccatcatcacatgctgcctgctgatggctatggtcaagcggaaggacagccgggga

SEQ ID NO: 6593 - DNA, 2601 bp, synthetic construct
  source 1..2601: mol_type = other DNA
atggccttaccagtgaccgccttgctcctgccgctggccttgctgctccacgccgccaggccggaagtgcagctggttgaatctggcggaggactggttcagcctggcggatctctgagactgtcttgtgccgccagcggcttcagcttcagcgacttttggatgagctgggtccgacaggcccctggcaaaggacttgaatgggtcgccacaatcagccaggccggcagcgagaaggactacgtggactctgtgaagggcagattcaccatcagccgggacaacgccaagaagtccctgtacctccagatgaacagcctgagagccgaggacaccgccgtgtactattgtgcctctggcgtgtacagcttcgactacagaggccagggcaccctggtcacagtctcttctggtaccggcggaggcggatctggcggcggaggtagcggtggcggaggatctgaattcgacgagatcgtgctgacacagagccctggcaccctgagcctgtctctgggagagagagccacactgagctgtcgggccagccagtctatcagcagcagcttcctggcctggtatcagcagaagcccggccaggcccctaagctgctgatctacgccgccagcacaagagccaccggcatccccgatagattcagcggctctggcagcggcaccgacttcaccctgaccatcagcagactggaacccgaggacttcgccgtgtactactgccagcagtacggcagaagcctgagcttcggcggaggcaccaaggtggaagtgaagctcgagatccagaaccctgatcctgccgtgtaccagctgcgggatagcaagagcagcgacaagagcgtgtgtctgttcaccgacttcgacagccagaccaacgtgtcccagagcaaggactccgacgtgtacatcaccgataagtgcgtgctggacatgcggagcatggacttcaagagcaactccgccgtggcctggtccaacaagtccgatttcgcctgcgccaacgccttcaacaacagcattatccccgaggacacattcttcccaagccccgagagcagcgactccaccgaccacgtgaagcccaaagagacagagaacaccaagcagcccagcaagagctgccacaagcccaaggccatcgtgcacaccgagaaagtgaacatgatgagcctgaccgtgctgggcctgcggatgctgttcgccaaaaccgtggccgtgaacttcctgctgaccgccaagctgttcttcctcctcaccgcccgcgccaagagaagcggatctggcgtgaagcagaccctgaatttcgacctgctgaagctggctggcgacgtggaatccaacccaggccctactagtatggactggatttggcgcatccttttccttgtcggcgctgctaccggcgcgcattccttcgaacaggtgcaactccagcagtctggccccggactcgtgaagcctagccagacactgagcctgacctgcgccatcagcggcgatagcgtgtccggcaatagcgccacctggaactggatcagacagagcccatctcggggcctggaatggctgggccggacctactaccgcagcaagtggaaccacgactacgccgagagcgtgaagtcccggatcaccatcaaccccgacaccagcaagaaccagttctccttgcaactgaacagcgtgacccccgaggacacagccgtgtattattgcgccagaggcgacagcagctcttggtacgccttcgactattggggccagggcaccctcgtgaccgtgtctagtacgcgtgaggacctgaagaacgtgttcccacctgaggtggccgtgttcgagcctagcgaggccgagatcagccacacccagaaagccaccctcgtgtgcctggctaccggcttctaccccgaccatgtggaactgtcttggtgggtcaacggcaaagaggtgcacagcggcgtgtgtaccgacccccagccactgaaagaacagcccgccctgaacgacagccggtactgcctgagcagcagactgagagtgtccgccaccttctggcagaacccccggaaccacttcagatgccaggtgcagttctacggcctgagcgagaacgacgagtggacccaggacagagccaagcccgtgacccagatcgtgtctgccgaagcctggggcagagccgatgatgtgattaagatccactggcaggaaaagaagtccaacaccatcctgggcagccaggaaggcaacaccatgaagaccaacgacacctacatgaagttcagctggctgaccgtgcccgagaagtccctggacaaagaacacagatgcatcgtgcggcacgaaaacaacaagaacggcgtggaccaggaaatcatcttcccacccatcaagaccgatgtgattacaatggaccccaaggacaactgctccaaggacgccaacgataccctgctgctccagctgaccaacaccagcgcctactacatgtacttgttgctgctgctgaagtccgtggtgtacttcgccatcatcacatgctgcctgctgatggctatggtcaagcggaaggacagccgggga

SEQ ID NO: 6594 - DNA, 2598 bp, synthetic construct
  source 1..2598: mol_type = other DNA
atggccttaccagtgaccgccttgctcctgccgctggccttgctgctccacgccgccaggccggaagtgcagctggttgaatctggcggaggactggttcagcctggcggatctctgagactgtcttgtgccgccagcggcttcagcttcagcgacttttggatgagctgggtccgacaggcccctggcaaaggacttgaatgggtcgccacaatcagccaggccggcagcgagaaggactacgtggactctgtgaagggcagattcaccatcagccgggacaacgccaagaagtccctgtacctccagatgaacagcctgagagccgaggacaccgccgtgtactattgtgcctctggcgtgtacagcttcgactacagaggccagggcaccctggtcacagtctcttctggtaccggcggaggcggatctggcggcggaggtagcggtggcggaggatctgaattcgaccagagcgtcgtgacacagcctcctagcgtgtcagtggcccctggcaagaccgccagaatcacctgtggccggaacaacatcggcagcaagagcgtgcactggtatcagcagaagcccggccaggctcctgtgctggtggtgtacgacgacagcgacagacccagcggcatccccgagagattcagcggcagcaactccggcaataccgccaccctgaccatcagcagagtggaagccggcgacgaggccgactactactgccaagtgtgggacagcagcagcgatcacgtggtgtttggcggaggcaccaagctgacagtgctgggtctcgagatccagaaccctgatcctgccgtgtaccagctgcgggatagcaagagcagcgacaagagcgtgtgtctgttcaccgacttcgacagccagaccaacgtgtcccagagcaaggactccgacgtgtacatcaccgataagtgcgtgctggacatgcggagcatggacttcaagagcaactccgccgtggcctggtccaacaagtccgatttcgcctgcgccaacgccttcaacaacagcattatccccgaggacacattcttcccaagccccgagagcagcgactccaccgaccacgtgaagcccaaagagacagagaacaccaagcagcccagcaagagctgccacaagcccaaggccatcgtgcacaccgagaaagtgaacatgatgagcctgaccgtgctgggcctgcggatgctgttcgccaaaaccgtggccgtgaacttcctgctgaccgccaagctgttcttcctcctcaccgcccgcgccaagagaagcggatctggcgtgaagcagaccctgaatttcgacctgctgaagctggctggcgacgtggaatccaacccaggccctactagtatggactggatttggcgcatccttttccttgtcggcgctgctaccggcgcgcattccttcgaagtgcaactggtgcagtctggcggaggggtcatgcggcctggcggatctctgagactgtcttgtgccgccagcggcttcaccttcgacgactacggcatgagctgggtgcgccaggcccctggaaaaggcctggaatgggtgtccggcatcaactggaatggcggcagcaccggctacgccgattctgtgcggggcagattcaccatcagccgggacaacgccaagaacagcctgtacctgcagatgaactccctgcgggccgaggacaccgccctgtactattgcgccagagagcggggctacggctaccacgaccctcacgattattggggccagggcacccttgttaccgtgtcctctacgcgtgaggacctgaagaacgtgttcccacctgaggtggccgtgttcgagcctagcgaggccgagatcagccacacccagaaagccaccctcgtgtgcctggctaccggcttctaccccgaccatgtggaactgtcttggtgggtcaacggcaaagaggtgcacagcggcgtgtgtaccgacccccagccactgaaagaacagcccgccctgaacgacagccggtactgcctgagcagcagactgagagtgtccgccaccttctggcagaacccccggaaccacttcagatgccaggtgcagttctacggcctgagcgagaacgacgagtggacccaggacagagccaagcccgtgacccagatcgtgtctgccgaagcctggggcagagccgatgatgtgattaagatccactggcaggaaaagaagtccaacaccatcctgggcagccaggaaggcaacaccatgaagaccaacgacacctacatgaagttcagctggctgaccgtgcccgagaagtccctggacaaagaacacagatgcatcgtgcggcacgaaaacaacaagaacggcgtggaccaggaaatcatcttcccacccatcaagaccgatgtgattacaatggaccccaaggacaactgctccaaggacgccaacgataccctgctgctccagctgaccaacaccagcgcctactacatgtacttgttgctgctgctgaagtccgtggtgtacttcgccatcatcacatgctgcctgctgatggctatggtcaagcggaaggacagccgggga

SEQ ID NO: 6595 - DNA, 2637 bp, synthetic construct
  source 1..2637: mol_type = other DNA
atggccttaccagtgaccgccttgctcctgccgctggccttgctgctccacgccgccaggccggaagtgcagctggttgaatctggcggaggactggttcagcctggcggatctctgagactgtcttgtgccgccagcggcttcagcttcagcgacttttggatgagctgggtccgacaggcccctggcaaaggacttgaatgggtcgccacaatcagccaggccggcagcgagaaggactacgtggactctgtgaagggcagattcaccatcagccgggacaacgccaagaagtccctgtacctccagatgaacagcctgagagccgaggacaccgccgtgtactattgtgcctctggcgtgtacagcttcgactacagaggccagggcaccctggtcacagtctcttctggtaccggcggaggcggatctggcggcggaggtagcggtggcggaggatctgaattcgaacagaaactcatcagtgaagaagacctggaattccaggctgtcgtgacacagcctcctagcgcctctggcacaccaggccagagagtgaccatctcctgtagcggcagcagcagcaacatcggcagcaacaccgtgaactggtatcagcaggtgcccggcaccgctcccaagctgctgatctacagcaacaaccagcggcccagcggcgtgcccgatagattttctggcagcaagagcggcaccagcgccagcctggctatctctggactccagtccgaggacgaggccgactactattgcgccgcctgggacgatagcctgaacggctgggtgttcggcggaggcaccaagctgacagtgctgctcgagatccagaaccctgatcctgccgtgtaccagctgcgggatagcaagagcagcgacaagagcgtgtgtctgttcaccgacttcgacagccagaccaacgtgtcccagagcaaggactccgacgtgtacatcaccgataagtgcgtgctggacatgcggagcatggacttcaagagcaactccgccgtggcctggtccaacaagtccgatttcgcctgcgccaacgccttcaacaacagcattatccccgaggacacattcttcccaagccccgagagcagcgactccaccgaccacgtgaagcccaaagagacagagaacaccaagcagcccagcaagagctgccacaagcccaaggccatcgtgcacaccgagaaagtgaacatgatgagcctgaccgtgctgggcctgcggatgctgttcgccaaaaccgtggccgtgaacttcctgctgaccgccaagctgttcttcctcctcaccgcccgcgccaagagaagcggatctggcgtgaagcagaccctgaatttcgacctgctgaagctggctggcgacgtggaatccaacccaggccctactagtatggactggatttggcgcatccttttccttgtcggcgctgctaccggcgcgcattccttcgaacagatgcaactggtgcagagcggagccgaagtgaaagagcctggcgagagcctgcggatctcctgcaagggcagcggctacagcttcaccaatttctggatctcttgggtgcgccagatgcccggcaagggcctggaatggatgggcagagtggaccccggctactcctacagcacctacagccctagcttccagggccacgtgaccatcagcgccgacaagagcaccagcaccgcctacctccagtggaacagcctgaaggccagcgacaccgccatgtactactgcgccagagtgcagtacagcggctattacgattggttcgacccctggggccagggcacactcgtgacagtgtcaagcacgcgtgaggacctgaagaacgtgttcccacctgaggtggccgtgttcgagcctagcgaggccgagatcagccacacccagaaagccaccctcgtgtgcctggctaccggcttctaccccgaccatgtggaactgtcttggtgggtcaacggcaaagaggtgcacagcggcgtgtgtaccgacccccagccactgaaagaacagcccgccctgaacgacagccggtactgcctgagcagcagactgagagtgtccgccaccttctggcagaacccccggaaccacttcagatgccaggtgcagttctacggcctgagcgagaacgacgagtggacccaggacagagccaagcccgtgacccagatcgtgtctgccgaagcctggggcagagccgatgatgtgattaagatccactggcaggaaaagaagtccaacaccatcctgggcagccaggaaggcaacaccatgaagaccaacgacacctacatgaagttcagctggctgaccgtgcccgagaagtccctggacaaagaacacagatgcatcgtgcggcacgaaaacaacaagaacggcgtggaccaggaaatcatcttcccacccatcaagaccgatgtgattacaatggaccccaaggacaactgctccaaggacgccaacgataccctgctgctccagctgaccaacaccagcgcctactacatgtacttgttgctgctgctgaagtccgtggtgtacttcgccatcatcacatgctgcctgctgatggctatggtcaagcggaaggacagccgggga

SEQ ID NO: 6596 - DNA, 2619 bp, synthetic construct
  source 1..2619: mol_type = other DNA
atggccttaccagtgaccgccttgctcctgccgctggccttgctgctccacgccgccaggccggaagtgcagctggttgaatctggcggaggactggttcagcctggcggatctctgagactgtcttgtgccgccagcggcttcagcttcagcgacttttggatgagctgggtccgacaggcccctggcaaaggacttgaatgggtcgccacaatcagccaggccggcagcgagaaggactacgtggactctgtgaagggcagattcaccatcagccgggacaacgccaagaagtccctgtacctccagatgaacagcctgagagccgaggacaccgccgtgtactattgtgcctctggcgtgtacagcttcgactacagaggccagggcaccctggtcacagtctcttctggtaccggcggaggcggatctggcggcggaggtagcggtggcggaggatctgaattcgaacagaaactcatcagtgaagaagacctggaattcgacatccagatgacccagagccccagcacactgagcgccagcgtgggcgacagagtgaccatcacctgtcgggccagccagaacatcaacaagtggctggcctggtatcagcagaggcccggaaaagccccccagctgctgatctacaaggccagcagcctggaaagcggcgtgcccagcagattttctggcagcggctctggcaccgagtacaccctgaccatcagctccctccagcccgacgacttcgccacctactactgccagcagtacaacagctacgccaccttcggccagggcaccaaggtggaaatcaagagactcgagatccagaaccctgatcctgccgtgtaccagctgcgggatagcaagagcagcgacaagagcgtgtgtctgttcaccgacttcgacagccagaccaacgtgtcccagagcaaggactccgacgtgtacatcaccgataagtgcgtgctggacatgcggagcatggacttcaagagcaactccgccgtggcctggtccaacaagtccgatttcgcctgcgccaacgccttcaacaacagcattatccccgaggacacattcttcccaagccccgagagcagcgactccaccgaccacgtgaagcccaaagagacagagaacaccaagcagcccagcaagagctgccacaagcccaaggccatcgtgcacaccgagaaagtgaacatgatgagcctgaccgtgctgggcctgcggatgctgttcgccaaaaccgtggccgtgaacttcctgctgaccgccaagctgttcttcctcctcaccgcccgcgccaagagaagcggatctggcgtgaagcagaccctgaatttcgacctgctgaagctggctggcgacgtggaatccaacccaggccctactagtatggactggatttggcgcatccttttccttgtcggcgctgctaccggcgcgcattccttcgaacaggtgcagctggtgcagtctggggccgaagtgaagaagcctggcgagagcctgaagatcagctgcaagggctccggctacaacttctctaacaagtggatcggctgggtgcgccagctgcctggcagaggactggaatggatcgccatcatctaccccggctacagcgacatcacctacagccccagcttccagggccgcgtgacaatcagcgccgacaccagcatcaacaccgcctacctgcactggcacagcctgaaggccagcgacaccgccatgtactactgcgtgcggcatacagccctggctggcttcgattattggggcctgggcaccctcgtgaccgtgtctagtacgcgtgaggacctgaagaacgtgttcccacctgaggtggccgtgttcgagcctagcgaggccgagatcagccacacccagaaagccaccctcgtgtgcctggctaccggcttctaccccgaccatgtggaactgtcttggtgggtcaacggcaaagaggtgcacagcggcgtgtgtaccgacccccagccactgaaagaacagcccgccctgaacgacagccggtactgcctgagcagcagactgagagtgtccgccaccttctggcagaacccccggaaccacttcagatgccaggtgcagttctacggcctgagcgagaacgacgagtggacccaggacagagccaagcccgtgacccagatcgtgtctgccgaagcctggggcagagccgatgatgtgattaagatccactggcaggaaaagaagtccaacaccatcctgggcagccaggaaggcaacaccatgaagaccaacgacacctacatgaagttcagctggctgaccgtgcccgagaagtccctggacaaagaacacagatgcatcgtgcggcacgaaaacaacaagaacggcgtggaccaggaaatcatcttcccacccatcaagaccgatgtgattacaatggaccccaaggacaactgctccaaggacgccaacgataccctgctgctccagctgaccaacaccagcgcctactacatgtacttgttgctgctgctgaagtccgtggtgtacttcgccatcatcacatgctgcctgctgatggctatggtcaagcggaaggacagccgggga

SEQ ID NO: 6597 - DNA, 2595 bp, synthetic construct
  source 1..2595: mol_type = other DNA
atggccttaccagtgaccgccttgctcctgccgctggccttgctgctccacgccgccaggccggaagtgcagctggttgaatctggcggaggactggttcagcctggcggatctctgagactgtcttgtgccgccagcggcttcagcttcagcgacttttggatgagctgggtccgacaggcccctggcaaaggacttgaatgggtcgccacaatcagccaggccggcagcgagaaggactacgtggactctgtgaagggcagattcaccatcagccgggacaacgccaagaagtccctgtacctccagatgaacagcctgagagccgaggacaccgccgtgtactattgtgcctctggcgtgtacagcttcgactacagaggccagggcaccctggtcacagtctcttctggtaccggcggaggcggatctggcggcggaggtagcggtggcggaggatctgaattcgacatcgtgctgacacagagccctgcttctctggccgtgtctctgggacagagagccaccatcagctgtagagccagcgagagcgtggacaactacggcaacaccttcatgcactggtatcagcagaagcccggccagcctcctaagctgctgatctacagagccagcaacctggaaagcggcatccccgccagattttctggcagcggcagcagaaccgacttcaccctgaccatcaatcccgtggaagccgacgacgtggcaacctactactgccagcagagcaacgaggaccctcctacatttggagccggcaccaagctggaactgaaactcgagatccagaaccctgatcctgccgtgtaccagctgcgggatagcaagagcagcgacaagagcgtgtgtctgttcaccgacttcgacagccagaccaacgtgtcccagagcaaggactccgacgtgtacatcaccgataagtgcgtgctggacatgcggagcatggacttcaagagcaactccgccgtggcctggtccaacaagtccgatttcgcctgcgccaacgccttcaacaacagcattatccccgaggacacattcttcccaagccccgagagcagcgactccaccgaccacgtgaagcccaaagagacagagaacaccaagcagcccagcaagagctgccacaagcccaaggccatcgtgcacaccgagaaagtgaacatgatgagcctgaccgtgctgggcctgcggatgctgttcgccaaaaccgtggccgtgaacttcctgctgaccgccaagctgttcttcctcctcaccgcccgcgccaagagaagcggatctggcgtgaagcagaccctgaatttcgacctgctgaagctggctggcgacgtggaatccaacccaggccctactagtatggactggatttggcgcatccttttccttgtcggcgctgctaccggcgcgcattccttcgaacagattcagctggtgcagtctggccccgagctgaagaaacctggcgagacagtgaagatcagctgcaaggccagcggctacatcttcaccaattacggcatgaactgggtcaagcaggcccctggcaagagcttcaagtggatgggctggatcaacacctacaccggcgagagcacatacagcgccgacttcaagggcagattcgccttcagcctggaaaccagcgccagcacagcctacctgcacatcaacgacctgaagaacgaggacaccgccacctacttttgcgccagaagcggcggctacgaccctatggattattggggccagggcaccagcgtgaccgtttcttctacgcgtgaggacctgaagaacgtgttcccacctgaggtggccgtgttcgagcctagcgaggccgagatcagccacacccagaaagccaccctcgtgtgcctggctaccggcttctaccccgaccatgtggaactgtcttggtgggtcaacggcaaagaggtgcacagcggcgtgtgtaccgacccccagccactgaaagaacagcccgccctgaacgacagccggtactgcctgagcagcagactgagagtgtccgccaccttctggcagaacccccggaaccacttcagatgccaggtgcagttctacggcctgagcgagaacgacgagtggacccaggacagagccaagcccgtgacccagatcgtgtctgccgaagcctggggcagagccgatgatgtgattaagatccactggcaggaaaagaagtccaacaccatcctgggcagccaggaaggcaacaccatgaagaccaacgacacctacatgaagttcagctggctgaccgtgcccgagaagtccctggacaaagaacacagatgcatcgtgcggcacgaaaacaacaagaacggcgtggaccaggaaatcatcttcccacccatcaagaccgatgtgattacaatggaccccaaggacaactgctccaaggacgccaacgataccctgctgctccagctgaccaacaccagcgcctactacatgtacttgttgctgctgctgaagtccgtggtgtacttcgccatcatcacatgctgcctgctgatggctatggtcaagcggaaggacagccgggga

SEQ ID NO: 6598 - DNA, 2592 bp, synthetic construct
  source 1..2592: mol_type = other DNA
atggccttaccagtgaccgccttgctcctgccgctggccttgctgctccacgccgccaggccggaagtgcagctggttgaatctggcggaggactggttcagcctggcggatctctgagactgtcttgtgccgccagcggcttcagcttcagcgacttttggatgagctgggtccgacaggcccctggcaaaggacttgaatgggtcgccacaatcagccaggccggcagcgagaaggactacgtggactctgtgaagggcagattcaccatcagccgggacaacgccaagaagtccctgtacctccagatgaacagcctgagagccgaggacaccgccgtgtactattgtgcctctggcgtgtacagcttcgactacagaggccagggcaccctggtcacagtctcttctggtaccggcggaggcggatctggcggcggaggtagcggtggcggaggatctgaattcgacgagatcgtgctgacacagagccctggcaccctgagcctgtctccaggcgaaagagccacactgagctgtcgggccagccagagcgtgtccaatacctacctggcctggtatcaccagaggcccggacaggctccccggctgctgatctatggcgcttctagcagagccaccggcatccccgatagattcagcggctctggcagcggcaccgacttcgccctgacaatcagctccctggaacccgaggacttcgccgtgtactactgccagcagtacagcaactcctggaccttcggccagggcaccaaggtggaaatcaagagactcgagatccagaaccctgatcctgccgtgtaccagctgcgggatagcaagagcagcgacaagagcgtgtgtctgttcaccgacttcgacagccagaccaacgtgtcccagagcaaggactccgacgtgtacatcaccgataagtgcgtgctggacatgcggagcatggacttcaagagcaactccgccgtggcctggtccaacaagtccgatttcgcctgcgccaacgccttcaacaacagcattatccccgaggacacattcttcccaagccccgagagcagcgactccaccgaccacgtgaagcccaaagagacagagaacaccaagcagcccagcaagagctgccacaagcccaaggccatcgtgcacaccgagaaagtgaacatgatgagcctgaccgtgctgggcctgcggatgctgttcgccaaaaccgtggccgtgaacttcctgctgaccgccaagctgttcttcctcctcaccgcccgcgccaagagaagcggatctggcgtgaagcagaccctgaatttcgacctgctgaagctggctggcgacgtggaatccaacccaggccctactagtatggactggatttggcgcatccttttccttgtcggcgctgctaccggcgcgcattccttcgaacaggtgcaactggtggaatctggcgggggagtggtgcagcctggcagaagcctgagactgtcttgtgccgccagcggcttcaccttcagcagctacgacatgcactgggtgcgccaggcccctggcaaaggactggaatgggtggccgtgatctcctacgacggcaccaacgagtattacgccgacagcgtgaagggccggttcaccatctccagagacaccagcaagaacaccctgtacctccagatgaacagcctgcgggccgaggacacagccgtgtattattgcgccagagagcggtacttcgactggtccttcgactactggggccagggaaccctggtgtccgtgtctagtacgcgtgaggacctgaagaacgtgttcccacctgaggtggccgtgttcgagcctagcgaggccgagatcagccacacccagaaagccaccctcgtgtgcctggctaccggcttctaccccgaccatgtggaactgtcttggtgggtcaacggcaaagaggtgcacagcggcgtgtgtaccgacccccagccactgaaagaacagcccgccctgaacgacagccggtactgcctgagcagcagactgagagtgtccgccaccttctggcagaacccccggaaccacttcagatgccaggtgcagttctacggcctgagcgagaacgacgagtggacccaggacagagccaagcccgtgacccagatcgtgtctgccgaagcctggggcagagccgatgatgtgattaagatccactggcaggaaaagaagtccaacaccatcctgggcagccaggaaggcaacaccatgaagaccaacgacacctacatgaagttcagctggctgaccgtgcccgagaagtccctggacaaagaacacagatgcatcgtgcggcacgaaaacaacaagaacggcgtggaccaggaaatcatcttcccacccatcaagaccgatgtgattacaatggaccccaaggacaactgctccaaggacgccaacgataccctgctgctccagctgaccaacaccagcgcctactacatgtacttgttgctgctgctgaagtccgtggtgtacttcgccatcatcacatgctgcctgctgatggctatggtcaagcggaaggacagccgggga

SEQ ID NO: 6599 - DNA, 2589 bp, synthetic construct
  source 1..2589: mol_type = other DNA
atggccttaccagtgaccgccttgctcctgccgctggccttgctgctccacgccgccaggccggaagtgcagctggttgaatctggcggaggactggttcagcctggcggatctctgagactgtcttgtgccgccagcggcttcagcttcagcgacttttggatgagctgggtccgacaggcccctggcaaaggacttgaatgggtcgccacaatcagccaggccggcagcgagaaggactacgtggactctgtgaagggcagattcaccatcagccgggacaacgccaagaagtccctgtacctccagatgaacagcctgagagccgaggacaccgccgtgtactattgtgcctctggcgtgtacagcttcgactacagaggccagggcaccctggtcacagtctcttctggtaccggcggaggcggatctggcggcggaggtagcggtggcggaggatctgaattcgacgagctgacacaggaccctgctgtgtctgttgccctgggccagacagtgcggattacctgtcaaggcgacagcctgagaagcaactacgccaactggtatcagcagaagcccggacaggctcccgtgctggttatctacggccagaacaacagacccagcggcatccccgatagattcagcggctctagctctggcaataccgccagcctgacaatcactggcgctcaggctgccgatgaggccgactactactgcgatagcagagtgtccaccggcaatcacgtggtgtttggcggcggaacaaagctgacagtgctcggacaactcgagatccagaaccctgatcctgccgtgtaccagctgcgggatagcaagagcagcgacaagagcgtgtgtctgttcaccgacttcgacagccagaccaacgtgtcccagagcaaggactccgacgtgtacatcaccgataagtgcgtgctggacatgcggagcatggacttcaagagcaactccgccgtggcctggtccaacaagtccgatttcgcctgcgccaacgccttcaacaacagcattatccccgaggacacattcttcccaagccccgagagcagcgactccaccgaccacgtgaagcccaaagagacagagaacaccaagcagcccagcaagagctgccacaagcccaaggccatcgtgcacaccgagaaagtgaacatgatgagcctgaccgtgctgggcctgcggatgctgttcgccaaaaccgtggccgtgaacttcctgctgaccgccaagctgttcttcctcctcaccgcccgcgccaagagaagcggatctggcgtgaagcagaccctgaatttcgacctgctgaagctggctggcgacgtggaatccaacccaggccctactagtatggactggatttggcgcatccttttccttgtcggcgctgctaccggcgcgcattccttcgaagaagttcagctggtgcagagcggagccgaagtgaagaaacctggggcctctgtgaaggtgtcctgcaaggcttccggctacacctttaccagctacgccatgcactgggtccgacaggcacctggacaacggcttgaatggatgggctggatcaacgccggcaacggcaacaccaagtacagccagaaattccagggccgcgtgaccatcaccagagatacaagcgccagcaccgcctacatggaactgtctagcctgagatccgaggacaccgccgtgtactactgtgccagagacatcagctacggcagcttcgactattggggccagggcacactggtcaccgttagctctacgcgtgaggacctgaagaacgtgttcccacctgaggtggccgtgttcgagcctagcgaggccgagatcagccacacccagaaagccaccctcgtgtgcctggctaccggcttctaccccgaccatgtggaactgtcttggtgggtcaacggcaaagaggtgcacagcggcgtgtgtaccgacccccagccactgaaagaacagcccgccctgaacgacagccggtactgcctgagcagcagactgagagtgtccgccaccttctggcagaacccccggaaccacttcagatgccaggtgcagttctacggcctgagcgagaacgacgagtggacccaggacagagccaagcccgtgacccagatcgtgtctgccgaagcctggggcagagccgatgatgtgattaagatccactggcaggaaaagaagtccaacaccatcctgggcagccaggaaggcaacaccatgaagaccaacgacacctacatgaagttcagctggctgaccgtgcccgagaagtccctggacaaagaacacagatgcatcgtgcggcacgaaaacaacaagaacggcgtggaccaggaaatcatcttcccacccatcaagaccgatgtgattacaatggaccccaaggacaactgctccaaggacgccaacgataccctgctgctccagctgaccaacaccagcgcctactacatgtacttgttgctgctgctgaagtccgtggtgtacttcgccatcatcacatgctgcctgctgatggctatggtcaagcggaaggacagccgggga

SEQ ID NO: 6600 - DNA, 2595 bp, synthetic construct
  source 1..2595: mol_type = other DNA
atggccttaccagtgaccgccttgctcctgccgctggccttgctgctccacgccgccaggccggaagtgcagctggttgaatctggcggaggactggttcagcctggcggatctctgagactgtcttgtgccgccagcggcttcagcttcagcgacttttggatgagctgggtccgacaggcccctggcaaaggacttgaatgggtcgccacaatcagccaggccggcagcgagaaggactacgtggactctgtgaagggcagattcaccatcagccgggacaacgccaagaagtccctgtacctccagatgaacagcctgagagccgaggacaccgccgtgtactattgtgcctctggcgtgtacagcttcgactacagaggccagggcaccctggtcacagtctcttctggtaccggcggaggcggatctggcggcggaggtagcggtggcggaggatctgaattcgacgacatcgtgctgacacagacaccagccacactgagcgtgacacctggcgattctgtgtccctgagctgtagagccagccagagcatcagcaacaacctgcactggtatcagcagaagtcccacgagagccccagactgctgattaagaacgccagccagtctatcagcggcatccccagcaagtttagcggctctggcagcggcaccgacttcaccctgagaatcaacagcgtggaaaccgaggacttcgggatgtacttctgccagcagagcaatagctggccctacacatttggctccggcaccaagctggaaatcaaactcgagatccagaaccctgatcctgccgtgtaccagctgcgggatagcaagagcagcgacaagagcgtgtgtctgttcaccgacttcgacagccagaccaacgtgtcccagagcaaggactccgacgtgtacatcaccgataagtgcgtgctggacatgcggagcatggacttcaagagcaactccgccgtggcctggtccaacaagtccgatttcgcctgcgccaacgccttcaacaacagcattatccccgaggacacattcttcccaagccccgagagcagcgactccaccgaccacgtgaagcccaaagagacagagaacaccaagcagcccagcaagagctgccacaagcccaaggccatcgtgcacaccgagaaagtgaacatgatgagcctgaccgtgctgggcctgcggatgctgttcgccaaaaccgtggccgtgaacttcctgctgaccgccaagctgttcttcctcctcaccgcccgcgccaagagaagcggatctggcgtgaagcagaccctgaatttcgacctgctgaagctggctggcgacgtggaatccaacccaggccctactagtatggactggatttggcgcatccttttccttgtcggcgctgctaccggcgcgcattccttcgaacaagtgaagctgcaacagagcggacccgagctggttaagccaggcgcttccgtgaagattagctgcaaggccagcggctacagcttcaccggctactacatgcactgggtcaagcagagccacggcaacatcctggactggatcggctacatctacccctacaacggcgtgtccagctacaaccagaagttcaagggcaaagccactctgaccgtggacaagagcagcagcaccgcctacatggaactgagaagcctgaccagcgaggacagcgccgtgtactattgtgccagagagcggggcctgtaccagctcagagcaatggattattggggccagggcaccagcgtgaccgtttcttctacgcgtgaggacctgaagaacgtgttcccacctgaggtggccgtgttcgagcctagcgaggccgagatcagccacacccagaaagccaccctcgtgtgcctggctaccggcttctaccccgaccatgtggaactgtcttggtgggtcaacggcaaagaggtgcacagcggcgtgtgtaccgacccccagccactgaaagaacagcccgccctgaacgacagccggtactgcctgagcagcagactgagagtgtccgccaccttctggcagaacccccggaaccacttcagatgccaggtgcagttctacggcctgagcgagaacgacgagtggacccaggacagagccaagcccgtgacccagatcgtgtctgccgaagcctggggcagagccgatgatgtgattaagatccactggcaggaaaagaagtccaacaccatcctgggcagccaggaaggcaacaccatgaagaccaacgacacctacatgaagttcagctggctgaccgtgcccgagaagtccctggacaaagaacacagatgcatcgtgcggcacgaaaacaacaagaacggcgtggaccaggaaatcatcttcccacccatcaagaccgatgtgattacaatggaccccaaggacaactgctccaaggacgccaacgataccctgctgctccagctgaccaacaccagcgcctactacatgtacttgttgctgctgctgaagtccgtggtgtacttcgccatcatcacatgctgcctgctgatggctatggtcaagcggaaggacagccgggga

SEQ ID NO: 6601 - DNA, 2568 bp, synthetic construct
  source 1..2568: mol_type = other DNA
atggccttaccagtgaccgccttgctcctgccgctggccttgctgctccacgccgccaggccggaagtgcagctggttgaatctggcggaggactggttcagcctggcggatctctgagactgtcttgtgccgccagcggcttcagcttcagcgacttttggatgagctgggtccgacaggcccctggcaaaggacttgaatgggtcgccacaatcagccaggccggcagcgagaaggactacgtggactctgtgaagggcagattcaccatcagccgggacaacgccaagaagtccctgtacctccagatgaacagcctgagagccgaggacaccgccgtgtactattgtgcctctggcgtgtacagcttcgactacagaggccagggcaccctggtcacagtctcttctggtaccggcggaggcggatctggcggcggaggtagcggtggcggaggatctgaattcgacgacatcgtgatgacacagacccctgccatcatgagcgcctctccaggccagaaagtgaccatcacatgtagcgccagcagcagcgtgaactacatgcactggtatcagcagaagctgggcagcagccccaagctgtggatctacgataccagcaaactggcccctggcgtgccagccagattttctggttctggcagcggcaccagctacagcctgacaatcagcagcatggaagccgaggatgccgccagctacttctgccatcagtggtctagctacccctacacctttggctccggcaccaagctggaaatcaaactcgagatccagaaccctgatcctgccgtgtaccagctgcgggatagcaagagcagcgacaagagcgtgtgtctgttcaccgacttcgacagccagaccaacgtgtcccagagcaaggactccgacgtgtacatcaccgataagtgcgtgctggacatgcggagcatggacttcaagagcaactccgccgtggcctggtccaacaagtccgatttcgcctgcgccaacgccttcaacaacagcattatccccgaggacacattcttcccaagccccgagagcagcgactccaccgaccacgtgaagcccaaagagacagagaacaccaagcagcccagcaagagctgccacaagcccaaggccatcgtgcacaccgagaaagtgaacatgatgagcctgaccgtgctgggcctgcggatgctgttcgccaaaaccgtggccgtgaacttcctgctgaccgccaagctgttcttcctcctcaccgcccgcgccaagagaagcggatctggcgtgaagcagaccctgaatttcgacctgctgaagctggctggcgacgtggaatccaacccaggccctactagtatggactggatttggcgcatccttttccttgtcggcgctgctaccggcgcgcattccttcgaagaagttcagctccaagagtctggccccgacctggtcaagcctagccaaagcctgagcctgacctgtaccgtgaccggctacagcatcacaagcggctatggatggcactggatcagacagttccccggcaacaaactggaatggatgggctacatccactacagcggcagcaccacctacaatcccagcctgaagtcccggatcagcatcagcagagacaccagcaagaaccagttcttcctgcaactgaacagcgtgaccaccgaggacaccgccacctactattgtgctcggagcctgagatattggggccagggcacaaccctgaccgtgtcatctacgcgtgaggacctgaagaacgtgttcccacctgaggtggccgtgttcgagcctagcgaggccgagatcagccacacccagaaagccaccctcgtgtgcctggctaccggcttctaccccgaccatgtggaactgtcttggtgggtcaacggcaaagaggtgcacagcggcgtgtgtaccgacccccagccactgaaagaacagcccgccctgaacgacagccggtactgcctgagcagcagactgagagtgtccgccaccttctggcagaacccccggaaccacttcagatgccaggtgcagttctacggcctgagcgagaacgacgagtggacccaggacagagccaagcccgtgacccagatcgtgtctgccgaagcctggggcagagccgatgatgtgattaagatccactggcaggaaaagaagtccaacaccatcctgggcagccaggaaggcaacaccatgaagaccaacgacacctacatgaagttcagctggctgaccgtgcccgagaagtccctggacaaagaacacagatgcatcgtgcggcacgaaaacaacaagaacggcgtggaccaggaaatcatcttcccacccatcaagaccgatgtgattacaatggaccccaaggacaactgctccaaggacgccaacgataccctgctgctccagctgaccaacaccagcgcctactacatgtacttgttgctgctgctgaagtccgtggtgtacttcgccatcatcacatgctgcctgctgatggctatggtcaagcggaaggacagccgggga

SEQ ID NO: 6602 - DNA, 2577 bp, synthetic construct
  source 1..2577: mol_type = other DNA
atggccttaccagtgaccgccttgctcctgccgctggccttgctgctccacgccgccaggccggaagtgcagctggttgaatctggcggaggactggttcagcctggcggatctctgagactgtcttgtgccgccagcggcttcagcttcagcgacttttggatgagctgggtccgacaggcccctggcaaaggacttgaatgggtcgccacaatcagccaggccggcagcgagaaggactacgtggactctgtgaagggcagattcaccatcagccgggacaacgccaagaagtccctgtacctccagatgaacagcctgagagccgaggacaccgccgtgtactattgtgcctctggcgtgtacagcttcgactacagaggccagggcaccctggtcacagtctcttctggtaccggcggaggcggatctggcggcggaggtagcggtggcggaggatctgaattcgacgacatccagatgacacagagccctagcagcctgtctgccagcgtgggagacagagtgaccatcacctgtagcgccaccagcagcatcagctacatgcactggtatcagcagaagcccggcaaggcccctaaaggctggatctacgataccagcaaactggcccacggcgtgcccagcagattttctggttctggcagcggcaccgacttcaccctgacaatatctagcctccagcctgaggacttcgccacctactactgccaccagagaagaagctaccccttcaccttcggccagggcaccaaggtggaaatcaaactcgagatccagaaccctgatcctgccgtgtaccagctgcgggatagcaagagcagcgacaagagcgtgtgtctgttcaccgacttcgacagccagaccaacgtgtcccagagcaaggactccgacgtgtacatcaccgataagtgcgtgctggacatgcggagcatggacttcaagagcaactccgccgtggcctggtccaacaagtccgatttcgcctgcgccaacgccttcaacaacagcattatccccgaggacacattcttcccaagccccgagagcagcgactccaccgaccacgtgaagcccaaagagacagagaacaccaagcagcccagcaagagctgccacaagcccaaggccatcgtgcacaccgagaaagtgaacatgatgagcctgaccgtgctgggcctgcggatgctgttcgccaaaaccgtggccgtgaacttcctgctgaccgccaagctgttcttcctcctcaccgcccgcgccaagagaagcggatctggcgtgaagcagaccctgaatttcgacctgctgaagctggctggcgacgtggaatccaacccaggccctactagtatggactggatttggcgcatccttttccttgtcggcgctgctaccggcgcgcattccttcgaagaagtgcaactggttcagagcggagccgaagtgaagaaacctggggcctctgtgaaggtgtcctgcaaggcttccggctacacctttaccaatttctggattcactgggtccgacaggctccaggccaaggactggaatggatcggagagatcgaccccagcgacagctacaccaactacaaccagaaattcaaaggccgggtcaccatcaccagagacaccagcacaagcaccgcctacctggaactgagcagcctgagaagcgaggacaccgccgtgtactactgcgccagggaaatcaccaccgtggattattggggccagggaaccctggtcaccgtgtcatctacgcgtgaggacctgaagaacgtgttcccacctgaggtggccgtgttcgagcctagcgaggccgagatcagccacacccagaaagccaccctcgtgtgcctggctaccggcttctaccccgaccatgtggaactgtcttggtgggtcaacggcaaagaggtgcacagcggcgtgtgtaccgacccccagccactgaaagaacagcccgccctgaacgacagccggtactgcctgagcagcagactgagagtgtccgccaccttctggcagaacccccggaaccacttcagatgccaggtgcagttctacggcctgagcgagaacgacgagtggacccaggacagagccaagcccgtgacccagatcgtgtctgccgaagcctggggcagagccgatgatgtgattaagatccactggcaggaaaagaagtccaacaccatcctgggcagccaggaaggcaacaccatgaagaccaacgacacctacatgaagttcagctggctgaccgtgcccgagaagtccctggacaaagaacacagatgcatcgtgcggcacgaaaacaacaagaacggcgtggaccaggaaatcatcttcccacccatcaagaccgatgtgattacaatggaccccaaggacaactgctccaaggacgccaacgataccctgctgctccagctgaccaacaccagcgcctactacatgtacttgttgctgctgctgaagtccgtggtgtacttcgccatcatcacatgctgcctgctgatggctatggtcaagcggaaggacagccgggga

SEQ ID NO: 6603 - DNA, 2598 bp, synthetic construct
  source 1..2598: mol_type = other DNA
atggccttaccagtgaccgccttgctcctgccgctggccttgctgctccacgccgccaggccggaagtgcagctggttgaatctggcggaggactggttcagcctggcggatctctgagactgtcttgtgccgccagcggcttcagcttcagcgacttttggatgagctgggtccgacaggcccctggcaaaggacttgaatgggtcgccacaatcagccaggccggcagcgagaaggactacgtggactctgtgaagggcagattcaccatcagccgggacaacgccaagaagtccctgtacctccagatgaacagcctgagagccgaggacaccgccgtgtactattgtgcctctggcgtgtacagcttcgactacagaggccagggcaccctggtcacagtctcttctggtaccggcggaggcggatctggcggcggaggtagcggtggcggaggatctgaattcgacgacatccagatgacacagagccctagcagcctgtctgccagcgtgggagacagagtgaccatcacatgcaaggccagccagggcttcaacaaatacgtggcctggtatcagcagaagcccggcaaggctcctaagctgctgatctactacaccagcacactccagcctggcgtgcccagcagattttctggctctggcagcggcagagactacaccctgacaatatccagcctccagccagaggacttcgccacctactactgtctccagtacggcaacctgctgtacgcctttggacagggcaccaaggtggaaatcaagagactcgagatccagaaccctgatcctgccgtgtaccagctgcgggatagcaagagcagcgacaagagcgtgtgtctgttcaccgacttcgacagccagaccaacgtgtcccagagcaaggactccgacgtgtacatcaccgataagtgcgtgctggacatgcggagcatggacttcaagagcaactccgccgtggcctggtccaacaagtccgatttcgcctgcgccaacgccttcaacaacagcattatccccgaggacacattcttcccaagccccgagagcagcgactccaccgaccacgtgaagcccaaagagacagagaacaccaagcagcccagcaagagctgccacaagcccaaggccatcgtgcacaccgagaaagtgaacatgatgagcctgaccgtgctgggcctgcggatgctgttcgccaaaaccgtggccgtgaacttcctgctgaccgccaagctgttcttcctcctcaccgcccgcgccaagagaagcggatctggcgtgaagcagaccctgaatttcgacctgctgaagctggctggcgacgtggaatccaacccaggccctactagtatggactggatttggcgcatccttttccttgtcggcgctgctaccggcgcgcattccttcgaagaagttcagcttgtgcagagcggagccgaagtgaagaaacctggggcctctgtgaaggtgtcctgcaaagccagcggctacacctttaccagctactggatcggctgggtccgacaggctcctggacaaggactggaatggatcggcgacatctatcccggcggaggctacaccaactacaacgagaagttcaagggccgcgtgacaatcaccagagacacctctacaagcaccgcctacctggaactgagcagcctgagaagcgaggacaccgccgtgtactactgcgccagactggatggcagcagctacagaggcgctatggattcttggggccagggcacactggtcaccgtttcttctacgcgtgaggacctgaagaacgtgttcccacctgaggtggccgtgttcgagcctagcgaggccgagatcagccacacccagaaagccaccctcgtgtgcctggctaccggcttctaccccgaccatgtggaactgtcttggtgggtcaacggcaaagaggtgcacagcggcgtgtgtaccgacccccagccactgaaagaacagcccgccctgaacgacagccggtactgcctgagcagcagactgagagtgtccgccaccttctggcagaacccccggaaccacttcagatgccaggtgcagttctacggcctgagcgagaacgacgagtggacccaggacagagccaagcccgtgacccagatcgtgtctgccgaagcctggggcagagccgatgatgtgattaagatccactggcaggaaaagaagtccaacaccatcctgggcagccaggaaggcaacaccatgaagaccaacgacacctacatgaagttcagctggctgaccgtgcccgagaagtccctggacaaagaacacagatgcatcgtgcggcacgaaaacaacaagaacggcgtggaccaggaaatcatcttcccacccatcaagaccgatgtgattacaatggaccccaaggacaactgctccaaggacgccaacgataccctgctgctccagctgaccaacaccagcgcctactacatgtacttgttgctgctgctgaagtccgtggtgtacttcgccatcatcacatgctgcctgctgatggctatggtcaagcggaaggacagccgggga

SEQ ID NO: 6604 - DNA, 2586 bp, synthetic construct
  source 1..2586: mol_type = other DNA
atggccttaccagtgaccgccttgctcctgccgctggccttgctgctccacgccgccaggccggaagtgcagctggttgaatctggcggaggactggttcagcctggcggatctctgagactgtcttgtgccgccagcggcttcagcttcagcgacttttggatgagctgggtccgacaggcccctggcaaaggacttgaatgggtcgccacaatcagccaggccggcagcgagaaggactacgtggactctgtgaagggcagattcaccatcagccgggacaacgccaagaagtccctgtacctccagatgaacagcctgagagccgaggacaccgccgtgtactattgtgcctctggcgtgtacagcttcgactacagaggccagggcaccctggtcacagtctcttctggtaccggcggaggcggatctggcggcggaggtagcggtggcggaggatctgaattcgacgacatccagatgacacagagccctagcagcctgtctgccagcgtgggagacagagtgaccatcacctgtagagccagccaggacatccggtactacctgaactggtatcagcagaagcccggcaaggcccctaagctgctgatctatgtggcctccagcctccagagcggagtgccttctagattttctggcagcggctccggcaccgagtttaccctgacagtgtctagcttgcagcccgaggacttcgccacctactactgcctgcaagtgtacagcacccctcggacctttggacagggcaccaaggtggaaatcaaactcgagatccagaaccctgatcctgccgtgtaccagctgcgggatagcaagagcagcgacaagagcgtgtgtctgttcaccgacttcgacagccagaccaacgtgtcccagagcaaggactccgacgtgtacatcaccgataagtgcgtgctggacatgcggagcatggacttcaagagcaactccgccgtggcctggtccaacaagtccgatttcgcctgcgccaacgccttcaacaacagcattatccccgaggacacattcttcccaagccccgagagcagcgactccaccgaccacgtgaagcccaaagagacagagaacaccaagcagcccagcaagagctgccacaagcccaaggccatcgtgcacaccgagaaagtgaacatgatgagcctgaccgtgctgggcctgcggatgctgttcgccaaaaccgtggccgtgaacttcctgctgaccgccaagctgttcttcctcctcaccgcccgcgccaagagaagcggatctggcgtgaagcagaccctgaatttcgacctgctgaagctggctggcgacgtggaatccaacccaggccctactagtatggactggatttggcgcatccttttccttgtcggcgctgctaccggcgcgcattccttcgaagaagtgcagcttgttgaatctggcggcggactggctaagcctggcggatctctgagactgtcttgtgccgccagcggcttccggttcaccttcaacaactactacatggactgggtccgacaggcccctggacaaggacttgaatgggtgtccagaatcagcagcagcggcgaccctacttggtacgccgattctgtgaagggcagattcaccatcagcagagagaacgccaagaacaccctgttcctccagatgaactccctgagagccgaggacaccgccgtgtactattgtgcctctctgaccaccggcagcgattcttggggacagggcgtgctggttaccgtgtcatctacgcgtgaggacctgaagaacgtgttcccacctgaggtggccgtgttcgagcctagcgaggccgagatcagccacacccagaaagccaccctcgtgtgcctggctaccggcttctaccccgaccatgtggaactgtcttggtgggtcaacggcaaagaggtgcacagcggcgtgtgtaccgacccccagccactgaaagaacagcccgccctgaacgacagccggtactgcctgagcagcagactgagagtgtccgccaccttctggcagaacccccggaaccacttcagatgccaggtgcagttctacggcctgagcgagaacgacgagtggacccaggacagagccaagcccgtgacccagatcgtgtctgccgaagcctggggcagagccgatgatgtgattaagatccactggcaggaaaagaagtccaacaccatcctgggcagccaggaaggcaacaccatgaagaccaacgacacctacatgaagttcagctggctgaccgtgcccgagaagtccctggacaaagaacacagatgcatcgtgcggcacgaaaacaacaagaacggcgtggaccaggaaatcatcttcccacccatcaagaccgatgtgattacaatggaccccaaggacaactgctccaaggacgccaacgataccctgctgctccagctgaccaacaccagcgcctactacatgtacttgttgctgctgctgaagtccgtggtgtacttcgccatcatcacatgctgcctgctgatggctatggtcaagcggaaggacagccgggga

SEQ ID NO: 6605 - DNA, 2586 bp, synthetic construct
  source 1..2586: mol_type = other DNA
atggccttaccagtgaccgccttgctcctgccgctggccttgctgctccacgccgccaggccggaagtgcagctggttgaatctggcggaggactggttcagcctggcggatctctgagactgtcttgtgccgccagcggcttcagcttcagcgacttttggatgagctgggtccgacaggcccctggcaaaggacttgaatgggtcgccacaatcagccaggccggcagcgagaaggactacgtggactctgtgaagggcagattcaccatcagccgggacaacgccaagaagtccctgtacctccagatgaacagcctgagagccgaggacaccgccgtgtactattgtgcctctggcgtgtacagcttcgactacagaggccagggcaccctggtcacagtctcttctggtaccggcggaggcggatctggcggcggaggtagcggtggcggaggatctgaattcgagatcgtgatgacacagagccccgccacactgagtgtgtctccaggcgaaagagccacactgtcctgtagagccagccagagcgtgtccagaaacctggcctggtatcagcagaagcctggacaggctccccggctgttgatctacggcgcttctacaagagccaccggcattcccgccagattttctggctctggcagcggcaccgagttcaccctgacaatcggaagcctccagagcgaggacttcgccgtgtactactgccagcagtacaagacctggcctcggacctttggacagggcaccaacgtggaaatcaaactcgagatccagaaccctgatcctgccgtgtaccagctgcgggatagcaagagcagcgacaagagcgtgtgtctgttcaccgacttcgacagccagaccaacgtgtcccagagcaaggactccgacgtgtacatcaccgataagtgcgtgctggacatgcggagcatggacttcaagagcaactccgccgtggcctggtccaacaagtccgatttcgcctgcgccaacgccttcaacaacagcattatccccgaggacacattcttcccaagccccgagagcagcgactccaccgaccacgtgaagcccaaagagacagagaacaccaagcagcccagcaagagctgccacaagcccaaggccatcgtgcacaccgagaaagtgaacatgatgagcctgaccgtgctgggcctgcggatgctgttcgccaaaaccgtggccgtgaacttcctgctgaccgccaagctgttcttcctcctcaccgcccgcgccaagagaagcggatctggcgtgaagcagaccctgaatttcgacctgctgaagctggctggcgacgtggaatccaacccaggccctactagtatggactggatttggcgcatccttttccttgtcggcgctgctaccggcgcgcattccttcgaacaagttcagctgcaacaatggggagccggcctgctgaagcctagcgaaacactgtctctgacctgcgccgtgttcggcggctctttcagcggctactactggtcctggatcagacagcctcctggcaaaggactggaatggatcggcgagatcaaccaccggggcaacaccaacgacaaccccagcctgaaaagcagagtgaccatcagcgtggacaccagcaagaaccagttcgccctgaagctgagcagcgtgacagccgctgataccgccgtgtattattgcgccagagagcggggctacacctacggcaatttcgatcactggggccagggcaccctggtcacagtttcttctacgcgtgaggacctgaagaacgtgttcccacctgaggtggccgtgttcgagcctagcgaggccgagatcagccacacccagaaagccaccctcgtgtgcctggctaccggcttctaccccgaccatgtggaactgtcttggtgggtcaacggcaaagaggtgcacagcggcgtgtgtaccgacccccagccactgaaagaacagcccgccctgaacgacagccggtactgcctgagcagcagactgagagtgtccgccaccttctggcagaacccccggaaccacttcagatgccaggtgcagttctacggcctgagcgagaacgacgagtggacccaggacagagccaagcccgtgacccagatcgtgtctgccgaagcctggggcagagccgatgatgtgattaagatccactggcaggaaaagaagtccaacaccatcctgggcagccaggaaggcaacaccatgaagaccaacgacacctacatgaagttcagctggctgaccgtgcccgagaagtccctggacaaagaacacagatgcatcgtgcggcacgaaaacaacaagaacggcgtggaccaggaaatcatcttcccacccatcaagaccgatgtgattacaatggaccccaaggacaactgctccaaggacgccaacgataccctgctgctccagctgaccaacaccagcgcctactacatgtacttgttgctgctgctgaagtccgtggtgtacttcgccatcatcacatgctgcctgctgatggctatggtcaagcggaaggacagccgggga

SEQ ID NO: 6606 - DNA, 2589 bp, synthetic construct
  source 1..2589: mol_type = other DNA
atggccttaccagtgaccgccttgctcctgccgctggccttgctgctccacgccgccaggccggaagtgcagctggttgaatctggcggaggactggttcagcctggcggatctctgagactgtcttgtgccgccagcggcttcagcttcagcgacttttggatgagctgggtccgacaggcccctggcaaaggacttgaatgggtcgccacaatcagccaggccggcagcgagaaggactacgtggactctgtgaagggcagattcaccatcagccgggacaacgccaagaagtccctgtacctccagatgaacagcctgagagccgaggacaccgccgtgtactattgtgcctctggcgtgtacagcttcgactacagaggccagggcaccctggtcacagtctcttctggtaccggcggaggcggatctggcggcggaggtagcggtggcggaggatctgaattcgagatcgtgatgacccctagcagcgccacactgagtgtgtctccaggcgaaagagccacactgtcctgtagagccagccagagcgtgtccagaaacctggcctggtatcagcagaagcctggacaggctccccggctgttgatctacggcgcttctacaagagccaccggcattcccgccagattttctggctctggcagcggcaccgagttcaccctgacaatctctagcctccagagcgaggacttcgccgtgtactactgccaccagtacagcaactggatgtgcagcttcggccagggcaccaagctggaaatcaaactcgagatccagaaccctgatcctgccgtgtaccagctgcgggatagcaagagcagcgacaagagcgtgtgtctgttcaccgacttcgacagccagaccaacgtgtcccagagcaaggactccgacgtgtacatcaccgataagtgcgtgctggacatgcggagcatggacttcaagagcaactccgccgtggcctggtccaacaagtccgatttcgcctgcgccaacgccttcaacaacagcattatccccgaggacacattcttcccaagccccgagagcagcgactccaccgaccacgtgaagcccaaagagacagagaacaccaagcagcccagcaagagctgccacaagcccaaggccatcgtgcacaccgagaaagtgaacatgatgagcctgaccgtgctgggcctgcggatgctgttcgccaaaaccgtggccgtgaacttcctgctgaccgccaagctgttcttcctcctcaccgcccgcgccaagagaagcggatctggcgtgaagcagaccctgaatttcgacctgctgaagctggctggcgacgtggaatccaacccaggccctactagtatggactggatttggcgcatccttttccttgtcggcgctgctaccggcgcgcattccttcgaagaagttcagctccttgagtcaggtggcggcctggttcaacctggcggatctctgagactgagctgtgccgccagcggcttcacctttagcagatacgccatgaactgggtccgacaggcccctggcaaaggactggaatgggtgtccggcatctctggaagcggcggcagaacctactacgccgattctgtgaagggcagattcaccatcagccgggacaacagcaagaacaccctgtacctccagatgaacagcctgagagccgaggacacagccgtgtattattgcgccaaggaccgggacttttggagcggcccttttgactattggggccagggaaccctggtcaccgttagctctacgcgtgaggacctgaagaacgtgttcccacctgaggtggccgtgttcgagcctagcgaggccgagatcagccacacccagaaagccaccctcgtgtgcctggctaccggcttctaccccgaccatgtggaactgtcttggtgggtcaacggcaaagaggtgcacagcggcgtgtgtaccgacccccagccactgaaagaacagcccgccctgaacgacagccggtactgcctgagcagcagactgagagtgtccgccaccttctggcagaacccccggaaccacttcagatgccaggtgcagttctacggcctgagcgagaacgacgagtggacccaggacagagccaagcccgtgacccagatcgtgtctgccgaagcctggggcagagccgatgatgtgattaagatccactggcaggaaaagaagtccaacaccatcctgggcagccaggaaggcaacaccatgaagaccaacgacacctacatgaagttcagctggctgaccgtgcccgagaagtccctggacaaagaacacagatgcatcgtgcggcacgaaaacaacaagaacggcgtggaccaggaaatcatcttcccacccatcaagaccgatgtgattacaatggaccccaaggacaactgctccaaggacgccaacgataccctgctgctccagctgaccaacaccagcgcctactacatgtacttgttgctgctgctgaagtccgtggtgtacttcgccatcatcacatgctgcctgctgatggctatggtcaagcggaaggacagccgggga

SEQ ID NO: 6607 - DNA, 2604 bp, synthetic construct
  source 1..2604: mol_type = other DNA
atggccttaccagtgaccgccttgctcctgccgctggccttgctgctccacgccgccaggccggaagtgcagctggttgaatctggcggaggactggttcagcctggcggatctctgagactgtcttgtgccgccagcggcttcagcttcagcgacttttggatgagctgggtccgacaggcccctggcaaaggacttgaatgggtcgccacaatcagccaggccggcagcgagaaggactacgtggactctgtgaagggcagattcaccatcagccgggacaacgccaagaagtccctgtacctccagatgaacagcctgagagccgaggacaccgccgtgtactattgtgcctctggcgtgtacagcttcgactacagaggccagggcaccctggtcacagtctcttctggtaccggcggaggcggatctggcggcggaggtagcggtggcggaggatctgaattcgacatccagatgacccagagccccagcagcctgtctgccagcgtgggcgacagagtgaccatcacatgcaaggccagcaagaacatcagaagctacctggcctggtatcagcagaagcccggcaaggcccccaagctgctgatctacagcggcagcacactgcacagcggcgtgcccagcagattttccggctctggcagcggcaccgacttcaccctgaccatctctagcctccagcccgaggacttcgccacctactactgccagcagcaccacgagtaccccctgacattcggccagggcaccaaggtggaaatcaagagactcgagatccagaaccctgatcctgccgtgtaccagctgcgggatagcaagagcagcgacaagagcgtgtgtctgttcaccgacttcgacagccagaccaacgtgtcccagagcaaggactccgacgtgtacatcaccgataagtgcgtgctggacatgcggagcatggacttcaagagcaactccgccgtggcctggtccaacaagtccgatttcgcctgcgccaacgccttcaacaacagcattatccccgaggacacattcttcccaagccccgagagcagcgactccaccgaccacgtgaagcccaaagagacagagaacaccaagcagcccagcaagagctgccacaagcccaaggccatcgtgcacaccgagaaagtgaacatgatgagcctgaccgtgctgggcctgcggatgctgttcgccaaaaccgtggccgtgaacttcctgctgaccgccaagctgttcttcctcctcaccgcccgcgccaagagaagcggatctggcgtgaagcagaccctgaatttcgacctgctgaagctggctggcgacgtggaatccaacccaggccctactagtatggactggatttggcgcatccttttccttgtcggcgctgctaccggcgcgcattccttcgaacaggtgcaactccaggaatctggccccggactcgtgaagcccagcgagacactgagcctgacctgtaccgtgtccggctacaccatcaccagcggctacgactggtcctggatcagacagcctcctggcaagggcctggaatggatcggctacatcaactacggcggctccaccaactacaagcccagcctgggaagccgcgtgacaatcagcgtggacacctccaagaaccagttcagcctgaagctgagcagcgtgacagccgccgataccgccgtgtactactgcgcccggtacaacgagtacaagagctacatctacgattggtacttcgacttctggggccagggaaccctcgtgaccgtgtctagtacgcgtgaggacctgaagaacgtgttcccacctgaggtggccgtgttcgagcctagcgaggccgagatcagccacacccagaaagccaccctcgtgtgcctggctaccggcttctaccccgaccatgtggaactgtcttggtgggtcaacggcaaagaggtgcacagcggcgtgtgtaccgacccccagccactgaaagaacagcccgccctgaacgacagccggtactgcctgagcagcagactgagagtgtccgccaccttctggcagaacccccggaaccacttcagatgccaggtgcagttctacggcctgagcgagaacgacgagtggacccaggacagagccaagcccgtgacccagatcgtgtctgccgaagcctggggcagagccgatgatgtgattaagatccactggcaggaaaagaagtccaacaccatcctgggcagccaggaaggcaacaccatgaagaccaacgacacctacatgaagttcagctggctgaccgtgcccgagaagtccctggacaaagaacacagatgcatcgtgcggcacgaaaacaacaagaacggcgtggaccaggaaatcatcttcccacccatcaagaccgatgtgattacaatggaccccaaggacaactgctccaaggacgccaacgataccctgctgctccagctgaccaacaccagcgcctactacatgtacttgttgctgctgctgaagtccgtggtgtacttcgccatcatcacatgctgcctgctgatggctatggtcaagcggaaggacagccgggga

SEQ ID NO: 6608 - DNA, 2610 bp, synthetic construct
  source 1..2610: mol_type = other DNA
atggccttaccagtgaccgccttgctcctgccgctggccttgctgctccacgccgccaggccggaagtgcagctggttgaatctggcggaggactggttcagcctggcggatctctgagactgtcttgtgccgccagcggcttcagcttcagcgacttttggatgagctgggtccgacaggcccctggcaaaggacttgaatgggtcgccacaatcagccaggccggcagcgagaaggactacgtggactctgtgaagggcagattcaccatcagccgggacaacgccaagaagtccctgtacctccagatgaacagcctgagagccgaggacaccgccgtgtactattgtgcctctggcgtgtacagcttcgactacagaggccagggcaccctggtcacagtctcttctggtaccggcggaggcggatctggcggcggaggtagcggtggcggaggatctgaattccagtctgtggtcacacagcctccatccgtgtctgctgcccctggacagaaagtgaccatctcctgtagcggcagcagcagcaacatcggcaacaactacgtgtcctggtatcagcagctccccggcacagctcccaaactgctgatctacgacaacaacaagcggcccagcggcatccccgatagattttctggcagcaagagcggcaccagcgccacactgggaattaccggacttcagacaggcgacgaggccgactactactgtggcacatgggatggcagcctgtacaccatgcttttcggcggaggcaccaagctgacagtgcttctcgagatccagaaccctgatcctgccgtgtaccagctgcgggatagcaagagcagcgacaagagcgtgtgtctgttcaccgacttcgacagccagaccaacgtgtcccagagcaaggactccgacgtgtacatcaccgataagtgcgtgctggacatgcggagcatggacttcaagagcaactccgccgtggcctggtccaacaagtccgatttcgcctgcgccaacgccttcaacaacagcattatccccgaggacacattcttcccaagccccgagagcagcgactccaccgaccacgtgaagcccaaagagacagagaacaccaagcagcccagcaagagctgccacaagcccaaggccatcgtgcacaccgagaaagtgaacatgatgagcctgaccgtgctgggcctgcggatgctgttcgccaaaaccgtggccgtgaacttcctgctgaccgccaagctgttcttcctcctcaccgcccgcgccaagagaagcggatctggcgtgaagcagaccctgaatttcgacctgctgaagctggctggcgacgtggaatccaacccaggccctactagtatggactggatttggcgcatccttttccttgtcggcgctgctaccggcgcgcattccttcgaagaagtgcaactggtggaatctggcggcggactggttaagcctggcggatctctgagactgtcttgtgccgccagcggcttcaccttcagcaatgcctggatgagctgggttcgacaggcccctggaaaaggactggaatgggtcggattcatccggtccaaagcctacggcggcaccacagaatatgccgcctctgtgaagggcagattcaccatcagccgggacgacagcaagtctatcgcctacctccagatgaacaacctgaaaaccgaggacaccgccgtgtactactgcgccagagatggcctgtacagcagctcttggtacgacagcgattactggggccagggcacactggtcacagtgtcatctacgcgtgaggacctgaagaacgtgttcccacctgaggtggccgtgttcgagcctagcgaggccgagatcagccacacccagaaagccaccctcgtgtgcctggctaccggcttctaccccgaccatgtggaactgtcttggtgggtcaacggcaaagaggtgcacagcggcgtgtgtaccgacccccagccactgaaagaacagcccgccctgaacgacagccggtactgcctgagcagcagactgagagtgtccgccaccttctggcagaacccccggaaccacttcagatgccaggtgcagttctacggcctgagcgagaacgacgagtggacccaggacagagccaagcccgtgacccagatcgtgtctgccgaagcctggggcagagccgatgatgtgattaagatccactggcaggaaaagaagtccaacaccatcctgggcagccaggaaggcaacaccatgaagaccaacgacacctacatgaagttcagctggctgaccgtgcccgagaagtccctggacaaagaacacagatgcatcgtgcggcacgaaaacaacaagaacggcgtggaccaggaaatcatcttcccacccatcaagaccgatgtgattacaatggaccccaaggacaactgctccaaggacgccaacgataccctgctgctccagctgaccaacaccagcgcctactacatgtacttgttgctgctgctgaagtccgtggtgtacttcgccatcatcacatgctgcctgctgatggctatggtcaagcggaaggacagccgggga

SEQ ID NO: 6609 - DNA, 2625 bp, synthetic construct
  source 1..2625: mol_type = other DNA
atggccttaccagtgaccgccttgctcctgccgctggccttgctgctccacgccgccaggccggaagtgcagctggttgaatctggcggaggactggttcagcctggcggatctctgagactgtcttgtgccgccagcggcttcagcttcagcgacttttggatgagctgggtccgacaggcccctggcaaaggacttgaatgggtcgccacaatcagccaggccggcagcgagaaggactacgtggactctgtgaagggcagattcaccatcagccgggacaacgccaagaagtccctgtacctccagatgaacagcctgagagccgaggacaccgccgtgtactattgtgcctctggcgtgtacagcttcgactacagaggccagggcaccctggtcacagtctcttctggtaccggcggaggcggatctggcggcggaggtagcggtggcggaggatctgaattccagtctgtgctgacacagcctcctagtgtgtctggcgctcctggacagagagtgaccatctcttgtaccggcagcagcagcaatatcggagccggctatgacgtgcactggtatcagcagctccctggcacagcccctaaactgctgatcttcggcaacagcaacagacccagcggcgtgcccgatagattcagcggctttaagagcggcacaagcgccagcctggctatcactggactgcaagccgaggacgaggccgactacttctgccagagctacgatagcagcctgagcggcagcggagtgtttggcacaggcaccaaagtgacagtgcttggcctcgagatccagaaccctgatcctgccgtgtaccagctgcgggatagcaagagcagcgacaagagcgtgtgtctgttcaccgacttcgacagccagaccaacgtgtcccagagcaaggactccgacgtgtacatcaccgataagtgcgtgctggacatgcggagcatggacttcaagagcaactccgccgtggcctggtccaacaagtccgatttcgcctgcgccaacgccttcaacaacagcattatccccgaggacacattcttcccaagccccgagagcagcgactccaccgaccacgtgaagcccaaagagacagagaacaccaagcagcccagcaagagctgccacaagcccaaggccatcgtgcacaccgagaaagtgaacatgatgagcctgaccgtgctgggcctgcggatgctgttcgccaaaaccgtggccgtgaacttcctgctgaccgccaagctgttcttcctcctcaccgcccgcgccaagagaagcggatctggcgtgaagcagaccctgaatttcgacctgctgaagctggctggcgacgtggaatccaacccaggccctactagtatggactggatttggcgcatccttttccttgtcggcgctgctaccggcgcgcattccttcgaacaaatgcaactggttcaaagcggcggtggcctggtgcaacctggaagaagtctgagactgagctgtgccgccagcggcttcaccttcgatgattacgccatgcactgggtccgacaggcccctggaaaaggactggaatgggtgtccggcatctcctggaatagcggctctatcggctacgccgacagcgtgaagggcagattcaccatcagccgggacaacgccaagaacagcctgtacctccagatgaactccctgagagccgaggatacagccctgtactactgcgccaaggacatccacagcggcagctactacggcctgctgtactacgctatggacgtgtggggccagggcacaaccgtgacagtttcttctacgcgtgaggacctgaagaacgtgttcccacctgaggtggccgtgttcgagcctagcgaggccgagatcagccacacccagaaagccaccctcgtgtgcctggctaccggcttctaccccgaccatgtggaactgtcttggtgggtcaacggcaaagaggtgcacagcggcgtgtgtaccgacccccagccactgaaagaacagcccgccctgaacgacagccggtactgcctgagcagcagactgagagtgtccgccaccttctggcagaacccccggaaccacttcagatgccaggtgcagttctacggcctgagcgagaacgacgagtggacccaggacagagccaagcccgtgacccagatcgtgtctgccgaagcctggggcagagccgatgatgtgattaagatccactggcaggaaaagaagtccaacaccatcctgggcagccaggaaggcaacaccatgaagaccaacgacacctacatgaagttcagctggctgaccgtgcccgagaagtccctggacaaagaacacagatgcatcgtgcggcacgaaaacaacaagaacggcgtggaccaggaaatcatcttcccacccatcaagaccgatgtgattacaatggaccccaaggacaactgctccaaggacgccaacgataccctgctgctccagctgaccaacaccagcgcctactacatgtacttgttgctgctgctgaagtccgtggtgtacttcgccatcatcacatgctgcctgctgatggctatggtcaagcggaaggacagccgggga

SEQ ID NO: 6610 - DNA, 2625 bp, synthetic construct
  source 1..2625: mol_type = other DNA
atggccttaccagtgaccgccttgctcctgccgctggccttgctgctccacgccgccaggccggaagtgcagctggttgaatctggcggaggactggttcagcctggcggatctctgagactgtcttgtgccgccagcggcttcagcttcagcgacttttggatgagctgggtccgacaggcccctggcaaaggacttgaatgggtcgccacaatcagccaggccggcagcgagaaggactacgtggactctgtgaagggcagattcaccatcagccgggacaacgccaagaagtccctgtacctccagatgaacagcctgagagccgaggacaccgccgtgtactattgtgcctctggcgtgtacagcttcgactacagaggccagggcaccctggtcacagtctcttctggtaccggcggaggcggatctggcggcggaggtagcggtggcggaggatctgaattcctgcctgttctgacacagcctccatctgcctctggcacacctggacagagagtgaccatcagctgtagcggcagaagcagcaacatcggcagcaacagcgtgaactggtacagacagcttcctggcgctgcccctaagctgctgatctacagcaacaaccagcggcctcctggcgtgccagtcagattttctggcagcaagagcggcacaagcgccagcctggctatttctggactccagtctgaggacgaggccacctactactgtgccacctgggacgacaacctgaacgtgcactacgtgttcggcaccggcaccaaagtgacagtgcttggaagtagactcgagatccagaaccctgatcctgccgtgtaccagctgcgggatagcaagagcagcgacaagagcgtgtgtctgttcaccgacttcgacagccagaccaacgtgtcccagagcaaggactccgacgtgtacatcaccgataagtgcgtgctggacatgcggagcatggacttcaagagcaactccgccgtggcctggtccaacaagtccgatttcgcctgcgccaacgccttcaacaacagcattatccccgaggacacattcttcccaagccccgagagcagcgactccaccgaccacgtgaagcccaaagagacagagaacaccaagcagcccagcaagagctgccacaagcccaaggccatcgtgcacaccgagaaagtgaacatgatgagcctgaccgtgctgggcctgcggatgctgttcgccaaaaccgtggccgtgaacttcctgctgaccgccaagctgttcttcctcctcaccgcccgcgccaagagaagcggatctggcgtgaagcagaccctgaatttcgacctgctgaagctggctggcgacgtggaatccaacccaggccctactagtatggactggatttggcgcatccttttccttgtcggcgctgctaccggcgcgcattccttcgaacttgaaatggctcaggtgcagctggtgcagagcggagccgaagtgaagaaacctggcagcagcgtgaaggtgtcctgcaaagcttctggcggcaccttcagcagctacgccatctcttgggttcgacaggcccctggacaaggactggaatggatgggcagaatcatccccatcctgggaatcgccaactacgcccagaaattccagggcagagtgacaatcaccgccgacaagagcaccagcaccgcctacatggaactgagcagcctgagaagcgaggacaccgccgtgtactattgtgcaagaggcggctactacagccacgacatgtggagcgaagattggggccagggcacactggtcacagtgtcatctacgcgtgaggacctgaagaacgtgttcccacctgaggtggccgtgttcgagcctagcgaggccgagatcagccacacccagaaagccaccctcgtgtgcctggctaccggcttctaccccgaccatgtggaactgtcttggtgggtcaacggcaaagaggtgcacagcggcgtgtgtaccgacccccagccactgaaagaacagcccgccctgaacgacagccggtactgcctgagcagcagactgagagtgtccgccaccttctggcagaacccccggaaccacttcagatgccaggtgcagttctacggcctgagcgagaacgacgagtggacccaggacagagccaagcccgtgacccagatcgtgtctgccgaagcctggggcagagccgatgatgtgattaagatccactggcaggaaaagaagtccaacaccatcctgggcagccaggaaggcaacaccatgaagaccaacgacacctacatgaagttcagctggctgaccgtgcccgagaagtccctggacaaagaacacagatgcatcgtgcggcacgaaaacaacaagaacggcgtggaccaggaaatcatcttcccacccatcaagaccgatgtgattacaatggaccccaaggacaactgctccaaggacgccaacgataccctgctgctccagctgaccaacaccagcgcctactacatgtacttgttgctgctgctgaagtccgtggtgtacttcgccatcatcacatgctgcctgctgatggctatggtcaagcggaaggacagccgggga

SEQ ID NO: 6611 - DNA, 2607 bp, synthetic construct
  source 1..2607: mol_type = other DNA
atggccttaccagtgaccgccttgctcctgccgctggccttgctgctccacgccgccaggccggaagtgcagctggttgaatctggcggaggactggttcagcctggcggatctctgagactgtcttgtgccgccagcggcttcagcttcagcgacttttggatgagctgggtccgacaggcccctggcaaaggacttgaatgggtcgccacaatcagccaggccggcagcgagaaggactacgtggactctgtgaagggcagattcaccatcagccgggacaacgccaagaagtccctgtacctccagatgaacagcctgagagccgaggacaccgccgtgtactattgtgcctctggcgtgtacagcttcgactacagaggccagggcaccctggtcacagtctcttctggtaccggcggaggcggatctggcggcggaggtagcggtggcggaggatctgaattcgacttcgtgatgacacagagccctgatagcctggccgtgtctctcggcgagcgagtgaccatgagctgcaagtctagccagagcctgctgaacagcggcaaccagaagaactacctgacctggtatcagcagaagcccggccagcctcctaagctgctgatctactgggccagcaccagagaaagcggcgtgcccgatagattttctggctctggcagcggcaccgacttcaccctgacaatttctagcctgcaagccgaggacgtggccgtgtactactgccagaacgactacagctacccctacaccttcggccagggcaccaagctggaaatcaaactcgagatccagaaccctgatcctgccgtgtaccagctgcgggatagcaagagcagcgacaagagcgtgtgtctgttcaccgacttcgacagccagaccaacgtgtcccagagcaaggactccgacgtgtacatcaccgataagtgcgtgctggacatgcggagcatggacttcaagagcaactccgccgtggcctggtccaacaagtccgatttcgcctgcgccaacgccttcaacaacagcattatccccgaggacacattcttcccaagccccgagagcagcgactccaccgaccacgtgaagcccaaagagacagagaacaccaagcagcccagcaagagctgccacaagcccaaggccatcgtgcacaccgagaaagtgaacatgatgagcctgaccgtgctgggcctgcggatgctgttcgccaaaaccgtggccgtgaacttcctgctgaccgccaagctgttcttcctcctcaccgcccgcgccaagagaagcggatctggcgtgaagcagaccctgaatttcgacctgctgaagctggctggcgacgtggaatccaacccaggccctactagtatggactggatttggcgcatccttttccttgtcggcgctgctaccggcgcgcattccttcgaagaagtgcaactggttcagagcggagccgagctgaagaaacctggggccagcgtgaaggtgtcctgtaaagccagcggctacacctttaccgactactacatgaaatgggtccgacaggccccaggccagggactcgaatggatcggcgatattatccccagcaacggggccaccttctacaaccagaaattcaagggccgcgtgaccatcaccgtggacaagagcacaagcaccgcctacatggaactgagcagcctgagaagcgaggacaccgccgtgtattattgcgccagaagccatctgctgcgggccagttggttcgcctattggggacagggaaccctggtcaccgttagctctacgcgtgaggacctgaagaacgtgttcccacctgaggtggccgtgttcgagcctagcgaggccgagatcagccacacccagaaagccaccctcgtgtgcctggctaccggcttctaccccgaccatgtggaactgtcttggtgggtcaacggcaaagaggtgcacagcggcgtgtgtaccgacccccagccactgaaagaacagcccgccctgaacgacagccggtactgcctgagcagcagactgagagtgtccgccaccttctggcagaacccccggaaccacttcagatgccaggtgcagttctacggcctgagcgagaacgacgagtggacccaggacagagccaagcccgtgacccagatcgtgtctgccgaagcctggggcagagccgatgatgtgattaagatccactggcaggaaaagaagtccaacaccatcctgggcagccaggaaggcaacaccatgaagaccaacgacacctacatgaagttcagctggctgaccgtgcccgagaagtccctggacaaagaacacagatgcatcgtgcggcacgaaaacaacaagaacggcgtggaccaggaaatcatcttcccacccatcaagaccgatgtgattacaatggaccccaaggacaactgctccaaggacgccaacgataccctgctgctccagctgaccaacaccagcgcctactacatgtacttgttgctgctgctgaagtccgtggtgtacttcgccatcatcacatgctgcctgctgatggctatggtcaagcggaaggacagccgggga

SEQ ID NO: 6612 - DNA, 2607 bp, synthetic construct
  source 1..2607: mol_type = other DNA
atggccttaccagtgaccgccttgctcctgccgctggccttgctgctccacgccgccaggccggaagtgcagctggttgaatctggcggaggactggttcagcctggcggatctctgagactgtcttgtgccgccagcggcttcagcttcagcgacttttggatgagctgggtccgacaggcccctggcaaaggacttgaatgggtcgccacaatcagccaggccggcagcgagaaggactacgtggactctgtgaagggcagattcaccatcagccgggacaacgccaagaagtccctgtacctccagatgaacagcctgagagccgaggacaccgccgtgtactattgtgcctctggcgtgtacagcttcgactacagaggccagggcaccctggtcacagtctcttctggtaccggcggaggcggatctggcggcggaggtagcggtggcggaggatctgaattcgacttcgtgatgacacagagccctgatagcctggccgtgtctctcggcgagcgagtgaccatgagctgcaagtctagccagagcctgctgaacagcggcaaccagaagaactacctgacctggtatcagcagaagcccggccagcctcctaagctgctgatctactgggccagcaccagagaaagcggcgtgcccgatagattttctggctctggcagcggcaccgacttcaccctgacaatttctagcctgcaagccgaggacgtggccgtgtactactgccagaacgactacagctacccctacaccttcggccagggcaccaagctggaaatcaaactcgagatccagaaccctgatcctgccgtgtaccagctgcgggatagcaagagcagcgacaagagcgtgtgtctgttcaccgacttcgacagccagaccaacgtgtcccagagcaaggactccgacgtgtacatcaccgataagtgcgtgctggacatgcggagcatggacttcaagagcaactccgccgtggcctggtccaacaagtccgatttcgcctgcgccaacgccttcaacaacagcattatccccgaggacacattcttcccaagccccgagagcagcgactccaccgaccacgtgaagcccaaagagacagagaacaccaagcagcccagcaagagctgccacaagcccaaggccatcgtgcacaccgagaaagtgaacatgatgagcctgaccgtgctgggcctgcggatgctgttcgccaaaaccgtggccgtgaacttcctgctgaccgccaagctgttcttcctcctcaccgcccgcgccaagagaagcggatctggcgtgaagcagaccctgaatttcgacctgctgaagctggctggcgacgtggaatccaacccaggccctactagtatggactggatttggcgcatccttttccttgtcggcgctgctaccggcgcgcattccttcgaacaagtgcaactggttcagagcggagccgagctgaagaaacctggggccagcgtgaaggtgtcctgtaaagccagcggctacacctttaccgactactacatgaaatgggtccgacaggccccaggccagggactcgaatggatcggcgatattatccccagcaacggggccaccttctacaaccagaaattcaagggccgcgtgaccatcaccgtggacaagagcacaagcaccgcctacatggaactgagcagcctgagaagcgaggacaccgccgtgtattattgcgccagaagccatctgctgcgggccagttggttcgcctattggggacagggaaccctggtcaccgttagctctacgcgtgaggacctgaagaacgtgttcccacctgaggtggccgtgttcgagcctagcgaggccgagatcagccacacccagaaagccaccctcgtgtgcctggctaccggcttctaccccgaccatgtggaactgtcttggtgggtcaacggcaaagaggtgcacagcggcgtgtgtaccgacccccagccactgaaagaacagcccgccctgaacgacagccggtactgcctgagcagcagactgagagtgtccgccaccttctggcagaacccccggaaccacttcagatgccaggtgcagttctacggcctgagcgagaacgacgagtggacccaggacagagccaagcccgtgacccagatcgtgtctgccgaagcctggggcagagccgatgatgtgattaagatccactggcaggaaaagaagtccaacaccatcctgggcagccaggaaggcaacaccatgaagaccaacgacacctacatgaagttcagctggctgaccgtgcccgagaagtccctggacaaagaacacagatgcatcgtgcggcacgaaaacaacaagaacggcgtggaccaggaaatcatcttcccacccatcaagaccgatgtgattacaatggaccccaaggacaactgctccaaggacgccaacgataccctgctgctccagctgaccaacaccagcgcctactacatgtacttgttgctgctgctgaagtccgtggtgtacttcgccatcatcacatgctgcctgctgatggctatggtcaagcggaaggacagccgggga

SEQ ID NO: 6613 - DNA, 2577 bp, synthetic construct
  source 1..2577: mol_type = other DNA
atggccttaccagtgaccgccttgctcctgccgctggccttgctgctccacgccgccaggccggaagtgcagctggttgaatctggcggaggactggttcagcctggcggatctctgagactgtcttgtgccgccagcggcttcagcttcagcgacttttggatgagctgggtccgacaggcccctggcaaaggacttgaatgggtcgccacaatcagccaggccggcagcgagaaggactacgtggactctgtgaagggcagattcaccatcagccgggacaacgccaagaagtccctgtacctccagatgaacagcctgagagccgaggacaccgccgtgtactattgtgcctctggcgtgtacagcttcgactacagaggccagggcaccctggtcacagtctcttctggtaccggcggaggcggatctggcggcggaggtagcggtggcggaggatctgaattcgacgtgcagatcacacagagccctagctacctggctgcctctcctggcgagacaatcaccatcaactgtcgggccagcaagagcatcagcaaggacctggcctggtatcaagagaagcccggcaagaccaacaagctgctgatctacagcggcagcacactccagtctggcatccccagcagattttccggctctggcagcggcaccgatttcaccctgaccataagcagcctggaacctgaggacttcgccatgtactactgccagcagcacaacaagtacccctacacctttggcggaggcaccaagctggaaatcaagagactcgagatccagaaccctgatcctgccgtgtaccagctgcgggatagcaagagcagcgacaagagcgtgtgtctgttcaccgacttcgacagccagaccaacgtgtcccagagcaaggactccgacgtgtacatcaccgataagtgcgtgctggacatgcggagcatggacttcaagagcaactccgccgtggcctggtccaacaagtccgatttcgcctgcgccaacgccttcaacaacagcattatccccgaggacacattcttcccaagccccgagagcagcgactccaccgaccacgtgaagcccaaagagacagagaacaccaagcagcccagcaagagctgccacaagcccaaggccatcgtgcacaccgagaaagtgaacatgatgagcctgaccgtgctgggcctgcggatgctgttcgccaaaaccgtggccgtgaacttcctgctgaccgccaagctgttcttcctcctcaccgcccgcgccaagagaagcggatctggcgtgaagcagaccctgaatttcgacctgctgaagctggctggcgacgtggaatccaacccaggccctactagtatggactggatttggcgcatccttttccttgtcggcgctgctaccggcgcgcattccttcgaacaagttcaactgcaacagcctggggccgagcttgttagacctggcgcttctgtgaagctgagctgcaaggccagcggctacaccttcaccagctactggatgaactgggtcaagcagcggcctgaccagggcctcgaatggatcggcagaatcgacccctacgacagcgagacacactacaaccagaagttcaaggacaaggccatcctgaccgtggacaagagcagctccaccgcctacatgcaactgagcagcctgacctctgaggatagcgccgtgtactattgcgccagaggcaactgggacgactattggggccagggcacaaccctgacagtgtctagtacgcgtgaggacctgaagaacgtgttcccacctgaggtggccgtgttcgagcctagcgaggccgagatcagccacacccagaaagccaccctcgtgtgcctggctaccggcttctaccccgaccatgtggaactgtcttggtgggtcaacggcaaagaggtgcacagcggcgtgtgtaccgacccccagccactgaaagaacagcccgccctgaacgacagccggtactgcctgagcagcagactgagagtgtccgccaccttctggcagaacccccggaaccacttcagatgccaggtgcagttctacggcctgagcgagaacgacgagtggacccaggacagagccaagcccgtgacccagatcgtgtctgccgaagcctggggcagagccgatgatgtgattaagatccactggcaggaaaagaagtccaacaccatcctgggcagccaggaaggcaacaccatgaagaccaacgacacctacatgaagttcagctggctgaccgtgcccgagaagtccctggacaaagaacacagatgcatcgtgcggcacgaaaacaacaagaacggcgtggaccaggaaatcatcttcccacccatcaagaccgatgtgattacaatggaccccaaggacaactgctccaaggacgccaacgataccctgctgctccagctgaccaacaccagcgcctactacatgtacttgttgctgctgctgaagtccgtggtgtacttcgccatcatcacatgctgcctgctgatggctatggtcaagcggaaggacagccgggga

SEQ ID NO: 6614 - DNA, 2583 bp, synthetic construct
  source 1..2583: mol_type = other DNA
atggccttaccagtgaccgccttgctcctgccgctggccttgctgctccacgccgccaggccggaagtgcagctggttgaatctggcggaggactggttcagcctggcggatctctgagactgtcttgtgccgccagcggcttcagcttcagcgacttttggatgagctgggtccgacaggcccctggcaaaggacttgaatgggtcgccacaatcagccaggccggcagcgagaaggactacgtggactctgtgaagggcagattcaccatcagccgggacaacgccaagaagtccctgtacctccagatgaacagcctgagagccgaggacaccgccgtgtactattgtgcctctggcgtgtacagcttcgactacagaggccagggcaccctggtcacagtctcttctggtaccggcggaggcggatctggcggcggaggtagcggtggcggaggatctgaattcgagatcgtgctgacacagagccctaccagcatgacagcctctccaggcgagcaagtgaccatcacctgtagagccagcagcagcatcaactacatgcactggtatcagcagaagcctggcgcaagccccagaccttggatctacgagacaagcaagctggcctccggcgtgcccgatagattttctggatctgccagcggcaccagctacagcctgaccatcaacaacatggaagccgaggacgccgccacctactactgccagcagtggaattacccctcctggacctttggcggaggcaccaagctggaacttaaactcgagatccagaaccctgatcctgccgtgtaccagctgcgggatagcaagagcagcgacaagagcgtgtgtctgttcaccgacttcgacagccagaccaacgtgtcccagagcaaggactccgacgtgtacatcaccgataagtgcgtgctggacatgcggagcatggacttcaagagcaactccgccgtggcctggtccaacaagtccgatttcgcctgcgccaacgccttcaacaacagcattatccccgaggacacattcttcccaagccccgagagcagcgactccaccgaccacgtgaagcccaaagagacagagaacaccaagcagcccagcaagagctgccacaagcccaaggccatcgtgcacaccgagaaagtgaacatgatgagcctgaccgtgctgggcctgcggatgctgttcgccaaaaccgtggccgtgaacttcctgctgaccgccaagctgttcttcctcctcaccgcccgcgccaagagaagcggatctggcgtgaagcagaccctgaatttcgacctgctgaagctggctggcgacgtggaatccaacccaggccctactagtatggactggatttggcgcatccttttccttgtcggcgctgctaccggcgcgcattccttcgaagaagtgcagctcgttgagtctggtggcggactggttcagcctggaagaagcctgaagctgagctgtgccgccagcggcttcaccttcagcgactacaatatggcctgggtccgacaggcccctaagaaaggactggaatgggtcgccaccatcctgtacgatggcggcagaacctactaccggggcagcgtgaagggcagattcaccatcagcagagacaacgccaagagcaccctgtacctgcggatggactctctgagaagcgaggataccgccacatattactgtgccacacacagccggggcaccgactactttgattattggggccagggcgtgatggttaccgtgtctagtacgcgtgaggacctgaagaacgtgttcccacctgaggtggccgtgttcgagcctagcgaggccgagatcagccacacccagaaagccaccctcgtgtgcctggctaccggcttctaccccgaccatgtggaactgtcttggtgggtcaacggcaaagaggtgcacagcggcgtgtgtaccgacccccagccactgaaagaacagcccgccctgaacgacagccggtactgcctgagcagcagactgagagtgtccgccaccttctggcagaacccccggaaccacttcagatgccaggtgcagttctacggcctgagcgagaacgacgagtggacccaggacagagccaagcccgtgacccagatcgtgtctgccgaagcctggggcagagccgatgatgtgattaagatccactggcaggaaaagaagtccaacaccatcctgggcagccaggaaggcaacaccatgaagaccaacgacacctacatgaagttcagctggctgaccgtgcccgagaagtccctggacaaagaacacagatgcatcgtgcggcacgaaaacaacaagaacggcgtggaccaggaaatcatcttcccacccatcaagaccgatgtgattacaatggaccccaaggacaactgctccaaggacgccaacgataccctgctgctccagctgaccaacaccagcgcctactacatgtacttgttgctgctgctgaagtccgtggtgtacttcgccatcatcacatgctgcctgctgatggctatggtcaagcggaaggacagccgggga

SEQ ID NO: 6615 - DNA, 2610 bp, synthetic construct
  source 1..2610: mol_type = other DNA
atggccttaccagtgaccgccttgctcctgccgctggccttgctgctccacgccgccaggccggaagtgcagctggttgaatctggcggaggactggttcagcctggcggatctctgagactgtcttgtgccgccagcggcttcagcttcagcgacttttggatgagctgggtccgacaggcccctggcaaaggacttgaatgggtcgccacaatcagccaggccggcagcgagaaggactacgtggactctgtgaagggcagattcaccatcagccgggacaacgccaagaagtccctgtacctccagatgaacagcctgagagccgaggacaccgccgtgtactattgtgcctctggcgtgtacagcttcgactacagaggccagggcaccctggtcacagtctcttctggtaccggcggaggcggatctggcggcggaggtagcggtggcggaggatctgaattcgacatcgtgatgacacagagcccttctagcctggccgtgtctgagggcgagacagtgaccatcaactgcaagagcagccagagcttcctgtctagcggcgacggcaagaattacgtggcctggtatcagtacaagcccggacagagccccaagctgctgatctactgggccagcacaagacagagcggcgtgcccgatagattcatcggctctggcagcggcaccgacttcaccctgacaatctctacagtgcaggccgaggacctggctatctactactgccagcagtattacgacacccctctgacctttggctccggcaccaagctggaaatcaaactcgagatccagaaccctgatcctgccgtgtaccagctgcgggatagcaagagcagcgacaagagcgtgtgtctgttcaccgacttcgacagccagaccaacgtgtcccagagcaaggactccgacgtgtacatcaccgataagtgcgtgctggacatgcggagcatggacttcaagagcaactccgccgtggcctggtccaacaagtccgatttcgcctgcgccaacgccttcaacaacagcattatccccgaggacacattcttcccaagccccgagagcagcgactccaccgaccacgtgaagcccaaagagacagagaacaccaagcagcccagcaagagctgccacaagcccaaggccatcgtgcacaccgagaaagtgaacatgatgagcctgaccgtgctgggcctgcggatgctgttcgccaaaaccgtggccgtgaacttcctgctgaccgccaagctgttcttcctcctcaccgcccgcgccaagagaagcggatctggcgtgaagcagaccctgaatttcgacctgctgaagctggctggcgacgtggaatccaacccaggccctactagtatggactggatttggcgcatccttttccttgtcggcgctgctaccggcgcgcattccttcgaagaagtgaagctgcaagagtctggccccagcctggtgcagagtagccaaacactgagcctgacctgtaccgtgtccggctttagcctgaccagctaccacatccactgggtccgacagacccctggcaaaggactggaatggatgggcgtgatgtggagcgacggcgacaccagctataacagcgccctgaagtcccggctgagcatcagcagagatacaagccagagccaggtgttcctgaagatgaacagcctccagaccgaggacaccgccacctactattgtgccagaggctactacagcagctacctgtacctttggttcgcctattggggccagggcaccctggttacagtcagctctacgcgtgaggacctgaagaacgtgttcccacctgaggtggccgtgttcgagcctagcgaggccgagatcagccacacccagaaagccaccctcgtgtgcctggctaccggcttctaccccgaccatgtggaactgtcttggtgggtcaacggcaaagaggtgcacagcggcgtgtgtaccgacccccagccactgaaagaacagcccgccctgaacgacagccggtactgcctgagcagcagactgagagtgtccgccaccttctggcagaacccccggaaccacttcagatgccaggtgcagttctacggcctgagcgagaacgacgagtggacccaggacagagccaagcccgtgacccagatcgtgtctgccgaagcctggggcagagccgatgatgtgattaagatccactggcaggaaaagaagtccaacaccatcctgggcagccaggaaggcaacaccatgaagaccaacgacacctacatgaagttcagctggctgaccgtgcccgagaagtccctggacaaagaacacagatgcatcgtgcggcacgaaaacaacaagaacggcgtggaccaggaaatcatcttcccacccatcaagaccgatgtgattacaatggaccccaaggacaactgctccaaggacgccaacgataccctgctgctccagctgaccaacaccagcgcctactacatgtacttgttgctgctgctgaagtccgtggtgtacttcgccatcatcacatgctgcctgctgatggctatggtcaagcggaaggacagccgggga

SEQ ID NO: 6616 - DNA, 2622 bp, synthetic construct
  source 1..2622: mol_type = other DNA
atggccttaccagtgaccgccttgctcctgccgctggccttgctgctccacgccgccaggccggaagtgcagctggttgaatctggcggaggactggttcagcctggcggatctctgagactgtcttgtgccgccagcggcttcagcttcagcgacttttggatgagctgggtccgacaggcccctggcaaaggacttgaatgggtcgccacaatcagccaggccggcagcgagaaggactacgtggactctgtgaagggcagattcaccatcagccgggacaacgccaagaagtccctgtacctccagatgaacagcctgagagccgaggacaccgccgtgtactattgtgcctctggcgtgtacagcttcgactacagaggccagggcaccctggtcacagtctcttctggtaccggcggaggcggatctggcggcggaggtagcggtggcggaggatctgaattcgacgtgctgatgacccagacacctgtgtctctgccagtgtctctcggaggccaggtgtccatctcctgtagaagcagccagagcctggtgcactccgacggcgatacctacctgcactggtatctccagaagcctggacagagccctcagctcctgatctaccgggtgtccaacagattcagcggcgtgcccgatagattttccggcagcggctctggcaccgacttcaccctgaagatcagcagagtggaacccgaggacctgggcctgtactactgtctccagaccacacacttcccaccttggacctttggcggaggcaccaagctggaaatgaaactcgagatccagaaccctgatcctgccgtgtaccagctgcgggatagcaagagcagcgacaagagcgtgtgtctgttcaccgacttcgacagccagaccaacgtgtcccagagcaaggactccgacgtgtacatcaccgataagtgcgtgctggacatgcggagcatggacttcaagagcaactccgccgtggcctggtccaacaagtccgatttcgcctgcgccaacgccttcaacaacagcattatccccgaggacacattcttcccaagccccgagagcagcgactccaccgaccacgtgaagcccaaagagacagagaacaccaagcagcccagcaagagctgccacaagcccaaggccatcgtgcacaccgagaaagtgaacatgatgagcctgaccgtgctgggcctgcggatgctgttcgccaaaaccgtggccgtgaacttcctgctgaccgccaagctgttcttcctcctcaccgcccgcgccaagagaagcggatctggcgtgaagcagaccctgaatttcgacctgctgaagctggctggcgacgtggaatccaacccaggccctactagtatggactggatttggcgcatccttttccttgtcggcgctgctaccggcgcgcattccttcgaacaggttcagctccagcagtctggacccgagcttagaaggccaggatctagcgtcagactgagctgcaaggccagcggctaccggatcaaggacttcctgatccactggattaagaacagacccgagcacggcctggaatggatcggatggattgaccctgaggacggcgagactaagtacgcccagaagttccagaccaaggccacactgaccgccgacacctctagcaacaccgcctacatgcaactgagcagcctgaccagcgaggacaccgccacctacttttgtgctagatggggcgacgtgtactacggcctgatgagaggccatgtgatggatgcctggggccagggaacaagcgtgacagtctcttctacgcgtgaggacctgaagaacgtgttcccacctgaggtggccgtgttcgagcctagcgaggccgagatcagccacacccagaaagccaccctcgtgtgcctggctaccggcttctaccccgaccatgtggaactgtcttggtgggtcaacggcaaagaggtgcacagcggcgtgtgtaccgacccccagccactgaaagaacagcccgccctgaacgacagccggtactgcctgagcagcagactgagagtgtccgccaccttctggcagaacccccggaaccacttcagatgccaggtgcagttctacggcctgagcgagaacgacgagtggacccaggacagagccaagcccgtgacccagatcgtgtctgccgaagcctggggcagagccgatgatgtgattaagatccactggcaggaaaagaagtccaacaccatcctgggcagccaggaaggcaacaccatgaagaccaacgacacctacatgaagttcagctggctgaccgtgcccgagaagtccctggacaaagaacacagatgcatcgtgcggcacgaaaacaacaagaacggcgtggaccaggaaatcatcttcccacccatcaagaccgatgtgattacaatggaccccaaggacaactgctccaaggacgccaacgataccctgctgctccagctgaccaacaccagcgcctactacatgtacttgttgctgctgctgaagtccgtggtgtacttcgccatcatcacatgctgcctgctgatggctatggtcaagcggaaggacagccgggga

SEQ ID NO: 6617 - DNA, 2607 bp, synthetic construct
  source 1..2607: mol_type = other DNA
atggccttaccagtgaccgccttgctcctgccgctggccttgctgctccacgccgccaggccggaagtgcagctggttgaatctggcggaggactggttcagcctggcggatctctgagactgtcttgtgccgccagcggcttcagcttcagcgacttttggatgagctgggtccgacaggcccctggcaaaggacttgaatgggtcgccacaatcagccaggccggcagcgagaaggactacgtggactctgtgaagggcagattcaccatcagccgggacaacgccaagaagtccctgtacctccagatgaacagcctgagagccgaggacaccgccgtgtactattgtgcctctggcgtgtacagcttcgactacagaggccagggcaccctggtcacagtctcttctggtaccggcggaggcggatctggcggcggaggtagcggtggcggaggatctgaattcgacatcgtgatgacacagagccccgccacactgtcactgtctccaggcgaaagagccacactgagctgtcggagcagcaagagcctccagaacgtgaacggcaacacctacctgtactggttccagcagaagcccggccagtctcctcagctcctgatctacagaatgagcaacctgaacagcggcgtgcccgacagattttctggcagcggaagcggcaccgagttcaccctgaccataagcagcctggaacctgaggacttcgccgtgtactactgtatgcagcacctggaataccccatcaccttcggagccggcaccaagctggaaatcaaactcgagatccagaaccctgatcctgccgtgtaccagctgcgggatagcaagagcagcgacaagagcgtgtgtctgttcaccgacttcgacagccagaccaacgtgtcccagagcaaggactccgacgtgtacatcaccgataagtgcgtgctggacatgcggagcatggacttcaagagcaactccgccgtggcctggtccaacaagtccgatttcgcctgcgccaacgccttcaacaacagcattatccccgaggacacattcttcccaagccccgagagcagcgactccaccgaccacgtgaagcccaaagagacagagaacaccaagcagcccagcaagagctgccacaagcccaaggccatcgtgcacaccgagaaagtgaacatgatgagcctgaccgtgctgggcctgcggatgctgttcgccaaaaccgtggccgtgaacttcctgctgaccgccaagctgttcttcctcctcaccgcccgcgccaagagaagcggatctggcgtgaagcagaccctgaatttcgacctgctgaagctggctggcgacgtggaatccaacccaggccctactagtatggactggatttggcgcatccttttccttgtcggcgctgctaccggcgcgcattccttcgaagaagtgcaactggttgaatctggcggcggactggttaagcctggcggatctctgaagctgagctgtgccgccagcggctacacctttaccagctacgtgatgcactgggtccgacaggcccctggcaaaggacttgagtggatcggctacatcaacccctacaacgatggcaccaagtacaacgagaagttccagggcagagtgaccatcagctccgacaagagcatcagcaccgcctacatggaactgagcagcctgagaagcgaggataccgccatgtactattgcgccagaggcacctactactacggcaccagagtgttcgactactggggccagggaaccctggtcacagtctcttctacgcgtgaggacctgaagaacgtgttcccacctgaggtggccgtgttcgagcctagcgaggccgagatcagccacacccagaaagccaccctcgtgtgcctggctaccggcttctaccccgaccatgtggaactgtcttggtgggtcaacggcaaagaggtgcacagcggcgtgtgtaccgacccccagccactgaaagaacagcccgccctgaacgacagccggtactgcctgagcagcagactgagagtgtccgccaccttctggcagaacccccggaaccacttcagatgccaggtgcagttctacggcctgagcgagaacgacgagtggacccaggacagagccaagcccgtgacccagatcgtgtctgccgaagcctggggcagagccgatgatgtgattaagatccactggcaggaaaagaagtccaacaccatcctgggcagccaggaaggcaacaccatgaagaccaacgacacctacatgaagttcagctggctgaccgtgcccgagaagtccctggacaaagaacacagatgcatcgtgcggcacgaaaacaacaagaacggcgtggaccaggaaatcatcttcccacccatcaagaccgatgtgattacaatggaccccaaggacaactgctccaaggacgccaacgataccctgctgctccagctgaccaacaccagcgcctactacatgtacttgttgctgctgctgaagtccgtggtgtacttcgccatcatcacatgctgcctgctgatggctatggtcaagcggaaggacagccgggga

SEQ ID NO: 6618 - DNA, 2595 bp, synthetic construct
  source 1..2595: mol_type = other DNA
atggccttaccagtgaccgccttgctcctgccgctggccttgctgctccacgccgccaggccggaagtgcagctggttgaatctggcggaggactggttcagcctggcggatctctgagactgtcttgtgccgccagcggcttcagcttcagcgacttttggatgagctgggtccgacaggcccctggcaaaggacttgaatgggtcgccacaatcagccaggccggcagcgagaaggactacgtggactctgtgaagggcagattcaccatcagccgggacaacgccaagaagtccctgtacctccagatgaacagcctgagagccgaggacaccgccgtgtactattgtgcctctggcgtgtacagcttcgactacagaggccagggcaccctggtcacagtctcttctggtaccggcggaggcggatctggcggcggaggtagcggtggcggaggatctgaattcgacatccagatgacacagagccctagcagcctgtctgccagcgtgggagacagagtgaccatcacatgcaaggccagcgaccacatcaacaactggctggcctggtatcagcagaagcctggacaggcccctaagctgctgatctacggcgctaccacactggaaacaggcgtgcccagcagattttctggcagcggctctggcaccgactacaccctgacaatatccagcctccagcctgaggacttcgccacctactactgtcagcagagctggaacaccccttggacattcggccagggcaccaagctggaaatcaagagactcgagatccagaaccctgatcctgccgtgtaccagctgcgggatagcaagagcagcgacaagagcgtgtgtctgttcaccgacttcgacagccagaccaacgtgtcccagagcaaggactccgacgtgtacatcaccgataagtgcgtgctggacatgcggagcatggacttcaagagcaactccgccgtggcctggtccaacaagtccgatttcgcctgcgccaacgccttcaacaacagcattatccccgaggacacattcttcccaagccccgagagcagcgactccaccgaccacgtgaagcccaaagagacagagaacaccaagcagcccagcaagagctgccacaagcccaaggccatcgtgcacaccgagaaagtgaacatgatgagcctgaccgtgctgggcctgcggatgctgttcgccaaaaccgtggccgtgaacttcctgctgaccgccaagctgttcttcctcctcaccgcccgcgccaagagaagcggatctggcgtgaagcagaccctgaatttcgacctgctgaagctggctggcgacgtggaatccaacccaggccctactagtatggactggatttggcgcatccttttccttgtcggcgctgctaccggcgcgcattccttcgaacaagttcagcttcaacagcctggcgctgagctggtcaaacctggcgcttctgtgaagatgagctgcaaagccagcggctacgccttcagcagctactggatcaactggatgaagcagaaacccggccagggactcgaatggatcggccaaatctatcccggcgacggcgacaccaactacaacggcaagttcaagggcagagccacactgaccgccgatacctctagcagcacagcctacatgcagctgagcagcctgaccagcgaagatagcgccgtgtacttctgtgcccggtccatcacaacagtcgtgggctgcgctatggactattggggccagggaacaagcgtgaccgtgtctagtacgcgtgaggacctgaagaacgtgttcccacctgaggtggccgtgttcgagcctagcgaggccgagatcagccacacccagaaagccaccctcgtgtgcctggctaccggcttctaccccgaccatgtggaactgtcttggtgggtcaacggcaaagaggtgcacagcggcgtgtgtaccgacccccagccactgaaagaacagcccgccctgaacgacagccggtactgcctgagcagcagactgagagtgtccgccaccttctggcagaacccccggaaccacttcagatgccaggtgcagttctacggcctgagcgagaacgacgagtggacccaggacagagccaagcccgtgacccagatcgtgtctgccgaagcctggggcagagccgatgatgtgattaagatccactggcaggaaaagaagtccaacaccatcctgggcagccaggaaggcaacaccatgaagaccaacgacacctacatgaagttcagctggctgaccgtgcccgagaagtccctggacaaagaacacagatgcatcgtgcggcacgaaaacaacaagaacggcgtggaccaggaaatcatcttcccacccatcaagaccgatgtgattacaatggaccccaaggacaactgctccaaggacgccaacgataccctgctgctccagctgaccaacaccagcgcctactacatgtacttgttgctgctgctgaagtccgtggtgtacttcgccatcatcacatgctgcctgctgatggctatggtcaagcggaaggacagccgggga

SEQ ID NO: 6619 - DNA, 2601 bp, synthetic construct
  source 1..2601: mol_type = other DNA
atggccttaccagtgaccgccttgctcctgccgctggccttgctgctccacgccgccaggccggaagtgcagctggttgaatctggcggaggactggttcagcctggcggatctctgagactgtcttgtgccgccagcggcttcagcttcagcgacttttggatgagctgggtccgacaggcccctggcaaaggacttgaatgggtcgccacaatcagccaggccggcagcgagaaggactacgtggactctgtgaagggcagattcaccatcagccgggacaacgccaagaagtccctgtacctccagatgaacagcctgagagccgaggacaccgccgtgtactattgtgcctctggcgtgtacagcttcgactacagaggccagggcaccctggtcacagtctcttctggtaccggcggaggcggatctggcggcggaggtagcggtggcggaggatctgaattccagatcgtgctgtctcagtctcctgccatcctgagcgcttccccaggcgagaaagtgaccatgacctgtagagccagcagcagcgtgtcctacatgcactggtatcagcagaagcccggcagcagccctaagccttggatctacgccaccagcaatctggcctctggcgtgccagccagattttctggctctggcagcggcaccagctacagcttcacaatcagcagagtggaagccgaggacgccgccacctactattgtcagcagtggaccttcaatcctcctaccttcggcggaggcacccggctggaaatcaaaagaacagtggctgctctcgagatccagaaccctgatcctgccgtgtaccagctgcgggatagcaagagcagcgacaagagcgtgtgtctgttcaccgacttcgacagccagaccaacgtgtcccagagcaaggactccgacgtgtacatcaccgataagtgcgtgctggacatgcggagcatggacttcaagagcaactccgccgtggcctggtccaacaagtccgatttcgcctgcgccaacgccttcaacaacagcattatccccgaggacacattcttcccaagccccgagagcagcgactccaccgaccacgtgaagcccaaagagacagagaacaccaagcagcccagcaagagctgccacaagcccaaggccatcgtgcacaccgagaaagtgaacatgatgagcctgaccgtgctgggcctgcggatgctgttcgccaaaaccgtggccgtgaacttcctgctgaccgccaagctgttcttcctcctcaccgcccgcgccaagagaagcggatctggcgtgaagcagaccctgaatttcgacctgctgaagctggctggcgacgtggaatccaacccaggccctactagtatggactggatttggcgcatccttttccttgtcggcgctgctaccggcgcgcattccttcgaacaggcttatctgcaacagagcggagccgaactcgtcagacctggcgcttctgtgaagatgagctgcaaggccagcggctacaccttcaccagctataatatgcactgggtcaagcagacccctcggcagggactcgaatggatcggcggaatctatcccggcaacggcgacacctcctacaaccagaagttcaagggcaaagccacactgaccgtgggcaagagcagcagcaccgcctatatgcagctcagcagcctgaccagcgaggacagcgccgtgtacttctgcgccagatacgactacaactacgctatggactactggggccagggcaccagcgtgacagttagctctgccagcacgcgtgaggacctgaagaacgtgttcccacctgaggtggccgtgttcgagcctagcgaggccgagatcagccacacccagaaagccaccctcgtgtgcctggctaccggcttctaccccgaccatgtggaactgtcttggtgggtcaacggcaaagaggtgcacagcggcgtgtgtaccgacccccagccactgaaagaacagcccgccctgaacgacagccggtactgcctgagcagcagactgagagtgtccgccaccttctggcagaacccccggaaccacttcagatgccaggtgcagttctacggcctgagcgagaacgacgagtggacccaggacagagccaagcccgtgacccagatcgtgtctgccgaagcctggggcagagccgatgatgtgattaagatccactggcaggaaaagaagtccaacaccatcctgggcagccaggaaggcaacaccatgaagaccaacgacacctacatgaagttcagctggctgaccgtgcccgagaagtccctggacaaagaacacagatgcatcgtgcggcacgaaaacaacaagaacggcgtggaccaggaaatcatcttcccacccatcaagaccgatgtgattacaatggaccccaaggacaactgctccaaggacgccaacgataccctgctgctccagctgaccaacaccagcgcctactacatgtacttgttgctgctgctgaagtccgtggtgtacttcgccatcatcacatgctgcctgctgatggctatggtcaagcggaaggacagccgggga

SEQ ID NO: 6620 - DNA, 2595 bp, synthetic construct
  source 1..2595: mol_type = other DNA
atggccttaccagtgaccgccttgctcctgccgctggccttgctgctccacgccgccaggccggaagtgcagctggttgaatctggcggaggactggttcagcctggcggatctctgagactgtcttgtgccgccagcggcttcagcttcagcgacttttggatgagctgggtccgacaggcccctggcaaaggacttgaatgggtcgccacaatcagccaggccggcagcgagaaggactacgtggactctgtgaagggcagattcaccatcagccgggacaacgccaagaagtccctgtacctccagatgaacagcctgagagccgaggacaccgccgtgtactattgtgcctctggcgtgtacagcttcgactacagaggccagggcaccctggtcacagtctcttctggtaccggcggaggcggatctggcggcggaggtagcggtggcggaggatctgaattcgagatcgtgctgacacagagccctgccaccctgtctctgagccctggcgaaagagccaccctgagctgtagagccagccagagcgtgtccagctacctggcctggtatcagcagaagcccggccaggctccccggctgctgatctacgatgccagcaatagagccaccggcatccccgccagattttccggctctggcagcggcaccgacttcaccctgaccatcagctccctggaacccgaggacttcgccgtgtactactgccagcagcggagcaactggcccatcacattcggccagggcacccggctggaaatcaaactcgagatccagaaccctgatcctgccgtgtaccagctgcgggatagcaagagcagcgacaagagcgtgtgtctgttcaccgacttcgacagccagaccaacgtgtcccagagcaaggactccgacgtgtacatcaccgataagtgcgtgctggacatgcggagcatggacttcaagagcaactccgccgtggcctggtccaacaagtccgatttcgcctgcgccaacgccttcaacaacagcattatccccgaggacacattcttcccaagccccgagagcagcgactccaccgaccacgtgaagcccaaagagacagagaacaccaagcagcccagcaagagctgccacaagcccaaggccatcgtgcacaccgagaaagtgaacatgatgagcctgaccgtgctgggcctgcggatgctgttcgccaaaaccgtggccgtgaacttcctgctgaccgccaagctgttcttcctcctcaccgcccgcgccaagagaagcggatctggcgtgaagcagaccctgaatttcgacctgctgaagctggctggcgacgtggaatccaacccaggccctactagtatggactggatttggcgcatccttttccttgtcggcgctgctaccggcgcgcattccttcgaagaggtgcagcttgttgagtctggcggaggactggtgcagcccgatagaagcctgagactgtcttgtgccgccagcggcttcaccttccacgattatgccatgcactgggtccgacaggcccctggcaaaggacttgaatgggtgtccaccatctcttggaacagcggcacaatcggctacgccgactctgtgaagggcagattcaccatcagccgggacaacgccaagaacagcctgtacctccagatgaactccctgagagccgaggacacagccctgtactactgcgccaaggacatccagtacggcaactactactacggcatggacgtgtggggccagggcacaacagtgacagtctcttctacgcgtgaggacctgaagaacgtgttcccacctgaggtggccgtgttcgagcctagcgaggccgagatcagccacacccagaaagccaccctcgtgtgcctggctaccggcttctaccccgaccatgtggaactgtcttggtgggtcaacggcaaagaggtgcacagcggcgtgtgtaccgacccccagccactgaaagaacagcccgccctgaacgacagccggtactgcctgagcagcagactgagagtgtccgccaccttctggcagaacccccggaaccacttcagatgccaggtgcagttctacggcctgagcgagaacgacgagtggacccaggacagagccaagcccgtgacccagatcgtgtctgccgaagcctggggcagagccgatgatgtgattaagatccactggcaggaaaagaagtccaacaccatcctgggcagccaggaaggcaacaccatgaagaccaacgacacctacatgaagttcagctggctgaccgtgcccgagaagtccctggacaaagaacacagatgcatcgtgcggcacgaaaacaacaagaacggcgtggaccaggaaatcatcttcccacccatcaagaccgatgtgattacaatggaccccaaggacaactgctccaaggacgccaacgataccctgctgctccagctgaccaacaccagcgcctactacatgtacttgttgctgctgctgaagtccgtggtgtacttcgccatcatcacatgctgcctgctgatggctatggtcaagcggaaggacagccgggga

SEQ ID NO: 6621 - DNA, 2580 bp, synthetic construct
  source 1..2580: mol_type = other DNA
atggccttaccagtgaccgccttgctcctgccgctggccttgctgctccacgccgccaggccggaagtgcagctggttgaatctggcggaggactggttcagcctggcggatctctgagactgtcttgtgccgccagcggcttcagcttcagcgacttttggatgagctgggtccgacaggcccctggcaaaggacttgaatgggtcgccacaatcagccaggccggcagcgagaaggactacgtggactctgtgaagggcagattcaccatcagccgggacaacgccaagaagtccctgtacctccagatgaacagcctgagagccgaggacaccgccgtgtactattgtgcctctggcgtgtacagcttcgactacagaggccagggcaccctggtcacagtctcttctggtaccggcggaggcggatctggcggcggaggtagcggtggcggaggatctgaattcgacatccagatgacacagagccctagcagcctgtctgccagcgtgggagatagagtgaccatcaactgcaaggccagccaggacatcaacagctacctgagctggttccagcagaagcctggcaaggcccctaagacactgatctaccgggccaacagactggtggatggcgtgccaagcagattttctggcagcggcagcggccaggattacaccctgacaatatccagcctccagcctgaggacttcgccacctactactgcctccagtacgacgagttccctctgacctttggcggaggcaccaaggtggaaatcaaactcgagatccagaaccctgatcctgccgtgtaccagctgcgggatagcaagagcagcgacaagagcgtgtgtctgttcaccgacttcgacagccagaccaacgtgtcccagagcaaggactccgacgtgtacatcaccgataagtgcgtgctggacatgcggagcatggacttcaagagcaactccgccgtggcctggtccaacaagtccgatttcgcctgcgccaacgccttcaacaacagcattatccccgaggacacattcttcccaagccccgagagcagcgactccaccgaccacgtgaagcccaaagagacagagaacaccaagcagcccagcaagagctgccacaagcccaaggccatcgtgcacaccgagaaagtgaacatgatgagcctgaccgtgctgggcctgcggatgctgttcgccaaaaccgtggccgtgaacttcctgctgaccgccaagctgttcttcctcctcaccgcccgcgccaagagaagcggatctggcgtgaagcagaccctgaatttcgacctgctgaagctggctggcgacgtggaatccaacccaggccctactagtatggactggatttggcgcatccttttccttgtcggcgctgctaccggcgcgcattccttcgaacaggtgcaactggtgcagtctggggccgaagtgaagaaacctggggcctctgtgaaggtgtcctgcaaagccagcggctacacctttaccaactacgacatcaactgggtccgacaggctccaggccaaggactggaatggatcggctggatctatcctggcgacggcagcaccaagtacaacgagaagttcaaggccaaggccacactgaccgccgataccagcacaagcaccgcctacatggaactgcggagcctgagaagcgacgacaccgccgtgtactattgtgcctccggctacgaggacgctatggactattggggccagggcaccaccgtgacagtgtctagtacgcgtgaggacctgaagaacgtgttcccacctgaggtggccgtgttcgagcctagcgaggccgagatcagccacacccagaaagccaccctcgtgtgcctggctaccggcttctaccccgaccatgtggaactgtcttggtgggtcaacggcaaagaggtgcacagcggcgtgtgtaccgacccccagccactgaaagaacagcccgccctgaacgacagccggtactgcctgagcagcagactgagagtgtccgccaccttctggcagaacccccggaaccacttcagatgccaggtgcagttctacggcctgagcgagaacgacgagtggacccaggacagagccaagcccgtgacccagatcgtgtctgccgaagcctggggcagagccgatgatgtgattaagatccactggcaggaaaagaagtccaacaccatcctgggcagccaggaaggcaacaccatgaagaccaacgacacctacatgaagttcagctggctgaccgtgcccgagaagtccctggacaaagaacacagatgcatcgtgcggcacgaaaacaacaagaacggcgtggaccaggaaatcatcttcccacccatcaagaccgatgtgattacaatggaccccaaggacaactgctccaaggacgccaacgataccctgctgctccagctgaccaacaccagcgcctactacatgtacttgttgctgctgctgaagtccgtggtgtacttcgccatcatcacatgctgcctgctgatggctatggtcaagcggaaggacagccgggga

SEQ ID NO: 6622 - DNA, 2586 bp, synthetic construct
  source 1..2586: mol_type = other DNA
atggccttaccagtgaccgccttgctcctgccgctggccttgctgctccacgccgccaggccggaagtgcagctggttgaatctggcggaggactggttcagcctggcggatctctgagactgtcttgtgccgccagcggcttcagcttcagcgacttttggatgagctgggtccgacaggcccctggcaaaggacttgaatgggtcgccacaatcagccaggccggcagcgagaaggactacgtggactctgtgaagggcagattcaccatcagccgggacaacgccaagaagtccctgtacctccagatgaacagcctgagagccgaggacaccgccgtgtactattgtgcctctggcgtgtacagcttcgactacagaggccagggcaccctggtcacagtctcttctggtaccggcggaggcggatctggcggcggaggtagcggtggcggaggatctgaattcgacatcgtgatgacccagacacctctgagcctgagcgtgacacctggacagcctgccagcattagctgcaagagcagccagtctctgctggacggcgacggcaagacctacctgaattggctgctccagaagcctggacagagccctcagcggctgatctacctggtgtccaagctggatagcggcgtgcccgatagattttctggcagcggctctggcaccgacttcaccctgaagatcagcagagtggaagccgaggacgtgggcgtgtactactgttggcagggcacacacttccccagaacattcggccagggcacaaagctggaaatcaaactcgagatccagaaccctgatcctgccgtgtaccagctgcgggatagcaagagcagcgacaagagcgtgtgtctgttcaccgacttcgacagccagaccaacgtgtcccagagcaaggactccgacgtgtacatcaccgataagtgcgtgctggacatgcggagcatggacttcaagagcaactccgccgtggcctggtccaacaagtccgatttcgcctgcgccaacgccttcaacaacagcattatccccgaggacacattcttcccaagccccgagagcagcgactccaccgaccacgtgaagcccaaagagacagagaacaccaagcagcccagcaagagctgccacaagcccaaggccatcgtgcacaccgagaaagtgaacatgatgagcctgaccgtgctgggcctgcggatgctgttcgccaaaaccgtggccgtgaacttcctgctgaccgccaagctgttcttcctcctcaccgcccgcgccaagagaagcggatctggcgtgaagcagaccctgaatttcgacctgctgaagctggctggcgacgtggaatccaacccaggccctactagtatggactggatttggcgcatccttttccttgtcggcgctgctaccggcgcgcattccttcgaacaagtgcaactggttcagagcggagccgaagtgaagaaacctggggcctctgtgaaggtgtcctgcaaggccagcggctacaccttcaaggacacctacatccactgggtccgacaggcccctggacaaggacttgagtggatgggcagaatcgaccccgccaacggcaacaccaaatacgaccccaagttccagggcagagtgaccatgaccagagacaccagcatcagcaccgcctacatggaactgagccggctgagatccgatgacaccgccgtgtactattgcgctagaagaggcggagtggattggggccagggaacactggttaccgtgtctagtacgcgtgaggacctgaagaacgtgttcccacctgaggtggccgtgttcgagcctagcgaggccgagatcagccacacccagaaagccaccctcgtgtgcctggctaccggcttctaccccgaccatgtggaactgtcttggtgggtcaacggcaaagaggtgcacagcggcgtgtgtaccgacccccagccactgaaagaacagcccgccctgaacgacagccggtactgcctgagcagcagactgagagtgtccgccaccttctggcagaacccccggaaccacttcagatgccaggtgcagttctacggcctgagcgagaacgacgagtggacccaggacagagccaagcccgtgacccagatcgtgtctgccgaagcctggggcagagccgatgatgtgattaagatccactggcaggaaaagaagtccaacaccatcctgggcagccaggaaggcaacaccatgaagaccaacgacacctacatgaagttcagctggctgaccgtgcccgagaagtccctggacaaagaacacagatgcatcgtgcggcacgaaaacaacaagaacggcgtggaccaggaaatcatcttcccacccatcaagaccgatgtgattacaatggaccccaaggacaactgctccaaggacgccaacgataccctgctgctccagctgaccaacaccagcgcctactacatgtacttgttgctgctgctgaagtccgtggtgtacttcgccatcatcacatgctgcctgctgatggctatggtcaagcggaaggacagccgggga

SEQ ID NO: 6623 - DNA, 2589 bp, synthetic construct
  source 1..2589: mol_type = other DNA
atggccttaccagtgaccgccttgctcctgccgctggccttgctgctccacgccgccaggccggaagtgcagctggttgaatctggcggaggactggttcagcctggcggatctctgagactgtcttgtgccgccagcggcttcagcttcagcgacttttggatgagctgggtccgacaggcccctggcaaaggacttgaatgggtcgccacaatcagccaggccggcagcgagaaggactacgtggactctgtgaagggcagattcaccatcagccgggacaacgccaagaagtccctgtacctccagatgaacagcctgagagccgaggacaccgccgtgtactattgtgcctctggcgtgtacagcttcgactacagaggccagggcaccctggtcacagtctcttctggtaccggcggaggcggatctggcggcggaggtagcggtggcggaggatctgaattcgacatccagatgacacagagccctagcagcctgtctgccagcgtgggagacagagtgaccatcacatgcaaggccagccaggatgtgtctacagccgtggcctggttccagcagaagcctggaaaagcccctaagctgctgatctacagccccagctacagatacaccggcgtgcccagcagattttctggcagcggctctggcaccgacttcaccctgacaatatccagcctccagcctgaggacttcacctactactgccagcagctctacagcaccccttacacattcggccagggcaccaaggtggaaatcaaactcgagatccagaaccctgatcctgccgtgtaccagctgcgggatagcaagagcagcgacaagagcgtgtgtctgttcaccgacttcgacagccagaccaacgtgtcccagagcaaggactccgacgtgtacatcaccgataagtgcgtgctggacatgcggagcatggacttcaagagcaactccgccgtggcctggtccaacaagtccgatttcgcctgcgccaacgccttcaacaacagcattatccccgaggacacattcttcccaagccccgagagcagcgactccaccgaccacgtgaagcccaaagagacagagaacaccaagcagcccagcaagagctgccacaagcccaaggccatcgtgcacaccgagaaagtgaacatgatgagcctgaccgtgctgggcctgcggatgctgttcgccaaaaccgtggccgtgaacttcctgctgaccgccaagctgttcttcctcctcaccgcccgcgccaagagaagcggatctggcgtgaagcagaccctgaatttcgacctgctgaagctggctggcgacgtggaatccaacccaggccctactagtatggactggatttggcgcatccttttccttgtcggcgctgctaccggcgcgcattccttcgaagaagtgcaactggttcagagcggagccgaagtgaagaaacctggggcctctgtgaaggtgtcctgcaaagccagcggctacacctttaccgactactacctggacgtggtcgtgcggcaagctcctggacaaggactggaatggatcggcagagtgaacccctacaacggcggcaccatctacaaccagaaattcaagggaagagtgaccctgaccagagacaccagcacctccacagcctacctggaactgagcagcctgagaagcgaagataccgccgtgtactactgcgccagggaccactacagatatgaccctctgctggactactggggccagggaaccctggttacagtgtctagtacgcgtgaggacctgaagaacgtgttcccacctgaggtggccgtgttcgagcctagcgaggccgagatcagccacacccagaaagccaccctcgtgtgcctggctaccggcttctaccccgaccatgtggaactgtcttggtgggtcaacggcaaagaggtgcacagcggcgtgtgtaccgacccccagccactgaaagaacagcccgccctgaacgacagccggtactgcctgagcagcagactgagagtgtccgccaccttctggcagaacccccggaaccacttcagatgccaggtgcagttctacggcctgagcgagaacgacgagtggacccaggacagagccaagcccgtgacccagatcgtgtctgccgaagcctggggcagagccgatgatgtgattaagatccactggcaggaaaagaagtccaacaccatcctgggcagccaggaaggcaacaccatgaagaccaacgacacctacatgaagttcagctggctgaccgtgcccgagaagtccctggacaaagaacacagatgcatcgtgcggcacgaaaacaacaagaacggcgtggaccaggaaatcatcttcccacccatcaagaccgatgtgattacaatggaccccaaggacaactgctccaaggacgccaacgataccctgctgctccagctgaccaacaccagcgcctactacatgtacttgttgctgctgctgaagtccgtggtgtacttcgccatcatcacatgctgcctgctgatggctatggtcaagcggaaggacagccgggga

SEQ ID NO: 6624 - DNA, 2607 bp, synthetic construct
  source 1..2607: mol_type = other DNA
atggccttaccagtgaccgccttgctcctgccgctggccttgctgctccacgccgccaggccggaagtgcagctggttgaatctggcggaggactggttcagcctggcggatctctgagactgtcttgtgccgccagcggcttcagcttcagcgacttttggatgagctgggtccgacaggcccctggcaaaggacttgaatgggtcgccacaatcagccaggccggcagcgagaaggactacgtggactctgtgaagggcagattcaccatcagccgggacaacgccaagaagtccctgtacctccagatgaacagcctgagagccgaggacaccgccgtgtactattgtgcctctggcgtgtacagcttcgactacagaggccagggcaccctggtcacagtctcttctggtaccggcggaggcggatctggcggcggaggtagcggtggcggaggatctgaattcgacatccagatgacacagagccctagcagcctgtctgccagcgtgggagacagagtgaccatcacctgtagagccagccagagcgtgtccaccagcagctacaactacatgcactggtatcagcagaagcccggcaagcctcctaagctgctgattaagtacgccagcaacctggaaagcggcgtgcccagcagattttctggcagcggctctggcaccgacttcaccctgacaatatccagcctccagcctgaggacttcgccacctactactgtcagcactcctgggagatccctctgacattcggccagggcaccaaggtggaaatcaaactcgagatccagaaccctgatcctgccgtgtaccagctgcgggatagcaagagcagcgacaagagcgtgtgtctgttcaccgacttcgacagccagaccaacgtgtcccagagcaaggactccgacgtgtacatcaccgataagtgcgtgctggacatgcggagcatggacttcaagagcaactccgccgtggcctggtccaacaagtccgatttcgcctgcgccaacgccttcaacaacagcattatccccgaggacacattcttcccaagccccgagagcagcgactccaccgaccacgtgaagcccaaagagacagagaacaccaagcagcccagcaagagctgccacaagcccaaggccatcgtgcacaccgagaaagtgaacatgatgagcctgaccgtgctgggcctgcggatgctgttcgccaaaaccgtggccgtgaacttcctgctgaccgccaagctgttcttcctcctcaccgcccgcgccaagagaagcggatctggcgtgaagcagaccctgaatttcgacctgctgaagctggctggcgacgtggaatccaacccaggccctactagtatggactggatttggcgcatccttttccttgtcggcgctgctaccggcgcgcattccttcgaagaagtgcaactggttcagagcggagccgaagtgaagaaacctggggcctctgtgaaggtgtcctgcaaggccagcggctacagcttcaccgactattatatgcactgggtccgacaggctccaggccagggacttgagtggatcggcagaatcaacccctacaacggcgctgccttctacagccagaacttcaaggatagagtgaccctgaccgtggacaccagcaccagcacagcctacctggaactgagcagcctgagaagcgaggacaccgccgtgtactactgcgccattgagagaggcgctgacctggaaggctacgctatggattattggggccagggaaccctggtcaccgtgtcatctacgcgtgaggacctgaagaacgtgttcccacctgaggtggccgtgttcgagcctagcgaggccgagatcagccacacccagaaagccaccctcgtgtgcctggctaccggcttctaccccgaccatgtggaactgtcttggtgggtcaacggcaaagaggtgcacagcggcgtgtgtaccgacccccagccactgaaagaacagcccgccctgaacgacagccggtactgcctgagcagcagactgagagtgtccgccaccttctggcagaacccccggaaccacttcagatgccaggtgcagttctacggcctgagcgagaacgacgagtggacccaggacagagccaagcccgtgacccagatcgtgtctgccgaagcctggggcagagccgatgatgtgattaagatccactggcaggaaaagaagtccaacaccatcctgggcagccaggaaggcaacaccatgaagaccaacgacacctacatgaagttcagctggctgaccgtgcccgagaagtccctggacaaagaacacagatgcatcgtgcggcacgaaaacaacaagaacggcgtggaccaggaaatcatcttcccacccatcaagaccgatgtgattacaatggaccccaaggacaactgctccaaggacgccaacgataccctgctgctccagctgaccaacaccagcgcctactacatgtacttgttgctgctgctgaagtccgtggtgtacttcgccatcatcacatgctgcctgctgatggctatggtcaagcggaaggacagccgggga

SEQ ID NO: 6625 - DNA, 2601 bp, synthetic construct
  source 1..2601: mol_type = other DNA
atggccttaccagtgaccgccttgctcctgccgctggccttgctgctccacgccgccaggccggaagtgcagctggttgaatctggcggaggactggttcagcctggcggatctctgagactgtcttgtgccgccagcggcttcagcttcagcgacttttggatgagctgggtccgacaggcccctggcaaaggacttgaatgggtcgccacaatcagccaggccggcagcgagaaggactacgtggactctgtgaagggcagattcaccatcagccgggacaacgccaagaagtccctgtacctccagatgaacagcctgagagccgaggacaccgccgtgtactattgtgcctctggcgtgtacagcttcgactacagaggccagggcaccctggtcacagtctcttctggtaccggcggaggcggatctggcggcggaggtagcggtggcggaggatctgaattcgagatcgtgctgacacagtctccagccacactgagcgcttctccaggcgagagagtgaccctgacctgtagagccagcagcaacgtgatctccagctacgtgcactggtatcagcagaagcctggcagcagccccagactgtttctgtacagcaccagcaatctggcctccggcgtgccaagcagattttctggctctggcagcggcaccgacttcacctttaccatctctagcctggaagccgaggacgccgccacctactactgtcagcagtacagcggctaccctctgaccttcggccagggcacaagactggaaatcaaactcgagatccagaaccctgatcctgccgtgtaccagctgcgggatagcaagagcagcgacaagagcgtgtgtctgttcaccgacttcgacagccagaccaacgtgtcccagagcaaggactccgacgtgtacatcaccgataagtgcgtgctggacatgcggagcatggacttcaagagcaactccgccgtggcctggtccaacaagtccgatttcgcctgcgccaacgccttcaacaacagcattatccccgaggacacattcttcccaagccccgagagcagcgactccaccgaccacgtgaagcccaaagagacagagaacaccaagcagcccagcaagagctgccacaagcccaaggccatcgtgcacaccgagaaagtgaacatgatgagcctgaccgtgctgggcctgcggatgctgttcgccaaaaccgtggccgtgaacttcctgctgaccgccaagctgttcttcctcctcaccgcccgcgccaagagaagcggatctggcgtgaagcagaccctgaatttcgacctgctgaagctggctggcgacgtggaatccaacccaggccctactagtatggactggatttggcgcatccttttccttgtcggcgctgctaccggcgcgcattccttcgaacaagttcagctgcaagagtctggccctggcctggtcaagcctagcgaaacactgagcctgacctgcgccgtgtctggctactctatcaccagcgcctactattggaactggatcagacagcctcctggcaaaggactggaatggatcggctacatcagctacgacggcagaaacaactacaaccccagcctgaagaaccggatcaccatcaatcccgacaccagcaagaaccagttcagcctccagctgaacagcgtgacccctgaggataccgccgtgtactactgtgccagagaaggcgactacgacgtgggcaactactacgctatggactactggggccagggaaccctggtcacagtctcttctacgcgtgaggacctgaagaacgtgttcccacctgaggtggccgtgttcgagcctagcgaggccgagatcagccacacccagaaagccaccctcgtgtgcctggctaccggcttctaccccgaccatgtggaactgtcttggtgggtcaacggcaaagaggtgcacagcggcgtgtgtaccgacccccagccactgaaagaacagcccgccctgaacgacagccggtactgcctgagcagcagactgagagtgtccgccaccttctggcagaacccccggaaccacttcagatgccaggtgcagttctacggcctgagcgagaacgacgagtggacccaggacagagccaagcccgtgacccagatcgtgtctgccgaagcctggggcagagccgatgatgtgattaagatccactggcaggaaaagaagtccaacaccatcctgggcagccaggaaggcaacaccatgaagaccaacgacacctacatgaagttcagctggctgaccgtgcccgagaagtccctggacaaagaacacagatgcatcgtgcggcacgaaaacaacaagaacggcgtggaccaggaaatcatcttcccacccatcaagaccgatgtgattacaatggaccccaaggacaactgctccaaggacgccaacgataccctgctgctccagctgaccaacaccagcgcctactacatgtacttgttgctgctgctgaagtccgtggtgtacttcgccatcatcacatgctgcctgctgatggctatggtcaagcggaaggacagccgggga

SEQ ID NO: 6626 - DNA, 2601 bp, synthetic construct
  source 1..2601: mol_type = other DNA
atggccttaccagtgaccgccttgctcctgccgctggccttgctgctccacgccgccaggccggaagtgcagctggttgaatctggcggaggactggttcagcctggcggatctctgagactgtcttgtgccgccagcggcttcagcttcagcgacttttggatgagctgggtccgacaggcccctggcaaaggacttgaatgggtcgccacaatcagccaggccggcagcgagaaggactacgtggactctgtgaagggcagattcaccatcagccgggacaacgccaagaagtccctgtacctccagatgaacagcctgagagccgaggacaccgccgtgtactattgtgcctctggcgtgtacagcttcgactacagaggccagggcaccctggtcacagtctcttctggtaccggcggaggcggatctggcggcggaggtagcggtggcggaggatctgaattcgagatcgtgctgacacagtctcccgccacactgtcactgtctccaggcgaaagagccacactgagctgtagagccagcagcaacgtgatctccagctacgtgcactggtatcagcagaagcctggacaggcccctcggctgctgatctacagcacaagcaatctggcctctggcatccccgccagattttctggctctggaagcggcaccgacttcaccctgaccataagcagcctggaacctgaggacttcgccgtgtactactgccagcagtatagcggctaccctctgaccttcggccagggcacaagactggaaatcaaactcgagatccagaaccctgatcctgccgtgtaccagctgcgggatagcaagagcagcgacaagagcgtgtgtctgttcaccgacttcgacagccagaccaacgtgtcccagagcaaggactccgacgtgtacatcaccgataagtgcgtgctggacatgcggagcatggacttcaagagcaactccgccgtggcctggtccaacaagtccgatttcgcctgcgccaacgccttcaacaacagcattatccccgaggacacattcttcccaagccccgagagcagcgactccaccgaccacgtgaagcccaaagagacagagaacaccaagcagcccagcaagagctgccacaagcccaaggccatcgtgcacaccgagaaagtgaacatgatgagcctgaccgtgctgggcctgcggatgctgttcgccaaaaccgtggccgtgaacttcctgctgaccgccaagctgttcttcctcctcaccgcccgcgccaagagaagcggatctggcgtgaagcagaccctgaatttcgacctgctgaagctggctggcgacgtggaatccaacccaggccctactagtatggactggatttggcgcatccttttccttgtcggcgctgctaccggcgcgcattccttcgaagaagtgcaactggtggaaagtggcggcggactggtgcaacctggaagaagcctgagactgtcctgtgccgccagcggctactctatcacaagcgcctactactggaactgggtccgacaggctcctggcaaaggactggaatgggtgtcctacatcagctacgacggcagaaacaactacaaccccagcctgaagaaccgcttcaccatcagccgggacaacgccaagaagtccctgtacctccagatgaacagcctgagagccgaggacacagccctgtactattgcgccaaagagggcgactacgacgtcggcaactactacgctatggactactggggccagggaaccaccgtgactgtctcttctacgcgtgaggacctgaagaacgtgttcccacctgaggtggccgtgttcgagcctagcgaggccgagatcagccacacccagaaagccaccctcgtgtgcctggctaccggcttctaccccgaccatgtggaactgtcttggtgggtcaacggcaaagaggtgcacagcggcgtgtgtaccgacccccagccactgaaagaacagcccgccctgaacgacagccggtactgcctgagcagcagactgagagtgtccgccaccttctggcagaacccccggaaccacttcagatgccaggtgcagttctacggcctgagcgagaacgacgagtggacccaggacagagccaagcccgtgacccagatcgtgtctgccgaagcctggggcagagccgatgatgtgattaagatccactggcaggaaaagaagtccaacaccatcctgggcagccaggaaggcaacaccatgaagaccaacgacacctacatgaagttcagctggctgaccgtgcccgagaagtccctggacaaagaacacagatgcatcgtgcggcacgaaaacaacaagaacggcgtggaccaggaaatcatcttcccacccatcaagaccgatgtgattacaatggaccccaaggacaactgctccaaggacgccaacgataccctgctgctccagctgaccaacaccagcgcctactacatgtacttgttgctgctgctgaagtccgtggtgtacttcgccatcatcacatgctgcctgctgatggctatggtcaagcggaaggacagccgggga

SEQ ID NO: 6627 - DNA, 2598 bp, synthetic construct
  source 1..2598: mol_type = other DNA
atggccttaccagtgaccgccttgctcctgccgctggccttgctgctccacgccgccaggccggaagtgcagctggttgaatctggcggaggactggttcagcctggcggatctctgagactgtcttgtgccgccagcggcttcagcttcagcgacttttggatgagctgggtccgacaggcccctggcaaaggacttgaatgggtcgccacaatcagccaggccggcagcgagaaggactacgtggactctgtgaagggcagattcaccatcagccgggacaacgccaagaagtccctgtacctccagatgaacagcctgagagccgaggacaccgccgtgtactattgtgcctctggcgtgtacagcttcgactacagaggccagggcaccctggtcacagtctcttctggtaccggcggaggcggatctggcggcggaggtagcggtggcggaggatctgaattcgacgtggtcatgacacagaccccactgagcctgcctgtgtctctgggagatcaggccagcatctcctgtagaagcagccagagcctggtgcacagcaacggcaacacctacctgcggtggtatctccagaagcctggacagagccccaaggtgctgatctacaaggtgtccaacagagtgtccggcgtgcccgatagattttctggcagcggctctggcaccgacttcaccctgaagatcaatagagtggaagccgaggacctgggcgtgtacttctgtagccagagcacccatgtgccttggacctttggcggaggcaccaagctggaaatcaagctcgagatccagaaccctgatcctgccgtgtaccagctgcgggatagcaagagcagcgacaagagcgtgtgtctgttcaccgacttcgacagccagaccaacgtgtcccagagcaaggactccgacgtgtacatcaccgataagtgcgtgctggacatgcggagcatggacttcaagagcaactccgccgtggcctggtccaacaagtccgatttcgcctgcgccaacgccttcaacaacagcattatccccgaggacacattcttcccaagccccgagagcagcgactccaccgaccacgtgaagcccaaagagacagagaacaccaagcagcccagcaagagctgccacaagcccaaggccatcgtgcacaccgagaaagtgaacatgatgagcctgaccgtgctgggcctgcggatgctgttcgccaaaaccgtggccgtgaacttcctgctgaccgccaagctgttcttcctcctcaccgcccgcgccaagagaagcggatctggcgtgaagcagaccctgaatttcgacctgctgaagctggctggcgacgtggaatccaacccaggccctactagtatggactggatttggcgcatccttttccttgtcggcgctgctaccggcgcgcattccttcgaaggcgtgaagctggacgagacaggcggaggacttgttcaacctggcggagccatgaagctgagctgtgtgaccagcggctttaccttcggccactactggatgaactgggtccgacagtcccctgagaaaggactggaatgggtcgcccagttcagaaacaagccctacaactacgaaacctactacagcgacagcgtgaagggcagattcaccatcagccgggacgacagcaagtccagcgtgtacctccagatgaacaacctgcgcgtggaagataccggcatctactactgtaccggggccagctacggcatggaatatctcggccagggcaccagcgtgaccgtgtctacaacgcgtgaggacctgaagaacgtgttcccacctgaggtggccgtgttcgagcctagcgaggccgagatcagccacacccagaaagccaccctcgtgtgcctggctaccggcttctaccccgaccatgtggaactgtcttggtgggtcaacggcaaagaggtgcacagcggcgtgtgtaccgacccccagccactgaaagaacagcccgccctgaacgacagccggtactgcctgagcagcagactgagagtgtccgccaccttctggcagaacccccggaaccacttcagatgccaggtgcagttctacggcctgagcgagaacgacgagtggacccaggacagagccaagcccgtgacccagatcgtgtctgccgaagcctggggcagagccgatgatgtgattaagatccactggcaggaaaagaagtccaacaccatcctgggcagccaggaaggcaacaccatgaagaccaacgacacctacatgaagttcagctggctgaccgtgcccgagaagtccctggacaaagaacacagatgcatcgtgcggcacgaaaacaacaagaacggcgtggaccaggaaatcatcttcccacccatcaagaccgatgtgattacaatggaccccaaggacaactgctccaaggacgccaacgataccctgctgctccagctgaccaacaccagcgcctactacatgtacttgttgctgctgctgaagtccgtggtgtacttcgccatcatcacatgctgcctgctgatggctatggtcaagcggaaggacagccgggga

SEQ ID NO: 6628 - DNA, 2616 bp, synthetic construct
  source 1..2616: mol_type = other DNA
atggccttaccagtgaccgccttgctcctgccgctggccttgctgctccacgccgccaggccggaagtgcagctggttgaatctggcggaggactggttcagcctggcggatctctgagactgtcttgtgccgccagcggcttcagcttcagcgacttttggatgagctgggtccgacaggcccctggcaaaggacttgaatgggtcgccacaatcagccaggccggcagcgagaaggactacgtggactctgtgaagggcagattcaccatcagccgggacaacgccaagaagtccctgtacctccagatgaacagcctgagagccgaggacaccgccgtgtactattgtgcctctggcgtgtacagcttcgactacagaggccagggcaccctggtcacagtctcttctggtaccggcggaggcggatctggcggcggaggtagcggtggcggaggatctgaattccaggtgcaactggtggaatctggcggcaatctggttcagcctggcggctctctgagactgtcttgtgccgccagcggcttcaccttcggcagcttttctatgagctgggtccgacaagctcctggcggaggacttgaatgggtggcaggactgtctgccagaagcagcctgacacactacgccgactctgtgaagggcagattcaccatcagccgggacaacgccaagaacagcgtgtacctccagatgaacagcctgagagtggaagataccgccgtgtactactgcgccagaagaagctacgacagcagcggctactggggccacttctacagctacatggatgtgtggggccagggcaccctggttacagtttctctcgagatccagaaccctgatcctgccgtgtaccagctgcgggatagcaagagcagcgacaagagcgtgtgtctgttcaccgacttcgacagccagaccaacgtgtcccagagcaaggactccgacgtgtacatcaccgataagtgcgtgctggacatgcggagcatggacttcaagagcaactccgccgtggcctggtccaacaagtccgatttcgcctgcgccaacgccttcaacaacagcattatccccgaggacacattcttcccaagccccgagagcagcgactccaccgaccacgtgaagcccaaagagacagagaacaccaagcagcccagcaagagctgccacaagcccaaggccatcgtgcacaccgagaaagtgaacatgatgagcctgaccgtgctgggcctgcggatgctgttcgccaaaaccgtggccgtgaacttcctgctgaccgccaagctgttcttcctcctcaccgcccgcgccaagagaagcggatctggcgtgaagcagaccctgaatttcgacctgctgaagctggctggcgacgtggaatccaacccaggccctactagtatggactggatttggcgcatccttttccttgtcggcgctgctaccggcgcgcattccttcgaatctgtgctgacccagcctagctccgtgtctgctgctcctggacagaaagtgaccatctcctgtagcggcagcaccagcaacatcggcaacaactacgtgtcctggtatcagcagcaccccggcaaggcccctaagctgatgatctacgacgtgtccaagaggcccagcggcgtgccagatagattttccggcagcaagagcggcaacagcgccagcctggatattagcggactccagtctgaggacgaggccgactactattgcgccgcctgggatgatagcctgagcgagtttctgtttggcaccggcaccaagctgacagtgcttggaacgcgtgaggacctgaagaacgtgttcccacctgaggtggccgtgttcgagcctagcgaggccgagatcagccacacccagaaagccaccctcgtgtgcctggctaccggcttctaccccgaccatgtggaactgtcttggtgggtcaacggcaaagaggtgcacagcggcgtgtgtaccgacccccagccactgaaagaacagcccgccctgaacgacagccggtactgcctgagcagcagactgagagtgtccgccaccttctggcagaacccccggaaccacttcagatgccaggtgcagttctacggcctgagcgagaacgacgagtggacccaggacagagccaagcccgtgacccagatcgtgtctgccgaagcctggggcagagccgatgatgtgattaagatccactggcaggaaaagaagtccaacaccatcctgggcagccaggaaggcaacaccatgaagaccaacgacacctacatgaagttcagctggctgaccgtgcccgagaagtccctggacaaagaacacagatgcatcgtgcggcacgaaaacaacaagaacggcgtggaccaggaaatcatcttcccacccatcaagaccgatgtgattacaatggaccccaaggacaactgctccaaggacgccaacgataccctgctgctccagctgaccaacaccagcgcctactacatgtacttgttgctgctgctgaagtccgtggtgtacttcgccatcatcacatgctgcctgctgatggctatggtcaagcggaaggacagccgggga

SEQ ID NO: 6629 - DNA, 2601 bp, synthetic construct
  source 1..2601: mol_type = other DNA
atggccttaccagtgaccgccttgctcctgccgctggccttgctgctccacgccgccaggccggaagtgcagctggttgaatctggcggaggactggttcagcctggcggatctctgagactgtcttgtgccgccagcggcttcagcttcagcgacttttggatgagctgggtccgacaggcccctggcaaaggacttgaatgggtcgccacaatcagccaggccggcagcgagaaggactacgtggactctgtgaagggcagattcaccatcagccgggacaacgccaagaagtccctgtacctccagatgaacagcctgagagccgaggacaccgccgtgtactattgtgcctctggcgtgtacagcttcgactacagaggccagggcaccctggtcacagtctcttctggtaccggcggaggcggatctggcggcggaggtagcggtggcggaggatctgaattcgacgtggtcatgacacagagcccttctagcctgtctgccagcgtgggcgacagagtgacaatcacctgtcagagcagcctggacatcagccactacctgaactggtatcagcagaagcccggcaaggcccctaagctgctgatctacgacgccagcaatctggaaaccggcgtgcccagcagattttctggcagcggaagcggcacccacttcaccttcacaatatccagcctccagcctgaggacttcgccacctactactgccagcagtacgacaacctgcctctgacctttggcggaggcaccaagctggaaatcaagagactcgagatccagaaccctgatcctgccgtgtaccagctgcgggatagcaagagcagcgacaagagcgtgtgtctgttcaccgacttcgacagccagaccaacgtgtcccagagcaaggactccgacgtgtacatcaccgataagtgcgtgctggacatgcggagcatggacttcaagagcaactccgccgtggcctggtccaacaagtccgatttcgcctgcgccaacgccttcaacaacagcattatccccgaggacacattcttcccaagccccgagagcagcgactccaccgaccacgtgaagcccaaagagacagagaacaccaagcagcccagcaagagctgccacaagcccaaggccatcgtgcacaccgagaaagtgaacatgatgagcctgaccgtgctgggcctgcggatgctgttcgccaaaaccgtggccgtgaacttcctgctgaccgccaagctgttcttcctcctcaccgcccgcgccaagagaagcggatctggcgtgaagcagaccctgaatttcgacctgctgaagctggctggcgacgtggaatccaacccaggccctactagtatggactggatttggcgcatccttttccttgtcggcgctgctaccggcgcgcattccttcgaacaagttcaactggttcaatcaggcggaggcgtggtgcaacctggtggctctctgagagtgtcttgtgctgcctctggcgtgaccctgagcgactatggaatgcactgggtccgacaggcccctggcaaaggacttgagtgggtcgccttcatcagaaacgacggcagcgacaagtattacgccgacagcgtgaagggcagattcaccatcagccgggacaacagcgagaaaaccgtgtctctccagatgtctagcctgagagccgaggacaccgccgtgtactactgtgccaagaatggcgagagcggccctctggactactggtatctggatctgtggggcagaggcaccctggtcacagtctcttctacgcgtgaggacctgaagaacgtgttcccacctgaggtggccgtgttcgagcctagcgaggccgagatcagccacacccagaaagccaccctcgtgtgcctggctaccggcttctaccccgaccatgtggaactgtcttggtgggtcaacggcaaagaggtgcacagcggcgtgtgtaccgacccccagccactgaaagaacagcccgccctgaacgacagccggtactgcctgagcagcagactgagagtgtccgccaccttctggcagaacccccggaaccacttcagatgccaggtgcagttctacggcctgagcgagaacgacgagtggacccaggacagagccaagcccgtgacccagatcgtgtctgccgaagcctggggcagagccgatgatgtgattaagatccactggcaggaaaagaagtccaacaccatcctgggcagccaggaaggcaacaccatgaagaccaacgacacctacatgaagttcagctggctgaccgtgcccgagaagtccctggacaaagaacacagatgcatcgtgcggcacgaaaacaacaagaacggcgtggaccaggaaatcatcttcccacccatcaagaccgatgtgattacaatggaccccaaggacaactgctccaaggacgccaacgataccctgctgctccagctgaccaacaccagcgcctactacatgtacttgttgctgctgctgaagtccgtggtgtacttcgccatcatcacatgctgcctgctgatggctatggtcaagcggaaggacagccgggga

SEQ ID NO: 6630 - DNA, 2613 bp, synthetic construct
  source 1..2613: mol_type = other DNA
atggccttaccagtgaccgccttgctcctgccgctggccttgctgctccacgccgccaggccggaagtgcagctggttgaatctggcggaggactggttcagcctggcggatctctgagactgtcttgtgccgccagcggcttcagcttcagcgacttttggatgagctgggtccgacaggcccctggcaaaggacttgaatgggtcgccacaatcagccaggccggcagcgagaaggactacgtggactctgtgaagggcagattcaccatcagccgggacaacgccaagaagtccctgtacctccagatgaacagcctgagagccgaggacaccgccgtgtactattgtgcctctggcgtgtacagcttcgactacagaggccagggcaccctggtcacagtctcttctggtaccggcggaggcggatctggcggcggaggtagcggtggcggaggatctgaattcagctacgagctgacacagcctccatccgtgtctggcacacctggacagagagtggctatctcctgtagcggcagcagcagcaacatcggcaccagaatggtcacctggtatcagcacgtgccaggcacagcccctaagctgctgatcttcaacaacaaccagcggcctagcggcgtgcccgatagattttctgccagcaagagcggcacaagcgccagcctggctatcatcggactccagtctgacgacgaggccgactactactgtgccacctgggacgacaacgtgaagtcctacgtgttcggcaccggcaccaaagtgacagtgcttggaagtagactcgagatccagaaccctgatcctgccgtgtaccagctgcgggatagcaagagcagcgacaagagcgtgtgtctgttcaccgacttcgacagccagaccaacgtgtcccagagcaaggactccgacgtgtacatcaccgataagtgcgtgctggacatgcggagcatggacttcaagagcaactccgccgtggcctggtccaacaagtccgatttcgcctgcgccaacgccttcaacaacagcattatccccgaggacacattcttcccaagccccgagagcagcgactccaccgaccacgtgaagcccaaagagacagagaacaccaagcagcccagcaagagctgccacaagcccaaggccatcgtgcacaccgagaaagtgaacatgatgagcctgaccgtgctgggcctgcggatgctgttcgccaaaaccgtggccgtgaacttcctgctgaccgccaagctgttcttcctcctcaccgcccgcgccaagagaagcggatctggcgtgaagcagaccctgaatttcgacctgctgaagctggctggcgacgtggaatccaacccaggccctactagtatggactggatttggcgcatccttttccttgtcggcgctgctaccggcgcgcattccttcgaacttgaaatggcccaggttcagctccagcagtggggagctggactgctgaagcctagcgagacactgagcctgacctgtgctgtgtacggcggcagcttcagcggctactactggtcctggatcagacagcctcctggcaaaggactggaatggatcggcgagatcaaccacagcggctccaccaactacaaccccagcctgaagtccagagtgaccatcagcgtggacaccagcaagaaccagttctccctgaagctgagcagcgtgacagccgctgataccgccgtgtactattgcgctagagcccctcagtcttggtacgtgggagatgtgtggggccagggcacactggttacagtgtcatctacgcgtgaggacctgaagaacgtgttcccacctgaggtggccgtgttcgagcctagcgaggccgagatcagccacacccagaaagccaccctcgtgtgcctggctaccggcttctaccccgaccatgtggaactgtcttggtgggtcaacggcaaagaggtgcacagcggcgtgtgtaccgacccccagccactgaaagaacagcccgccctgaacgacagccggtactgcctgagcagcagactgagagtgtccgccaccttctggcagaacccccggaaccacttcagatgccaggtgcagttctacggcctgagcgagaacgacgagtggacccaggacagagccaagcccgtgacccagatcgtgtctgccgaagcctggggcagagccgatgatgtgattaagatccactggcaggaaaagaagtccaacaccatcctgggcagccaggaaggcaacaccatgaagaccaacgacacctacatgaagttcagctggctgaccgtgcccgagaagtccctggacaaagaacacagatgcatcgtgcggcacgaaaacaacaagaacggcgtggaccaggaaatcatcttcccacccatcaagaccgatgtgattacaatggaccccaaggacaactgctccaaggacgccaacgataccctgctgctccagctgaccaacaccagcgcctactacatgtacttgttgctgctgctgaagtccgtggtgtacttcgccatcatcacatgctgcctgctgatggctatggtcaagcggaaggacagccgggga

SEQ ID NO: 6631 - DNA, 2604 bp, synthetic construct
  source 1..2604: mol_type = other DNA
atggccttaccagtgaccgccttgctcctgccgctggccttgctgctccacgccgccaggccggaagtgcagctggttgaatctggcggaggactggttcagcctggcggatctctgagactgtcttgtgccgccagcggcttcagcttcagcgacttttggatgagctgggtccgacaggcccctggcaaaggacttgaatgggtcgccacaatcagccaggccggcagcgagaaggactacgtggactctgtgaagggcagattcaccatcagccgggacaacgccaagaagtccctgtacctccagatgaacagcctgagagccgaggacaccgccgtgtactattgtgcctctggcgtgtacagcttcgactacagaggccagggcaccctggtcacagtctcttctggtaccggcggaggcggatctggcggcggaggtagcggtggcggaggatctgaattccagtctgtgctgacacagcctcctagcctgtctgtggcccctggaaagacagccagcatcacatgcggcggcaacaacatcggcatgaagtccgtgcactggtatcagcagaggccaggacaggctcctgtgctggtcatctactacgacagcgacagaccctctggcatccccggcagattttccggcagcaactctggcaataccgccacactgaccatctccagagtggaagctggcgacgaggccgactactactgccaagtgtgggataccaccggcgatcaccctggctatgtgtttggcaccggcaccaaagtgacagtgcttctcgagatccagaaccctgatcctgccgtgtaccagctgcgggatagcaagagcagcgacaagagcgtgtgtctgttcaccgacttcgacagccagaccaacgtgtcccagagcaaggactccgacgtgtacatcaccgataagtgcgtgctggacatgcggagcatggacttcaagagcaactccgccgtggcctggtccaacaagtccgatttcgcctgcgccaacgccttcaacaacagcattatccccgaggacacattcttcccaagccccgagagcagcgactccaccgaccacgtgaagcccaaagagacagagaacaccaagcagcccagcaagagctgccacaagcccaaggccatcgtgcacaccgagaaagtgaacatgatgagcctgaccgtgctgggcctgcggatgctgttcgccaaaaccgtggccgtgaacttcctgctgaccgccaagctgttcttcctcctcaccgcccgcgccaagagaagcggatctggcgtgaagcagaccctgaatttcgacctgctgaagctggctggcgacgtggaatccaacccaggccctactagtatggactggatttggcgcatccttttccttgtcggcgctgctaccggcgcgcattccttcgaacaagttcaactggttcagagcggagccgaagtgaagaaacctggcagcagcgtgaaggtgtcctgcaaagcaagcggcggcacctttagcagctacgccatctcttgggtccgacaggcacctggacaaggactggaatggatgggcggcatcatccccatcttcggcacagccaattacgcccagaaattccagggcagagtgaccatcaccgccgacgagtctacaagcaccgcctacatggaactgagcagcctgagaagcgaggacaccgccgtgtactattgtgccagaggcgtgtacggctacagcggctctgccccttatgatgagtggggccagggaaccctggtcaccgtttcttctacgcgtgaggacctgaagaacgtgttcccacctgaggtggccgtgttcgagcctagcgaggccgagatcagccacacccagaaagccaccctcgtgtgcctggctaccggcttctaccccgaccatgtggaactgtcttggtgggtcaacggcaaagaggtgcacagcggcgtgtgtaccgacccccagccactgaaagaacagcccgccctgaacgacagccggtactgcctgagcagcagactgagagtgtccgccaccttctggcagaacccccggaaccacttcagatgccaggtgcagttctacggcctgagcgagaacgacgagtggacccaggacagagccaagcccgtgacccagatcgtgtctgccgaagcctggggcagagccgatgatgtgattaagatccactggcaggaaaagaagtccaacaccatcctgggcagccaggaaggcaacaccatgaagaccaacgacacctacatgaagttcagctggctgaccgtgcccgagaagtccctggacaaagaacacagatgcatcgtgcggcacgaaaacaacaagaacggcgtggaccaggaaatcatcttcccacccatcaagaccgatgtgattacaatggaccccaaggacaactgctccaaggacgccaacgataccctgctgctccagctgaccaacaccagcgcctactacatgtacttgttgctgctgctgaagtccgtggtgtacttcgccatcatcacatgctgcctgctgatggctatggtcaagcggaaggacagccgggga

SEQ ID NO: 6632 - DNA, 2598 bp, synthetic construct
  source 1..2598: mol_type = other DNA
atggccttaccagtgaccgccttgctcctgccgctggccttgctgctccacgccgccaggccggaagtgcagctggttgaatctggcggaggactggttcagcctggcggatctctgagactgtcttgtgccgccagcggcttcagcttcagcgacttttggatgagctgggtccgacaggcccctggcaaaggacttgaatgggtcgccacaatcagccaggccggcagcgagaaggactacgtggactctgtgaagggcagattcaccatcagccgggacaacgccaagaagtccctgtacctccagatgaacagcctgagagccgaggacaccgccgtgtactattgtgcctctggcgtgtacagcttcgactacagaggccagggcaccctggtcacagtctcttctggtaccggcggaggcggatctggcggcggaggtagcggtggcggaggatctgaattcgaggtgcaactggttgagtctggcggaggactggtgcagcctggaagaagcctgagactgtcttgtgccgccagcggcttcaccttcgacgattatgccatgcactgggtccgacaggcccctggcaaaggacttgaatgggtgtccggcatctcctggaacagcggctctatcggctacgccgattccgtgaagggcagattcaccatcagccgggacaacgccaagaacagcctgtacctccagatgaactccctgagagccgaggacacagccctgtactactgcgccaaagacaaaggcggaggctactacgacttttggagcggcagcgattattggggccagggcacactggtcacagtgtctagcctcgagatccagaaccctgatcctgccgtgtaccagctgcgggatagcaagagcagcgacaagagcgtgtgtctgttcaccgacttcgacagccagaccaacgtgtcccagagcaaggactccgacgtgtacatcaccgataagtgcgtgctggacatgcggagcatggacttcaagagcaactccgccgtggcctggtccaacaagtccgatttcgcctgcgccaacgccttcaacaacagcattatccccgaggacacattcttcccaagccccgagagcagcgactccaccgaccacgtgaagcccaaagagacagagaacaccaagcagcccagcaagagctgccacaagcccaaggccatcgtgcacaccgagaaagtgaacatgatgagcctgaccgtgctgggcctgcggatgctgttcgccaaaaccgtggccgtgaacttcctgctgaccgccaagctgttcttcctcctcaccgcccgcgccaagagaagcggatctggcgtgaagcagaccctgaatttcgacctgctgaagctggctggcgacgtggaatccaacccaggccctactagtatggactggatttggcgcatccttttccttgtcggcgctgctaccggcgcgcattccttcgaatcttctgagctgacacaggaccctgccgtgtctgttgctctgggccagacagtgcggattacctgtcagggcgatagcctgagaagctactacgcctcctggtatcagcagaagccaggccaggctcctgtgctggtcatctacggcaagaacaacagacccagcggcatccccgatagattcagcggaagcagctctggcaataccgccagcctgacaattactggcgctcaggccgaggacgaggccgactactactgcaacagcagagatagcagcggctgggttttcggcggaggcacaaaactgacagtgctgacgcgtgaggacctgaagaacgtgttcccacctgaggtggccgtgttcgagcctagcgaggccgagatcagccacacccagaaagccaccctcgtgtgcctggctaccggcttctaccccgaccatgtggaactgtcttggtgggtcaacggcaaagaggtgcacagcggcgtgtgtaccgacccccagccactgaaagaacagcccgccctgaacgacagccggtactgcctgagcagcagactgagagtgtccgccaccttctggcagaacccccggaaccacttcagatgccaggtgcagttctacggcctgagcgagaacgacgagtggacccaggacagagccaagcccgtgacccagatcgtgtctgccgaagcctggggcagagccgatgatgtgattaagatccactggcaggaaaagaagtccaacaccatcctgggcagccaggaaggcaacaccatgaagaccaacgacacctacatgaagttcagctggctgaccgtgcccgagaagtccctggacaaagaacacagatgcatcgtgcggcacgaaaacaacaagaacggcgtggaccaggaaatcatcttcccacccatcaagaccgatgtgattacaatggaccccaaggacaactgctccaaggacgccaacgataccctgctgctccagctgaccaacaccagcgcctactacatgtacttgttgctgctgctgaagtccgtggtgtacttcgccatcatcacatgctgcctgctgatggctatggtcaagcggaaggacagccgggga

SEQ ID NO: 6633 - DNA, 2625 bp, synthetic construct
  source 1..2625: mol_type = other DNA
atggccttaccagtgaccgccttgctcctgccgctggccttgctgctccacgccgccaggccggaagtgcagctggttgaatctggcggaggactggttcagcctggcggatctctgagactgtcttgtgccgccagcggcttcagcttcagcgacttttggatgagctgggtccgacaggcccctggcaaaggacttgaatgggtcgccacaatcagccaggccggcagcgagaaggactacgtggactctgtgaagggcagattcaccatcagccgggacaacgccaagaagtccctgtacctccagatgaacagcctgagagccgaggacaccgccgtgtactattgtgcctctggcgtgtacagcttcgactacagaggccagggcaccctggtcacagtctcttctggtaccggcggaggcggatctggcggcggaggtagcggtggcggaggatctgaattcgaagtgcagctccagcagtctggacctggcctggttaagcctagccagacactgagcctgacctgtgccatcagcggcgatagcgtgctgagcaacagcgacacctggaactggatcagacagagccctagcagaggactggaatggctgggcagaacctaccacagaagcacttggtacgacgactacgccagctctgtgcggggcagagtgtccatcaatgtggacaccagcaagaaccagtacagcctgcaactgaacgccgtgacacctgaggataccggcgtgtactactgcgccagagacagactccaggacggcaactcttggagcgacgcctttgatgtgtggggccagggcacaatggtcaccgtttctagcctcgagatccagaaccctgatcctgccgtgtaccagctgcgggatagcaagagcagcgacaagagcgtgtgtctgttcaccgacttcgacagccagaccaacgtgtcccagagcaaggactccgacgtgtacatcaccgataagtgcgtgctggacatgcggagcatggacttcaagagcaactccgccgtggcctggtccaacaagtccgatttcgcctgcgccaacgccttcaacaacagcattatccccgaggacacattcttcccaagccccgagagcagcgactccaccgaccacgtgaagcccaaagagacagagaacaccaagcagcccagcaagagctgccacaagcccaaggccatcgtgcacaccgagaaagtgaacatgatgagcctgaccgtgctgggcctgcggatgctgttcgccaaaaccgtggccgtgaacttcctgctgaccgccaagctgttcttcctcctcaccgcccgcgccaagagaagcggatctggcgtgaagcagaccctgaatttcgacctgctgaagctggctggcgacgtggaatccaacccaggccctactagtatggactggatttggcgcatccttttccttgtcggcgctgctaccggcgcgcattccttcgaacaatctgctctgacacagcctgccagcgtgtcaggatctcctggacagagcatcaccatctcttgcaccggcaccagctctgatgtcggcggctacaattacgtgtcctggtatcagcagcaccccggcaaggcccctaagctgatgatctacgacgtgtccaacagacccagcggcgtgtccaatagattctccggcagcaagagcggcaacaccgccagcctgacaatttctggactgcaagccgaggacgaggccgactactactgtagcagctacaccagcagcagcacactggtgtacgtgttcggcacaggcaccaaagtgaccgtgcttacgcgtgaggacctgaagaacgtgttcccacctgaggtggccgtgttcgagcctagcgaggccgagatcagccacacccagaaagccaccctcgtgtgcctggctaccggcttctaccccgaccatgtggaactgtcttggtgggtcaacggcaaagaggtgcacagcggcgtgtgtaccgacccccagccactgaaagaacagcccgccctgaacgacagccggtactgcctgagcagcagactgagagtgtccgccaccttctggcagaacccccggaaccacttcagatgccaggtgcagttctacggcctgagcgagaacgacgagtggacccaggacagagccaagcccgtgacccagatcgtgtctgccgaagcctggggcagagccgatgatgtgattaagatccactggcaggaaaagaagtccaacaccatcctgggcagccaggaaggcaacaccatgaagaccaacgacacctacatgaagttcagctggctgaccgtgcccgagaagtccctggacaaagaacacagatgcatcgtgcggcacgaaaacaacaagaacggcgtggaccaggaaatcatcttcccacccatcaagaccgatgtgattacaatggaccccaaggacaactgctccaaggacgccaacgataccctgctgctccagctgaccaacaccagcgcctactacatgtacttgttgctgctgctgaagtccgtggtgtacttcgccatcatcacatgctgcctgctgatggctatggtcaagcggaaggacagccgggga

SEQ ID NO: 6634 - DNA, 2559 bp, synthetic construct
  source 1..2559: mol_type = other DNA
atggccttaccagtgaccgccttgctcctgccgctggccttgctgctccacgccgccaggccggaagtgcagctggttgaatctggcggaggactggttcagcctggcggatctctgagactgtcttgtgccgccagcggcttcagcttcagcgacttttggatgagctgggtccgacaggcccctggcaaaggacttgaatgggtcgccacaatcagccaggccggcagcgagaaggactacgtggactctgtgaagggcagattcaccatcagccgggacaacgccaagaagtccctgtacctccagatgaacagcctgagagccgaggacaccgccgtgtactattgtgcctctggcgtgtacagcttcgactacagaggccagggcaccctggtcacagtctcttctggtaccggcggaggcggatctggcggcggaggtagcggtggcggaggatctgaattccaggtgcaactggttcagtctggggccgaagtgaagaaacctggggcctctgtgaaggtgtcctgcaaggcttccggctacacctttaccagctacgacatcaactgggtccgacaggccacaggccaaggactggaatggatgggctggatgaaccccaacagcggcaataccggctacgcccagaaattccagggcagagtgaccatgaccagaaacaccagcatcagcaccgcctacatggaactgagcagcctgagaagcgaggacaccgccgtgtactattgcgccagaggcgacagcaccaaggtggaaatcaaactcgagatccagaaccctgatcctgccgtgtaccagctgcgggatagcaagagcagcgacaagagcgtgtgtctgttcaccgacttcgacagccagaccaacgtgtcccagagcaaggactccgacgtgtacatcaccgataagtgcgtgctggacatgcggagcatggacttcaagagcaactccgccgtggcctggtccaacaagtccgatttcgcctgcgccaacgccttcaacaacagcattatccccgaggacacattcttcccaagccccgagagcagcgactccaccgaccacgtgaagcccaaagagacagagaacaccaagcagcccagcaagagctgccacaagcccaaggccatcgtgcacaccgagaaagtgaacatgatgagcctgaccgtgctgggcctgcggatgctgttcgccaaaaccgtggccgtgaacttcctgctgaccgccaagctgttcttcctcctcaccgcccgcgccaagagaagcggatctggcgtgaagcagaccctgaatttcgacctgctgaagctggctggcgacgtggaatccaacccaggccctactagtatggactggatttggcgcatccttttccttgtcggcgctgctaccggcgcgcattccttcgaacaatctgtgctgacccagcctagatccgtgtctggctctcctggacagagcgtgaccatctcttgtaccggcaccagctctgatgtcggcggctacaattacgtgtcctggtatcagcagcaccccggcgaagcccctaagctgattatctacgacgccgacaagcggcccagcggcatcagcaatagattcagctctggcaagagcggcaacaccgccagcctgacaatcagcggactccaggtggaagatgaggccgactactactgctgctcctatgccggcggaagcacctgggttttcggaggcggtacaaaagtgaccgtgctgacgcgtgaggacctgaagaacgtgttcccacctgaggtggccgtgttcgagcctagcgaggccgagatcagccacacccagaaagccaccctcgtgtgcctggctaccggcttctaccccgaccatgtggaactgtcttggtgggtcaacggcaaagaggtgcacagcggcgtgtgtaccgacccccagccactgaaagaacagcccgccctgaacgacagccggtactgcctgagcagcagactgagagtgtccgccaccttctggcagaacccccggaaccacttcagatgccaggtgcagttctacggcctgagcgagaacgacgagtggacccaggacagagccaagcccgtgacccagatcgtgtctgccgaagcctggggcagagccgatgatgtgattaagatccactggcaggaaaagaagtccaacaccatcctgggcagccaggaaggcaacaccatgaagaccaacgacacctacatgaagttcagctggctgaccgtgcccgagaagtccctggacaaagaacacagatgcatcgtgcggcacgaaaacaacaagaacggcgtggaccaggaaatcatcttcccacccatcaagaccgatgtgattacaatggaccccaaggacaactgctccaaggacgccaacgataccctgctgctccagctgaccaacaccagcgcctactacatgtacttgttgctgctgctgaagtccgtggtgtacttcgccatcatcacatgctgcctgctgatggctatggtcaagcggaaggacagccgggga

SEQ ID NO: 6635 - DNA, 2625 bp, synthetic construct
  source 1..2625: mol_type = other DNA
atggccttaccagtgaccgccttgctcctgccgctggccttgctgctccacgccgccaggccggaagtgcagctggttgaatctggcggaggactggttcagcctggcggatctctgagactgtcttgtgccgccagcggcttcagcttcagcgacttttggatgagctgggtccgacaggcccctggcaaaggacttgaatgggtcgccacaatcagccaggccggcagcgagaaggactacgtggactctgtgaagggcagattcaccatcagccgggacaacgccaagaagtccctgtacctccagatgaacagcctgagagccgaggacaccgccgtgtactattgtgcctctggcgtgtacagcttcgactacagaggccagggcaccctggtcacagtctcttctggtaccggcggaggcggatctggcggcggaggtagcggtggcggaggatctgaattcgaagtgcagctccagcagtctggacctggcctggttaagcctagccagacactgagcctgacctgtgccatcagcggcgatagcgtgtcctctaatagcgccgcctggaactggatcagacagagccctagcagaggactggaatggctgggcagaacctactaccgcagcaagtggtacagcgactacgccgtgtccgtgaagtcccggatcaccatcaatcccgacaccagcaagaaccagttcagcctgcaactgaacagcgtgacccctgaggataccgccgtgtactactgcgccagagatccctacgacttttggagcggctaccccgacgcctttgacatctggggacagggcacaatggtcaccgtttctagcctcgagatccagaaccctgatcctgccgtgtaccagctgcgggatagcaagagcagcgacaagagcgtgtgtctgttcaccgacttcgacagccagaccaacgtgtcccagagcaaggactccgacgtgtacatcaccgataagtgcgtgctggacatgcggagcatggacttcaagagcaactccgccgtggcctggtccaacaagtccgatttcgcctgcgccaacgccttcaacaacagcattatccccgaggacacattcttcccaagccccgagagcagcgactccaccgaccacgtgaagcccaaagagacagagaacaccaagcagcccagcaagagctgccacaagcccaaggccatcgtgcacaccgagaaagtgaacatgatgagcctgaccgtgctgggcctgcggatgctgttcgccaaaaccgtggccgtgaacttcctgctgaccgccaagctgttcttcctcctcaccgcccgcgccaagagaagcggatctggcgtgaagcagaccctgaatttcgacctgctgaagctggctggcgacgtggaatccaacccaggccctactagtatggactggatttggcgcatccttttccttgtcggcgctgctaccggcgcgcattccttcgaacaatctgctctgacacagcctgccagcgtgtcaggatctcctggacagagcatcaccatctcttgcaccggcaccagctctgatgtcggcggctacaattacgtgtcctggtatcagcagcaccccggcaaggcccctaaagtgattatcagcgaagtgaacaacagacccagcggcgtgtcccacagattcagcggctctaagtctggcaacaccgccagcctgacaatctctggactgcaagccgaggacgaggccgactacttctgtagcagctacaccagcggcagaaccctgtacgtgttcggcacaggcagcaaagtgacagtgctgggaacgcgtgaggacctgaagaacgtgttcccacctgaggtggccgtgttcgagcctagcgaggccgagatcagccacacccagaaagccaccctcgtgtgcctggctaccggcttctaccccgaccatgtggaactgtcttggtgggtcaacggcaaagaggtgcacagcggcgtgtgtaccgacccccagccactgaaagaacagcccgccctgaacgacagccggtactgcctgagcagcagactgagagtgtccgccaccttctggcagaacccccggaaccacttcagatgccaggtgcagttctacggcctgagcgagaacgacgagtggacccaggacagagccaagcccgtgacccagatcgtgtctgccgaagcctggggcagagccgatgatgtgattaagatccactggcaggaaaagaagtccaacaccatcctgggcagccaggaaggcaacaccatgaagaccaacgacacctacatgaagttcagctggctgaccgtgcccgagaagtccctggacaaagaacacagatgcatcgtgcggcacgaaaacaacaagaacggcgtggaccaggaaatcatcttcccacccatcaagaccgatgtgattacaatggaccccaaggacaactgctccaaggacgccaacgataccctgctgctccagctgaccaacaccagcgcctactacatgtacttgttgctgctgctgaagtccgtggtgtacttcgccatcatcacatgctgcctgctgatggctatggtcaagcggaaggacagccgggga

SEQ ID NO: 6636 - DNA, 2622 bp, synthetic construct
  source 1..2622: mol_type = other DNA
atggccttaccagtgaccgccttgctcctgccgctggccttgctgctccacgccgccaggccggaagtgcagctggttgaatctggcggaggactggttcagcctggcggatctctgagactgtcttgtgccgccagcggcttcagcttcagcgacttttggatgagctgggtccgacaggcccctggcaaaggacttgaatgggtcgccacaatcagccaggccggcagcgagaaggactacgtggactctgtgaagggcagattcaccatcagccgggacaacgccaagaagtccctgtacctccagatgaacagcctgagagccgaggacaccgccgtgtactattgtgcctctggcgtgtacagcttcgactacagaggccagggcaccctggtcacagtctcttctggtaccggcggaggcggatctggcggcggaggtagcggtggcggaggatctgaattccaatctgctctgacacagcctgccagcgcctctggatctcctggacagagcgtgaccatctcctgtaccggcacctcttctgatgtcggcggctacaactacgtgtcctggtatcagcagcaccccggcaaggcccctaagctgatgatctacgacgtgtccaacagacccagcggcgtgtccaatagattctccggcagcaagagcggcaacaccgccagcctgacaatttctggactgcaagccgaggacgaggccgactactactgtagcagctacaccagcagcagcacactgtacgtgttcggcacaggcacccagctcacagttcttctcgagatccagaaccctgatcctgccgtgtaccagctgcgggatagcaagagcagcgacaagagcgtgtgtctgttcaccgacttcgacagccagaccaacgtgtcccagagcaaggactccgacgtgtacatcaccgataagtgcgtgctggacatgcggagcatggacttcaagagcaactccgccgtggcctggtccaacaagtccgatttcgcctgcgccaacgccttcaacaacagcattatccccgaggacacattcttcccaagccccgagagcagcgactccaccgaccacgtgaagcccaaagagacagagaacaccaagcagcccagcaagagctgccacaagcccaaggccatcgtgcacaccgagaaagtgaacatgatgagcctgaccgtgctgggcctgcggatgctgttcgccaaaaccgtggccgtgaacttcctgctgaccgccaagctgttcttcctcctcaccgcccgcgccaagagaagcggatctggcgtgaagcagaccctgaatttcgacctgctgaagctggctggcgacgtggaatccaacccaggccctactagtatggactggatttggcgcatccttttccttgtcggcgctgctaccggcgcgcattccttcgaagaagtgcagctccagcagtctggacctggcctggttaagcctagccagacactgagcctgacctgtgccatcagcggcgattccatgctgagcaacagcgacacctggaactggatcagacagagccccagcagaggcctggaatggctgggcagaacataccacagaagcacttggtacgacgactacgccagctctgtgcggggcagagtgtccatcaatgtggacaccagcaagaaccagtacagcctgcaactgaacgccgtgacacctgaggataccggcgtgtactactgtgccagagtgcggctccaggacggcaattcttggagcgacgcctttgatgtgtggggccagggcacaatggtcaccgtttctagcacgcgtgaggacctgaagaacgtgttcccacctgaggtggccgtgttcgagcctagcgaggccgagatcagccacacccagaaagccaccctcgtgtgcctggctaccggcttctaccccgaccatgtggaactgtcttggtgggtcaacggcaaagaggtgcacagcggcgtgtgtaccgacccccagccactgaaagaacagcccgccctgaacgacagccggtactgcctgagcagcagactgagagtgtccgccaccttctggcagaacccccggaaccacttcagatgccaggtgcagttctacggcctgagcgagaacgacgagtggacccaggacagagccaagcccgtgacccagatcgtgtctgccgaagcctggggcagagccgatgatgtgattaagatccactggcaggaaaagaagtccaacaccatcctgggcagccaggaaggcaacaccatgaagaccaacgacacctacatgaagttcagctggctgaccgtgcccgagaagtccctggacaaagaacacagatgcatcgtgcggcacgaaaacaacaagaacggcgtggaccaggaaatcatcttcccacccatcaagaccgatgtgattacaatggaccccaaggacaactgctccaaggacgccaacgataccctgctgctccagctgaccaacaccagcgcctactacatgtacttgttgctgctgctgaagtccgtggtgtacttcgccatcatcacatgctgcctgctgatggctatggtcaagcggaaggacagccgggga

SEQ ID NO: 6637 - DNA, 2622 bp, synthetic construct
  source 1..2622: mol_type = other DNA
atggccttaccagtgaccgccttgctcctgccgctggccttgctgctccacgccgccaggccggaagtgcagctggttgaatctggcggaggactggttcagcctggcggatctctgagactgtcttgtgccgccagcggcttcagcttcagcgacttttggatgagctgggtccgacaggcccctggcaaaggacttgaatgggtcgccacaatcagccaggccggcagcgagaaggactacgtggactctgtgaagggcagattcaccatcagccgggacaacgccaagaagtccctgtacctccagatgaacagcctgagagccgaggacaccgccgtgtactattgtgcctctggcgtgtacagcttcgactacagaggccagggcaccctggtcacagtctcttctggtaccggcggaggcggatctggcggcggaggtagcggtggcggaggatctgaattcgacgtgatgctgacccagacaccactgagcctgcctgtgtctctgggcgatcaggccagcatctcctgtagaagcagccagagcatcctgcacagcaccggcgatacctacctggaatggtatctccagaagcctggacagagccccaagctgctgattaacaaggtgtccaaccggctgagcggcgtgcccgatagattttctggcagcggctctggcaccgacttcaccctgaagatcagcagagtggaagccgaggacctgggcgtgtactactgcttccaaggcagccatgttccttggacctttggcggaggcaccaagctggaaatcaagagagctgacgccgctcctaccgtgtccatctttcctctcgagatccagaaccctgatcctgccgtgtaccagctgcgggatagcaagagcagcgacaagagcgtgtgtctgttcaccgacttcgacagccagaccaacgtgtcccagagcaaggactccgacgtgtacatcaccgataagtgcgtgctggacatgcggagcatggacttcaagagcaactccgccgtggcctggtccaacaagtccgatttcgcctgcgccaacgccttcaacaacagcattatccccgaggacacattcttcccaagccccgagagcagcgactccaccgaccacgtgaagcccaaagagacagagaacaccaagcagcccagcaagagctgccacaagcccaaggccatcgtgcacaccgagaaagtgaacatgatgagcctgaccgtgctgggcctgcggatgctgttcgccaaaaccgtggccgtgaacttcctgctgaccgccaagctgttcttcctcctcaccgcccgcgccaagagaagcggatctggcgtgaagcagaccctgaatttcgacctgctgaagctggctggcgacgtggaatccaacccaggccctactagtatggactggatttggcgcatccttttccttgtcggcgctgctaccggcgcgcattccttcgaacaagtgaagctccagcagagcggccctagccttgtgaaacctggcgcttccgtgaagatgagctgcaaggccagcggctacaccttcaccgatttctacatgaaatgggtcaagcagagccacggcaagtctctggaatggatcggcgacatcaaccccaacatcggagacaccttctacaaccagaagttcaagggcaaagccacactgaccgtggacaagagcagcagcaccgcctacatgcagctcaacagcctgaccagcgaggacagcgccgtgtacttttgttccgtgggctacttcgacgtgtggggagccggaacaaccgtgacagtctcttctacgcgtgaggacctgaagaacgtgttcccacctgaggtggccgtgttcgagcctagcgaggccgagatcagccacacccagaaagccaccctcgtgtgcctggctaccggcttctaccccgaccatgtggaactgtcttggtgggtcaacggcaaagaggtgcacagcggcgtgtgtaccgacccccagccactgaaagaacagcccgccctgaacgacagccggtactgcctgagcagcagactgagagtgtccgccaccttctggcagaacccccggaaccacttcagatgccaggtgcagttctacggcctgagcgagaacgacgagtggacccaggacagagccaagcccgtgacccagatcgtgtctgccgaagcctggggcagagccgatgatgtgattaagatccactggcaggaaaagaagtccaacaccatcctgggcagccaggaaggcaacaccatgaagaccaacgacacctacatgaagttcagctggctgaccgtgcccgagaagtccctggacaaagaacacagatgcatcgtgcggcacgaaaacaacaagaacggcgtggaccaggaaatcatcttcccacccatcaagaccgatgtgattacaatggaccccaaggacaactgctccaaggacgccaacgataccctgctgctccagctgaccaacaccagcgcctactacatgtacttgttgctgctgctgaagtccgtggtgtacttcgccatcatcacatgctgcctgctgatggctatggtcaagcggaaggacagccgggga

SEQ ID NO: 6638 - DNA, 2610 bp, synthetic construct
  source 1..2610: mol_type = other DNA
atggccttaccagtgaccgccttgctcctgccgctggccttgctgctccacgccgccaggccggaagtgcagctggttgaatctggcggaggactggttcagcctggcggatctctgagactgtcttgtgccgccagcggcttcagcttcagcgacttttggatgagctgggtccgacaggcccctggcaaaggacttgaatgggtcgccacaatcagccaggccggcagcgagaaggactacgtggactctgtgaagggcagattcaccatcagccgggacaacgccaagaagtccctgtacctccagatgaacagcctgagagccgaggacaccgccgtgtactattgtgcctctggcgtgtacagcttcgactacagaggccagggcaccctggtcacagtctcttctggtaccggcggaggcggatctggcggcggaggtagcggtggcggaggatctgaattcgagatcgtgctgacacagtctcccgccacactgtcactgtctccaggcgaaagagccacactgagctgtagagccagccagagcgtgtccatctacctggcctggtatcagcagaagcctggacaggctccccggctgctgatctacgatgccagcaatagagccacaggcatccccgccagattttctggctctggcagcggcaccgatttcaccctgaccataagcagcctggaacctgaggacttcgccgtgtactactgccagcagagaagcaactggcctcctttcacattcggccctggcaccaaggtggacatcaaactcgagatccagaaccctgatcctgccgtgtaccagctgcgggatagcaagagcagcgacaagagcgtgtgtctgttcaccgacttcgacagccagaccaacgtgtcccagagcaaggactccgacgtgtacatcaccgataagtgcgtgctggacatgcggagcatggacttcaagagcaactccgccgtggcctggtccaacaagtccgatttcgcctgcgccaacgccttcaacaacagcattatccccgaggacacattcttcccaagccccgagagcagcgactccaccgaccacgtgaagcccaaagagacagagaacaccaagcagcccagcaagagctgccacaagcccaaggccatcgtgcacaccgagaaagtgaacatgatgagcctgaccgtgctgggcctgcggatgctgttcgccaaaaccgtggccgtgaacttcctgctgaccgccaagctgttcttcctcctcaccgcccgcgccaagagaagcggatctggcgtgaagcagaccctgaatttcgacctgctgaagctggctggcgacgtggaatccaacccaggccctactagtatggactggatttggcgcatccttttccttgtcggcgctgctaccggcgcgcattccttcgaacaggtgcagcttgttgaaagcggaggcggagttgtgcagcctggcagaagtctgagactgtcttgtgccgccagcggcttcaccttcagcagctatggaatgcactgggtccgacaggcccctggcaaaggacttgaatgggttgccgtgatctgggacgacggcagcaacaagtattacgtggacagcgtgaagggcagattcaccatcagccgggacaacagcaagaacaccctgtacctccagatgaacagcctgagagccgaggacacagccgtgtattattgcgccagagatgactactacggcagcggctccttcaacagctactatggcacagacgtgtggggccagggcacaacagttaccgttagctctacgcgtgaggacctgaagaacgtgttcccacctgaggtggccgtgttcgagcctagcgaggccgagatcagccacacccagaaagccaccctcgtgtgcctggctaccggcttctaccccgaccatgtggaactgtcttggtgggtcaacggcaaagaggtgcacagcggcgtgtgtaccgacccccagccactgaaagaacagcccgccctgaacgacagccggtactgcctgagcagcagactgagagtgtccgccaccttctggcagaacccccggaaccacttcagatgccaggtgcagttctacggcctgagcgagaacgacgagtggacccaggacagagccaagcccgtgacccagatcgtgtctgccgaagcctggggcagagccgatgatgtgattaagatccactggcaggaaaagaagtccaacaccatcctgggcagccaggaaggcaacaccatgaagaccaacgacacctacatgaagttcagctggctgaccgtgcccgagaagtccctggacaaagaacacagatgcatcgtgcggcacgaaaacaacaagaacggcgtggaccaggaaatcatcttcccacccatcaagaccgatgtgattacaatggaccccaaggacaactgctccaaggacgccaacgataccctgctgctccagctgaccaacaccagcgcctactacatgtacttgttgctgctgctgaagtccgtggtgtacttcgccatcatcacatgctgcctgctgatggctatggtcaagcggaaggacagccgggga

SEQ ID NO: 6639 - DNA, 2565 bp, synthetic construct
  source 1..2565: mol_type = other DNA
atggccttaccagtgaccgccttgctcctgccgctggccttgctgctccacgccgccaggccggaagtgcagctggttgaatctggcggaggactggttcagcctggcggatctctgagactgtcttgtgccgccagcggcttcagcttcagcgacttttggatgagctgggtccgacaggcccctggcaaaggacttgaatgggtcgccacaatcagccaggccggcagcgagaaggactacgtggactctgtgaagggcagattcaccatcagccgggacaacgccaagaagtccctgtacctccagatgaacagcctgagagccgaggacaccgccgtgtactattgtgcctctggcgtgtacagcttcgactacagaggccagggcaccctggtcacagtctcttctggtaccggcggaggcggatctggcggcggaggtagcggtggcggaggatctgaattcgacatccagatgacacagagccctagcagcctgtctgccagcgtgggagacagagtgaccatcacctgtagagccagccagggcatctcttcttggctggcctggtatcagcagaagcccgagaaggcccctaagagcctgatctatgccgccagctctctccagagcggagtgcctagcagattttctggcagcggctccggcaccgatttcaccctgacaatatccagcctccagcctgaggacttcgccacctactactgccagcagtacaacagctacccctacaccttcggccagggcaccaagctggaaatcaaactcgagatccagaaccctgatcctgccgtgtaccagctgcgggatagcaagagcagcgacaagagcgtgtgtctgttcaccgacttcgacagccagaccaacgtgtcccagagcaaggactccgacgtgtacatcaccgataagtgcgtgctggacatgcggagcatggacttcaagagcaactccgccgtggcctggtccaacaagtccgatttcgcctgcgccaacgccttcaacaacagcattatccccgaggacacattcttcccaagccccgagagcagcgactccaccgaccacgtgaagcccaaagagacagagaacaccaagcagcccagcaagagctgccacaagcccaaggccatcgtgcacaccgagaaagtgaacatgatgagcctgaccgtgctgggcctgcggatgctgttcgccaaaaccgtggccgtgaacttcctgctgaccgccaagctgttcttcctcctcaccgcccgcgccaagagaagcggatctggcgtgaagcagaccctgaatttcgacctgctgaagctggctggcgacgtggaatccaacccaggccctactagtatggactggatttggcgcatccttttccttgtcggcgctgctaccggcgcgcattccttcgaagaagtgcaactggttcaatctggcggcggactggttcatccaggcggttctctgagactgagctgtgccggctctggcttcaccttcagcacctacctgatgtactgggtccgacaggcccctggcaagacactggaatgggtgtccgctattggcagcggaggcgatacctactacgccgactctgtgaagggcagattcaccatcagccgggacaacgccaagaacagcctgtacctccagatgaactccctgagagccgaggacatggccgtgtactactgtgccagaggactcggctattggggccagggaacactggtcacagtgtcctctacgcgtgaggacctgaagaacgtgttcccacctgaggtggccgtgttcgagcctagcgaggccgagatcagccacacccagaaagccaccctcgtgtgcctggctaccggcttctaccccgaccatgtggaactgtcttggtgggtcaacggcaaagaggtgcacagcggcgtgtgtaccgacccccagccactgaaagaacagcccgccctgaacgacagccggtactgcctgagcagcagactgagagtgtccgccaccttctggcagaacccccggaaccacttcagatgccaggtgcagttctacggcctgagcgagaacgacgagtggacccaggacagagccaagcccgtgacccagatcgtgtctgccgaagcctggggcagagccgatgatgtgattaagatccactggcaggaaaagaagtccaacaccatcctgggcagccaggaaggcaacaccatgaagaccaacgacacctacatgaagttcagctggctgaccgtgcccgagaagtccctggacaaagaacacagatgcatcgtgcggcacgaaaacaacaagaacggcgtggaccaggaaatcatcttcccacccatcaagaccgatgtgattacaatggaccccaaggacaactgctccaaggacgccaacgataccctgctgctccagctgaccaacaccagcgcctactacatgtacttgttgctgctgctgaagtccgtggtgtacttcgccatcatcacatgctgcctgctgatggctatggtcaagcggaaggacagccgggga

SEQ ID NO: 6640 - DNA, 2622 bp, synthetic construct
  source 1..2622: mol_type = other DNA
atggccttaccagtgaccgccttgctcctgccgctggccttgctgctccacgccgccaggccggaagtgcagctggttgaatctggcggaggactggttcagcctggcggatctctgagactgtcttgtgccgccagcggcttcagcttcagcgacttttggatgagctgggtccgacaggcccctggcaaaggacttgaatgggtcgccacaatcagccaggccggcagcgagaaggactacgtggactctgtgaagggcagattcaccatcagccgggacaacgccaagaagtccctgtacctccagatgaacagcctgagagccgaggacaccgccgtgtactattgtgcctctggcgtgtacagcttcgactacagaggccagggcaccctggtcacagtctcttctggtaccggcggaggcggatctggcggcggaggtagcggtggcggaggatctgaattcctgcctgttctgacacagcctccatccgtgtctgtggcccctggaaagaccgccagaatcacatgcggcggcaacaacatcggcagcaagagcgtgcactggtatcagcagaagcctggacaggctcctgtgctggtggtgtacgacgacagcgatagacctagcggcatccccgagagattcagcggcagcaattccggcaataccgccacactgaccatcagcagagtggaagctggcgacgaggccgactactactgccaagtgtgggacagcagcagcgactacgtggtgtttggcggcggaacaaagctgacagtgcttctcgagatccagaaccctgatcctgccgtgtaccagctgcgggatagcaagagcagcgacaagagcgtgtgtctgttcaccgacttcgacagccagaccaacgtgtcccagagcaaggactccgacgtgtacatcaccgataagtgcgtgctggacatgcggagcatggacttcaagagcaactccgccgtggcctggtccaacaagtccgatttcgcctgcgccaacgccttcaacaacagcattatccccgaggacacattcttcccaagccccgagagcagcgactccaccgaccacgtgaagcccaaagagacagagaacaccaagcagcccagcaagagctgccacaagcccaaggccatcgtgcacaccgagaaagtgaacatgatgagcctgaccgtgctgggcctgcggatgctgttcgccaaaaccgtggccgtgaacttcctgctgaccgccaagctgttcttcctcctcaccgcccgcgccaagagaagcggatctggcgtgaagcagaccctgaatttcgacctgctgaagctggctggcgacgtggaatccaacccaggccctactagtatggactggatttggcgcatccttttccttgtcggcgctgctaccggcgcgcattccttcgaagaagttcaactggtgcagagcggagccgaagtgaagaagccaggcgagagcctgaagattagctgcaaaggcagcggctacagcttcaccagctactggatcggctgggtccgacagatgcctggcaaaggactggaatggatgggcatcatctaccccggcgacagcgacaccagatacagccctagctttcagggccaagtgaccatctccgccgacaagagcatcagcacagcctacctccagtggtcctctctgaaggccagcgataccgccatgtactactgcgccagacaagtctggggatggcaaggcggcatgtaccccaggtctaactggtggtacaacctggactcttggggccagggcacactggtcacagtctcttctacgcgtgaggacctgaagaacgtgttcccacctgaggtggccgtgttcgagcctagcgaggccgagatcagccacacccagaaagccaccctcgtgtgcctggctaccggcttctaccccgaccatgtggaactgtcttggtgggtcaacggcaaagaggtgcacagcggcgtgtgtaccgacccccagccactgaaagaacagcccgccctgaacgacagccggtactgcctgagcagcagactgagagtgtccgccaccttctggcagaacccccggaaccacttcagatgccaggtgcagttctacggcctgagcgagaacgacgagtggacccaggacagagccaagcccgtgacccagatcgtgtctgccgaagcctggggcagagccgatgatgtgattaagatccactggcaggaaaagaagtccaacaccatcctgggcagccaggaaggcaacaccatgaagaccaacgacacctacatgaagttcagctggctgaccgtgcccgagaagtccctggacaaagaacacagatgcatcgtgcggcacgaaaacaacaagaacggcgtggaccaggaaatcatcttcccacccatcaagaccgatgtgattacaatggaccccaaggacaactgctccaaggacgccaacgataccctgctgctccagctgaccaacaccagcgcctactacatgtacttgttgctgctgctgaagtccgtggtgtacttcgccatcatcacatgctgcctgctgatggctatggtcaagcggaaggacagccgggga

SEQ ID NO: 6641 - DNA, 2601 bp, synthetic construct
  source 1..2601: mol_type = other DNA
atggccttaccagtgaccgccttgctcctgccgctggccttgctgctccacgccgccaggccggaagtgcagctggttgaatctggcggaggactggttcagcctggcggatctctgagactgtcttgtgccgccagcggcttcagcttcagcgacttttggatgagctgggtccgacaggcccctggcaaaggacttgaatgggtcgccacaatcagccaggccggcagcgagaaggactacgtggactctgtgaagggcagattcaccatcagccgggacaacgccaagaagtccctgtacctccagatgaacagcctgagagccgaggacaccgccgtgtactattgtgcctctggcgtgtacagcttcgactacagaggccagggcaccctggtcacagtctcttctggtaccggcggaggcggatctggcggcggaggtagcggtggcggaggatctgaattcgagctggtcatgacacagagccctgcttctctggccgtgtcactgggacagagagccaccatctcttgcagagccagcgagagcgtggacagctacggcaagagcttcatgcactggtatcagctcaagcccggccagcctcctaagctgctgatctacagagcctccaacctggaaagcggcgtgccagccagattttctggcagcggcagcagaaccgacttcaccctgaccattgatcccgtggaagccgatgatgccgccacctactactgccagcagaacaacgaggacccctggacatttggcggaggcaccaagctggaaatcaaactcgagatccagaaccctgatcctgccgtgtaccagctgcgggatagcaagagcagcgacaagagcgtgtgtctgttcaccgacttcgacagccagaccaacgtgtcccagagcaaggactccgacgtgtacatcaccgataagtgcgtgctggacatgcggagcatggacttcaagagcaactccgccgtggcctggtccaacaagtccgatttcgcctgcgccaacgccttcaacaacagcattatccccgaggacacattcttcccaagccccgagagcagcgactccaccgaccacgtgaagcccaaagagacagagaacaccaagcagcccagcaagagctgccacaagcccaaggccatcgtgcacaccgagaaagtgaacatgatgagcctgaccgtgctgggcctgcggatgctgttcgccaaaaccgtggccgtgaacttcctgctgaccgccaagctgttcttcctcctcaccgcccgcgccaagagaagcggatctggcgtgaagcagaccctgaatttcgacctgctgaagctggctggcgacgtggaatccaacccaggccctactagtatggactggatttggcgcatccttttccttgtcggcgctgctaccggcgcgcattccttcgaagaagtgcagctcgaacagtctggccccgagcttgtgaaacctggcgcttccgtgaagatgagctgcaaggccagcggctacaccttcaccaactactacatgaaatgggtcaagcagagccacggcaagtccctggaatggatcggcgatctgaaccccaacaacggcgacaccttctacaaccagaagttcaagggcaaagccacactgaccgtggacaagagcagcaacaccgcctacatgcagctcaactccctgaccagcgaggacagcgccgtgtactactgtgccagaaccggcagatacgaagagaacgctatggactactggggccagggcacaagcgtgacagtctcttctacgcgtgaggacctgaagaacgtgttcccacctgaggtggccgtgttcgagcctagcgaggccgagatcagccacacccagaaagccaccctcgtgtgcctggctaccggcttctaccccgaccatgtggaactgtcttggtgggtcaacggcaaagaggtgcacagcggcgtgtgtaccgacccccagccactgaaagaacagcccgccctgaacgacagccggtactgcctgagcagcagactgagagtgtccgccaccttctggcagaacccccggaaccacttcagatgccaggtgcagttctacggcctgagcgagaacgacgagtggacccaggacagagccaagcccgtgacccagatcgtgtctgccgaagcctggggcagagccgatgatgtgattaagatccactggcaggaaaagaagtccaacaccatcctgggcagccaggaaggcaacaccatgaagaccaacgacacctacatgaagttcagctggctgaccgtgcccgagaagtccctggacaaagaacacagatgcatcgtgcggcacgaaaacaacaagaacggcgtggaccaggaaatcatcttcccacccatcaagaccgatgtgattacaatggaccccaaggacaactgctccaaggacgccaacgataccctgctgctccagctgaccaacaccagcgcctactacatgtacttgttgctgctgctgaagtccgtggtgtacttcgccatcatcacatgctgcctgctgatggctatggtcaagcggaaggacagccgggga

SEQ ID NO: 6642 - DNA, 2583 bp, synthetic construct
  source 1..2583: mol_type = other DNA
atggccttaccagtgaccgccttgctcctgccgctggccttgctgctccacgccgccaggccggaagtgcagctggttgaatctggcggaggactggttcagcctggcggatctctgagactgtcttgtgccgccagcggcttcagcttcagcgacttttggatgagctgggtccgacaggcccctggcaaaggacttgaatgggtcgccacaatcagccaggccggcagcgagaaggactacgtggactctgtgaagggcagattcaccatcagccgggacaacgccaagaagtccctgtacctccagatgaacagcctgagagccgaggacaccgccgtgtactattgtgcctctggcgtgtacagcttcgactacagaggccagggcaccctggtcacagtctcttctggtaccggcggaggcggatctggcggcggaggtagcggtggcggaggatctgaattcgacgtggtcatgacacagagcccttctagcctgtctgccagcgtgggcgacagagtgaccatcacctgtatggcctccgaggacatctacatccggctggcctggtatcagcagaagcctggaaacgcccctaagctgctgatctacgccgccacctctctggaaacaggcgtgccaagcagattttccggcagcggctctggcaccgatttcaccctgacaatatccagcctccagcctgaggacttcgccacctactactgccagcagtattggagcagcccctggacatttggcggaggcaccaaggtggaaatcaaactcgagatccagaaccctgatcctgccgtgtaccagctgcgggatagcaagagcagcgacaagagcgtgtgtctgttcaccgacttcgacagccagaccaacgtgtcccagagcaaggactccgacgtgtacatcaccgataagtgcgtgctggacatgcggagcatggacttcaagagcaactccgccgtggcctggtccaacaagtccgatttcgcctgcgccaacgccttcaacaacagcattatccccgaggacacattcttcccaagccccgagagcagcgactccaccgaccacgtgaagcccaaagagacagagaacaccaagcagcccagcaagagctgccacaagcccaaggccatcgtgcacaccgagaaagtgaacatgatgagcctgaccgtgctgggcctgcggatgctgttcgccaaaaccgtggccgtgaacttcctgctgaccgccaagctgttcttcctcctcaccgcccgcgccaagagaagcggatctggcgtgaagcagaccctgaatttcgacctgctgaagctggctggcgacgtggaatccaacccaggccctactagtatggactggatttggcgcatccttttccttgtcggcgctgctaccggcgcgcattccttcgaacaggttcagctgcaagagtctggccccggactggtcaagcctagccaaacactgagcctgacctgtaccgtgtccggctacagcatcaccagcgactacacctggaactggatcagacagcctcctggcaacggactggaatggatcggctacatcacctacagcggcagcaccagctacaaccccagcctgaaaagccgggtgctgatctccgtggacaccagcaagaatcaggtgtccctgaagctgagcagcgtgacagccgctgataccgccgtgtactactgtgccagactggggagaagatacacaatggactactggggccagggcaccaccgtgacagtttcttctacgcgtgaggacctgaagaacgtgttcccacctgaggtggccgtgttcgagcctagcgaggccgagatcagccacacccagaaagccaccctcgtgtgcctggctaccggcttctaccccgaccatgtggaactgtcttggtgggtcaacggcaaagaggtgcacagcggcgtgtgtaccgacccccagccactgaaagaacagcccgccctgaacgacagccggtactgcctgagcagcagactgagagtgtccgccaccttctggcagaacccccggaaccacttcagatgccaggtgcagttctacggcctgagcgagaacgacgagtggacccaggacagagccaagcccgtgacccagatcgtgtctgccgaagcctggggcagagccgatgatgtgattaagatccactggcaggaaaagaagtccaacaccatcctgggcagccaggaaggcaacaccatgaagaccaacgacacctacatgaagttcagctggctgaccgtgcccgagaagtccctggacaaagaacacagatgcatcgtgcggcacgaaaacaacaagaacggcgtggaccaggaaatcatcttcccacccatcaagaccgatgtgattacaatggaccccaaggacaactgctccaaggacgccaacgataccctgctgctccagctgaccaacaccagcgcctactacatgtacttgttgctgctgctgaagtccgtggtgtacttcgccatcatcacatgctgcctgctgatggctatggtcaagcggaaggacagccgggga

SEQ ID NO: 6643 - DNA, 2595 bp, synthetic construct
  source 1..2595: mol_type = other DNA
atggccttaccagtgaccgccttgctcctgccgctggccttgctgctccacgccgccaggccggaagtgcagctggttgaatctggcggaggactggttcagcctggcggatctctgagactgtcttgtgccgccagcggcttcagcttcagcgacttttggatgagctgggtccgacaggcccctggcaaaggacttgaatgggtcgccacaatcagccaggccggcagcgagaaggactacgtggactctgtgaagggcagattcaccatcagccgggacaacgccaagaagtccctgtacctccagatgaacagcctgagagccgaggacaccgccgtgtactattgtgcctctggcgtgtacagcttcgactacagaggccagggcaccctggtcacagtctcttctggtaccggcggaggcggatctggcggcggaggtagcggtggcggaggatctgaattcgatattgtgctgactcagagccctgccactctgagccttagtccaggcgacagagctaccatctcctgtagggcctctgaatccgtgaccattctgggctctcatctcatatattggtatcaacaaaagccgggccagcctccacggctgctcattcaactggcctctaacgtgcagaccggcgtgccagctagattttctggctctggctcccggaccgactttacactgacaatcagctccgtggaacccgaagattttgccgtctattattgcctccagtccaggaccattcctcggacattcggccagggaacaaaactcgaaatcaagcggctcgagatccagaaccctgatcctgccgtgtaccagctgcgggatagcaagagcagcgacaagagcgtgtgtctgttcaccgacttcgacagccagaccaacgtgtcccagagcaaggactccgacgtgtacatcaccgataagtgcgtgctggacatgcggagcatggacttcaagagcaactccgccgtggcctggtccaacaagtccgatttcgcctgcgccaacgccttcaacaacagcattatccccgaggacacattcttcccaagccccgagagcagcgactccaccgaccacgtgaagcccaaagagacagagaacaccaagcagcccagcaagagctgccacaagcccaaggccatcgtgcacaccgagaaagtgaacatgatgagcctgaccgtgctgggcctgcggatgctgttcgccaaaaccgtggccgtgaacttcctgctgaccgccaagctgttcttcctcctcaccgcccgcgccaagagaagcggatctggcgtgaagcagaccctgaatttcgacctgctgaagctggctggcgacgtggaatccaacccaggccctactagtatggactggatttggcgcatccttttccttgtcggcgctgctaccggcgcgcattccttcgaacaggtgcagctcgttcagagtggccccgaagtgaaaaagccaggcgagtccgtgaagatttcctgcaaagcctccggctacacattccggcactactctatgaattgggtcaagcaggccccaggccagggccttaagtggatgggacgcatcaataccgagtccggcgtgccaatctacgccgatgacttcaaaggccggttcagcttcaccgtggatacctctgcctccaccgcctacctggaaatcagcagcctgaccagcgaggatacagctgtgtacttctgtagcaacgattacctctacagcctggatttctggggacagggaaccacactgaccgtgtctagcacgcgtgaggacctgaagaacgtgttcccacctgaggtggccgtgttcgagcctagcgaggccgagatcagccacacccagaaagccaccctcgtgtgcctggctaccggcttctaccccgaccatgtggaactgtcttggtgggtcaacggcaaagaggtgcacagcggcgtgtgtaccgacccccagccactgaaagaacagcccgccctgaacgacagccggtactgcctgagcagcagactgagagtgtccgccaccttctggcagaacccccggaaccacttcagatgccaggtgcagttctacggcctgagcgagaacgacgagtggacccaggacagagccaagcccgtgacccagatcgtgtctgccgaagcctggggcagagccgatgatgtgattaagatccactggcaggaaaagaagtccaacaccatcctgggcagccaggaaggcaacaccatgaagaccaacgacacctacatgaagttcagctggctgaccgtgcccgagaagtccctggacaaagaacacagatgcatcgtgcggcacgaaaacaacaagaacggcgtggaccaggaaatcatcttcccacccatcaagaccgatgtgattacaatggaccccaaggacaactgctccaaggacgccaacgataccctgctgctccagctgaccaacaccagcgcctactacatgtacttgttgctgctgctgaagtccgtggtgtacttcgccatcatcacatgctgcctgctgatggctatggtcaagcggaaggacagccgggga

SEQ ID NO: 6644 - DNA, 2595 bp, synthetic construct
  source 1..2595: mol_type = other DNA
atggccttaccagtgaccgccttgctcctgccgctggccttgctgctccacgccgccaggccggaagtgcagctggttgaatctggcggaggactggttcagcctggcggatctctgagactgtcttgtgccgccagcggcttcagcttcagcgacttttggatgagctgggtccgacaggcccctggcaaaggacttgaatgggtcgccacaatcagccaggccggcagcgagaaggactacgtggactctgtgaagggcagattcaccatcagccgggacaacgccaagaagtccctgtacctccagatgaacagcctgagagccgaggacaccgccgtgtactattgtgcctctggcgtgtacagcttcgactacagaggccagggcaccctggtcacagtctcttctggtaccggcggaggcggatctggcggcggaggtagcggtggcggaggatctgaattcgacatcgtgctgacacagtctcccgccacactgtcactgagccctggcgatagagccacactgagctgtagagccagcgagagcgtgacaatcctgggcagccacctgatctactggtatcagcagaagcccggacaggcccctagactgctgattcagctcgccagcaatgtgcagacaggcatccctgccagattttccggcagcggcagcagaaccgatttcaccctgaccataagcagcctggaacctgaggacttcgccgtgtactactgcctccagagccggacaatccccagaacctttggacagggcaccaagctggaaatcaagagactcgagatccagaaccctgatcctgccgtgtaccagctgcgggatagcaagagcagcgacaagagcgtgtgtctgttcaccgacttcgacagccagaccaacgtgtcccagagcaaggactccgacgtgtacatcaccgataagtgcgtgctggacatgcggagcatggacttcaagagcaactccgccgtggcctggtccaacaagtccgatttcgcctgcgccaacgccttcaacaacagcattatccccgaggacacattcttcccaagccccgagagcagcgactccaccgaccacgtgaagcccaaagagacagagaacaccaagcagcccagcaagagctgccacaagcccaaggccatcgtgcacaccgagaaagtgaacatgatgagcctgaccgtgctgggcctgcggatgctgttcgccaaaaccgtggccgtgaacttcctgctgaccgccaagctgttcttcctcctcaccgcccgcgccaagagaagcggatctggcgtgaagcagaccctgaatttcgacctgctgaagctggctggcgacgtggaatccaacccaggccctactagtatggactggatttggcgcatccttttccttgtcggcgctgctaccggcgcgcattccttcgaacaggttcagctggtgcagtctggcagcgagctgaagaaacctggcgagagcgtgaagatcagctgcaaggccagcggctacaccttcacacactacagcatgaactgggtccgacaggcccctggacaaggactggaatggatgggcagaatcaacaccgagacaggcgagcccctgtacgccgacgatttcaagggcagattcgtgttcagcctggacaccagcgccagcacagcctatctccagatcagctctctgaaggccgaggacaccgccgtgtactactgctccaacgactacctgtactccctggactattggggccagggcacactggtcacagtgtctagtacgcgtgaggacctgaagaacgtgttcccacctgaggtggccgtgttcgagcctagcgaggccgagatcagccacacccagaaagccaccctcgtgtgcctggctaccggcttctaccccgaccatgtggaactgtcttggtgggtcaacggcaaagaggtgcacagcggcgtgtgtaccgacccccagccactgaaagaacagcccgccctgaacgacagccggtactgcctgagcagcagactgagagtgtccgccaccttctggcagaacccccggaaccacttcagatgccaggtgcagttctacggcctgagcgagaacgacgagtggacccaggacagagccaagcccgtgacccagatcgtgtctgccgaagcctggggcagagccgatgatgtgattaagatccactggcaggaaaagaagtccaacaccatcctgggcagccaggaaggcaacaccatgaagaccaacgacacctacatgaagttcagctggctgaccgtgcccgagaagtccctggacaaagaacacagatgcatcgtgcggcacgaaaacaacaagaacggcgtggaccaggaaatcatcttcccacccatcaagaccgatgtgattacaatggaccccaaggacaactgctccaaggacgccaacgataccctgctgctccagctgaccaacaccagcgcctactacatgtacttgttgctgctgctgaagtccgtggtgtacttcgccatcatcacatgctgcctgctgatggctatggtcaagcggaaggacagccgggga

SEQ ID NO: 6645 - DNA, 2598 bp, synthetic construct
  source 1..2598: mol_type = other DNA
atggccttaccagtgaccgccttgctcctgccgctggccttgctgctccacgccgccaggccggaagtgcagctggttgaatctggcggaggactggttcagcctggcggatctctgagactgtcttgtgccgccagcggcttcagcttcagcgacttttggatgagctgggtccgacaggcccctggcaaaggacttgaatgggtcgccacaatcagccaggccggcagcgagaaggactacgtggactctgtgaagggcagattcaccatcagccgggacaacgccaagaagtccctgtacctccagatgaacagcctgagagccgaggacaccgccgtgtactattgtgcctctggcgtgtacagcttcgactacagaggccagggcaccctggtcacagtctcttctggtaccggcggaggcggatctggcggcggaggtagcggtggcggaggatctgaattcgacatccagctgactcagagccctagctttctgagcgccagcgtgggcgacagagtgaccattacatgtagagccagccagggcatcagcaccgacctgaactggtatcagcagaagcctggcaaggcccctaagctgctgatctacgccgccagcaatctggaaagcggcgtgccaagcagattttccggctctggcagcggcaccgagttcaccctgacaatatctagcctccagcctgaggacttcgccacctactactgccagcagagctacaactggccctacacctttggcggaggcaccaaggtggaaatcaagagactcgagatccagaaccctgatcctgccgtgtaccagctgcgggatagcaagagcagcgacaagagcgtgtgtctgttcaccgacttcgacagccagaccaacgtgtcccagagcaaggactccgacgtgtacatcaccgataagtgcgtgctggacatgcggagcatggacttcaagagcaactccgccgtggcctggtccaacaagtccgatttcgcctgcgccaacgccttcaacaacagcattatccccgaggacacattcttcccaagccccgagagcagcgactccaccgaccacgtgaagcccaaagagacagagaacaccaagcagcccagcaagagctgccacaagcccaaggccatcgtgcacaccgagaaagtgaacatgatgagcctgaccgtgctgggcctgcggatgctgttcgccaaaaccgtggccgtgaacttcctgctgaccgccaagctgttcttcctcctcaccgcccgcgccaagagaagcggatctggcgtgaagcagaccctgaatttcgacctgctgaagctggctggcgacgtggaatccaacccaggccctactagtatggactggatttggcgcatccttttccttgtcggcgctgctaccggcgcgcattccttcgaagaagttcagctggttgaatcaggcggaggactcgtgaaacctggcggctctctgagactgtcttgtgccgccagcggcttcaccttcagcaacttcgagatgaactgggtccgacaggccccaggcaaaggactggaatgggtgtccggcatcagctccaatggccggtacatcaactacgccgacagcgtgaagggcagattcaccatcagccgggacaacgccaagaacagcctgtacctccagatgaactccctgagagccgaggacaccgccgtgtactattgtgccagagtggtggacttcgaccaggactacaacggcttcgactattggggccagggcaccctggttaccgttagctctacgcgtgaggacctgaagaacgtgttcccacctgaggtggccgtgttcgagcctagcgaggccgagatcagccacacccagaaagccaccctcgtgtgcctggctaccggcttctaccccgaccatgtggaactgtcttggtgggtcaacggcaaagaggtgcacagcggcgtgtgtaccgacccccagccactgaaagaacagcccgccctgaacgacagccggtactgcctgagcagcagactgagagtgtccgccaccttctggcagaacccccggaaccacttcagatgccaggtgcagttctacggcctgagcgagaacgacgagtggacccaggacagagccaagcccgtgacccagatcgtgtctgccgaagcctggggcagagccgatgatgtgattaagatccactggcaggaaaagaagtccaacaccatcctgggcagccaggaaggcaacaccatgaagaccaacgacacctacatgaagttcagctggctgaccgtgcccgagaagtccctggacaaagaacacagatgcatcgtgcggcacgaaaacaacaagaacggcgtggaccaggaaatcatcttcccacccatcaagaccgatgtgattacaatggaccccaaggacaactgctccaaggacgccaacgataccctgctgctccagctgaccaacaccagcgcctactacatgtacttgttgctgctgctgaagtccgtggtgtacttcgccatcatcacatgctgcctgctgatggctatggtcaagcggaaggacagccgggga

SEQ ID NO: 6646 - DNA, 2592 bp, synthetic construct
  source 1..2592: mol_type = other DNA
atggccttaccagtgaccgccttgctcctgccgctggccttgctgctccacgccgccaggccggaagtgcagctggttgaatctggcggaggactggttcagcctggcggatctctgagactgtcttgtgccgccagcggcttcagcttcagcgacttttggatgagctgggtccgacaggcccctggcaaaggacttgaatgggtcgccacaatcagccaggccggcagcgagaaggactacgtggactctgtgaagggcagattcaccatcagccgggacaacgccaagaagtccctgtacctccagatgaacagcctgagagccgaggacaccgccgtgtactattgtgcctctggcgtgtacagcttcgactacagaggccagggcaccctggtcacagtctcttctggtaccggcggaggcggatctggcggcggaggtagcggtggcggaggatctgaattcgacatccaactgactcagagccccagctttctgagcgcctctgtgggcgacagagtgaccatcacatgtagtctcagcctgggcatcagcacatggcgggattggtttccgccgaggcttggcaggggccttgagccgctgacctacgccgccagcacactgcaaagcggagtgcctagcagattttccggcagcggctctggcaccgagttcaccctgacaatatccagcctccagcctgaggacttcgccacctactactgccagcagctcaacagctaccctctgacctttggcggaggcaccaaggtggaaatcaagagactcgagatccagaaccctgatcctgccgtgtaccagctgcgggatagcaagagcagcgacaagagcgtgtgtctgttcaccgacttcgacagccagaccaacgtgtcccagagcaaggactccgacgtgtacatcaccgataagtgcgtgctggacatgcggagcatggacttcaagagcaactccgccgtggcctggtccaacaagtccgatttcgcctgcgccaacgccttcaacaacagcattatccccgaggacacattcttcccaagccccgagagcagcgactccaccgaccacgtgaagcccaaagagacagagaacaccaagcagcccagcaagagctgccacaagcccaaggccatcgtgcacaccgagaaagtgaacatgatgagcctgaccgtgctgggcctgcggatgctgttcgccaaaaccgtggccgtgaacttcctgctgaccgccaagctgttcttcctcctcaccgcccgcgccaagagaagcggatctggcgtgaagcagaccctgaatttcgacctgctgaagctggctggcgacgtggaatccaacccaggccctactagtatggactggatttggcgcatccttttccttgtcggcgctgctaccggcgcgcattccttcgaagaagttcaactggttgagtctggtggcggcctggttaagcctggcggatctctgagactgagctgtgccgccagcggcttcacctttagcacatacggcatgagctgggtccgacaggcccctggaaaaggacttgagtgggtcgcctacatcaacaacggctccggctacatctactacgccgacagcgtgaagggcagattcaccatcagccgggacaacgccaagaacagcctgtacctccagatgaactccctgagagccgaggacaccgccgtgtactattgtgccagaggacagtggtggagcggcggagactttgattattggggccagggcaccctggtcaccgtttcttctacgcgtgaggacctgaagaacgtgttcccacctgaggtggccgtgttcgagcctagcgaggccgagatcagccacacccagaaagccaccctcgtgtgcctggctaccggcttctaccccgaccatgtggaactgtcttggtgggtcaacggcaaagaggtgcacagcggcgtgtgtaccgacccccagccactgaaagaacagcccgccctgaacgacagccggtactgcctgagcagcagactgagagtgtccgccaccttctggcagaacccccggaaccacttcagatgccaggtgcagttctacggcctgagcgagaacgacgagtggacccaggacagagccaagcccgtgacccagatcgtgtctgccgaagcctggggcagagccgatgatgtgattaagatccactggcaggaaaagaagtccaacaccatcctgggcagccaggaaggcaacaccatgaagaccaacgacacctacatgaagttcagctggctgaccgtgcccgagaagtccctggacaaagaacacagatgcatcgtgcggcacgaaaacaacaagaacggcgtggaccaggaaatcatcttcccacccatcaagaccgatgtgattacaatggaccccaaggacaactgctccaaggacgccaacgataccctgctgctccagctgaccaacaccagcgcctactacatgtacttgttgctgctgctgaagtccgtggtgtacttcgccatcatcacatgctgcctgctgatggctatggtcaagcggaaggacagccgggga

SEQ ID NO: 6647 - DNA, 2595 bp, synthetic construct
  source 1..2595: mol_type = other DNA
atggccttaccagtgaccgccttgctcctgccgctggccttgctgctccacgccgccaggccggaagtgcagctggttgaatctggcggaggactggttcagcctggcggatctctgagactgtcttgtgccgccagcggcttcagcttcagcgacttttggatgagctgggtccgacaggcccctggcaaaggacttgaatgggtcgccacaatcagccaggccggcagcgagaaggactacgtggactctgtgaagggcagattcaccatcagccgggacaacgccaagaagtccctgtacctccagatgaacagcctgagagccgaggacaccgccgtgtactattgtgcctctggcgtgtacagcttcgactacagaggccagggcaccctggtcacagtctcttctggtaccggcggaggcggatctggcggcggaggtagcggtggcggaggatctgaattcgagatcgtgctgacacagtctcccgccacactgtcactgtctccaggcgaaagagccacactgagctgtagcgccagcagcagcgtgtcctacatgtactggtatcagcagaagcccggacaggcccctagactgctgatctacagaaccagcaacctggcctctggcatccccgccagattttctggctctggcagcggcaccgatttcaccctgaccataagcagcctggaacctgaggacttcgccgtgtactactgccagcagtaccacagctaccccaccacctttggacagggcaccaaggtggaaatcaagcggacagttctcgagatccagaaccctgatcctgccgtgtaccagctgcgggatagcaagagcagcgacaagagcgtgtgtctgttcaccgacttcgacagccagaccaacgtgtcccagagcaaggactccgacgtgtacatcaccgataagtgcgtgctggacatgcggagcatggacttcaagagcaactccgccgtggcctggtccaacaagtccgatttcgcctgcgccaacgccttcaacaacagcattatccccgaggacacattcttcccaagccccgagagcagcgactccaccgaccacgtgaagcccaaagagacagagaacaccaagcagcccagcaagagctgccacaagcccaaggccatcgtgcacaccgagaaagtgaacatgatgagcctgaccgtgctgggcctgcggatgctgttcgccaaaaccgtggccgtgaacttcctgctgaccgccaagctgttcttcctcctcaccgcccgcgccaagagaagcggatctggcgtgaagcagaccctgaatttcgacctgctgaagctggctggcgacgtggaatccaacccaggccctactagtatggactggatttggcgcatccttttccttgtcggcgctgctaccggcgcgcattccttcgaagaagtgcagctggttgaatcaggtggcggcctggttcaacctggcggatctctgagactgtcttgtgccgccagcggcttcagcttcaacacctacgccatgaactgggtccgacaggctcctggcaaaggactggaatgggtgtcccacatcagaagcaagagcaacaacttcgccacctactacgccgacagcgtgaaggacagattcaccatcagccgggacaacgccaagaacagcctgtacctccagatgaactccctgagagccgaggacaccgccgtgtattattgcgccagacaaggcggcgacttccctatggattattggggccagggcaccctggtcaccgtttcttctacgcgtgaggacctgaagaacgtgttcccacctgaggtggccgtgttcgagcctagcgaggccgagatcagccacacccagaaagccaccctcgtgtgcctggctaccggcttctaccccgaccatgtggaactgtcttggtgggtcaacggcaaagaggtgcacagcggcgtgtgtaccgacccccagccactgaaagaacagcccgccctgaacgacagccggtactgcctgagcagcagactgagagtgtccgccaccttctggcagaacccccggaaccacttcagatgccaggtgcagttctacggcctgagcgagaacgacgagtggacccaggacagagccaagcccgtgacccagatcgtgtctgccgaagcctggggcagagccgatgatgtgattaagatccactggcaggaaaagaagtccaacaccatcctgggcagccaggaaggcaacaccatgaagaccaacgacacctacatgaagttcagctggctgaccgtgcccgagaagtccctggacaaagaacacagatgcatcgtgcggcacgaaaacaacaagaacggcgtggaccaggaaatcatcttcccacccatcaagaccgatgtgattacaatggaccccaaggacaactgctccaaggacgccaacgataccctgctgctccagctgaccaacaccagcgcctactacatgtacttgttgctgctgctgaagtccgtggtgtacttcgccatcatcacatgctgcctgctgatggctatggtcaagcggaaggacagccgggga

SEQ ID NO: 6648 - DNA, 2583 bp, synthetic construct
  source 1..2583: mol_type = other DNA
atggccttaccagtgaccgccttgctcctgccgctggccttgctgctccacgccgccaggccggaagtgcagctggttgaatctggcggaggactggttcagcctggcggatctctgagactgtcttgtgccgccagcggcttcagcttcagcgacttttggatgagctgggtccgacaggcccctggcaaaggacttgaatgggtcgccacaatcagccaggccggcagcgagaaggactacgtggactctgtgaagggcagattcaccatcagccgggacaacgccaagaagtccctgtacctccagatgaacagcctgagagccgaggacaccgccgtgtactattgtgcctctggcgtgtacagcttcgactacagaggccagggcaccctggtcacagtctcttctggtaccggcggaggcggatctggcggcggaggtagcggtggcggaggatctgaattcgacgtggtcatgacacagagcccttctagcctgtctgccagcgtgggcgacagagtgaccatcacctgtaaagccagcgaggacatctacatccggctggcctggtatcagcagaagcctggaaaggcccctaagctgctgatctacgccgccacctctctggaaacaggcgtgccaagcagattttccggcagcggctctggcaccgatttcaccctgacaatatccagcctccagcctgaggacttcgccacctactactgccagcagtattggaccacaccttggacctttggcggaggcaccaaggtggaaatcaaactcgagatccagaaccctgatcctgccgtgtaccagctgcgggatagcaagagcagcgacaagagcgtgtgtctgttcaccgacttcgacagccagaccaacgtgtcccagagcaaggactccgacgtgtacatcaccgataagtgcgtgctggacatgcggagcatggacttcaagagcaactccgccgtggcctggtccaacaagtccgatttcgcctgcgccaacgccttcaacaacagcattatccccgaggacacattcttcccaagccccgagagcagcgactccaccgaccacgtgaagcccaaagagacagagaacaccaagcagcccagcaagagctgccacaagcccaaggccatcgtgcacaccgagaaagtgaacatgatgagcctgaccgtgctgggcctgcggatgctgttcgccaaaaccgtggccgtgaacttcctgctgaccgccaagctgttcttcctcctcaccgcccgcgccaagagaagcggatctggcgtgaagcagaccctgaatttcgacctgctgaagctggctggcgacgtggaatccaacccaggccctactagtatggactggatttggcgcatccttttccttgtcggcgctgctaccggcgcgcattccttcgaacaggtgcagctccaagagtctggccctggactggtcaagcctagccagacactgagcctgacctgtaccgtgtccggctacagcatcaccatcgactacacctggaactggatcagacagcctcctggcaaaggactggaatggatcggctacatcacctacagcggcagcaccgactacaaccccagcctgaaaagccgggtgctgatctccgtggacaccagcaagaatcaggtgtccctgaagctgagcagcgtgacagccgctgataccgccgtgtactactgtgccagactgggcagaagatacgccctggattattggggccagggcaccaccgtgacagtgtcatctacgcgtgaggacctgaagaacgtgttcccacctgaggtggccgtgttcgagcctagcgaggccgagatcagccacacccagaaagccaccctcgtgtgcctggctaccggcttctaccccgaccatgtggaactgtcttggtgggtcaacggcaaagaggtgcacagcggcgtgtgtaccgacccccagccactgaaagaacagcccgccctgaacgacagccggtactgcctgagcagcagactgagagtgtccgccaccttctggcagaacccccggaaccacttcagatgccaggtgcagttctacggcctgagcgagaacgacgagtggacccaggacagagccaagcccgtgacccagatcgtgtctgccgaagcctggggcagagccgatgatgtgattaagatccactggcaggaaaagaagtccaacaccatcctgggcagccaggaaggcaacaccatgaagaccaacgacacctacatgaagttcagctggctgaccgtgcccgagaagtccctggacaaagaacacagatgcatcgtgcggcacgaaaacaacaagaacggcgtggaccaggaaatcatcttcccacccatcaagaccgatgtgattacaatggaccccaaggacaactgctccaaggacgccaacgataccctgctgctccagctgaccaacaccagcgcctactacatgtacttgttgctgctgctgaagtccgtggtgtacttcgccatcatcacatgctgcctgctgatggctatggtcaagcggaaggacagccgggga

SEQ ID NO: 6649 - DNA, 2595 bp, synthetic construct
  source 1..2595: mol_type = other DNA
atggccttaccagtgaccgccttgctcctgccgctggccttgctgctccacgccgccaggccggaagtgcagctggttgaatctggcggaggactggttcagcctggcggatctctgagactgtcttgtgccgccagcggcttcagcttcagcgacttttggatgagctgggtccgacaggcccctggcaaaggacttgaatgggtcgccacaatcagccaggccggcagcgagaaggactacgtggactctgtgaagggcagattcaccatcagccgggacaacgccaagaagtccctgtacctccagatgaacagcctgagagccgaggacaccgccgtgtactattgtgcctctggcgtgtacagcttcgactacagaggccagggcaccctggtcacagtctcttctggtaccggcggaggcggatctggcggcggaggtagcggtggcggaggatctgaattcgacatccagatgacccagaccacaagcagcctgtctgccagcctgggcgacagagtgaccatctcttgtagagccagccaggacatcagcaactacctgaactggtatcagcagaaacccgacggcaccgtgaagctgctgatctactacaccagcatcctgcacagcggcgtgcccagcagattttctggctctggcagcggcaccgactacagcctgaccatcagcaatctggaacaagaggacttcgctacctacttctgccagcaaggcaacaccctgccttggacatttggcggaggcaccaagctggaaatcaaagctctcgagatccagaaccctgatcctgccgtgtaccagctgcgggatagcaagagcagcgacaagagcgtgtgtctgttcaccgacttcgacagccagaccaacgtgtcccagagcaaggactccgacgtgtacatcaccgataagtgcgtgctggacatgcggagcatggacttcaagagcaactccgccgtggcctggtccaacaagtccgatttcgcctgcgccaacgccttcaacaacagcattatccccgaggacacattcttcccaagccccgagagcagcgactccaccgaccacgtgaagcccaaagagacagagaacaccaagcagcccagcaagagctgccacaagcccaaggccatcgtgcacaccgagaaagtgaacatgatgagcctgaccgtgctgggcctgcggatgctgttcgccaaaaccgtggccgtgaacttcctgctgaccgccaagctgttcttcctcctcaccgcccgcgccaagagaagcggatctggcgtgaagcagaccctgaatttcgacctgctgaagctggctggcgacgtggaatccaacccaggccctactagtatggactggatttggcgcatccttttccttgtcggcgctgctaccggcgcgcattccttcgaagtgcaactggttgaatctggcggcggactggttaagcctggcggatctctgaagctgagctgtgccgcctctggcttcgccttcagcatctacgatatgagctgggtccgacagacccctgagaagagactggaatgggtcgcctacatctctagcggcggagggacctactatcccgacacagtgaagggcagattcaccatctccagagacaacgccaagaacaccctgtacctccagatgagcagcctgaagtccgaggacaccgccatgtactactgcgccagacacagcggctatggcacacattggggagtgctgtttgcctactggggccagggaacactggtcacagtttctgctacgcgtgaggacctgaagaacgtgttcccacctgaggtggccgtgttcgagcctagcgaggccgagatcagccacacccagaaagccaccctcgtgtgcctggctaccggcttctaccccgaccatgtggaactgtcttggtgggtcaacggcaaagaggtgcacagcggcgtgtgtaccgacccccagccactgaaagaacagcccgccctgaacgacagccggtactgcctgagcagcagactgagagtgtccgccaccttctggcagaacccccggaaccacttcagatgccaggtgcagttctacggcctgagcgagaacgacgagtggacccaggacagagccaagcccgtgacccagatcgtgtctgccgaagcctggggcagagccgatgatgtgattaagatccactggcaggaaaagaagtccaacaccatcctgggcagccaggaaggcaacaccatgaagaccaacgacacctacatgaagttcagctggctgaccgtgcccgagaagtccctggacaaagaacacagatgcatcgtgcggcacgaaaacaacaagaacggcgtggaccaggaaatcatcttcccacccatcaagaccgatgtgattacaatggaccccaaggacaactgctccaaggacgccaacgataccctgctgctccagctgaccaacaccagcgcctactacatgtacttgttgctgctgctgaagtccgtggtgtacttcgccatcatcacatgctgcctgctgatggctatggtcaagcggaaggacagccgggga

SEQ ID NO: 6650 - DNA, 2628 bp, synthetic construct
  source 1..2628: mol_type = other DNA
atggccttaccagtgaccgccttgctcctgccgctggccttgctgctccacgccgccaggccggaagtgcagctggttgaatctggcggaggactggttcagcctggcggatctctgagactgtcttgtgccgccagcggcttcagcttcagcgacttttggatgagctgggtccgacaggcccctggcaaaggacttgaatgggtcgccacaatcagccaggccggcagcgagaaggactacgtggactctgtgaagggcagattcaccatcagccgggacaacgccaagaagtccctgtacctccagatgaacagcctgagagccgaggacaccgccgtgtactattgtgcctctggcgtgtacagcttcgactacagaggccagggcaccctggtcacagtctcttctggtaccggcggaggcggatctggcggcggaggtagcggtggcggaggatctgaattcgacatcgtgatgacacagagccctgatagcctggccgtgtctctgggagagagagccaccatcaactgcaagagcagccagagcctgctgtacagaagcaaccagaagaactacctggcctggtatcagcagaagcccggccagcctcctaagctgctgatctactgggccagcaccagagaaagcggcgtgcccgatagattttctggctctggcagcggcaccgacttcaccctgacaatttctagcctgcaagccgaggacgtggccgtgtactactgccagcagtattacaactaccccagaaccttcggccagggcaccaaggtggaaatcaagagaacagttctcgagatccagaaccctgatcctgccgtgtaccagctgcgggatagcaagagcagcgacaagagcgtgtgtctgttcaccgacttcgacagccagaccaacgtgtcccagagcaaggactccgacgtgtacatcaccgataagtgcgtgctggacatgcggagcatggacttcaagagcaactccgccgtggcctggtccaacaagtccgatttcgcctgcgccaacgccttcaacaacagcattatccccgaggacacattcttcccaagccccgagagcagcgactccaccgaccacgtgaagcccaaagagacagagaacaccaagcagcccagcaagagctgccacaagcccaaggccatcgtgcacaccgagaaagtgaacatgatgagcctgaccgtgctgggcctgcggatgctgttcgccaaaaccgtggccgtgaacttcctgctgaccgccaagctgttcttcctcctcaccgcccgcgccaagagaagcggatctggcgtgaagcagaccctgaatttcgacctgctgaagctggctggcgacgtggaatccaacccaggccctactagtatggactggatttggcgcatccttttccttgtcggcgctgctaccggcgcgcattccttcgaagaagttcagctgcttgaatcaggcggcggactggttcaacctggcggatctctgagactgagctgtgccgccagcggctacagcatcacaagcgactatgcctggaactgggtccgacaggcccctggcaaaggactggaatgggtgtcctacatcagcaacagcggcagcaccagctacaaccccagcctgaagtcccggttcaccatcagcagagacaacagcaagaacaccctgtacctccagatgaacagcctgagagctgaggacaccgccgtgtattattgcgccaaagagcggaactacgactacgacgattactactacgctatggactactggggccagggaaccctggtcacagtctcttctacgcgtgaggacctgaagaacgtgttcccacctgaggtggccgtgttcgagcctagcgaggccgagatcagccacacccagaaagccaccctcgtgtgcctggctaccggcttctaccccgaccatgtggaactgtcttggtgggtcaacggcaaagaggtgcacagcggcgtgtgtaccgacccccagccactgaaagaacagcccgccctgaacgacagccggtactgcctgagcagcagactgagagtgtccgccaccttctggcagaacccccggaaccacttcagatgccaggtgcagttctacggcctgagcgagaacgacgagtggacccaggacagagccaagcccgtgacccagatcgtgtctgccgaagcctggggcagagccgatgatgtgattaagatccactggcaggaaaagaagtccaacaccatcctgggcagccaggaaggcaacaccatgaagaccaacgacacctacatgaagttcagctggctgaccgtgcccgagaagtccctggacaaagaacacagatgcatcgtgcggcacgaaaacaacaagaacggcgtggaccaggaaatcatcttcccacccatcaagaccgatgtgattacaatggaccccaaggacaactgctccaaggacgccaacgataccctgctgctccagctgaccaacaccagcgcctactacatgtacttgttgctgctgctgaagtccgtggtgtacttcgccatcatcacatgctgcctgctgatggctatggtcaagcggaaggacagccgggga

SEQ ID NO: 6651 - DNA, 2607 bp, synthetic construct
  source 1..2607: mol_type = other DNA
atggccttaccagtgaccgccttgctcctgccgctggccttgctgctccacgccgccaggccggaagtgcagctggttgaatctggcggaggactggttcagcctggcggatctctgagactgtcttgtgccgccagcggcttcagcttcagcgacttttggatgagctgggtccgacaggcccctggcaaaggacttgaatgggtcgccacaatcagccaggccggcagcgagaaggactacgtggactctgtgaagggcagattcaccatcagccgggacaacgccaagaagtccctgtacctccagatgaacagcctgagagccgaggacaccgccgtgtactattgtgcctctggcgtgtacagcttcgactacagaggccagggcaccctggtcacagtctcttctggtaccggcggaggcggatctggcggcggaggtagcggtggcggaggatctgaattcgacgtggtcatgacacagagccctctgagcctgcctgtgacacttggacagcctgccagcatcagctgtagaagcagccagagcctgctgcacagcagcggcaatacctacctggaatggtatcagcagaggcccggacagagccccagacctctgatctacaagatcagcacccggttcagcggcgtgcccgatagattttctggctctggcagcggcaccgacttcaccctgaagattagcagagtggaagccgaggacgtgggcgtgtactactgcttccaaggcagccacgtgccatacacctttggcggcggaacaaaggtggaaatcaagagactcgagatccagaaccctgatcctgccgtgtaccagctgcgggatagcaagagcagcgacaagagcgtgtgtctgttcaccgacttcgacagccagaccaacgtgtcccagagcaaggactccgacgtgtacatcaccgataagtgcgtgctggacatgcggagcatggacttcaagagcaactccgccgtggcctggtccaacaagtccgatttcgcctgcgccaacgccttcaacaacagcattatccccgaggacacattcttcccaagccccgagagcagcgactccaccgaccacgtgaagcccaaagagacagagaacaccaagcagcccagcaagagctgccacaagcccaaggccatcgtgcacaccgagaaagtgaacatgatgagcctgaccgtgctgggcctgcggatgctgttcgccaaaaccgtggccgtgaacttcctgctgaccgccaagctgttcttcctcctcaccgcccgcgccaagagaagcggatctggcgtgaagcagaccctgaatttcgacctgctgaagctggctggcgacgtggaatccaacccaggccctactagtatggactggatttggcgcatccttttccttgtcggcgctgctaccggcgcgcattccttcgaacaagttcagctggttcagagcggagccgaagtgaagaaacctggggcctctgtgaaggtgtcctgcaaagcctctggcctgaccatcgaggactactacatgcactgggtccgacaggcccctggacaaggacttgaatggatgggctggatcgaccccgagaacggcgatacagagtacggccctaagttccagggcagagtgaccatgaccagagacaccagcatcaacaccgcctacatggaactgagccggctgagatccgatgacaccgccgtgtactattgcgccgtgcacaatgcccactacggcacttggtttgcctattggggccagggcacactggtcaccgttagctctacgcgtgaggacctgaagaacgtgttcccacctgaggtggccgtgttcgagcctagcgaggccgagatcagccacacccagaaagccaccctcgtgtgcctggctaccggcttctaccccgaccatgtggaactgtcttggtgggtcaacggcaaagaggtgcacagcggcgtgtgtaccgacccccagccactgaaagaacagcccgccctgaacgacagccggtactgcctgagcagcagactgagagtgtccgccaccttctggcagaacccccggaaccacttcagatgccaggtgcagttctacggcctgagcgagaacgacgagtggacccaggacagagccaagcccgtgacccagatcgtgtctgccgaagcctggggcagagccgatgatgtgattaagatccactggcaggaaaagaagtccaacaccatcctgggcagccaggaaggcaacaccatgaagaccaacgacacctacatgaagttcagctggctgaccgtgcccgagaagtccctggacaaagaacacagatgcatcgtgcggcacgaaaacaacaagaacggcgtggaccaggaaatcatcttcccacccatcaagaccgatgtgattacaatggaccccaaggacaactgctccaaggacgccaacgataccctgctgctccagctgaccaacaccagcgcctactacatgtacttgttgctgctgctgaagtccgtggtgtacttcgccatcatcacatgctgcctgctgatggctatggtcaagcggaaggacagccgggga

SEQ ID NO: 6652 - DNA, 2583 bp, synthetic construct
  source 1..2583: mol_type = other DNA
atggccttaccagtgaccgccttgctcctgccgctggccttgctgctccacgccgccaggccggaagtgcagctggttgaatctggcggaggactggttcagcctggcggatctctgagactgtcttgtgccgccagcggcttcagcttcagcgacttttggatgagctgggtccgacaggcccctggcaaaggacttgaatgggtcgccacaatcagccaggccggcagcgagaaggactacgtggactctgtgaagggcagattcaccatcagccgggacaacgccaagaagtccctgtacctccagatgaacagcctgagagccgaggacaccgccgtgtactattgtgcctctggcgtgtacagcttcgactacagaggccagggcaccctggtcacagtctcttctggtaccggcggaggcggatctggcggcggaggtagcggtggcggaggatctgaattcgacatccagatgacacagagccctagcagcctgtctgccagcgtgggagacagagtgaccatcacctgtagagccagcgagaacatctacagcaacctggcctggtatcagcagaagcctggcaaggcccctaagctgctgatctacgccgccaccaatctggctgatggcgtgccaagcagattttccggctctggcagcggcaccgatttcaccctgacaatatccagcctccagcctgaggacttcgccacctactactgccagcacttttggggcacccctacattcggccagggcaccaaggtggaaatcaagagaacagttctcgagatccagaaccctgatcctgccgtgtaccagctgcgggatagcaagagcagcgacaagagcgtgtgtctgttcaccgacttcgacagccagaccaacgtgtcccagagcaaggactccgacgtgtacatcaccgataagtgcgtgctggacatgcggagcatggacttcaagagcaactccgccgtggcctggtccaacaagtccgatttcgcctgcgccaacgccttcaacaacagcattatccccgaggacacattcttcccaagccccgagagcagcgactccaccgaccacgtgaagcccaaagagacagagaacaccaagcagcccagcaagagctgccacaagcccaaggccatcgtgcacaccgagaaagtgaacatgatgagcctgaccgtgctgggcctgcggatgctgttcgccaaaaccgtggccgtgaacttcctgctgaccgccaagctgttcttcctcctcaccgcccgcgccaagagaagcggatctggcgtgaagcagaccctgaatttcgacctgctgaagctggctggcgacgtggaatccaacccaggccctactagtatggactggatttggcgcatccttttccttgtcggcgctgctaccggcgcgcattccttcgaagaagtgcagctggttgaatcaggtggcggcctggttcaacctggcggatctctgagactgagctgtgccgcctctggcttcagcctgacaaattacggcgtgcactgggtccgacaggcccctggaaaaggactggaatgggtgtccgtgatttggagcggcggcagcaccgattacaacgccgccttcatcagccggttcaccatcagcgccgacaccagcaagaataccgcctacctccagatgaactccctgagagccgaggacaccgccgtgtactattgcgccagagaactgatccacgctatggacaactggggccagggaaccctggtcacagtctcttctacgcgtgaggacctgaagaacgtgttcccacctgaggtggccgtgttcgagcctagcgaggccgagatcagccacacccagaaagccaccctcgtgtgcctggctaccggcttctaccccgaccatgtggaactgtcttggtgggtcaacggcaaagaggtgcacagcggcgtgtgtaccgacccccagccactgaaagaacagcccgccctgaacgacagccggtactgcctgagcagcagactgagagtgtccgccaccttctggcagaacccccggaaccacttcagatgccaggtgcagttctacggcctgagcgagaacgacgagtggacccaggacagagccaagcccgtgacccagatcgtgtctgccgaagcctggggcagagccgatgatgtgattaagatccactggcaggaaaagaagtccaacaccatcctgggcagccaggaaggcaacaccatgaagaccaacgacacctacatgaagttcagctggctgaccgtgcccgagaagtccctggacaaagaacacagatgcatcgtgcggcacgaaaacaacaagaacggcgtggaccaggaaatcatcttcccacccatcaagaccgatgtgattacaatggaccccaaggacaactgctccaaggacgccaacgataccctgctgctccagctgaccaacaccagcgcctactacatgtacttgttgctgctgctgaagtccgtggtgtacttcgccatcatcacatgctgcctgctgatggctatggtcaagcggaaggacagccgggga

SEQ ID NO: 6653 - DNA, 2604 bp, synthetic construct
  source 1..2604: mol_type = other DNA
atggccttaccagtgaccgccttgctcctgccgctggccttgctgctccacgccgccaggccggaagtgcagctggttgaatctggcggaggactggttcagcctggcggatctctgagactgtcttgtgccgccagcggcttcagcttcagcgacttttggatgagctgggtccgacaggcccctggcaaaggacttgaatgggtcgccacaatcagccaggccggcagcgagaaggactacgtggactctgtgaagggcagattcaccatcagccgggacaacgccaagaagtccctgtacctccagatgaacagcctgagagccgaggacaccgccgtgtactattgtgcctctggcgtgtacagcttcgactacagaggccagggcaccctggtcacagtctcttctggtaccggcggaggcggatctggcggcggaggtagcggtggcggaggatctgaattcgacttcgtgatgacacagagccctctgagcctgcctgtgacacctggcgaacctgccagcatcagctgtagaagcagccagagcatcgtgcacagcaacggcaacacctacctggaatggtatctccagaagcctggacagagcccacagctgctgatctacaaggtgtccaacagattcagcggcgtgcccgacagattttctggcagcggctctggcaccgacttcaccctgaagattagcagagtggaagccgaggacgtgggcgtgtactactgcttccaaggctctcacgtgcccctgacctttggacagggcaccaagctggaaatcaagagactcgagatccagaaccctgatcctgccgtgtaccagctgcgggatagcaagagcagcgacaagagcgtgtgtctgttcaccgacttcgacagccagaccaacgtgtcccagagcaaggactccgacgtgtacatcaccgataagtgcgtgctggacatgcggagcatggacttcaagagcaactccgccgtggcctggtccaacaagtccgatttcgcctgcgccaacgccttcaacaacagcattatccccgaggacacattcttcccaagccccgagagcagcgactccaccgaccacgtgaagcccaaagagacagagaacaccaagcagcccagcaagagctgccacaagcccaaggccatcgtgcacaccgagaaagtgaacatgatgagcctgaccgtgctgggcctgcggatgctgttcgccaaaaccgtggccgtgaacttcctgctgaccgccaagctgttcttcctcctcaccgcccgcgccaagagaagcggatctggcgtgaagcagaccctgaatttcgacctgctgaagctggctggcgacgtggaatccaacccaggccctactagtatggactggatttggcgcatccttttccttgtcggcgctgctaccggcgcgcattccttcgaagaagtgcagctggttgaaagcggagccgaagtgaagaaacctggggcctctgtgaaggtgtcctgcaaggccagcggctacacctttaccagctactggattcactgggtccgacaggcccctggacaaggacttgagtggatgggcgagaacgacccctccaacggcaggaccaactacaacgagaagttcaagaaccgcgtgaccctgaccgtggacaccagcatctctaccgcctacatggaactgagccggctgagatccgatgacaccgccgtgtactattgcgccagaggacccaactacttttacagcatggactactggggccagggcacaatggtcaccgttagctctacgcgtgaggacctgaagaacgtgttcccacctgaggtggccgtgttcgagcctagcgaggccgagatcagccacacccagaaagccaccctcgtgtgcctggctaccggcttctaccccgaccatgtggaactgtcttggtgggtcaacggcaaagaggtgcacagcggcgtgtgtaccgacccccagccactgaaagaacagcccgccctgaacgacagccggtactgcctgagcagcagactgagagtgtccgccaccttctggcagaacccccggaaccacttcagatgccaggtgcagttctacggcctgagcgagaacgacgagtggacccaggacagagccaagcccgtgacccagatcgtgtctgccgaagcctggggcagagccgatgatgtgattaagatccactggcaggaaaagaagtccaacaccatcctgggcagccaggaaggcaacaccatgaagaccaacgacacctacatgaagttcagctggctgaccgtgcccgagaagtccctggacaaagaacacagatgcatcgtgcggcacgaaaacaacaagaacggcgtggaccaggaaatcatcttcccacccatcaagaccgatgtgattacaatggaccccaaggacaactgctccaaggacgccaacgataccctgctgctccagctgaccaacaccagcgcctactacatgtacttgttgctgctgctgaagtccgtggtgtacttcgccatcatcacatgctgcctgctgatggctatggtcaagcggaaggacagccgggga

SEQ ID NO: 6654 - DNA, 2583 bp, synthetic construct
  source 1..2583: mol_type = other DNA
atggccttaccagtgaccgccttgctcctgccgctggccttgctgctccacgccgccaggccggaagtgcagctggttgaatctggcggaggactggttcagcctggcggatctctgagactgtcttgtgccgccagcggcttcagcttcagcgacttttggatgagctgggtccgacaggcccctggcaaaggacttgaatgggtcgccacaatcagccaggccggcagcgagaaggactacgtggactctgtgaagggcagattcaccatcagccgggacaacgccaagaagtccctgtacctccagatgaacagcctgagagccgaggacaccgccgtgtactattgtgcctctggcgtgtacagcttcgactacagaggccagggcaccctggtcacagtctcttctggtaccggcggaggcggatctggcggcggaggtagcggtggcggaggatctgaattcgacatccagctgactcagagccctagctttctgagcgccagcgtgggcgacagagtgaccatcacatgtagcgccagatccagcatcagcttcatgtactggtatcagcagaagcccggcaaggcccctaagctgctgatctacgacaccagcaatctggcctctggcgtgcccagcagattttctggaagcggcagcggcaccgagttcaccctgacaatctctagcctggaagccgaggatgccgccacctactattgccagcagtggtccagctatcccctgacatttggacagggcaccaagctggaaatcaaactcgagatccagaaccctgatcctgccgtgtaccagctgcgggatagcaagagcagcgacaagagcgtgtgtctgttcaccgacttcgacagccagaccaacgtgtcccagagcaaggactccgacgtgtacatcaccgataagtgcgtgctggacatgcggagcatggacttcaagagcaactccgccgtggcctggtccaacaagtccgatttcgcctgcgccaacgccttcaacaacagcattatccccgaggacacattcttcccaagccccgagagcagcgactccaccgaccacgtgaagcccaaagagacagagaacaccaagcagcccagcaagagctgccacaagcccaaggccatcgtgcacaccgagaaagtgaacatgatgagcctgaccgtgctgggcctgcggatgctgttcgccaaaaccgtggccgtgaacttcctgctgaccgccaagctgttcttcctcctcaccgcccgcgccaagagaagcggatctggcgtgaagcagaccctgaatttcgacctgctgaagctggctggcgacgtggaatccaacccaggccctactagtatggactggatttggcgcatccttttccttgtcggcgctgctaccggcgcgcattccttcgaacaggttcagctggttcagtctggggccgaagtgaagaaacctggggcctctgtgaaggtgtcctgcaaggcttccggctacacctttaccggctcttggatgaactgggtccgacaggctcctggacagggactcgaatggatcggcagaatctatcctggcgacggcgagacaaactacaacggcaagttcaaggaccgcgtgacaatcaccgccgacaagagcacaagcaccgcctacatggaactgagcagcctgcggagcgaagataccgccgtgtactactgcgcccggatctacggcaacaacgtgtacttcgatgtgtggggccagggcacaaccgtgacagtctcttctacgcgtgaggacctgaagaacgtgttcccacctgaggtggccgtgttcgagcctagcgaggccgagatcagccacacccagaaagccaccctcgtgtgcctggctaccggcttctaccccgaccatgtggaactgtcttggtgggtcaacggcaaagaggtgcacagcggcgtgtgtaccgacccccagccactgaaagaacagcccgccctgaacgacagccggtactgcctgagcagcagactgagagtgtccgccaccttctggcagaacccccggaaccacttcagatgccaggtgcagttctacggcctgagcgagaacgacgagtggacccaggacagagccaagcccgtgacccagatcgtgtctgccgaagcctggggcagagccgatgatgtgattaagatccactggcaggaaaagaagtccaacaccatcctgggcagccaggaaggcaacaccatgaagaccaacgacacctacatgaagttcagctggctgaccgtgcccgagaagtccctggacaaagaacacagatgcatcgtgcggcacgaaaacaacaagaacggcgtggaccaggaaatcatcttcccacccatcaagaccgatgtgattacaatggaccccaaggacaactgctccaaggacgccaacgataccctgctgctccagctgaccaacaccagcgcctactacatgtacttgttgctgctgctgaagtccgtggtgtacttcgccatcatcacatgctgcctgctgatggctatggtcaagcggaaggacagccgggga

SEQ ID NO: 6655 - DNA, 2607 bp, synthetic construct
  source 1..2607: mol_type = other DNA
atggccttaccagtgaccgccttgctcctgccgctggccttgctgctccacgccgccaggccggaagtgcagctggttgaatctggcggaggactggttcagcctggcggatctctgagactgtcttgtgccgccagcggcttcagcttcagcgacttttggatgagctgggtccgacaggcccctggcaaaggacttgaatgggtcgccacaatcagccaggccggcagcgagaaggactacgtggactctgtgaagggcagattcaccatcagccgggacaacgccaagaagtccctgtacctccagatgaacagcctgagagccgaggacaccgccgtgtactattgtgcctctggcgtgtacagcttcgactacagaggccagggcaccctggtcacagtctcttctggtaccggcggaggcggatctggcggcggaggtagcggtggcggaggatctgaattccagctggtgctgacacagtctccaagcgcctctgccagcctgggatctagcgtgaagctgacctgtacactgagcagcggccacaagaccgacaccatcgactggtatcagcagcagcctggcaaggcccctagatacctgatgaagctggaaggcagcggcagctacaacaaaggctctggcgtgcccgatagattcagcggcagttcttctggcgctgattggtatctgaccatcagcagcctccagagcgaggacgaggccgattactactgcggcacagactaccccggcaactacctgtttggcggcggaacacagctgacagtgcttggcctcgagatccagaaccctgatcctgccgtgtaccagctgcgggatagcaagagcagcgacaagagcgtgtgtctgttcaccgacttcgacagccagaccaacgtgtcccagagcaaggactccgacgtgtacatcaccgataagtgcgtgctggacatgcggagcatggacttcaagagcaactccgccgtggcctggtccaacaagtccgatttcgcctgcgccaacgccttcaacaacagcattatccccgaggacacattcttcccaagccccgagagcagcgactccaccgaccacgtgaagcccaaagagacagagaacaccaagcagcccagcaagagctgccacaagcccaaggccatcgtgcacaccgagaaagtgaacatgatgagcctgaccgtgctgggcctgcggatgctgttcgccaaaaccgtggccgtgaacttcctgctgaccgccaagctgttcttcctcctcaccgcccgcgccaagagaagcggatctggcgtgaagcagaccctgaatttcgacctgctgaagctggctggcgacgtggaatccaacccaggccctactagtatggactggatttggcgcatccttttccttgtcggcgctgctaccggcgcgcattccttcgaacaagaacagctggttgaaagcggcggaggactggttcaacctggcggttctctgagactgagctgtgccgccagcggcttcaccttcagcgactactacatgagctggatcagacaggccccaggcaaaggactggaatgggtcgccacaatctaccccagcagcggcaagacctactacgccgattctgccaagggcagactgaccatctccagcgacaacgccaaggacagcctgtacctccagatgaacagcctgagagccgaggacaccgccgtgtactactgcaccagagatagctacgccgacgacgccgctctgtttgacatttggggccagggcaccaccgtgaccgtttcttctacgcgtgaggacctgaagaacgtgttcccacctgaggtggccgtgttcgagcctagcgaggccgagatcagccacacccagaaagccaccctcgtgtgcctggctaccggcttctaccccgaccatgtggaactgtcttggtgggtcaacggcaaagaggtgcacagcggcgtgtgtaccgacccccagccactgaaagaacagcccgccctgaacgacagccggtactgcctgagcagcagactgagagtgtccgccaccttctggcagaacccccggaaccacttcagatgccaggtgcagttctacggcctgagcgagaacgacgagtggacccaggacagagccaagcccgtgacccagatcgtgtctgccgaagcctggggcagagccgatgatgtgattaagatccactggcaggaaaagaagtccaacaccatcctgggcagccaggaaggcaacaccatgaagaccaacgacacctacatgaagttcagctggctgaccgtgcccgagaagtccctggacaaagaacacagatgcatcgtgcggcacgaaaacaacaagaacggcgtggaccaggaaatcatcttcccacccatcaagaccgatgtgattacaatggaccccaaggacaactgctccaaggacgccaacgataccctgctgctccagctgaccaacaccagcgcctactacatgtacttgttgctgctgctgaagtccgtggtgtacttcgccatcatcacatgctgcctgctgatggctatggtcaagcggaaggacagccgggga

SEQ ID NO: 6656 - DNA, 2583 bp, synthetic construct; identical to SEQ ID NO: 6652
  source 1..2583: mol_type = other DNA

SEQ ID NO: 6657 - DNA, 2604 bp, synthetic construct; identical to SEQ ID NO: 6653
  source 1..2604: mol_type = other DNA

SEQ ID NO: 6658 - DNA, 2583 bp, synthetic construct; identical to SEQ ID NO: 6654
  source 1..2583: mol_type = other DNA

SEQ ID NO: 6659 - DNA, 2607 bp, synthetic construct; identical to SEQ ID NO: 6655
  source 1..2607: mol_type = other DNA

SEQ ID NO: 6660 - DNA, 2604 bp, synthetic construct
  source 1..2604: mol_type = other DNA
atggccttaccagtgaccgccttgctcctgccgctggccttgctgctccacgccgccaggccggaagtgcagctggttgaatctggcggaggactggttcagcctggcggatctctgagactgtcttgtgccgccagcggcttcagcttcagcgacttttggatgagctgggtccgacaggcccctggcaaaggacttgaatgggtcgccacaatcagccaggccggcagcgagaaggactacgtggactctgtgaagggcagattcaccatcagccgggacaacgccaagaagtccctgtacctccagatgaacagcctgagagccgaggacaccgccgtgtactattgtgcctctggcgtgtacagcttcgactacagaggccagggcaccctggtcacagtctcttctggtaccggcggaggcggatctggcggcggaggtagcggtggcggaggatctgaattcgatatccagctcactcaaagcccctctagtctctctgcctcagtgggggatcgggtcagttttacttgtcaagcttcacaggatatcaacaacttccttaattggtatcagcagaagccaggaaaagcacccaagctgctcatctatgatgcctcaaatttggagacgggtgttcccagtcgattctctgggtcagggtccgggaccgactttacgtttacgatctcctctctgcagcccgaagacatcgccacatactattgtcaacagtacggcaacttgcctttcacatttgggggcgggactaaggttgaaatcaagaggctcgagatccagaaccctgatcctgccgtgtaccagctgcgggatagcaagagcagcgacaagagcgtgtgtctgttcaccgacttcgacagccagaccaacgtgtcccagagcaaggactccgacgtgtacatcaccgataagtgcgtgctggacatgcggagcatggacttcaagagcaactccgccgtggcctggtccaacaagtccgatttcgcctgcgccaacgccttcaacaacagcattatccccgaggacacattcttcccaagccccgagagcagcgactccaccgaccacgtgaagcccaaagagacagagaacaccaagcagcccagcaagagctgccacaagcccaaggccatcgtgcacaccgagaaagtgaacatgatgagcctgaccgtgctgggcctgcggatgctgttcgccaaaaccgtggccgtgaacttcctgctgaccgccaagctgttcttcctcctcaccgcccgcgccaagagaagcggatctggcgtgaagcagaccctgaatttcgacctgctgaagctggctggcgacgtggaatccaacccaggccctactagtatggactggatttggcgcatccttttccttgtcggcgctgctaccggcgcgcattccttcgaacaggtacagctgcaggaatctgggcccggacttgtcaagccaagtcagacactttctcttacatgtaccgtgagcggcggaagtataagcagtggaggcttttactggtcttggatacggcagcacccaggcaaaggcttggagtggattggatacattcatcattcaggatctacacactataatccatcccttaagtcccgggtcaccattagcattgatacgtctaagaatctgttcagtctcaggctgtcctccgtcactgctgccgacacagccgtgtactactgcgcctccttggtttactgcggaggcgactgttatagcggctttgattattgggggcaggggaccctcgtaaccgtgagctctacgcgtgaggacctgaagaacgtgttcccacctgaggtggccgtgttcgagcctagcgaggccgagatcagccacacccagaaagccaccctcgtgtgcctggctaccggcttctaccccgaccatgtggaactgtcttggtgggtcaacggcaaagaggtgcacagcggcgtgtgtaccgacccccagccactgaaagaacagcccgccctgaacgacagccggtactgcctgagcagcagactgagagtgtccgccaccttctggcagaacccccggaaccacttcagatgccaggtgcagttctacggcctgagcgagaacgacgagtggacccaggacagagccaagcccgtgacccagatcgtgtctgccgaagcctggggcagagccgatgatgtgattaagatccactggcaggaaaagaagtccaacaccatcctgggcagccaggaaggcaacaccatgaagaccaacgacacctacatgaagttcagctggctgaccgtgcccgagaagtccctggacaaagaacacagatgcatcgtgcggcacgaaaacaacaagaacggcgtggaccaggaaatcatcttcccacccatcaagaccgatgtgattacaatggaccccaaggacaactgctccaaggacgccaacgataccctgctgctccagctgaccaacaccagcgcctactacatgtacttgttgctgctgctgaagtccgtggtgtacttcgccatcatcacatgctgcctgctgatggctatggtcaagcggaaggacagccgggga

SEQ ID NO: 6661 - DNA, 2592 bp, synthetic construct
  source 1..2592: mol_type = other DNA
atggccttaccagtgaccgccttgctcctgccgctggccttgctgctccacgccgccaggccggaagtgcagctggttgaatctggcggaggactggttcagcctggcggatctctgagactgtcttgtgccgccagcggcttcagcttcagcgacttttggatgagctgggtccgacaggcccctggcaaaggacttgaatgggtcgccacaatcagccaggccggcagcgagaaggactacgtggactctgtgaagggcagattcaccatcagccgggacaacgccaagaagtccctgtacctccagatgaacagcctgagagccgaggacaccgccgtgtactattgtgcctctggcgtgtacagcttcgactacagaggccagggcaccctggtcacagtctcttctggtaccggcggaggcggatctggcggcggaggtagcggtggcggaggatctgaattcgacattcagatgacacagagccctagcagcctgagcgcctctgtgggagacagagtgaccatcacatgcaagagcagccagagcgtgctgtactccagcaatcagaagaactacctggcctggttccagcagaagcctggcaaggctcctaagctgctgatctactgggccagcaccagagaaagcggcgtgccaagcagattttctggcagcggctctggcaccgacttcaccctgacaatatccagcctccagcctgaggacttcgccacctacttttgccaccagtacctgagcagctacacattcggacagggcaccaaggtggaaatcaagcggctcgagatccagaaccctgatcctgccgtgtaccagctgcgggatagcaagagcagcgacaagagcgtgtgtctgttcaccgacttcgacagccagaccaacgtgtcccagagcaaggactccgacgtgtacatcaccgataagtgcgtgctggacatgcggagcatggacttcaagagcaactccgccgtggcctggtccaacaagtccgatttcgcctgcgccaacgccttcaacaacagcattatccccgaggacacattcttcccaagccccgagagcagcgactccaccgaccacgtgaagcccaaagagacagagaacaccaagcagcccagcaagagctgccacaagcccaaggccatcgtgcacaccgagaaagtgaacatgatgagcctgaccgtgctgggcctgcggatgctgttcgccaaaaccgtggccgtgaacttcctgctgaccgccaagctgttcttcctcctcaccgcccgcgccaagagaagcggatctggcgtgaagcagaccctgaatttcgacctgctgaagctggctggcgacgtggaatccaacccaggccctactagtatggactggatttggcgcatccttttccttgtcggcgctgctaccggcgcgcattccttcgaagaggtgcagctggttgaatctggcggaggactggttcagcctggcggatctctgagactgtcttgtgccgccagcggctacaccttcaccacctattggatgcactgggtccgacaggcccctggcaaaggacttgagtgggtcggatatatcaggcccagcaccggctacacagagtacaaccagaagttcaaggaccgcttcaccatcagcgccgacaccagcaagaataccgcctacctccagatgaacagcctgagagccgaggacaccgccgtgtactactgtgccagatccagatggctgctggactattggggccagggcacactggttacagtttctacgcgtgaggacctgaagaacgtgttcccacctgaggtggccgtgttcgagcctagcgaggccgagatcagccacacccagaaagccaccctcgtgtgcctggctaccggcttctaccccgaccatgtggaactgtcttggtgggtcaacggcaaagaggtgcacagcggcgtgtgtaccgacccccagccactgaaagaacagcccgccctgaacgacagccggtactgcctgagcagcagactgagagtgtccgccaccttctggcagaacccccggaaccacttcagatgccaggtgcagttctacggcctgagcgagaacgacgagtggacccaggacagagccaagcccgtgacccagatcgtgtctgccgaagcctggggcagagccgatgatgtgattaagatccactggcaggaaaagaagtccaacaccatcctgggcagccaggaaggcaacaccatgaagaccaacgacacctacatgaagttcagctggctgaccgtgcccgagaagtccctggacaaagaacacagatgcatcgtgcggcacgaaaacaacaagaacggcgtggaccaggaaatcatcttcccacccatcaagaccgatgtgattacaatggaccccaaggacaactgctccaaggacgccaacgataccctgctgctccagctgaccaacaccagcgcctactacatgtacttgttgctgctgctgaagtccgtggtgtacttcgccatcatcacatgctgcctgctgatggctatggtcaagcggaaggacagccgggga

SEQ ID NO: 6662 - DNA, 2583 bp, synthetic construct
  source 1..2583: mol_type = other DNA
atggccttaccagtgaccgccttgctcctgccgctggccttgctgctccacgccgccaggccggaagtgcagctggttgaatctggcggaggactggttcagcctggcggatctctgagactgtcttgtgccgccagcggcttcagcttcagcgacttttggatgagctgggtccgacaggcccctggcaaaggacttgaatgggtcgccacaatcagccaggccggcagcgagaaggactacgtggactctgtgaagggcagattcaccatcagccgggacaacgccaagaagtccctgtacctccagatgaacagcctgagagccgaggacaccgccgtgtactattgtgcctctggcgtgtacagcttcgactacagaggccagggcaccctggtcacagtctcttctggtaccggcggaggcggatctggcggcggaggtagcggtggcggaggatctgaattcgacatccagatgacacagagccctagcagcctgtctgccagcgtgggagacagagtgaccatcacctgtagagccagccaggacatcagcaactacctgaactggtatcagcagaagcccggcaaggcccctaagctgctgatctactacaccagcagactgcacagcggcgtgcccagcagattttctggctctggcagcggcaccgacttcaccctgacaatatctagcctccagcctgaggacttcgccacctactattgccagcagggcaacaccctgccttacacatttggacagggcaccaaggtggaaatcaagagactcgagatccagaaccctgatcctgccgtgtaccagctgcgggatagcaagagcagcgacaagagcgtgtgtctgttcaccgacttcgacagccagaccaacgtgtcccagagcaaggactccgacgtgtacatcaccgataagtgcgtgctggacatgcggagcatggacttcaagagcaactccgccgtggcctggtccaacaagtccgatttcgcctgcgccaacgccttcaacaacagcattatccccgaggacacattcttcccaagccccgagagcagcgactccaccgaccacgtgaagcccaaagagacagagaacaccaagcagcccagcaagagctgccacaagcccaaggccatcgtgcacaccgagaaagtgaacatgatgagcctgaccgtgctgggcctgcggatgctgttcgccaaaaccgtggccgtgaacttcctgctgaccgccaagctgttcttcctcctcaccgcccgcgccaagagaagcggatctggcgtgaagcagaccctgaatttcgacctgctgaagctggctggcgacgtggaatccaacccaggccctactagtatggactggatttggcgcatccttttccttgtcggcgctgctaccggcgcgcattccttcgaagaagtgcagctggttgaatcaggtggcggcctggttcaacctggcggatctctgagactgagctgtgccgccagcggcttcaccttcagcgactactttatgagctgggtccgacaggcccctggcaaaggacttgaatgggtcgccaccatcagcaatggcggcacctacacttactaccccgacagcgtgaagggcagattcaccatctccagagacaacagcaagaacaccctgtacctccagatgaactccctgagagccgaggacaccgccgtgtactactgcgccagattcgacggctacatcttcgactattggggccagggcaccctggtcacagtctcttctacgcgtgaggacctgaagaacgtgttcccacctgaggtggccgtgttcgagcctagcgaggccgagatcagccacacccagaaagccaccctcgtgtgcctggctaccggcttctaccccgaccatgtggaactgtcttggtgggtcaacggcaaagaggtgcacagcggcgtgtgtaccgacccccagccactgaaagaacagcccgccctgaacgacagccggtactgcctgagcagcagactgagagtgtccgccaccttctggcagaacccccggaaccacttcagatgccaggtgcagttctacggcctgagcgagaacgacgagtggacccaggacagagccaagcccgtgacccagatcgtgtctgccgaagcctggggcagagccgatgatgtgattaagatccactggcaggaaaagaagtccaacaccatcctgggcagccaggaaggcaacaccatgaagaccaacgacacctacatgaagttcagctggctgaccgtgcccgagaagtccctggacaaagaacacagatgcatcgtgcggcacgaaaacaacaagaacggcgtggaccaggaaatcatcttcccacccatcaagaccgatgtgattacaatggaccccaaggacaactgctccaaggacgccaacgataccctgctgctccagctgaccaacaccagcgcctactacatgtacttgttgctgctgctgaagtccgtggtgtacttcgccatcatcacatgctgcctgctgatggctatggtcaagcggaaggacagccgggga

SEQ ID NO: 6663 - DNA, 2985 bp, synthetic construct
  source 1..2985: mol_type = other DNA
atggccttaccagtgaccgccttgctcctgccgctggccttgctgctccacgccgccaggccggaagtgcagctggttgaatctggcggaggactggttcagcctggcggatctctgagactgtcttgtgccgccagcggcttcagcttcagcgacttttggatgagctgggtccgacaggcccctggcaaaggacttgaatgggtcgccacaatcagccaggccggcagcgagaaggactacgtggactctgtgaagggcagattcaccatcagccgggacaacgccaagaagtccctgtacctccagatgaacagcctgagagccgaggacaccgccgtgtactattgtgcctctggcgtgtacagcttcgactacagaggccagggcaccctggtcacagtctcttctggtaccggcggaggcggatctggcggcggaggtagcggtggcggaggatctgaattcgacatccagatgacacagactacatcctccctgtctgcctctctgggagacagagtcaccatcagttgcagggcaagtcaggacattagtaagtacctgaactggtatcagcagaaaccagatggaactgttaaactcctgatctaccatacatcaagattacactcaggagtcccatcaaggttcagtggcagtgggtctggaacagattattctctcaccattagcaacctggagcaagaagatattgccacttacttttgccaacagggtaatacgcttccgtacacgttcggaggggggaccaagctggagatcacactcgaggacctgaagaacgtgttcccacctgaggtggccgtgttcgagcctagcgaggccgagatcagccacacccagaaagccaccctcgtgtgcctggctaccggcttctaccccgaccatgtggaactgtcttggtgggtcaacggcaaagaggtgcacagcggcgtgtgtaccgacccccagccactgaaagaacagcccgccctgaacgacagccggtactgcctgagcagcagactgagagtgtccgccaccttctggcagaacccccggaaccacttcagatgccaggtgcagttctacggcctgagcgagaacgacgagtggacccaggacagagccaagcccgtgacccagatcgtgtctgccgaagcctggggcagagccgatgatgtgattaagatccactggcaggaaaagaagtccaacaccatcctgggcagccaggaaggcaacaccatgaagaccaacgacacctacatgaagttcagctggctgaccgtgcccgagaagtccctggacaaagaacacagatgcatcgtgcggcacgaaaacaacaagaacggcgtggaccaggaaatcatcttcccacccatcaagaccgatgtgattacaatggaccccaaggacaactgctccaaggacgccaacgataccctgctgctccagctgaccaacaccagcgcctactacatgtacttgttgctgctgctgaagtccgtggtgtacttcgccatcatcacatgctgcctgctgatggctatggtcaagcggaaggacagccggggaagggccaagcgatctggatctggagcaacaaacttctcactactcaaacaagcaggtgacgtggaggagaatcccgggcctactagtatggactggatttggcgcatccttttccttgtcggcgctgctaccggcgcgcattccgggccccagctccagctgcaagagtctggacctggcctggtcaagcctagcgagacactgagcctgacctgtaccgtgtccggcgatagcatcagcagcggcgattactactggggctggatcagacagcctcctggcaaaggactggaatggatcggccacatctactacagcggcgtgacctactacaaccccagcctgaagtccagagtgaccatcagcgtggacaccagccggaaccagttctccctgaagctgtctagcgtgacagccgccgataccgccgtgtactactgcaccagagaggacagcagcaactggcggagtagaggccagggaacactggtcacagttagctctggatccggcggaggcggaagtggaggcggaggatctggcggcggaggctctttcgaagtgaaactgcaggagtcaggacctggcctggtggcgccctcacagagcctgtccgtcacatgcactgtctcaggggtctcattacccgactatggtgtaagctggattcgccagcctccacgaaagggtctggagtggctgggagtaatatggggtagtgaaaccacatactataattcagctctcaaatccagactgaccatcatcaaggacaactccaagagccaagttttcttaaaaatgaacagtctgcaaactgatgacacagccatttactactgtgccaaacattattactacggtggtagctatgctatggactactggggccaaggaacctcagtcaccgtctcctcaacgcgtatccagaaccctgatcctgccgtgtaccagctgcgggatagcaagagcagcgacaagagcgtgtgtctgttcaccgacttcgacagccagaccaacgtgtcccagagcaaggactccgacgtgtacatcaccgataagtgcgtgctggacatgcggagcatggacttcaagagcaactccgccgtggcctggtccaacaagtccgatttcgcctgcgccaacgccttcaacaacagcattatccccgaggacacattcttcccaagccccgagagcagcgactccaccgaccacgtgaagcccaaagagacagagaacaccaagcagcccagcaagagctgccacaagcccaaggccatcgtgcacaccgagaaagtgaacatgatgagcctgaccgtgctgggcctgcggatgctgttcgccaaaaccgtggccgtgaacttcctgctgaccgccaagctgttcttcctcctcaccgcc

SEQ ID NO: 6664 - DNA, 2988 bp, synthetic construct
  source 1..2988: mol_type = other DNA
atggccttaccagtgaccgccttgctcctgccgctggccttgctgctccacgccgccaggccggaagtgcagctggttgaatctggcggaggactggttcagcctggcggatctctgagactgtcttgtgccgccagcggcttcagcttcagcgacttttggatgagctgggtccgacaggcccctggcaaaggacttgaatgggtcgccacaatcagccaggccggcagcgagaaggactacgtggactctgtgaagggcagattcaccatcagccgggacaacgccaagaagtccctgtacctccagatgaacagcctgagagccgaggacaccgccgtgtactattgtgcctctggcgtgtacagcttcgactacagaggccagggcaccctggtcacagtctcttctggtaccggcggaggcggatctggcggcggaggtagcggtggcggaggatctgaattcgagatcgtgatgacccagagccctgccaccctgtctctgagccctggcgaaagagccaccctgagctgtagagccagccaggacatcagcaagtacctgaactggtatcagcagaagcccggccaggcccccagactgctgatctaccacaccagcagactgcacagcggcatccccgccagattttctggctctggcagcggcaccgactacaccctgacaatcagcagcctccagcccgaggacttcgccgtgtacttctgtcagcaaggcaacaccctgccctacaccttcggccagggcaccaagctggaaatcaagctcgaggacctgaagaacgtgttcccacctgaggtggccgtgttcgagcctagcgaggccgagatcagccacacccagaaagccaccctcgtgtgcctggctaccggcttctaccccgaccatgtggaactgtcttggtgggtcaacggcaaagaggtgcacagcggcgtgtgtaccgacccccagccactgaaagaacagcccgccctgaacgacagccggtactgcctgagcagcagactgagagtgtccgccaccttctggcagaacccccggaaccacttcagatgccaggtgcagttctacggcctgagcgagaacgacgagtggacccaggacagagccaagcccgtgacccagatcgtgtctgccgaagcctggggcagagccgatgatgtgattaagatccactggcaggaaaagaagtccaacaccatcctgggcagccaggaaggcaacaccatgaagaccaacgacacctacatgaagttcagctggctgaccgtgcccgagaagtccctggacaaagaacacagatgcatcgtgcggcacgaaaacaacaagaacggcgtggaccaggaaatcatcttcccacccatcaagaccgatgtgattacaatggaccccaaggacaactgctccaaggacgccaacgataccctgctgctccagctgaccaacaccagcgcctactacatgtacttgttgctgctgctgaagtccgtggtgtacttcgccatcatcacatgctgcctgctgatggctatggtcaagcggaaggacagccggggaagggccaagcgatctggatctggagcaacaaacttctcactactcaaacaagcaggtgacgtggaggagaatcccgggcctactagtatggactggatttggcgcatccttttccttgtcggcgctgctaccggcgcgcattccgggccccagctccagctgcaagagtctggacctggcctggtcaagcctagcgagacactgagcctgacctgtaccgtgtccggcgatagcatcagcagcggcgattactactggggctggatcagacagcctcctggcaaaggactggaatggatcggccacatctactacagcggcgtgacctactacaaccccagcctgaagtccagagtgaccatcagcgtggacaccagccggaaccagttctccctgaagctgtctagcgtgacagccgccgataccgccgtgtactactgcaccagagaggacagcagcaactggcggagtagaggccagggaacactggtcacagttagctctggatccggcggaggcggaagtggaggcggaggatctggcggcggaggctctttcgaacaggtgcaactccaggaatctggccctggcctcgtgaagcccagcgagacactgagcctgacctgtaccgtgtccggcgtgtccctgcctgactatggcgtgtcctggatcagacagccccctggcaagggcctggaatggatcggagtgatttggggcagcgaaaccacctactacaacagctccctgaagtccagagtgaccatctccaaggacaactccaagaaccaggtgtccctgaagctgagcagcgtgacagccgccgacaccgccgtgtattactgcgccaagcactactactacggcggcagctacgctatggactactggggccagggaaccctcgtgaccgtgtctagtacgcgtatccagaaccctgatcctgccgtgtaccagctgcgggatagcaagagcagcgacaagagcgtgtgtctgttcaccgacttcgacagccagaccaacgtgtcccagagcaaggactccgacgtgtacatcaccgataagtgcgtgctggacatgcggagcatggacttcaagagcaactccgccgtggcctggtccaacaagtccgatttcgcctgcgccaacgccttcaacaacagcattatccccgaggacacattcttcccaagccccgagagcagcgactccaccgaccacgtgaagcccaaagagacagagaacaccaagcagcccagcaagagctgccacaagcccaaggccatcgtgcacaccgagaaagtgaacatgatgagcctgaccgtgctgggcctgcggatgctgttcgccaaaaccgtggccgtgaacttcctgctgaccgccaagctgttcttcctcctcaccgcc

SEQ ID NO: 6665 - DNA, 2991 bp, synthetic construct
  source 1..2991: mol_type = other DNA
atggccttaccagtgaccgccttgctcctgccgctggccttgctgctccacgccgccaggccggaagtgcagctggttgaatctggcggaggactggttcagcctggcggatctctgagactgtcttgtgccgccagcggcttcagcttcagcgacttttggatgagctgggtccgacaggcccctggcaaaggacttgaatgggtcgccacaatcagccaggccggcagcgagaaggactacgtggactctgtgaagggcagattcaccatcagccgggacaacgccaagaagtccctgtacctccagatgaacagcctgagagccgaggacaccgccgtgtactattgtgcctctggcgtgtacagcttcgactacagaggccagggcaccctggtcacagtctcttctggtaccggcggaggcggatctggcggcggaggtagcggtggcggaggatctgaattcgacgagatcgtgctgacacagagccccgccaccctgtcactgtctccaggcgaaagagccaccctgagctgtagcgccagcagcagcgtgtcctacatgcactggtatcagcagaagcccggccaggcccccagactgctgatctacgataccagcaagctggcctccggcatccccgccagattttctggcagcggctccggcaccgacttcaccctgacaatcagcagcctggaacccgaggacgtggccgtgtactactgttttcaaggcagcgtgtaccccttcaccttcggccagggcaccaagctggaaatcaagagactcgaggacctgaagaacgtgttcccacctgaggtggccgtgttcgagcctagcgaggccgagatcagccacacccagaaagccaccctcgtgtgcctggctaccggcttctaccccgaccatgtggaactgtcttggtgggtcaacggcaaagaggtgcacagcggcgtgtgtaccgacccccagccactgaaagaacagcccgccctgaacgacagccggtactgcctgagcagcagactgagagtgtccgccaccttctggcagaacccccggaaccacttcagatgccaggtgcagttctacggcctgagcgagaacgacgagtggacccaggacagagccaagcccgtgacccagatcgtgtctgccgaagcctggggcagagccgatgatgtgattaagatccactggcaggaaaagaagtccaacaccatcctgggcagccaggaaggcaacaccatgaagaccaacgacacctacatgaagttcagctggctgaccgtgcccgagaagtccctggacaaagaacacagatgcatcgtgcggcacgaaaacaacaagaacggcgtggaccaggaaatcatcttcccacccatcaagaccgatgtgattacaatggaccccaaggacaactgctccaaggacgccaacgataccctgctgctccagctgaccaacaccagcgcctactacatgtacttgttgctgctgctgaagtccgtggtgtacttcgccatcatcacatgctgcctgctgatggctatggtcaagcggaaggacagccggggaagggccaagcgatctggatctggagcaacaaacttctcactactcaaacaagcaggtgacgtggaggagaatcccgggcctactagtatggactggatttggcgcatccttttccttgtcggcgctgctaccggcgcgcattccgggccccagctccagctgcaagagtctggacctggcctggtcaagcctagcgagacactgagcctgacctgtaccgtgtccggcgatagcatcagcagcggcgattactactggggctggatcagacagcctcctggcaaaggactggaatggatcggccacatctactacagcggcgtgacctactacaaccccagcctgaagtccagagtgaccatcagcgtggacaccagccggaaccagttctccctgaagctgtctagcgtgacagccgccgataccgccgtgtactactgcaccagagaggacagcagcaactggcggagtagaggccagggaacactggtcacagttagctctggatccggcggaggcggaagtggaggcggaggatctggcggcggaggctctttcgaacaggtgcagctccaggaatctggccctggcctcgtgaagcctagccagaccctgagcctgacctgtaccgtgtctggcggcagcatcagcacaagcggcatgggcgtgggctggatcagacagcaccctggcaagggcctggaatggatcggccacatttggtgggacgacgacaagcggtacaaccccgccctgaagtccagagtgaccatcagcgtggacaccagcaagaaccagttcagcctgaagctgagcagcgtgacagccgccgataccgccgtgtattattgcgcccggatggaactgtggtcctactacttcgactactggggccagggaaccctcgtgaccgtgtctagtacgcgtatccagaaccctgatcctgccgtgtaccagctgcgggatagcaagagcagcgacaagagcgtgtgtctgttcaccgacttcgacagccagaccaacgtgtcccagagcaaggactccgacgtgtacatcaccgataagtgcgtgctggacatgcggagcatggacttcaagagcaactccgccgtggcctggtccaacaagtccgatttcgcctgcgccaacgccttcaacaacagcattatccccgaggacacattcttcccaagccccgagagcagcgactccaccgaccacgtgaagcccaaagagacagagaacaccaagcagcccagcaagagctgccacaagcccaaggccatcgtgcacaccgagaaagtgaacatgatgagcctgaccgtgctgggcctgcggatgctgttcgccaaaaccgtggccgtgaacttcctgctgaccgccaagctgttcttcctcctcaccgcc

SEQ ID NO: 6666 - DNA, 2985 bp, synthetic construct
  source 1..2985: mol_type = other DNA
atggccttaccagtgaccgccttgctcctgccgctggccttgctgctccacgccgccaggccggaagtgcagctggttgaatctggcggaggactggttcagcctggcggatctctgagactgtcttgtgccgccagcggcttcagcttcagcgacttttggatgagctgggtccgacaggcccctggcaaaggacttgaatgggtcgccacaatcagccaggccggcagcgagaaggactacgtggactctgtgaagggcagattcaccatcagccgggacaacgccaagaagtccctgtacctccagatgaacagcctgagagccgaggacaccgccgtgtactattgtgcctctggcgtgtacagcttcgactacagaggccagggcaccctggtcacagtctcttctggtaccggcggaggcggatctggcggcggaggtagcggtggcggaggatctgaattcgactacatccacgtgacacagagccctagcagcctgtccgtgtccatcggcgatagagtgaccatcaactgccagacctctcaaggcgtgggcagcgacctgcactggtatcagcacaaacctggcagagcccctaagctgctgatccaccatgccagctctgtggaagatggcgtgcccagcagattttccggcaccggatttcacaccagcttcaacctgacaatcaacgacctccaggccgacgacatcggcacctactactgtcaagtgctccagagcttcggcagaggcagcagactggatacaaaactcgaggacctgaagaacgtgttcccacctgaggtggccgtgttcgagcctagcgaggccgagatcagccacacccagaaagccaccctcgtgtgcctggctaccggcttctaccccgaccatgtggaactgtcttggtgggtcaacggcaaagaggtgcacagcggcgtgtgtaccgacccccagccactgaaagaacagcccgccctgaacgacagccggtactgcctgagcagcagactgagagtgtccgccaccttctggcagaacccccggaaccacttcagatgccaggtgcagttctacggcctgagcgagaacgacgagtggacccaggacagagccaagcccgtgacccagatcgtgtctgccgaagcctggggcagagccgatgatgtgattaagatccactggcaggaaaagaagtccaacaccatcctgggcagccaggaaggcaacaccatgaagaccaacgacacctacatgaagttcagctggctgaccgtgcccgagaagtccctggacaaagaacacagatgcatcgtgcggcacgaaaacaacaagaacggcgtggaccaggaaatcatcttcccacccatcaagaccgatgtgattacaatggaccccaaggacaactgctccaaggacgccaacgataccctgctgctccagctgaccaacaccagcgcctactacatgtacttgttgctgctgctgaagtccgtggtgtacttcgccatcatcacatgctgcctgctgatggctatggtcaagcggaaggacagccggggaagggccaagcgatctggatctggagcaacaaacttctcactactcaaacaagcaggtgacgtggaggagaatcccgggcctactagtatggactggatttggcgcatccttttccttgtcggcgctgctaccggcgcgcattccgggccccagctccagctgcaagagtctggacctggcctggtcaagcctagcgagacactgagcctgacctgtaccgtgtccggcgatagcatcagcagcggcgattactactggggctggatcagacagcctcctggcaaaggactggaatggatcggccacatctactacagcggcgtgacctactacaaccccagcctgaagtccagagtgaccatcagcgtggacaccagccggaaccagttctccctgaagctgtctagcgtgacagccgccgataccgccgtgtactactgcaccagagaggacagcagcaactggcggagtagaggccagggaacactggtcacagttagctctggatccggcggaggcggaagtggaggcggaggatctggcggcggaggctctttcgaaagggcacacctggtgcagtctggcaccgccatgaagaaacctggcgcttccgtcagagtgtcctgtcagacaagcggctacaccttcacagcccacatcctgttctggttcagacaggccccaggcagaggactggaatgggtcggatggatcaagccccagtacggggccgtgaatttcggcggaggcttcagagacagagtgaccctgaccagggacgtgtaccgggaaatcgcctacatggacatccggggcctgaagcctgatgacaccgccgtgtactactgcgccagggatagaagctacggcgacagctcttgggctctcgatgcttggggacagggcacaacagtggtggtgtctgctacgcgtatccagaaccctgatcctgccgtgtaccagctgcgggatagcaagagcagcgacaagagcgtgtgtctgttcaccgacttcgacagccagaccaacgtgtcccagagcaaggactccgacgtgtacatcaccgataagtgcgtgctggacatgcggagcatggacttcaagagcaactccgccgtggcctggtccaacaagtccgatttcgcctgcgccaacgccttcaacaacagcattatccccgaggacacattcttcccaagccccgagagcagcgactccaccgaccacgtgaagcccaaagagacagagaacaccaagcagcccagcaagagctgccacaagcccaaggccatcgtgcacaccgagaaagtgaacatgatgagcctgaccgtgctgggcctgcggatgctgttcgccaaaaccgtggccgtgaacttcctgctgaccgccaagctgttcttcctcctcaccgcc

SEQ ID NO: 6667 - DNA, 3015 bp, synthetic construct
  source 1..3015: mol_type = other DNA
atggccttaccagtgaccgccttgctcctgccgctggccttgctgctccacgccgccaggccggaagtgcagctggttgaatctggcggaggactggttcagcctggcggatctctgagactgtcttgtgccgccagcggcttcagcttcagcgacttttggatgagctgggtccgacaggcccctggcaaaggacttgaatgggtcgccacaatcagccaggccggcagcgagaaggactacgtggactctgtgaagggcagattcaccatcagccgggacaacgccaagaagtccctgtacctccagatgaacagcctgagagccgaggacaccgccgtgtactattgtgcctctggcgtgtacagcttcgactacagaggccagggcaccctggtcacagtctcttctggtaccggcggaggcggatctggcggcggaggtagcggtggcggaggatctgaattcgacgtgcagatgatccagacccccgatagcctggccgtgtccctgggacagagagccaccatctcttgcagagccagcgagagcgtggacaactacggcatcagcttcatgcactggtatcagcagaagcccggccagagccccaagctgctgatctacagagcctccaacctggaaagcggcatccccgccagattttccggcagcggcagcagaaccgacttcaccctgaccatcaaccccgtggaaaccgacgacgtggcaacctactactgccagcagaacaacaaggacccccccacctttggcggaggcaccaagctggaaatcaagctcgaggacctgaagaacgtgttcccacctgaggtggccgtgttcgagcctagcgaggccgagatcagccacacccagaaagccaccctcgtgtgcctggctaccggcttctaccccgaccatgtggaactgtcttggtgggtcaacggcaaagaggtgcacagcggcgtgtgtaccgacccccagccactgaaagaacagcccgccctgaacgacagccggtactgcctgagcagcagactgagagtgtccgccaccttctggcagaacccccggaaccacttcagatgccaggtgcagttctacggcctgagcgagaacgacgagtggacccaggacagagccaagcccgtgacccagatcgtgtctgccgaagcctggggcagagccgatgatgtgattaagatccactggcaggaaaagaagtccaacaccatcctgggcagccaggaaggcaacaccatgaagaccaacgacacctacatgaagttcagctggctgaccgtgcccgagaagtccctggacaaagaacacagatgcatcgtgcggcacgaaaacaacaagaacggcgtggaccaggaaatcatcttcccacccatcaagaccgatgtgattacaatggaccccaaggacaactgctccaaggacgccaacgataccctgctgctccagctgaccaacaccagcgcctactacatgtacttgttgctgctgctgaagtccgtggtgtacttcgccatcatcacatgctgcctgctgatggctatggtcaagcggaaggacagccggggaagggccaagcgatctggatctggagcaacaaacttctcactactcaaacaagcaggtgacgtggaggagaatcccgggcctactagtatggactggatttggcgcatccttttccttgtcggcgctgctaccggcgcgcattccgggccccagctccagctgcaagagtctggacctggcctggtcaagcctagcgagacactgagcctgacctgtaccgtgtccggcgatagcatcagcagcggcgattactactggggctggatcagacagcctcctggcaaaggactggaatggatcggccacatctactacagcggcgtgacctactacaaccccagcctgaagtccagagtgaccatcagcgtggacaccagccggaaccagttctccctgaagctgtctagcgtgacagccgccgataccgccgtgtactactgcaccagagaggacagcagcaactggcggagtagaggccagggaacactggtcacagttagctctggatccggcggaggcggaagtggaggcggaggatctggcggcggaggctctttcgaagggggaggcggctctcaggtgcaactccagcagtctggcgctgagcttgtgaagcctggggccagcgtgaagattagctgcaaggccagcggctacgccttcagcagctactggatgaactgggtcaagcagcggcctggcaagggcctggaatggatcggccaaatctaccccggcgacggcgacaccacctacaacggcaagttcaagggcaaggccaccctgacagccgacaagagcagcagcaccgtgtacatgcaactgaacagcctgaccagcgaggacagcgccgtgtacttctgcgtgcggtactactacggcagctccggctacttcgactattggggccagggcaccacactgaccgtgtcctctacgcgtatccagaaccctgatcctgccgtgtaccagctgcgggatagcaagagcagcgacaagagcgtgtgtctgttcaccgacttcgacagccagaccaacgtgtcccagagcaaggactccgacgtgtacatcaccgataagtgcgtgctggacatgcggagcatggacttcaagagcaactccgccgtggcctggtccaacaagtccgatttcgcctgcgccaacgccttcaacaacagcattatccccgaggacacattcttcccaagccccgagagcagcgactccaccgaccacgtgaagcccaaagagacagagaacaccaagcagcccagcaagagctgccacaagcccaaggccatcgtgcacaccgagaaagtgaacatgatgagcctgaccgtgctgggcctgcggatgctgttcgccaaaaccgtggccgtgaacttcctgctgaccgccaagctgttcttcctcctcaccgcc

SEQ ID NO: 6668 - DNA, 2988 bp, synthetic construct
  source 1..2988: mol_type = other DNA
atggccttaccagtgaccgccttgctcctgccgctggccttgctgctccacgccgccaggccggaagtgcagctggttgaatctggcggaggactggttcagcctggcggatctctgagactgtcttgtgccgccagcggcttcagcttcagcgacttttggatgagctgggtccgacaggcccctggcaaaggacttgaatgggtcgccacaatcagccaggccggcagcgagaaggactacgtggactctgtgaagggcagattcaccatcagccgggacaacgccaagaagtccctgtacctccagatgaacagcctgagagccgaggacaccgccgtgtactattgtgcctctggcgtgtacagcttcgactacagaggccagggcaccctggtcacagtctcttctggtaccggcggaggcggatctggcggcggaggtagcggtggcggaggatctgaattcgacgtgcagatgatccagacccccagcagcctgtctgccagcctgggcgatagagtgaccatcagctgtcgggccagccaggacatcggcaactacctgaactggtatcagcagaaacccgacggcaccgtgaagctgctgatctactacaccagcagactgcacagcggcgtgcccagcagattttctggcagcggctctggcaccgagtacagcctgaccatctccaacctggaacaggaagatattgctacctacttctgtcagcaaggcagcgccctgccccctacatttggcggcggaacaaagctggaaatcaacctcgaggacctgaagaacgtgttcccacctgaggtggccgtgttcgagcctagcgaggccgagatcagccacacccagaaagccaccctcgtgtgcctggctaccggcttctaccccgaccatgtggaactgtcttggtgggtcaacggcaaagaggtgcacagcggcgtgtgtaccgacccccagccactgaaagaacagcccgccctgaacgacagccggtactgcctgagcagcagactgagagtgtccgccaccttctggcagaacccccggaaccacttcagatgccaggtgcagttctacggcctgagcgagaacgacgagtggacccaggacagagccaagcccgtgacccagatcgtgtctgccgaagcctggggcagagccgatgatgtgattaagatccactggcaggaaaagaagtccaacaccatcctgggcagccaggaaggcaacaccatgaagaccaacgacacctacatgaagttcagctggctgaccgtgcccgagaagtccctggacaaagaacacagatgcatcgtgcggcacgaaaacaacaagaacggcgtggaccaggaaatcatcttcccacccatcaagaccgatgtgattacaatggaccccaaggacaactgctccaaggacgccaacgataccctgctgctccagctgaccaacaccagcgcctactacatgtacttgttgctgctgctgaagtccgtggtgtacttcgccatcatcacatgctgcctgctgatggctatggtcaagcggaaggacagccggggaagggccaagcgatctggatctggagcaacaaacttctcactactcaaacaagcaggtgacgtggaggagaatcccgggcctactagtatggactggatttggcgcatccttttccttgtcggcgctgctaccggcgcgcattccgggccccagctccagctgcaagagtctggacctggcctggtcaagcctagcgagacactgagcctgacctgtaccgtgtccggcgatagcatcagcagcggcgattactactggggctggatcagacagcctcctggcaaaggactggaatggatcggccacatctactacagcggcgtgacctactacaaccccagcctgaagtccagagtgaccatcagcgtggacaccagccggaaccagttctccctgaagctgtctagcgtgacagccgccgataccgccgtgtactactgcaccagagaggacagcagcaactggcggagtagaggccagggaacactggtcacagttagctctggatccggcggaggcggaagtggaggcggaggatctggcggcggaggctctttcgaagctctccagctccagcagtctggcgcagaactcgtgcggcctggcgcttctgtgaccctgagctgtaaagccagcggctacaccttcaccgactacgagatgcactgggtcaagcagacccctgtgcacggcctggaatggatcggagccatcgaccctgagacaggcggcaccgcctacaaccagaagttcgagggcaaggccatcctgaccgccgacaagagcagcagcacagcctacatggaactgcggagcctgacctccgaggacagccccgtgtactactgtgccagacggcggtactacggcagcagctccttcgactattggggccagggcaccaccctgaccgtgtctagtacgcgtatccagaaccctgatcctgccgtgtaccagctgcgggatagcaagagcagcgacaagagcgtgtgtctgttcaccgacttcgacagccagaccaacgtgtcccagagcaaggactccgacgtgtacatcaccgataagtgcgtgctggacatgcggagcatggacttcaagagcaactccgccgtggcctggtccaacaagtccgatttcgcctgcgccaacgccttcaacaacagcattatccccgaggacacattcttcccaagccccgagagcagcgactccaccgaccacgtgaagcccaaagagacagagaacaccaagcagcccagcaagagctgccacaagcccaaggccatcgtgcacaccgagaaagtgaacatgatgagcctgaccgtgctgggcctgcggatgctgttcgccaaaaccgtggccgtgaacttcctgctgaccgccaagctgttcttcctcctcaccgcc

SEQ ID NO: 6669 - DNA, 3000 bp, synthetic construct
  source 1..3000: mol_type = other DNA
atggccttaccagtgaccgccttgctcctgccgctggccttgctgctccacgccgccaggccggaagtgcagctggttgaatctggcggaggactggttcagcctggcggatctctgagactgtcttgtgccgccagcggcttcagcttcagcgacttttggatgagctgggtccgacaggcccctggcaaaggacttgaatgggtcgccacaatcagccaggccggcagcgagaaggactacgtggactctgtgaagggcagattcaccatcagccgggacaacgccaagaagtccctgtacctccagatgaacagcctgagagccgaggacaccgccgtgtactattgtgcctctggcgtgtacagcttcgactacagaggccagggcaccctggtcacagtctcttctggtaccggcggaggcggatctggcggcggaggtagcggtggcggaggatctgaattcgacatcgtcctgacccagtccccagccagcctggcggtgtccctgggtcaacgagctaccatttcctgcagagcctctaagtccgtatccacttccggctatagttacctgcattggtaccaacagaaaccagggcagccacccaagctgctcatctatctggcctcaaacctggagtccggcgtgcccgccagattctccggaagtgggagcggcaccgactttacattgaacatccacccagtcgaagaggaagatgctgccacttattactgtcagcactccagggagctgccatttacatttggctctggcacaaaactggagatcaaactcgaggacctgaagaacgtgttcccacctgaggtggccgtgttcgagcctagcgaggccgagatcagccacacccagaaagccaccctcgtgtgcctggctaccggcttctaccccgaccatgtggaactgtcttggtgggtcaacggcaaagaggtgcacagcggcgtgtgtaccgacccccagccactgaaagaacagcccgccctgaacgacagccggtactgcctgagcagcagactgagagtgtccgccaccttctggcagaacccccggaaccacttcagatgccaggtgcagttctacggcctgagcgagaacgacgagtggacccaggacagagccaagcccgtgacccagatcgtgtctgccgaagcctggggcagagccgatgatgtgattaagatccactggcaggaaaagaagtccaacaccatcctgggcagccaggaaggcaacaccatgaagaccaacgacacctacatgaagttcagctggctgaccgtgcccgagaagtccctggacaaagaacacagatgcatcgtgcggcacgaaaacaacaagaacggcgtggaccaggaaatcatcttcccacccatcaagaccgatgtgattacaatggaccccaaggacaactgctccaaggacgccaacgataccctgctgctccagctgaccaacaccagcgcctactacatgtacttgttgctgctgctgaagtccgtggtgtacttcgccatcatcacatgctgcctgctgatggctatggtcaagcggaaggacagccggggaagggccaagcgatctggatctggagcaacaaacttctcactactcaaacaagcaggtgacgtggaggagaatcccgggcctactagtatggactggatttggcgcatccttttccttgtcggcgctgctaccggcgcgcattccgggccccagctccagctgcaagagtctggacctggcctggtcaagcctagcgagacactgagcctgacctgtaccgtgtccggcgatagcatcagcagcggcgattactactggggctggatcagacagcctcctggcaaaggactggaatggatcggccacatctactacagcggcgtgacctactacaaccccagcctgaagtccagagtgaccatcagcgtggacaccagccggaaccagttctccctgaagctgtctagcgtgacagccgccgataccgccgtgtactactgcaccagagaggacagcagcaactggcggagtagaggccagggaacactggtcacagttagctctggatccggcggaggcggaagtggaggcggaggatctggcggcggaggctctttcgaacaggttcagctggtcgagtccgggggaggtctggtacagccgggtggcagcctcaagctgtcatgtgccgcatctggttttgactttagcaggtattggatgagctgggtccgccaggccccgggcaagggacttgagtggattggagaaataaaccctacttccagcacaatcaacttcacaccttctttgaaagataaggtttttatctctcgggataacgctaaaaacacactgtacttgcagatgtctaaggtgcgaagcgaagacaccgccctctattattgcgcccggggtaattactaccgctatggggatgcgatggactattgggggcaaggtacctccgtcacggtctcaacgcgtatccagaaccctgatcctgccgtgtaccagctgcgggatagcaagagcagcgacaagagcgtgtgtctgttcaccgacttcgacagccagaccaacgtgtcccagagcaaggactccgacgtgtacatcaccgataagtgcgtgctggacatgcggagcatggacttcaagagcaactccgccgtggcctggtccaacaagtccgatttcgcctgcgccaacgccttcaacaacagcattatccccgaggacacattcttcccaagccccgagagcagcgactccaccgaccacgtgaagcccaaagagacagagaacaccaagcagcccagcaagagctgccacaagcccaaggccatcgtgcacaccgagaaagtgaacatgatgagcctgaccgtgctgggcctgcggatgctgttcgccaaaaccgtggccgtgaacttcctgctgaccgccaagctgttcttcctcctcaccgcc

SEQ ID NO: 6670 - DNA, 2994 bp, synthetic construct
  source 1..2994: mol_type = other DNA
atggccttaccagtgaccgccttgctcctgccgctggccttgctgctccacgccgccaggccggaagtgcagctggttgaatctggcggaggactggttcagcctggcggatctctgagactgtcttgtgccgccagcggcttcagcttcagcgacttttggatgagctgggtccgacaggcccctggcaaaggacttgaatgggtcgccacaatcagccaggccggcagcgagaaggactacgtggactctgtgaagggcagattcaccatcagccgggacaacgccaagaagtccctgtacctccagatgaacagcctgagagccgaggacaccgccgtgtactattgtgcctctggcgtgtacagcttcgactacagaggccagggcaccctggtcacagtctcttctggtaccggcggaggcggatctggcggcggaggtagcggtggcggaggatctgaattcgacatccagatgacccagagccctagctcactgagcgccagcgtgggcgacagggtgaccattacctgctccgccagccaggacatcagcaactacctgaactggtaccagcagaagcccggcaaggcccccaagctgctgatctactacacctccaacctgcactccggcgtgcccagcaggttcagcggaagcggcagcggcaccgatttcaccctgaccatctccagcctgcagcccgaggacttcgccacctactactgccagcagtacaggaagctcccctggactttcggccagggcaccaaactggagatcaagcgtctcgaggacctgaagaacgtgttcccacctgaggtggccgtgttcgagcctagcgaggccgagatcagccacacccagaaagccaccctcgtgtgcctggctaccggcttctaccccgaccatgtggaactgtcttggtgggtcaacggcaaagaggtgcacagcggcgtgtgtaccgacccccagccactgaaagaacagcccgccctgaacgacagccggtactgcctgagcagcagactgagagtgtccgccaccttctggcagaacccccggaaccacttcagatgccaggtgcagttctacggcctgagcgagaacgacgagtggacccaggacagagccaagcccgtgacccagatcgtgtctgccgaagcctggggcagagccgatgatgtgattaagatccactggcaggaaaagaagtccaacaccatcctgggcagccaggaaggcaacaccatgaagaccaacgacacctacatgaagttcagctggctgaccgtgcccgagaagtccctggacaaagaacacagatgcatcgtgcggcacgaaaacaacaagaacggcgtggaccaggaaatcatcttcccacccatcaagaccgatgtgattacaatggaccccaaggacaactgctccaaggacgccaacgataccctgctgctccagctgaccaacaccagcgcctactacatgtacttgttgctgctgctgaagtccgtggtgtacttcgccatcatcacatgctgcctgctgatggctatggtcaagcggaaggacagccggggaagggccaagcgatctggatctggagcaacaaacttctcactactcaaacaagcaggtgacgtggaggagaatcccgggcctactagtatggactggatttggcgcatccttttccttgtcggcgctgctaccggcgcgcattccgggccccagctccagctgcaagagtctggacctggcctggtcaagcctagcgagacactgagcctgacctgtaccgtgtccggcgatagcatcagcagcggcgattactactggggctggatcagacagcctcctggcaaaggactggaatggatcggccacatctactacagcggcgtgacctactacaaccccagcctgaagtccagagtgaccatcagcgtggacaccagccggaaccagttctccctgaagctgtctagcgtgacagccgccgataccgccgtgtactactgcaccagagaggacagcagcaactggcggagtagaggccagggaacactggtcacagttagctctggatccggcggaggcggaagtggaggcggaggatctggcggcggaggctctttcgaacaggtgcagctggtccagagcggcgccgaagtgaagaagcccggcagctccgtgaaagtgagctgcaaggccagcggcggcaccttcagcaactactggatgcactgggtgaggcaggcccccggacagggcctggagtggatgggcgccacctacaggggccacagcgacacctactacaaccagaagttcaagggccgggtgaccatcaccgccgacaagagcaccagcaccgcctacatggaactgagcagcctcaggagcgaggacaccgctgtgtattactgcgccaggggcgccatctacgacggctacgacgtgctggacaactggggccagggcacactggtgaccgtgtccagcacgcgtatccagaaccctgatcctgccgtgtaccagctgcgggatagcaagagcagcgacaagagcgtgtgtctgttcaccgacttcgacagccagaccaacgtgtcccagagcaaggactccgacgtgtacatcaccgataagtgcgtgctggacatgcggagcatggacttcaagagcaactccgccgtggcctggtccaacaagtccgatttcgcctgcgccaacgccttcaacaacagcattatccccgaggacacattcttcccaagccccgagagcagcgactccaccgaccacgtgaagcccaaagagacagagaacaccaagcagcccagcaagagctgccacaagcccaaggccatcgtgcacaccgagaaagtgaacatgatgagcctgaccgtgctgggcctgcggatgctgttcgccaaaaccgtggccgtgaacttcctgctgaccgccaagctgttcttcctcctcaccgcc

SEQ ID NO: 6671 - DNA, 2994 bp, synthetic construct
  source 1..2994: mol_type = other DNA
atggccttaccagtgaccgccttgctcctgccgctggccttgctgctccacgccgccaggccggaagtgcagctggttgaatctggcggaggactggttcagcctggcggatctctgagactgtcttgtgccgccagcggcttcagcttcagcgacttttggatgagctgggtccgacaggcccctggcaaaggacttgaatgggtcgccacaatcagccaggccggcagcgagaaggactacgtggactctgtgaagggcagattcaccatcagccgggacaacgccaagaagtccctgtacctccagatgaacagcctgagagccgaggacaccgccgtgtactattgtgcctctggcgtgtacagcttcgactacagaggccagggcaccctggtcacagtctcttctggtaccggcggaggcggatctggcggcggaggtagcggtggcggaggatctgaattcgacatcgtgctgacacagagccctgccaccctgtctctgagccctggcgatagagccaccatcagctgtagagccagcgagagcgtgaccatcctgggcagccacctgatctactggtatcagcagaagcccggccagccccccagactgctgattcagctggcctccaatgtgcagaccggcgtgccagccagattttccggcagcggcagcagaaccgacttcaccctgaccatcagcagcgtggaacccgaggacttcgccgtgtactactgcctccagagccggaccatccccagaacattcggccagggcaccaagctggaaatcaagagactcgaggacctgaagaacgtgttcccacctgaggtggccgtgttcgagcctagcgaggccgagatcagccacacccagaaagccaccctcgtgtgcctggctaccggcttctaccccgaccatgtggaactgtcttggtgggtcaacggcaaagaggtgcacagcggcgtgtgtaccgacccccagccactgaaagaacagcccgccctgaacgacagccggtactgcctgagcagcagactgagagtgtccgccaccttctggcagaacccccggaaccacttcagatgccaggtgcagttctacggcctgagcgagaacgacgagtggacccaggacagagccaagcccgtgacccagatcgtgtctgccgaagcctggggcagagccgatgatgtgattaagatccactggcaggaaaagaagtccaacaccatcctgggcagccaggaaggcaacaccatgaagaccaacgacacctacatgaagttcagctggctgaccgtgcccgagaagtccctggacaaagaacacagatgcatcgtgcggcacgaaaacaacaagaacggcgtggaccaggaaatcatcttcccacccatcaagaccgatgtgattacaatggaccccaaggacaactgctccaaggacgccaacgataccctgctgctccagctgaccaacaccagcgcctactacatgtacttgttgctgctgctgaagtccgtggtgtacttcgccatcatcacatgctgcctgctgatggctatggtcaagcggaaggacagccggggaagggccaagcgatctggatctggagcaacaaacttctcactactcaaacaagcaggtgacgtggaggagaatcccgggcctactagtatggactggatttggcgcatccttttccttgtcggcgctgctaccggcgcgcattccgggccccagctccagctgcaagagtctggacctggcctggtcaagcctagcgagacactgagcctgacctgtaccgtgtccggcgatagcatcagcagcggcgattactactggggctggatcagacagcctcctggcaaaggactggaatggatcggccacatctactacagcggcgtgacctactacaaccccagcctgaagtccagagtgaccatcagcgtggacaccagccggaaccagttctccctgaagctgtctagcgtgacagccgccgataccgccgtgtactactgcaccagagaggacagcagcaactggcggagtagaggccagggaacactggtcacagttagctctggatccggcggaggcggaagtggaggcggaggatctggcggcggaggctctttcgaacaggtgcagctggtgcagtctggccccgaagtgaagaaacccggcgagtccgtgaagatcagctgcaaggccagcggctacaccttccggcactacagcatgaactgggtcaagcaggccccaggccagggcctgaagtggatgggcagaatcaacaccgagagcggcgtgcccatctacgccgacgacttcaagggccggttcagcttcaccgtggacaccagcgccagcaccgcctacctggaaatctccagcctgaccagcgaggataccgccgtgtatttctgctccaacgactacctgtacagcctggatttctggggccagggaaccaccctgacagtgtcctctacgcgtatccagaaccctgatcctgccgtgtaccagctgcgggatagcaagagcagcgacaagagcgtgtgtctgttcaccgacttcgacagccagaccaacgtgtcccagagcaaggactccgacgtgtacatcaccgataagtgcgtgctggacatgcggagcatggacttcaagagcaactccgccgtggcctggtccaacaagtccgatttcgcctgcgccaacgccttcaacaacagcattatccccgaggacacattcttcccaagccccgagagcagcgactccaccgaccacgtgaagcccaaagagacagagaacaccaagcagcccagcaagagctgccacaagcccaaggccatcgtgcacaccgagaaagtgaacatgatgagcctgaccgtgctgggcctgcggatgctgttcgccaaaaccgtggccgtgaacttcctgctgaccgccaagctgttcttcctcctcaccgcc

SEQ ID NO: 6672 - DNA, 2997 bp, synthetic construct
  source 1..2997: mol_type = other DNA
atggccttaccagtgaccgccttgctcctgccgctggccttgctgctccacgccgccaggccggaagtgcagctggttgaatctggcggaggactggttcagcctggcggatctctgagactgtcttgtgccgccagcggcttcagcttcagcgacttttggatgagctgggtccgacaggcccctggcaaaggacttgaatgggtcgccacaatcagccaggccggcagcgagaaggactacgtggactctgtgaagggcagattcaccatcagccgggacaacgccaagaagtccctgtacctccagatgaacagcctgagagccgaggacaccgccgtgtactattgtgcctctggcgtgtacagcttcgactacagaggccagggcaccctggtcacagtctcttctggtaccggcggaggcggatctggcggcggaggtagcggtggcggaggatctgaattccagtctgtgctgacacagcctcctagtgtgtctggcgctcctggacagagagtgaccatcagctgtacaggcagcagcagcaatatcggagccggctttgacgtgcactggtatcagcagctgcctggcacagcccctaaactgctgatctacggcaacagcaacagacccagcggcgtgcccgatagattttccggctctaagagcggcacaagcgccagcctggctattactggactccaggccgaggacgaggccgactactactgtcagagctacgacagcagcctgagcggctacgttttcggcaccggcaccaaagtgacagtgcttggtctcgaggacctgaagaacgtgttcccacctgaggtggccgtgttcgagcctagcgaggccgagatcagccacacccagaaagccaccctcgtgtgcctggctaccggcttctaccccgaccatgtggaactgtcttggtgggtcaacggcaaagaggtgcacagcggcgtgtgtaccgacccccagccactgaaagaacagcccgccctgaacgacagccggtactgcctgagcagcagactgagagtgtccgccaccttctggcagaacccccggaaccacttcagatgccaggtgcagttctacggcctgagcgagaacgacgagtggacccaggacagagccaagcccgtgacccagatcgtgtctgccgaagcctggggcagagccgatgatgtgattaagatccactggcaggaaaagaagtccaacaccatcctgggcagccaggaaggcaacaccatgaagaccaacgacacctacatgaagttcagctggctgaccgtgcccgagaagtccctggacaaagaacacagatgcatcgtgcggcacgaaaacaacaagaacggcgtggaccaggaaatcatcttcccacccatcaagaccgatgtgattacaatggaccccaaggacaactgctccaaggacgccaacgataccctgctgctccagctgaccaacaccagcgcctactacatgtacttgttgctgctgctgaagtccgtggtgtacttcgccatcatcacatgctgcctgctgatggctatggtcaagcggaaggacagccggggaagggccaagcgatctggatctggagcaacaaacttctcactactcaaacaagcaggtgacgtggaggagaatcccgggcctactagtatggactggatttggcgcatccttttccttgtcggcgctgctaccggcgcgcattccgggccccagctccagctgcaagagtctggacctggcctggtcaagcctagcgagacactgagcctgacctgtaccgtgtccggcgatagcatcagcagcggcgattactactggggctggatcagacagcctcctggcaaaggactggaatggatcggccacatctactacagcggcgtgacctactacaaccccagcctgaagtccagagtgaccatcagcgtggacaccagccggaaccagttctccctgaagctgtctagcgtgacagccgccgataccgccgtgtactactgcaccagagaggacagcagcaactggcggagtagaggccagggaacactggtcacagttagctctggatccggcggaggcggaagtggaggcggaggatctggcggcggaggctctttcgaacaagttcagctggttcagagcggagccgaagtgaagaaacctggggcctctgtgaaggtgtcctgcaaggcttccggctacacctttaccgattactacatgcactgggtccgacaggctcccggccaaagacttgaatggatgggctggatcaaccccaacagcggcggcacaaattacgcccagaagttccaggaccggatcaccgtgaccagagacaccagctccaacaccggctacatggaactgacccggctgagatccgatgacaccgccgtgtactactgcgctagaagcccttactccggcgtgctggataagtggggacagggcacactggtcaccgtgtcatctacgcgtatccagaaccctgatcctgccgtgtaccagctgcgggatagcaagagcagcgacaagagcgtgtgtctgttcaccgacttcgacagccagaccaacgtgtcccagagcaaggactccgacgtgtacatcaccgataagtgcgtgctggacatgcggagcatggacttcaagagcaactccgccgtggcctggtccaacaagtccgatttcgcctgcgccaacgccttcaacaacagcattatccccgaggacacattcttcccaagccccgagagcagcgactccaccgaccacgtgaagcccaaagagacagagaacaccaagcagcccagcaagagctgccacaagcccaaggccatcgtgcacaccgagaaagtgaacatgatgagcctgaccgtgctgggcctgcggatgctgttcgccaaaaccgtggccgtgaacttcctgctgaccgccaagctgttcttcctcctcaccgcc

SEQ ID NO: 6673 - DNA, 2988 bp, synthetic construct
  source 1..2988: mol_type = other DNA
atggccttaccagtgaccgccttgctcctgccgctggccttgctgctccacgccgccaggccggaagtgcagctggttgaatctggcggaggactggttcagcctggcggatctctgagactgtcttgtgccgccagcggcttcagcttcagcgacttttggatgagctgggtccgacaggcccctggcaaaggacttgaatgggtcgccacaatcagccaggccggcagcgagaaggactacgtggactctgtgaagggcagattcaccatcagccgggacaacgccaagaagtccctgtacctccagatgaacagcctgagagccgaggacaccgccgtgtactattgtgcctctggcgtgtacagcttcgactacagaggccagggcaccctggtcacagtctcttctggtaccggcggaggcggatctggcggcggaggtagcggtggcggaggatctgaattccaggctgttctgacacagcctccatctgcctctggcacacctggacagagagtgaccatctcctgtagcggcagcagcagcaacatcggcagctacaccgtgtcctggtatcagcagctccctggaacagcccctaagttcctgatctacagcaacaaccagcggcctagcggcgtgcccgatagattttctggcagcaagagcggcacaagcgccagcctggctatttctggactccagtctgaggacgaggccgactactattgtgccgcctgggacgatagcctgaacggctatgtgtttggcaccggcaccaaagtgacagtgcttggtctcgaggacctgaagaacgtgttcccacctgaggtggccgtgttcgagcctagcgaggccgagatcagccacacccagaaagccaccctcgtgtgcctggctaccggcttctaccccgaccatgtggaactgtcttggtgggtcaacggcaaagaggtgcacagcggcgtgtgtaccgacccccagccactgaaagaacagcccgccctgaacgacagccggtactgcctgagcagcagactgagagtgtccgccaccttctggcagaacccccggaaccacttcagatgccaggtgcagttctacggcctgagcgagaacgacgagtggacccaggacagagccaagcccgtgacccagatcgtgtctgccgaagcctggggcagagccgatgatgtgattaagatccactggcaggaaaagaagtccaacaccatcctgggcagccaggaaggcaacaccatgaagaccaacgacacctacatgaagttcagctggctgaccgtgcccgagaagtccctggacaaagaacacagatgcatcgtgcggcacgaaaacaacaagaacggcgtggaccaggaaatcatcttcccacccatcaagaccgatgtgattacaatggaccccaaggacaactgctccaaggacgccaacgataccctgctgctccagctgaccaacaccagcgcctactacatgtacttgttgctgctgctgaagtccgtggtgtacttcgccatcatcacatgctgcctgctgatggctatggtcaagcggaaggacagccggggaagggccaagcgatctggatctggagcaacaaacttctcactactcaaacaagcaggtgacgtggaggagaatcccgggcctactagtatggactggatttggcgcatccttttccttgtcggcgctgctaccggcgcgcattccgggccccagctccagctgcaagagtctggacctggcctggtcaagcctagcgagacactgagcctgacctgtaccgtgtccggcgatagcatcagcagcggcgattactactggggctggatcagacagcctcctggcaaaggactggaatggatcggccacatctactacagcggcgtgacctactacaaccccagcctgaagtccagagtgaccatcagcgtggacaccagccggaaccagttctccctgaagctgtctagcgtgacagccgccgataccgccgtgtactactgcaccagagaggacagcagcaactggcggagtagaggccagggaacactggtcacagttagctctggatccggcggaggcggaagtggaggcggaggatctggcggcggaggctctttcgaagttcaactggttcagagcggagccgaagtgaagaagcctggcgagagcctgaagattagctgcaaaggcagcggctacgacttcaccacctactggatcggctgggtccgacagatgcctggcaaaggactggaatggatgggcatcatctaccccggcgacagcgacaccagatacagccctagcgttagaggccgcgtgaccatcagcgccgacaagtctatcaacaccgcctacctccagtggtccagcctggaagcctctgacaccgccatgtactactgcgccagaatgtggaccttcagccaggatggatggggccagggaacactggtcacagtgtcatctacgcgtatccagaaccctgatcctgccgtgtaccagctgcgggatagcaagagcagcgacaagagcgtgtgtctgttcaccgacttcgacagccagaccaacgtgtcccagagcaaggactccgacgtgtacatcaccgataagtgcgtgctggacatgcggagcatggacttcaagagcaactccgccgtggcctggtccaacaagtccgatttcgcctgcgccaacgccttcaacaacagcattatccccgaggacacattcttcccaagccccgagagcagcgactccaccgaccacgtgaagcccaaagagacagagaacaccaagcagcccagcaagagctgccacaagcccaaggccatcgtgcacaccgagaaagtgaacatgatgagcctgaccgtgctgggcctgcggatgctgttcgccaaaaccgtggccgtgaacttcctgctgaccgccaagctgttcttcctcctcaccgcc

SEQ ID NO: 6674 - DNA, 2997 bp, synthetic construct
  source 1..2997: mol_type = other DNA
atggccttaccagtgaccgccttgctcctgccgctggccttgctgctccacgccgccaggccggaagtgcagctggttgaatctggcggaggactggttcagcctggcggatctctgagactgtcttgtgccgccagcggcttcagcttcagcgacttttggatgagctgggtccgacaggcccctggcaaaggacttgaatgggtcgccacaatcagccaggccggcagcgagaaggactacgtggactctgtgaagggcagattcaccatcagccgggacaacgccaagaagtccctgtacctccagatgaacagcctgagagccgaggacaccgccgtgtactattgtgcctctggcgtgtacagcttcgactacagaggccagggcaccctggtcacagtctcttctggtaccggcggaggcggatctggcggcggaggtagcggtggcggaggatctgaattcgacatcgtgatgacccagagccccgatagcctggccgtgtctctgggagagagagccaccatcaactgcaagagcagccagagcatcctgtacagcagcaaccagaagaactacctggcctggtatcagcagaagcccggccagagccctaagctgctgatctactgggccagcaccagagaaagcggcgtgcccgatagattcagcggcagcggctctggcaccgacttcaccctgaccatcagttctcttcaggccgaggacgtggccgtgtactactgccaccagtacatcagctcctacaccttcggccagggcaccaagctggaaatcaagctcgaggacctgaagaacgtgttcccacctgaggtggccgtgttcgagcctagcgaggccgagatcagccacacccagaaagccaccctcgtgtgcctggctaccggcttctaccccgaccatgtggaactgtcttggtgggtcaacggcaaagaggtgcacagcggcgtgtgtaccgacccccagccactgaaagaacagcccgccctgaacgacagccggtactgcctgagcagcagactgagagtgtccgccaccttctggcagaacccccggaaccacttcagatgccaggtgcagttctacggcctgagcgagaacgacgagtggacccaggacagagccaagcccgtgacccagatcgtgtctgccgaagcctggggcagagccgatgatgtgattaagatccactggcaggaaaagaagtccaacaccatcctgggcagccaggaaggcaacaccatgaagaccaacgacacctacatgaagttcagctggctgaccgtgcccgagaagtccctggacaaagaacacagatgcatcgtgcggcacgaaaacaacaagaacggcgtggaccaggaaatcatcttcccacccatcaagaccgatgtgattacaatggaccccaaggacaactgctccaaggacgccaacgataccctgctgctccagctgaccaacaccagcgcctactacatgtacttgttgctgctgctgaagtccgtggtgtacttcgccatcatcacatgctgcctgctgatggctatggtcaagcggaaggacagccggggaagggccaagcgatctggatctggagcaacaaacttctcactactcaaacaagcaggtgacgtggaggagaatcccgggcctactagtatggactggatttggcgcatccttttccttgtcggcgctgctaccggcgcgcattccgggccccagctccagctgcaagagtctggacctggcctggtcaagcctagcgagacactgagcctgacctgtaccgtgtccggcgatagcatcagcagcggcgattactactggggctggatcagacagcctcctggcaaaggactggaatggatcggccacatctactacagcggcgtgacctactacaaccccagcctgaagtccagagtgaccatcagcgtggacaccagccggaaccagttctccctgaagctgtctagcgtgacagccgccgataccgccgtgtactactgcaccagagaggacagcagcaactggcggagtagaggccagggaacactggtcacagttagctctggatccggcggaggcggaagtggaggcggaggatctggcggcggaggctctttcgaacaggtgcagctggtgcagtctggcgctgaagtgaagaaacctggggccagcgtgaaggtgtcctgcaaggccagcggctacacctttgccagccagtggatgcactggatgagacaggcccctggacagggcctggaatggatcggctggatcaaccccggcaacgtgaacaccaagtacaacgagaagttcaagggcagagccaccctgacagtggacaccagcaccaacaccgcctacatggaactgagcagcctgcggagcgaggacaccgccgtgtattattgcgccagaagcacctggtacagacccctggattattggggccagggaacccttgtgaccgtgtcctctacgcgtatccagaaccctgatcctgccgtgtaccagctgcgggatagcaagagcagcgacaagagcgtgtgtctgttcaccgacttcgacagccagaccaacgtgtcccagagcaaggactccgacgtgtacatcaccgataagtgcgtgctggacatgcggagcatggacttcaagagcaactccgccgtggcctggtccaacaagtccgatttcgcctgcgccaacgccttcaacaacagcattatccccgaggacacattcttcccaagccccgagagcagcgactccaccgaccacgtgaagcccaaagagacagagaacaccaagcagcccagcaagagctgccacaagcccaaggccatcgtgcacaccgagaaagtgaacatgatgagcctgaccgtgctgggcctgcggatgctgttcgccaaaaccgtggccgtgaacttcctgctgaccgccaagctgttcttcctcctcaccgcc

SEQ ID NO: 6675 - DNA, 2997 bp, synthetic construct
  source 1..2997: mol_type = other DNA
atggccttaccagtgaccgccttgctcctgccgctggccttgctgctccacgccgccaggccggaagtgcagctggttgaatctggcggaggactggttcagcctggcggatctctgagactgtcttgtgccgccagcggcttcagcttcagcgacttttggatgagctgggtccgacaggcccctggcaaaggacttgaatgggtcgccacaatcagccaggccggcagcgagaaggactacgtggactctgtgaagggcagattcaccatcagccgggacaacgccaagaagtccctgtacctccagatgaacagcctgagagccgaggacaccgccgtgtactattgtgcctctggcgtgtacagcttcgactacagaggccagggcaccctggtcacagtctcttctggtaccggcggaggcggatctggcggcggaggtagcggtggcggaggatctgaattcgaccacatcgtgctgacccagagccctagcagcctgtctgccagcctgggcgacagagtgaccatcagctgtagagccagccaggacatcagcacctacctgaactggtatcagcagaaacccgacggcaccgtgaagctgctgatcttctacaccagcagactgcacgccggggtgcccagcagattttctggcagcggctctggcacccaccacagcctgaccatctccaacctggaacaggaagatattgctacctacttctgtcagcaaggcaacagcctgcccttcaccttcggcagcggcaccaagctggaaatcaagagactcgaggacctgaagaacgtgttcccacctgaggtggccgtgttcgagcctagcgaggccgagatcagccacacccagaaagccaccctcgtgtgcctggctaccggcttctaccccgaccatgtggaactgtcttggtgggtcaacggcaaagaggtgcacagcggcgtgtgtaccgacccccagccactgaaagaacagcccgccctgaacgacagccggtactgcctgagcagcagactgagagtgtccgccaccttctggcagaacccccggaaccacttcagatgccaggtgcagttctacggcctgagcgagaacgacgagtggacccaggacagagccaagcccgtgacccagatcgtgtctgccgaagcctggggcagagccgatgatgtgattaagatccactggcaggaaaagaagtccaacaccatcctgggcagccaggaaggcaacaccatgaagaccaacgacacctacatgaagttcagctggctgaccgtgcccgagaagtccctggacaaagaacacagatgcatcgtgcggcacgaaaacaacaagaacggcgtggaccaggaaatcatcttcccacccatcaagaccgatgtgattacaatggaccccaaggacaactgctccaaggacgccaacgataccctgctgctccagctgaccaacaccagcgcctactacatgtacttgttgctgctgctgaagtccgtggtgtacttcgccatcatcacatgctgcctgctgatggctatggtcaagcggaaggacagccggggaagggccaagcgatctggatctggagcaacaaacttctcactactcaaacaagcaggtgacgtggaggagaatcccgggcctactagtatggactggatttggcgcatccttttccttgtcggcgctgctaccggcgcgcattccgggccccagctccagctgcaagagtctggacctggcctggtcaagcctagcgagacactgagcctgacctgtaccgtgtccggcgatagcatcagcagcggcgattactactggggctggatcagacagcctcctggcaaaggactggaatggatcggccacatctactacagcggcgtgacctactacaaccccagcctgaagtccagagtgaccatcagcgtggacaccagccggaaccagttctccctgaagctgtctagcgtgacagccgccgataccgccgtgtactactgcaccagagaggacagcagcaactggcggagtagaggccagggaacactggtcacagttagctctggatccggcggaggcggaagtggaggcggaggatctggcggcggaggctctttcgaacaggtgcagctgaaagagagcggccctgagctggaaaagcctggggccagcgtgaagattagctgcaaggccagcggctacagcttcaccgcctacagcatgaactgggtcaagcagaacaacggcatgagcctggaatggatcggcagcatcgacccctactacggcgacaccaaatacgcccagaagttcaagggcaaggccaccctgaccgtggataaggccagcagcaccgcctacctccagctgaagtctctgaccagcgaggacagcgccgtgtactactgcgccagacggatgattaccaccggcgactggtacttcgacgtgtggggagccggaaccaccgtgacagtgtctagcacgcgtatccagaaccctgatcctgccgtgtaccagctgcgggatagcaagagcagcgacaagagcgtgtgtctgttcaccgacttcgacagccagaccaacgtgtcccagagcaaggactccgacgtgtacatcaccgataagtgcgtgctggacatgcggagcatggacttcaagagcaactccgccgtggcctggtccaacaagtccgatttcgcctgcgccaacgccttcaacaacagcattatccccgaggacacattcttcccaagccccgagagcagcgactccaccgaccacgtgaagcccaaagagacagagaacaccaagcagcccagcaagagctgccacaagcccaaggccatcgtgcacaccgagaaagtgaacatgatgagcctgaccgtgctgggcctgcggatgctgttcgccaaaaccgtggccgtgaacttcctgctgaccgccaagctgttcttcctcctcaccgcc

SEQ ID NO: 6676 - DNA, 2997 bp, synthetic construct; identical to SEQ ID NO: 6675
  source 1..2997: mol_type = other DNA

SEQ ID NO: 6677 - DNA, 2997 bp, synthetic construct
  source 1..2997: mol_type = other DNA
atggccttaccagtgaccgccttgctcctgccgctggccttgctgctccacgccgccaggccggaagtgcagctggttgaatctggcggaggactggttcagcctggcggatctctgagactgtcttgtgccgccagcggcttcagcttcagcgacttttggatgagctgggtccgacaggcccctggcaaaggacttgaatgggtcgccacaatcagccaggccggcagcgagaaggactacgtggactctgtgaagggcagattcaccatcagccgggacaacgccaagaagtccctgtacctccagatgaacagcctgagagccgaggacaccgccgtgtactattgtgcctctggcgtgtacagcttcgactacagaggccagggcaccctggtcacagtctcttctggtaccggcggaggcggatctggcggcggaggtagcggtggcggaggatctgaattcgacgagatcgtgctgacacagagccctgccaccctgtctctgagccctggcgaaagagccaccctgagctgtagagccagccagagcgtgtccagctacctggcctggtatcagcagaagcccggccaggctccccggctgctgatctacgatgccagcaatagagccaccggcatccccgccagattttccggctctggcagcggcaccgacttcaccctgaccatcagctccctggaacccgaggacttcgccgtgtactactgccagcagcggagcaactggcccatcacattcggccagggcacccggctggaaatcaaactcgaggacctgaagaacgtgttcccacctgaggtggccgtgttcgagcctagcgaggccgagatcagccacacccagaaagccaccctcgtgtgcctggctaccggcttctaccccgaccatgtggaactgtcttggtgggtcaacggcaaagaggtgcacagcggcgtgtgtaccgacccccagccactgaaagaacagcccgccctgaacgacagccggtactgcctgagcagcagactgagagtgtccgccaccttctggcagaacccccggaaccacttcagatgccaggtgcagttctacggcctgagcgagaacgacgagtggacccaggacagagccaagcccgtgacccagatcgtgtctgccgaagcctggggcagagccgatgatgtgattaagatccactggcaggaaaagaagtccaacaccatcctgggcagccaggaaggcaacaccatgaagaccaacgacacctacatgaagttcagctggctgaccgtgcccgagaagtccctggacaaagaacacagatgcatcgtgcggcacgaaaacaacaagaacggcgtggaccaggaaatcatcttcccacccatcaagaccgatgtgattacaatggaccccaaggacaactgctccaaggacgccaacgataccctgctgctccagctgaccaacaccagcgcctactacatgtacttgttgctgctgctgaagtccgtggtgtacttcgccatcatcacatgctgcctgctgatggctatggtcaagcggaaggacagccggggaagggccaagcgatctggatctggagcaacaaacttctcactactcaaacaagcaggtgacgtggaggagaatcccgggcctactagtatggactggatttggcgcatccttttccttgtcggcgctgctaccggcgcgcattccgggccccagctccagctgcaagagtctggacctggcctggtcaagcctagcgagacactgagcctgacctgtaccgtgtccggcgatagcatcagcagcggcgattactactggggctggatcagacagcctcctggcaaaggactggaatggatcggccacatctactacagcggcgtgacctactacaaccccagcctgaagtccagagtgaccatcagcgtggacaccagccggaaccagttctccctgaagctgtctagcgtgacagccgccgataccgccgtgtactactgcaccagagaggacagcagcaactggcggagtagaggccagggaacactggtcacagttagctctggatccggcggaggcggaagtggaggcggaggatctggcggcggaggctctttcgaagaagtgcagctggtggaatcaggcggcggactggtgcagcctggcagaagcctgagactgagctgtgccgccagcggcttcaccttcaacgactacgccatgcactgggtgcgccaggcccctggaaaaggactggaatgggtgtccacaatcagctggaacagcggcagcatcggctacgccgatagcgtgaagggccggttcaccatcagccgggacaacgccaagaagtccctgtacctccagatgaacagcctgcgggccgaggacacagccctgtactattgcgccaaggacatccagtacggcaactactactacggcatggacgtgtggggccagggaaccaccgtgaccgtgtcatctacgcgtatccagaaccctgatcctgccgtgtaccagctgcgggatagcaagagcagcgacaagagcgtgtgtctgttcaccgacttcgacagccagaccaacgtgtcccagagcaaggactccgacgtgtacatcaccgataagtgcgtgctggacatgcggagcatggacttcaagagcaactccgccgtggcctggtccaacaagtccgatttcgcctgcgccaacgccttcaacaacagcattatccccgaggacacattcttcccaagccccgagagcagcgactccaccgaccacgtgaagcccaaagagacagagaacaccaagcagcccagcaagagctgccacaagcccaaggccatcgtgcacaccgagaaagtgaacatgatgagcctgaccgtgctgggcctgcggatgctgttcgccaaaaccgtggccgtgaacttcctgctgaccgccaagctgttcttcctcctcaccgcc

SEQ ID NO: 6678 - DNA, 3003 bp, synthetic construct
  source 1..3003: mol_type = other DNA
atggccttaccagtgaccgccttgctcctgccgctggccttgctgctccacgccgccaggccggaagtgcagctggttgaatctggcggaggactggttcagcctggcggatctctgagactgtcttgtgccgccagcggcttcagcttcagcgacttttggatgagctgggtccgacaggcccctggcaaaggacttgaatgggtcgccacaatcagccaggccggcagcgagaaggactacgtggactctgtgaagggcagattcaccatcagccgggacaacgccaagaagtccctgtacctccagatgaacagcctgagagccgaggacaccgccgtgtactattgtgcctctggcgtgtacagcttcgactacagaggccagggcaccctggtcacagtctcttctggtaccggcggaggcggatctggcggcggaggtagcggtggcggaggatctgaattcgacatcgtgatgacccagacccccctgagcctgcctgtgacacctggcgagcctgccagcatctcctgcagaagcagcaagagcctgctgcacagcaacggcatcacctacctgtactggtatctgcagaaacccggccagagcccccaactgctgatctaccagatgagcaacctggtgtccggcgtgcccgacagattttctggcagcggctccggcaccgacttcaccctgaagatcagccgggtggaagccgaggacgtgggcgtgtactactgcgcccagaacctggaactgccctacacctttggcggcggaacaaaggtggaaatcaagcggctcgaggacctgaagaacgtgttcccacctgaggtggccgtgttcgagcctagcgaggccgagatcagccacacccagaaagccaccctcgtgtgcctggctaccggcttctaccccgaccatgtggaactgtcttggtgggtcaacggcaaagaggtgcacagcggcgtgtgtaccgacccccagccactgaaagaacagcccgccctgaacgacagccggtactgcctgagcagcagactgagagtgtccgccaccttctggcagaacccccggaaccacttcagatgccaggtgcagttctacggcctgagcgagaacgacgagtggacccaggacagagccaagcccgtgacccagatcgtgtctgccgaagcctggggcagagccgatgatgtgattaagatccactggcaggaaaagaagtccaacaccatcctgggcagccaggaaggcaacaccatgaagaccaacgacacctacatgaagttcagctggctgaccgtgcccgagaagtccctggacaaagaacacagatgcatcgtgcggcacgaaaacaacaagaacggcgtggaccaggaaatcatcttcccacccatcaagaccgatgtgattacaatggaccccaaggacaactgctccaaggacgccaacgataccctgctgctccagctgaccaacaccagcgcctactacatgtacttgttgctgctgctgaagtccgtggtgtacttcgccatcatcacatgctgcctgctgatggctatggtcaagcggaaggacagccggggaagggccaagcgatctggatctggagcaacaaacttctcactactcaaacaagcaggtgacgtggaggagaatcccgggcctactagtatggactggatttggcgcatccttttccttgtcggcgctgctaccggcgcgcattccgggccccagctccagctgcaagagtctggacctggcctggtcaagcctagcgagacactgagcctgacctgtaccgtgtccggcgatagcatcagcagcggcgattactactggggctggatcagacagcctcctggcaaaggactggaatggatcggccacatctactacagcggcgtgacctactacaaccccagcctgaagtccagagtgaccatcagcgtggacaccagccggaaccagttctccctgaagctgtctagcgtgacagccgccgataccgccgtgtactactgcaccagagaggacagcagcaactggcggagtagaggccagggaacactggtcacagttagctctggatccggcggaggcggaagtggaggcggaggatctggcggcggaggctctttcgaacaggtgcaactggtgcagagcggagccgaagtgaaaaagcccggcagcagcgtgaaggtgtcctgcaaggccagcggctacgccttcagctactcctggatcaactgggtgcgccaggcccctggacagggcctggaatggatgggcagaatcttccccggcgacggcgacaccgactacaacggcaagttcaagggcagagtgaccatcaccgccgacaagagcaccagcaccgcctacatggaactgagcagcctgcggagcgaggataccgccgtgtactattgtgccagaaacgtgttcgacggctactggctggtgtactggggccagggaacacttgtgaccgtgtccagcacgcgtatccagaaccctgatcctgccgtgtaccagctgcgggatagcaagagcagcgacaagagcgtgtgtctgttcaccgacttcgacagccagaccaacgtgtcccagagcaaggactccgacgtgtacatcaccgataagtgcgtgctggacatgcggagcatggacttcaagagcaactccgccgtggcctggtccaacaagtccgatttcgcctgcgccaacgccttcaacaacagcattatccccgaggacacattcttcccaagccccgagagcagcgactccaccgaccacgtgaagcccaaagagacagagaacaccaagcagcccagcaagagctgccacaagcccaaggccatcgtgcacaccgagaaagtgaacatgatgagcctgaccgtgctgggcctgcggatgctgttcgccaaaaccgtggccgtgaacttcctgctgaccgccaagctgttcttcctcctcaccgcc

SEQ ID NO: 6679 - DNA, 3006 bp, synthetic construct
  source 1..3006: mol_type = other DNA
atggccttaccagtgaccgccttgctcctgccgctggccttgctgctccacgccgccaggccggaagtgcagctggttgaatctggcggaggactggttcagcctggcggatctctgagactgtcttgtgccgccagcggcttcagcttcagcgacttttggatgagctgggtccgacaggcccctggcaaaggacttgaatgggtcgccacaatcagccaggccggcagcgagaaggactacgtggactctgtgaagggcagattcaccatcagccgggacaacgccaagaagtccctgtacctccagatgaacagcctgagagccgaggacaccgccgtgtactattgtgcctctggcgtgtacagcttcgactacagaggccagggcaccctggtcacagtctcttctggtaccggcggaggcggatctggcggcggaggtagcggtggcggaggatctgaattcgacatccagatgacccagagccccagcagcctgtctgccagcgtgggcgacagagtgaccatcacctgtcggagcagccagagcatcgtgcactccgtgggcaacaccttcctggaatggtatcagcagaagcccggcaaggcccccaagctgctgatctacaaggtgtccaacagattcagcggcgtgcccagcaggtttagcggctctggcagcggcaccgacttcaccctgaccatctctagcctccagcccgaggacttcgccacctactactgttttcaaggcagccagttcccctacaccttcggccagggaacaaaggtggaaatcaagcggctcgaggacctgaagaacgtgttcccacctgaggtggccgtgttcgagcctagcgaggccgagatcagccacacccagaaagccaccctcgtgtgcctggctaccggcttctaccccgaccatgtggaactgtcttggtgggtcaacggcaaagaggtgcacagcggcgtgtgtaccgacccccagccactgaaagaacagcccgccctgaacgacagccggtactgcctgagcagcagactgagagtgtccgccaccttctggcagaacccccggaaccacttcagatgccaggtgcagttctacggcctgagcgagaacgacgagtggacccaggacagagccaagcccgtgacccagatcgtgtctgccgaagcctggggcagagccgatgatgtgattaagatccactggcaggaaaagaagtccaacaccatcctgggcagccaggaaggcaacaccatgaagaccaacgacacctacatgaagttcagctggctgaccgtgcccgagaagtccctggacaaagaacacagatgcatcgtgcggcacgaaaacaacaagaacggcgtggaccaggaaatcatcttcccacccatcaagaccgatgtgattacaatggaccccaaggacaactgctccaaggacgccaacgataccctgctgctccagctgaccaacaccagcgcctactacatgtacttgttgctgctgctgaagtccgtggtgtacttcgccatcatcacatgctgcctgctgatggctatggtcaagcggaaggacagccggggaagggccaagcgatctggatctggagcaacaaacttctcactactcaaacaagcaggtgacgtggaggagaatcccgggcctactagtatggactggatttggcgcatccttttccttgtcggcgctgctaccggcgcgcattccgggccccagctccagctgcaagagtctggacctggcctggtcaagcctagcgagacactgagcctgacctgtaccgtgtccggcgatagcatcagcagcggcgattactactggggctggatcagacagcctcctggcaaaggactggaatggatcggccacatctactacagcggcgtgacctactacaaccccagcctgaagtccagagtgaccatcagcgtggacaccagccggaaccagttctccctgaagctgtctagcgtgacagccgccgataccgccgtgtactactgcaccagagaggacagcagcaactggcggagtagaggccagggaacactggtcacagttagctctggatccggcggaggcggaagtggaggcggaggatctggcggcggaggctctttcgaagaagtgcaactggtggaaagcggaggcggcctggtgcagcctggcggatctctgagactgagctgtgccgccagcggctacgagttcagccggtcctggatgaactgggtgcgccaggcccctggcaagggactggaatgggtgggaagaatctaccccggcgacggcgacaccaactacagcggcaagttcaagggccggttcaccatcagcgccgacaccagcaagaacaccgcctacctccagatgaacagcctgcgggccgaggataccgccgtgtactactgtgccagagatggcagctcctgggactggtacttcgacgtgtggggacagggaacccttgtgaccgtgtccagcacgcgtatccagaaccctgatcctgccgtgtaccagctgcgggatagcaagagcagcgacaagagcgtgtgtctgttcaccgacttcgacagccagaccaacgtgtcccagagcaaggactccgacgtgtacatcaccgataagtgcgtgctggacatgcggagcatggacttcaagagcaactccgccgtggcctggtccaacaagtccgatttcgcctgcgccaacgccttcaacaacagcattatccccgaggacacattcttcccaagccccgagagcagcgactccaccgaccacgtgaagcccaaagagacagagaacaccaagcagcccagcaagagctgccacaagcccaaggccatcgtgcacaccgagaaagtgaacatgatgagcctgaccgtgctgggcctgcggatgctgttcgccaaaaccgtggccgtgaacttcctgctgaccgccaagctgttcttcctcctcaccgcc

SEQ ID NO: 6680 - DNA, 3000 bp, synthetic construct
  source 1..3000: mol_type = other DNA
atggccttaccagtgaccgccttgctcctgccgctggccttgctgctccacgccgccaggccggaagtgcagctggttgaatctggcggaggactggttcagcctggcggatctctgagactgtcttgtgccgccagcggcttcagcttcagcgacttttggatgagctgggtccgacaggcccctggcaaaggacttgaatgggtcgccacaatcagccaggccggcagcgagaaggactacgtggactctgtgaagggcagattcaccatcagccgggacaacgccaagaagtccctgtacctccagatgaacagcctgagagccgaggacaccgccgtgtactattgtgcctctggcgtgtacagcttcgactacagaggccagggcaccctggtcacagtctcttctggtaccggcggaggcggatctggcggcggaggtagcggtggcggaggatctgaattcgacatccagatgacccagagccccagcagcctgtctgccagcgtgggcgacagagtgaccatcacctgtagagccagccagaccatctggtcctacctgaactggtatcagcagaggcccggcaaggcccccaacctgctgatctatgccgccagctctctccagagcggcgtgcccagcagattttccggcagaggcagcggcaccgacttcaccctgaccatcagttccttgcaggccgaggacttcgccacctactactgccagcagagctacagcatcccccagattttcggccagggcaccaagctggaaatcaagctcgaggacctgaagaacgtgttcccacctgaggtggccgtgttcgagcctagcgaggccgagatcagccacacccagaaagccaccctcgtgtgcctggctaccggcttctaccccgaccatgtggaactgtcttggtgggtcaacggcaaagaggtgcacagcggcgtgtgtaccgacccccagccactgaaagaacagcccgccctgaacgacagccggtactgcctgagcagcagactgagagtgtccgccaccttctggcagaacccccggaaccacttcagatgccaggtgcagttctacggcctgagcgagaacgacgagtggacccaggacagagccaagcccgtgacccagatcgtgtctgccgaagcctggggcagagccgatgatgtgattaagatccactggcaggaaaagaagtccaacaccatcctgggcagccaggaaggcaacaccatgaagaccaacgacacctacatgaagttcagctggctgaccgtgcccgagaagtccctggacaaagaacacagatgcatcgtgcggcacgaaaacaacaagaacggcgtggaccaggaaatcatcttcccacccatcaagaccgatgtgattacaatggaccccaaggacaactgctccaaggacgccaacgataccctgctgctccagctgaccaacaccagcgcctactacatgtacttgttgctgctgctgaagtccgtggtgtacttcgccatcatcacatgctgcctgctgatggctatggtcaagcggaaggacagccggggaagggccaagcgatctggatctggagcaacaaacttctcactactcaaacaagcaggtgacgtggaggagaatcccgggcctactagtatggactggatttggcgcatccttttccttgtcggcgctgctaccggcgcgcattccgggccccagctccagctgcaagagtctggacctggcctggtcaagcctagcgagacactgagcctgacctgtaccgtgtccggcgatagcatcagcagcggcgattactactggggctggatcagacagcctcctggcaaaggactggaatggatcggccacatctactacagcggcgtgacctactacaaccccagcctgaagtccagagtgaccatcagcgtggacaccagccggaaccagttctccctgaagctgtctagcgtgacagccgccgataccgccgtgtactactgcaccagagaggacagcagcaactggcggagtagaggccagggaacactggtcacagttagctctggatccggcggaggcggaagtggaggcggaggatctggcggcggaggctctttcgaacaggtgcagctccagcagtctggacccggcctcgtgaagcctagccagacactgagcctgacctgcgccatcagcggcgatagcgtgtccagcaatagcgccgcctggaactggatcagacagtccccctctcggggcctggaatggctgggccggacctactaccgcagcaagtggtacaacgactacgccgtgtccgtgaagtcccggatcaccatcaaccccgacaccagcaagaaccagttctccttgcaactgaacagcgtgacccccgaggacaccgccgtgtactactgcgccagagaagtgaccggcgacctggaagatgccttcgacatctggggccagggaacaatggtcacagtgtccagcacgcgtatccagaaccctgatcctgccgtgtaccagctgcgggatagcaagagcagcgacaagagcgtgtgtctgttcaccgacttcgacagccagaccaacgtgtcccagagcaaggactccgacgtgtacatcaccgataagtgcgtgctggacatgcggagcatggacttcaagagcaactccgccgtggcctggtccaacaagtccgatttcgcctgcgccaacgccttcaacaacagcattatccccgaggacacattcttcccaagccccgagagcagcgactccaccgaccacgtgaagcccaaagagacagagaacaccaagcagcccagcaagagctgccacaagcccaaggccatcgtgcacaccgagaaagtgaacatgatgagcctgaccgtgctgggcctgcggatgctgttcgccaaaaccgtggccgtgaacttcctgctgaccgccaagctgttcttcctcctcaccgcc

SEQ ID NO: 6681 - DNA, 2979 bp, synthetic construct
  source 1..2979: mol_type = other DNA
atggccttaccagtgaccgccttgctcctgccgctggccttgctgctccacgccgccaggccggaagtgcagctggttgaatctggcggaggactggttcagcctggcggatctctgagactgtcttgtgccgccagcggcttcagcttcagcgacttttggatgagctgggtccgacaggcccctggcaaaggacttgaatgggtcgccacaatcagccaggccggcagcgagaaggactacgtggactctgtgaagggcagattcaccatcagccgggacaacgccaagaagtccctgtacctccagatgaacagcctgagagccgaggacaccgccgtgtactattgtgcctctggcgtgtacagcttcgactacagaggccagggcaccctggtcacagtctcttctggtaccggcggaggcggatctggcggcggaggtagcggtggcggaggatctgaattcgacatccagatgacccagagccccgccaccatcgagaacacaagcctgtctgccagcgtgggcgacagagtgaccatcacctgtagagccagccagggcatcagctcttggctgacctggtatcagcagaagcccgagaaggcccccaagagcctgatctacgccgccagctctctgcagtctggcgtgcccagcagattttccggcagcggctctggcaccgacttcaccctgacaatcagcagcctgcagcccgaggacttcgccacctactactgccagcagtacgacagctaccccatcaccttcggccagggcacccggctggaaatcaagctcgaggacctgaagaacgtgttcccacctgaggtggccgtgttcgagcctagcgaggccgagatcagccacacccagaaagccaccctcgtgtgcctggctaccggcttctaccccgaccatgtggaactgtcttggtgggtcaacggcaaagaggtgcacagcggcgtgtgtaccgacccccagccactgaaagaacagcccgccctgaacgacagccggtactgcctgagcagcagactgagagtgtccgccaccttctggcagaacccccggaaccacttcagatgccaggtgcagttctacggcctgagcgagaacgacgagtggacccaggacagagccaagcccgtgacccagatcgtgtctgccgaagcctggggcagagccgatgatgtgattaagatccactggcaggaaaagaagtccaacaccatcctgggcagccaggaaggcaacaccatgaagaccaacgacacctacatgaagttcagctggctgaccgtgcccgagaagtccctggacaaagaacacagatgcatcgtgcggcacgaaaacaacaagaacggcgtggaccaggaaatcatcttcccacccatcaagaccgatgtgattacaatggaccccaaggacaactgctccaaggacgccaacgataccctgctgctccagctgaccaacaccagcgcctactacatgtacttgttgctgctgctgaagtccgtggtgtacttcgccatcatcacatgctgcctgctgatggctatggtcaagcggaaggacagccggggaagggccaagcgatctggatctggagcaacaaacttctcactactcaaacaagcaggtgacgtggaggagaatcccgggcctactagtatggactggatttggcgcatccttttccttgtcggcgctgctaccggcgcgcattccgggccccagctccagctgcaagagtctggacctggcctggtcaagcctagcgagacactgagcctgacctgtaccgtgtccggcgatagcatcagcagcggcgattactactggggctggatcagacagcctcctggcaaaggactggaatggatcggccacatctactacagcggcgtgacctactacaaccccagcctgaagtccagagtgaccatcagcgtggacaccagccggaaccagttctccctgaagctgtctagcgtgacagccgccgataccgccgtgtactactgcaccagagaggacagcagcaactggcggagtagaggccagggaacactggtcacagttagctctggatccggcggaggcggaagtggaggcggaggatctggcggcggaggctctttcgaacaggtgcaactgcagcagtggggagccggactgctgaagcctagcgagacactgagcctgacctgcgccgtgtacggcggcagcttcagcgcctactattggagctggatcagacagccccctggcaagggcctggaatggatcggcgacatcaatcacggcggaggcaccaactacaaccccagcctgaagtcccgcgtgaccatctccgtggacaccagcaagaaccagttctccctgaagctgaacagcgtgacagccgccgacacagccgtgtactactgtgccagcctgaccgcctattggggccagggatctcttgtgaccgtgtccagcacgcgtatccagaaccctgatcctgccgtgtaccagctgcgggatagcaagagcagcgacaagagcgtgtgtctgttcaccgacttcgacagccagaccaacgtgtcccagagcaaggactccgacgtgtacatcaccgataagtgcgtgctggacatgcggagcatggacttcaagagcaactccgccgtggcctggtccaacaagtccgatttcgcctgcgccaacgccttcaacaacagcattatccccgaggacacattcttcccaagccccgagagcagcgactccaccgaccacgtgaagcccaaagagacagagaacaccaagcagcccagcaagagctgccacaagcccaaggccatcgtgcacaccgagaaagtgaacatgatgagcctgaccgtgctgggcctgcggatgctgttcgccaaaaccgtggccgtgaacttcctgctgaccgccaagctgttcttcctcctcaccgcc

SEQ ID NO: 6682 - DNA, 2994 bp, synthetic construct
  source 1..2994: mol_type = other DNA
atggccttaccagtgaccgccttgctcctgccgctggccttgctgctccacgccgccaggccggaagtgcagctggttgaatctggcggaggactggttcagcctggcggatctctgagactgtcttgtgccgccagcggcttcagcttcagcgacttttggatgagctgggtccgacaggcccctggcaaaggacttgaatgggtcgccacaatcagccaggccggcagcgagaaggactacgtggactctgtgaagggcagattcaccatcagccgggacaacgccaagaagtccctgtacctccagatgaacagcctgagagccgaggacaccgccgtgtactattgtgcctctggcgtgtacagcttcgactacagaggccagggcaccctggtcacagtctcttctggtaccggcggaggcggatctggcggcggaggtagcggtggcggaggatctgaattcgacgagatcgtgctgacccagagccctgatagcctggccgtgtctctgggcgagagagccaccatcaactgcaaggccagccagagcgtggacttcgacggcgacagctacctgaactggtatcagcagaagcccggccagccccccaaggtgctgatctatgccgccagcacactgcagagcggcgtgcccagcagattttctggcagcggctccggcaccgacttcaccctgaccatcaacagcctggaagccgaggacgccgccacctactactgccagcagagcaacgaggacccctggacctttggcggcggaacaaaggtggaaatcaagctcgaggacctgaagaacgtgttcccacctgaggtggccgtgttcgagcctagcgaggccgagatcagccacacccagaaagccaccctcgtgtgcctggctaccggcttctaccccgaccatgtggaactgtcttggtgggtcaacggcaaagaggtgcacagcggcgtgtgtaccgacccccagccactgaaagaacagcccgccctgaacgacagccggtactgcctgagcagcagactgagagtgtccgccaccttctggcagaacccccggaaccacttcagatgccaggtgcagttctacggcctgagcgagaacgacgagtggacccaggacagagccaagcccgtgacccagatcgtgtctgccgaagcctggggcagagccgatgatgtgattaagatccactggcaggaaaagaagtccaacaccatcctgggcagccaggaaggcaacaccatgaagaccaacgacacctacatgaagttcagctggctgaccgtgcccgagaagtccctggacaaagaacacagatgcatcgtgcggcacgaaaacaacaagaacggcgtggaccaggaaatcatcttcccacccatcaagaccgatgtgattacaatggaccccaaggacaactgctccaaggacgccaacgataccctgctgctccagctgaccaacaccagcgcctactacatgtacttgttgctgctgctgaagtccgtggtgtacttcgccatcatcacatgctgcctgctgatggctatggtcaagcggaaggacagccggggaagggccaagcgatctggatctggagcaacaaacttctcactactcaaacaagcaggtgacgtggaggagaatcccgggcctactagtatggactggatttggcgcatccttttccttgtcggcgctgctaccggcgcgcattccgggccccagctccagctgcaagagtctggacctggcctggtcaagcctagcgagacactgagcctgacctgtaccgtgtccggcgatagcatcagcagcggcgattactactggggctggatcagacagcctcctggcaaaggactggaatggatcggccacatctactacagcggcgtgacctactacaaccccagcctgaagtccagagtgaccatcagcgtggacaccagccggaaccagttctccctgaagctgtctagcgtgacagccgccgataccgccgtgtactactgcaccagagaggacagcagcaactggcggagtagaggccagggaacactggtcacagttagctctggatccggcggaggcggaagtggaggcggaggatctggcggcggaggctctttcgaacaggtgcaactggtgcagtccggcgctgaagtgaagaaacctggggccagcgtgaaggtgtcctgcaaggtgtccggctacacctttaccgactactacattacctgggtgcgccaggcccctggacaggccctggaatggatgggctggatctaccccggcagcggcaacaccaagtacagccagaagttccagggcagattcgtgttcagcgtggacaccagcgccagcaccgcctacctgcaactgtctagcctgaaggccgaagataccgccgtgtactactgcgccaactacggcaactattggttcgcctattggggccagggaacccttgtgaccgtgtcctctacgcgtatccagaaccctgatcctgccgtgtaccagctgcgggatagcaagagcagcgacaagagcgtgtgtctgttcaccgacttcgacagccagaccaacgtgtcccagagcaaggactccgacgtgtacatcaccgataagtgcgtgctggacatgcggagcatggacttcaagagcaactccgccgtggcctggtccaacaagtccgatttcgcctgcgccaacgccttcaacaacagcattatccccgaggacacattcttcccaagccccgagagcagcgactccaccgaccacgtgaagcccaaagagacagagaacaccaagcagcccagcaagagctgccacaagcccaaggccatcgtgcacaccgagaaagtgaacatgatgagcctgaccgtgctgggcctgcggatgctgttcgccaaaaccgtggccgtgaacttcctgctgaccgccaagctgttcttcctcctcaccgcc

SEQ ID NO: 6683 - DNA, 2985 bp, synthetic construct
  source 1..2985: mol_type = other DNA
atggccttaccagtgaccgccttgctcctgccgctggccttgctgctccacgccgccaggccggaagtgcagctggttgaatctggcggaggactggttcagcctggcggatctctgagactgtcttgtgccgccagcggcttcagcttcagcgacttttggatgagctgggtccgacaggcccctggcaaaggacttgaatgggtcgccacaatcagccaggccggcagcgagaaggactacgtggactctgtgaagggcagattcaccatcagccgggacaacgccaagaagtccctgtacctccagatgaacagcctgagagccgaggacaccgccgtgtactattgtgcctctggcgtgtacagcttcgactacagaggccagggcaccctggtcacagtctcttctggtaccggcggaggcggatctggcggcggaggtagcggtggcggaggatctgaattcgacatccagatgacccagagccccagcagcctgtctgccagcgtgggcgacagagtgaccatcacctgtagagccagccagggcatcagctcttggctggcctggtatcagcagaagcccgagaaggcccccaagagcctgatctacgccgcctctagtctccagagcggcgtgcccagcagattttctggcagcggctccggcaccgacttcaccctgacaatcagctccctccagcccgaggacttcgccacctactactgccagcagtacaacagctaccctcccacctttggcggaggcaccaaggtggaaatcaagctcgaggacctgaagaacgtgttcccacctgaggtggccgtgttcgagcctagcgaggccgagatcagccacacccagaaagccaccctcgtgtgcctggctaccggcttctaccccgaccatgtggaactgtcttggtgggtcaacggcaaagaggtgcacagcggcgtgtgtaccgacccccagccactgaaagaacagcccgccctgaacgacagccggtactgcctgagcagcagactgagagtgtccgccaccttctggcagaacccccggaaccacttcagatgccaggtgcagttctacggcctgagcgagaacgacgagtggacccaggacagagccaagcccgtgacccagatcgtgtctgccgaagcctggggcagagccgatgatgtgattaagatccactggcaggaaaagaagtccaacaccatcctgggcagccaggaaggcaacaccatgaagaccaacgacacctacatgaagttcagctggctgaccgtgcccgagaagtccctggacaaagaacacagatgcatcgtgcggcacgaaaacaacaagaacggcgtggaccaggaaatcatcttcccacccatcaagaccgatgtgattacaatggaccccaaggacaactgctccaaggacgccaacgataccctgctgctccagctgaccaacaccagcgcctactacatgtacttgttgctgctgctgaagtccgtggtgtacttcgccatcatcacatgctgcctgctgatggctatggtcaagcggaaggacagccggggaagggccaagcgatctggatctggagcaacaaacttctcactactcaaacaagcaggtgacgtggaggagaatcccgggcctactagtatggactggatttggcgcatccttttccttgtcggcgctgctaccggcgcgcattccgggccccagctccagctgcaagagtctggacctggcctggtcaagcctagcgagacactgagcctgacctgtaccgtgtccggcgatagcatcagcagcggcgattactactggggctggatcagacagcctcctggcaaaggactggaatggatcggccacatctactacagcggcgtgacctactacaaccccagcctgaagtccagagtgaccatcagcgtggacaccagccggaaccagttctccctgaagctgtctagcgtgacagccgccgataccgccgtgtactactgcaccagagaggacagcagcaactggcggagtagaggccagggaacactggtcacagttagctctggatccggcggaggcggaagtggaggcggaggatctggcggcggaggctctttcgaagaagtgcaactggtgcagtctggcggagggctggtgcatcctgggggaagcctgagactgagctgtgccggctctggcttcgccttcagcagcagcaccatgcactggatcagacaggcccctggcaagggcctggaatggatcagcctgatcggaagcggagggggcatctactacggcgacagcgtgaagggccggttcaccatcagccgggacaacgccaagaacagcctgtacctccagatgaactccctgcgggccgaggacatggccgtgtactattgtgtgcggggctacttcgactgggtggactacttcgattactggggccagggcaccctcgtgaccgtgtcatctacgcgtatccagaaccctgatcctgccgtgtaccagctgcgggatagcaagagcagcgacaagagcgtgtgtctgttcaccgacttcgacagccagaccaacgtgtcccagagcaaggactccgacgtgtacatcaccgataagtgcgtgctggacatgcggagcatggacttcaagagcaactccgccgtggcctggtccaacaagtccgatttcgcctgcgccaacgccttcaacaacagcattatccccgaggacacattcttcccaagccccgagagcagcgactccaccgaccacgtgaagcccaaagagacagagaacaccaagcagcccagcaagagctgccacaagcccaaggccatcgtgcacaccgagaaagtgaacatgatgagcctgaccgtgctgggcctgcggatgctgttcgccaaaaccgtggccgtgaacttcctgctgaccgccaagctgttcttcctcctcaccgcc

SEQ ID NO: 6684 - DNA, 3015 bp, synthetic construct
  source 1..3015: mol_type = other DNA
atggccttaccagtgaccgccttgctcctgccgctggccttgctgctccacgccgccaggccggaagtgcagctggttgaatctggcggaggactggttcagcctggcggatctctgagactgtcttgtgccgccagcggcttcagcttcagcgacttttggatgagctgggtccgacaggcccctggcaaaggacttgaatgggtcgccacaatcagccaggccggcagcgagaaggactacgtggactctgtgaagggcagattcaccatcagccgggacaacgccaagaagtccctgtacctccagatgaacagcctgagagccgaggacaccgccgtgtactattgtgcctctggcgtgtacagcttcgactacagaggccagggcaccctggtcacagtctcttctggtaccggcggaggcggatctggcggcggaggtagcggtggcggaggatctgaattcgacgacatcgtgatgacacagtcaccagatagcctcaccgtctccctgggggagcggaccaccattaattgtaaatccagccaaagcgtgctggactcaagcaagaacaagaatagcctcgcctggtatcagcagaagcccggtcagcctccaaagctgctgctttcttgggcctccaccagagagtccgggattcctgataggtttagtggttcaggctccggcacagattttactctgaccattgattctctccagccagaggattctgcaacttattactgccagcaaagcgcccactttcctataacttttggccagggaacccgacttgaaatcaagctcgaggacctgaagaacgtgttcccacctgaggtggccgtgttcgagcctagcgaggccgagatcagccacacccagaaagccaccctcgtgtgcctggctaccggcttctaccccgaccatgtggaactgtcttggtgggtcaacggcaaagaggtgcacagcggcgtgtgtaccgacccccagccactgaaagaacagcccgccctgaacgacagccggtactgcctgagcagcagactgagagtgtccgccaccttctggcagaacccccggaaccacttcagatgccaggtgcagttctacggcctgagcgagaacgacgagtggacccaggacagagccaagcccgtgacccagatcgtgtctgccgaagcctggggcagagccgatgatgtgattaagatccactggcaggaaaagaagtccaacaccatcctgggcagccaggaaggcaacaccatgaagaccaacgacacctacatgaagttcagctggctgaccgtgcccgagaagtccctggacaaagaacacagatgcatcgtgcggcacgaaaacaacaagaacggcgtggaccaggaaatcatcttcccacccatcaagaccgatgtgattacaatggaccccaaggacaactgctccaaggacgccaacgataccctgctgctccagctgaccaacaccagcgcctactacatgtacttgttgctgctgctgaagtccgtggtgtacttcgccatcatcacatgctgcctgctgatggctatggtcaagcggaaggacagccggggaagggccaagcgatctggatctggagcaacaaacttctcactactcaaacaagcaggtgacgtggaggagaatcccgggcctactagtatggactggatttggcgcatccttttccttgtcggcgctgctaccggcgcgcattccgggccccagctccagctgcaagagtctggacctggcctggtcaagcctagcgagacactgagcctgacctgtaccgtgtccggcgatagcatcagcagcggcgattactactggggctggatcagacagcctcctggcaaaggactggaatggatcggccacatctactacagcggcgtgacctactacaaccccagcctgaagtccagagtgaccatcagcgtggacaccagccggaaccagttctccctgaagctgtctagcgtgacagccgccgataccgccgtgtactactgcaccagagaggacagcagcaactggcggagtagaggccagggaacactggtcacagttagctctggatccggcggaggcggaagtggaggcggaggatctggcggcggaggctctttcgaacaggtgcagctggtgcagagcggtgccgaagtgaagaaaccaggtgcatccgttaaagtttcatgtaaggctagtggatataccttcaccaattacggaatgaactgggtgaaacaggcccctggccagggactgaagtggatggggtggattaacacctacaccggggagccgacttatgcagacgactttaaggggcgggtcacgatgacctccgacacctccaccagtaccgcctacctggagctgcacaaccttaggtcagacgataccgccgtgtattactgtgcccgatggtcttggtccgacggatactatgtctacttcgactattggggccaggggaccacagttaccgtgtcctctacgcgtatccagaaccctgatcctgccgtgtaccagctgcgggatagcaagagcagcgacaagagcgtgtgtctgttcaccgacttcgacagccagaccaacgtgtcccagagcaaggactccgacgtgtacatcaccgataagtgcgtgctggacatgcggagcatggacttcaagagcaactccgccgtggcctggtccaacaagtccgatttcgcctgcgccaacgccttcaacaacagcattatccccgaggacacattcttcccaagccccgagagcagcgactccaccgaccacgtgaagcccaaagagacagagaacaccaagcagcccagcaagagctgccacaagcccaaggccatcgtgcacaccgagaaagtgaacatgatgagcctgaccgtgctgggcctgcggatgctgttcgccaaaaccgtggccgtgaacttcctgctgaccgccaagctgttcttcctcctcaccgcc

SEQ ID NO: 6685 - DNA, 3003 bp, synthetic construct
  source 1..3003: mol_type = other DNA
atggccttaccagtgaccgccttgctcctgccgctggccttgctgctccacgccgccaggccggaagtgcagctggttgaatctggcggaggactggttcagcctggcggatctctgagactgtcttgtgccgccagcggcttcagcttcagcgacttttggatgagctgggtccgacaggcccctggcaaaggacttgaatgggtcgccacaatcagccaggccggcagcgagaaggactacgtggactctgtgaagggcagattcaccatcagccgggacaacgccaagaagtccctgtacctccagatgaacagcctgagagccgaggacaccgccgtgtactattgtgcctctggcgtgtacagcttcgactacagaggccagggcaccctggtcacagtctcttctggtaccggcggaggcggatctggcggcggaggtagcggtggcggaggatctgaattcgacgagatcgtgctgacacagagccctggaagcctggccgtgtctcctggcgagcgcgtgacaatgagctgcaagagcagccagagcgtgttcttcagcagctcccagaagaactacctggcctggtatcagcagatccccggccagagccccagactgctgatctactgggccagcaccagagaaagcggcgtgcccgatagattcaccggcagcggctctggcaccgacttcaccctgacaatcagcagcgtgcagcccgaggacctggctatctactactgccaccagtacctgagcagccggaccttcggccagggcaccaagctggaaatcaagagactcgaggacctgaagaacgtgttcccacctgaggtggccgtgttcgagcctagcgaggccgagatcagccacacccagaaagccaccctcgtgtgcctggctaccggcttctaccccgaccatgtggaactgtcttggtgggtcaacggcaaagaggtgcacagcggcgtgtgtaccgacccccagccactgaaagaacagcccgccctgaacgacagccggtactgcctgagcagcagactgagagtgtccgccaccttctggcagaacccccggaaccacttcagatgccaggtgcagttctacggcctgagcgagaacgacgagtggacccaggacagagccaagcccgtgacccagatcgtgtctgccgaagcctggggcagagccgatgatgtgattaagatccactggcaggaaaagaagtccaacaccatcctgggcagccaggaaggcaacaccatgaagaccaacgacacctacatgaagttcagctggctgaccgtgcccgagaagtccctggacaaagaacacagatgcatcgtgcggcacgaaaacaacaagaacggcgtggaccaggaaatcatcttcccacccatcaagaccgatgtgattacaatggaccccaaggacaactgctccaaggacgccaacgataccctgctgctccagctgaccaacaccagcgcctactacatgtacttgttgctgctgctgaagtccgtggtgtacttcgccatcatcacatgctgcctgctgatggctatggtcaagcggaaggacagccggggaagggccaagcgatctggatctggagcaacaaacttctcactactcaaacaagcaggtgacgtggaggagaatcccgggcctactagtatggactggatttggcgcatccttttccttgtcggcgctgctaccggcgcgcattccgggccccagctccagctgcaagagtctggacctggcctggtcaagcctagcgagacactgagcctgacctgtaccgtgtccggcgatagcatcagcagcggcgattactactggggctggatcagacagcctcctggcaaaggactggaatggatcggccacatctactacagcggcgtgacctactacaaccccagcctgaagtccagagtgaccatcagcgtggacaccagccggaaccagttctccctgaagctgtctagcgtgacagccgccgataccgccgtgtactactgcaccagagaggacagcagcaactggcggagtagaggccagggaacactggtcacagttagctctggatccggcggaggcggaagtggaggcggaggatctggcggcggaggctctttcgaacaggtgcaactgcagcagcctggcgctgaggtcgtgaagccaggcgcttccgtgaagatgtcctgcaaggccagcggctacaccttcaccagctactacatccactggatcaagcagacccctggacagggcctggaatgggtgggagtgatctaccccggcaacgacgacatcagctacaaccagaagttccagggcaaggccaccctgaccgccgacaagtctagcaccaccgcctacatgcaactgtccagcctgaccagcgaggacagcgccgtgtactactgcgccagagaagtgcggctgcggtacttcgatgtgtggggccagggaaccaccgtgaccgtgtcatctacgcgtatccagaaccctgatcctgccgtgtaccagctgcgggatagcaagagcagcgacaagagcgtgtgtctgttcaccgacttcgacagccagaccaacgtgtcccagagcaaggactccgacgtgtacatcaccgataagtgcgtgctggacatgcggagcatggacttcaagagcaactccgccgtggcctggtccaacaagtccgatttcgcctgcgccaacgccttcaacaacagcattatccccgaggacacattcttcccaagccccgagagcagcgactccaccgaccacgtgaagcccaaagagacagagaacaccaagcagcccagcaagagctgccacaagcccaaggccatcgtgcacaccgagaaagtgaacatgatgagcctgaccgtgctgggcctgcggatgctgttcgccaaaaccgtggccgtgaacttcctgctgaccgccaagctgttcttcctcctcaccgcc

SEQ ID NO: 6686 - DNA, 3015 bp, synthetic construct
  source 1..3015: mol_type = other DNA
atggccttaccagtgaccgccttgctcctgccgctggccttgctgctccacgccgccaggccggaagtgcagctggttgaatctggcggaggactggttcagcctggcggatctctgagactgtcttgtgccgccagcggcttcagcttcagcgacttttggatgagctgggtccgacaggcccctggcaaaggacttgaatgggtcgccacaatcagccaggccggcagcgagaaggactacgtggactctgtgaagggcagattcaccatcagccgggacaacgccaagaagtccctgtacctccagatgaacagcctgagagccgaggacaccgccgtgtactattgtgcctctggcgtgtacagcttcgactacagaggccagggcaccctggtcacagtctcttctggtaccggcggaggcggatctggcggcggaggtagcggtggcggaggatctgaattcgatgtgctgctgacccagagccctctgagcctgcctgtgacactgggacagcctgccagcatctcctgtcggagcagccagaccatcgtgcacagcaacggcaacacctacctggaatggttccagcagcggccaggccagagccccagactgctgatctaccaggtgtccaacagattcagcggcgtgcccgacagattctccggcagcggctctggcaccgacttcaccctgaagatcagccgggtggaagccgaggacgtgggcgtgtactactgttttcaaggcagccacgtgccccggacctttggcggaggaacaaaggtggaaatcaagagagccctcgaggacctgaagaacgtgttcccacctgaggtggccgtgttcgagcctagcgaggccgagatcagccacacccagaaagccaccctcgtgtgcctggctaccggcttctaccccgaccatgtggaactgtcttggtgggtcaacggcaaagaggtgcacagcggcgtgtgtaccgacccccagccactgaaagaacagcccgccctgaacgacagccggtactgcctgagcagcagactgagagtgtccgccaccttctggcagaacccccggaaccacttcagatgccaggtgcagttctacggcctgagcgagaacgacgagtggacccaggacagagccaagcccgtgacccagatcgtgtctgccgaagcctggggcagagccgatgatgtgattaagatccactggcaggaaaagaagtccaacaccatcctgggcagccaggaaggcaacaccatgaagaccaacgacacctacatgaagttcagctggctgaccgtgcccgagaagtccctggacaaagaacacagatgcatcgtgcggcacgaaaacaacaagaacggcgtggaccaggaaatcatcttcccacccatcaagaccgatgtgattacaatggaccccaaggacaactgctccaaggacgccaacgataccctgctgctccagctgaccaacaccagcgcctactacatgtacttgttgctgctgctgaagtccgtggtgtacttcgccatcatcacatgctgcctgctgatggctatggtcaagcggaaggacagccggggaagggccaagcgatctggatctggagcaacaaacttctcactactcaaacaagcaggtgacgtggaggagaatcccgggcctactagtatggactggatttggcgcatccttttccttgtcggcgctgctaccggcgcgcattccgggccccagctccagctgcaagagtctggacctggcctggtcaagcctagcgagacactgagcctgacctgtaccgtgtccggcgatagcatcagcagcggcgattactactggggctggatcagacagcctcctggcaaaggactggaatggatcggccacatctactacagcggcgtgacctactacaaccccagcctgaagtccagagtgaccatcagcgtggacaccagccggaaccagttctccctgaagctgtctagcgtgacagccgccgataccgccgtgtactactgcaccagagaggacagcagcaactggcggagtagaggccagggaacactggtcacagttagctctggatccggcggaggcggaagtggaggcggaggatctggcggcggaggctctttcgaacagatccaactggtgcagagcggcagcgagctgaagaaacctggggccagcgtgaaggtgtcctgcaaggccagcggctacacctttaccaactacggcatgaactgggtgcgccaggcccctggacagggcctgaaatggatgggctggatcaacaccaacaccggcgagcctaagtacgccgaagagttcaagggcagattcgccctgagcctggacaccagcgtgtccacagcctacctccagatcaacagcctgaaggccgaggataccgccgtgtacttctgcgccagaggctacggcaactacgccagaggggcttggctggcctattggggccagggaacactcgtgaccgtgtcctctacgcgtatccagaaccctgatcctgccgtgtaccagctgcgggatagcaagagcagcgacaagagcgtgtgtctgttcaccgacttcgacagccagaccaacgtgtcccagagcaaggactccgacgtgtacatcaccgataagtgcgtgctggacatgcggagcatggacttcaagagcaactccgccgtggcctggtccaacaagtccgatttcgcctgcgccaacgccttcaacaacagcattatccccgaggacacattcttcccaagccccgagagcagcgactccaccgaccacgtgaagcccaaagagacagagaacaccaagcagcccagcaagagctgccacaagcccaaggccatcgtgcacaccgagaaagtgaacatgatgagcctgaccgtgctgggcctgcggatgctgttcgccaaaaccgtggccgtgaacttcctgctgaccgccaagctgttcttcctcctcaccgcc

SEQ ID NO: 6687 - DNA, 2970 bp, synthetic construct
  source 1..2970: mol_type = other DNA
atggccttaccagtgaccgccttgctcctgccgctggccttgctgctccacgccgccaggccggaagtgcagctggttgaatctggcggaggactggttcagcctggcggatctctgagactgtcttgtgccgccagcggcttcagcttcagcgacttttggatgagctgggtccgacaggcccctggcaaaggacttgaatgggtcgccacaatcagccaggccggcagcgagaaggactacgtggactctgtgaagggcagattcaccatcagccgggacaacgccaagaagtccctgtacctccagatgaacagcctgagagccgaggacaccgccgtgtactattgtgcctctggcgtgtacagcttcgactacagaggccagggcaccctggtcacagtctcttctggtaccggcggaggcggatctggcggcggaggtagcggtggcggaggatctgaattcgacgagatcgtgctgacacagagccctgccacactctctctgagccctggcgaaagagccaccctgagctgtagcgccagcagcagcatcaactacatctactggctccagcagaagcccggccaggcccccagaatcctgatctacctgaccagcaacctggcctccggcgtgccagccagattttctggcagcggctccggcaccgacttcaccctgacaatcagcagcctggaacccgaggacttcgccgtgtactactgcctccagtggtccagcaaccccctgacctttggcggaggcaccaaggtggaaatcaagctcgaggacctgaagaacgtgttcccacctgaggtggccgtgttcgagcctagcgaggccgagatcagccacacccagaaagccaccctcgtgtgcctggctaccggcttctaccccgaccatgtggaactgtcttggtgggtcaacggcaaagaggtgcacagcggcgtgtgtaccgacccccagccactgaaagaacagcccgccctgaacgacagccggtactgcctgagcagcagactgagagtgtccgccaccttctggcagaacccccggaaccacttcagatgccaggtgcagttctacggcctgagcgagaacgacgagtggacccaggacagagccaagcccgtgacccagatcgtgtctgccgaagcctggggcagagccgatgatgtgattaagatccactggcaggaaaagaagtccaacaccatcctgggcagccaggaaggcaacaccatgaagaccaacgacacctacatgaagttcagctggctgaccgtgcccgagaagtccctggacaaagaacacagatgcatcgtgcggcacgaaaacaacaagaacggcgtggaccaggaaatcatcttcccacccatcaagaccgatgtgattacaatggaccccaaggacaactgctccaaggacgccaacgataccctgctgctccagctgaccaacaccagcgcctactacatgtacttgttgctgctgctgaagtccgtggtgtacttcgccatcatcacatgctgcctgctgatggctatggtcaagcggaaggacagccggggaagggccaagcgatctggatctggagcaacaaacttctcactactcaaacaagcaggtgacgtggaggagaatcccgggcctactagtatggactggatttggcgcatccttttccttgtcggcgctgctaccggcgcgcattccgggccccagctccagctgcaagagtctggacctggcctggtcaagcctagcgagacactgagcctgacctgtaccgtgtccggcgatagcatcagcagcggcgattactactggggctggatcagacagcctcctggcaaaggactggaatggatcggccacatctactacagcggcgtgacctactacaaccccagcctgaagtccagagtgaccatcagcgtggacaccagccggaaccagttctccctgaagctgtctagcgtgacagccgccgataccgccgtgtactactgcaccagagaggacagcagcaactggcggagtagaggccagggaacactggtcacagttagctctggatccggcggaggcggaagtggaggcggaggatctggcggcggaggctctttcgaagaagtgcaactggtggaaagcgggggaggacttgtgaagcctggcggctctctgagactgagctgtgccgcctctggcttcaccttcagcagctacgacatgagctgggtgcgccaggctcctggcaagggactggaatgggtgtccaccatcagcagcggcggcagctacacctactacctggacagcatcaagggccggttcaccatctccagagacaacgccaagaacagcctgtacctccagatgaactccctgcgggccgaggacacagccgtgtattattgcgccagacagggcctggattactggggcagaggcacccttgtgaccgtgtcctctacgcgtatccagaaccctgatcctgccgtgtaccagctgcgggatagcaagagcagcgacaagagcgtgtgtctgttcaccgacttcgacagccagaccaacgtgtcccagagcaaggactccgacgtgtacatcaccgataagtgcgtgctggacatgcggagcatggacttcaagagcaactccgccgtggcctggtccaacaagtccgatttcgcctgcgccaacgccttcaacaacagcattatccccgaggacacattcttcccaagccccgagagcagcgactccaccgaccacgtgaagcccaaagagacagagaacaccaagcagcccagcaagagctgccacaagcccaaggccatcgtgcacaccgagaaagtgaacatgatgagcctgaccgtgctgggcctgcggatgctgttcgccaaaaccgtggccgtgaacttcctgctgaccgccaagctgttcttcctcctcaccgcc

SEQ ID NO: 6688 - DNA, 2997 bp, synthetic construct
  source 1..2997: mol_type = other DNA
atggccttaccagtgaccgccttgctcctgccgctggccttgctgctccacgccgccaggccggaagtgcagctggttgaatctggcggaggactggttcagcctggcggatctctgagactgtcttgtgccgccagcggcttcagcttcagcgacttttggatgagctgggtccgacaggcccctggcaaaggacttgaatgggtcgccacaatcagccaggccggcagcgagaaggactacgtggactctgtgaagggcagattcaccatcagccgggacaacgccaagaagtccctgtacctccagatgaacagcctgagagccgaggacaccgccgtgtactattgtgcctctggcgtgtacagcttcgactacagaggccagggcaccctggtcacagtctcttctggtaccggcggaggcggatctggcggcggaggtagcggtggcggaggatctgaattcgacatcgtgatgacccagagccccgatagcctggccgtgtctctgggagagagagccaccatcaactgccgggccagcaagagcgtgtccaccagcggctacagcttcatgcactggtatcagcagaagcccggccagccccccaagctgctgatctacctggcctccaacctggaaagcggcgtgcccgatagattcagcggcagcggctctggcaccgacttcaccctgaccatcagttctcttcaggccgaggacgtggccgtgtactactgccagcacagcagagaggtgccctggacattcggccagggcacaaaggtggaaatcaagcggctcgaggacctgaagaacgtgttcccacctgaggtggccgtgttcgagcctagcgaggccgagatcagccacacccagaaagccaccctcgtgtgcctggctaccggcttctaccccgaccatgtggaactgtcttggtgggtcaacggcaaagaggtgcacagcggcgtgtgtaccgacccccagccactgaaagaacagcccgccctgaacgacagccggtactgcctgagcagcagactgagagtgtccgccaccttctggcagaacccccggaaccacttcagatgccaggtgcagttctacggcctgagcgagaacgacgagtggacccaggacagagccaagcccgtgacccagatcgtgtctgccgaagcctggggcagagccgatgatgtgattaagatccactggcaggaaaagaagtccaacaccatcctgggcagccaggaaggcaacaccatgaagaccaacgacacctacatgaagttcagctggctgaccgtgcccgagaagtccctggacaaagaacacagatgcatcgtgcggcacgaaaacaacaagaacggcgtggaccaggaaatcatcttcccacccatcaagaccgatgtgattacaatggaccccaaggacaactgctccaaggacgccaacgataccctgctgctccagctgaccaacaccagcgcctactacatgtacttgttgctgctgctgaagtccgtggtgtacttcgccatcatcacatgctgcctgctgatggctatggtcaagcggaaggacagccggggaagggccaagcgatctggatctggagcaacaaacttctcactactcaaacaagcaggtgacgtggaggagaatcccgggcctactagtatggactggatttggcgcatccttttccttgtcggcgctgctaccggcgcgcattccgggccccagctccagctgcaagagtctggacctggcctggtcaagcctagcgagacactgagcctgacctgtaccgtgtccggcgatagcatcagcagcggcgattactactggggctggatcagacagcctcctggcaaaggactggaatggatcggccacatctactacagcggcgtgacctactacaaccccagcctgaagtccagagtgaccatcagcgtggacaccagccggaaccagttctccctgaagctgtctagcgtgacagccgccgataccgccgtgtactactgcaccagagaggacagcagcaactggcggagtagaggccagggaacactggtcacagttagctctggatccggcggaggcggaagtggaggcggaggatctggcggcggaggctctttcgaacaggtgcagctggtgcagtctggggccgaagtgaagaaacctggggccagcgtgaaggtgtcctgcaaggccagcggatacacctttaccaactacggcatgaactgggtgcgccaggcccctggacagggcctggaatggatgggctggatcaacacctacaccggcgagcccacatacgccgacgccttcaagggcagattcgccttcagcctggacaccagcacctccaccgcctacctccagatcaacagcctgcggagcgacgacaccgccgtgtattattgcgccagagattacggcgactacgggatggactattggggccagggaaccaccgtgaccgtgtcctctacgcgtatccagaaccctgatcctgccgtgtaccagctgcgggatagcaagagcagcgacaagagcgtgtgtctgttcaccgacttcgacagccagaccaacgtgtcccagagcaaggactccgacgtgtacatcaccgataagtgcgtgctggacatgcggagcatggacttcaagagcaactccgccgtggcctggtccaacaagtccgatttcgcctgcgccaacgccttcaacaacagcattatccccgaggacacattcttcccaagccccgagagcagcgactccaccgaccacgtgaagcccaaagagacagagaacaccaagcagcccagcaagagctgccacaagcccaaggccatcgtgcacaccgagaaagtgaacatgatgagcctgaccgtgctgggcctgcggatgctgttcgccaaaaccgtggccgtgaacttcctgctgaccgccaagctgttcttcctcctcaccgcc

SEQ ID NO: 6689 - DNA, 2985 bp, synthetic construct
  source 1..2985: mol_type = other DNA
atggccttaccagtgaccgccttgctcctgccgctggccttgctgctccacgccgccaggccggaagtgcagctggttgaatctggcggaggactggttcagcctggcggatctctgagactgtcttgtgccgccagcggcttcagcttcagcgacttttggatgagctgggtccgacaggcccctggcaaaggacttgaatgggtcgccacaatcagccaggccggcagcgagaaggactacgtggactctgtgaagggcagattcaccatcagccgggacaacgccaagaagtccctgtacctccagatgaacagcctgagagccgaggacaccgccgtgtactattgtgcctctggcgtgtacagcttcgactacagaggccagggcaccctggtcacagtctcttctggtaccggcggaggcggatctggcggcggaggtagcggtggcggaggatctgaattcgacatcgtgatgacccagacccccctgaccctgagcgtgacaatcggacagcctgccagcatctcctgcaagagcagccagagcctgctggacagcgacggcaagacctacctgaactggctgctgcagaggccaggccagagccccgagagactgatctacctggtgtccaagctggactccggcgtgcccgatagattcacaggcagcggctccggcaccgacttcaccctgaagatcagccgggtggaagccgaggacctgggcgtgtactgttgttggcagggcacccacttcccttacaccttcggcggagggaccaaggtggaaatcaagggcctcgaggacctgaagaacgtgttcccacctgaggtggccgtgttcgagcctagcgaggccgagatcagccacacccagaaagccaccctcgtgtgcctggctaccggcttctaccccgaccatgtggaactgtcttggtgggtcaacggcaaagaggtgcacagcggcgtgtgtaccgacccccagccactgaaagaacagcccgccctgaacgacagccggtactgcctgagcagcagactgagagtgtccgccaccttctggcagaacccccggaaccacttcagatgccaggtgcagttctacggcctgagcgagaacgacgagtggacccaggacagagccaagcccgtgacccagatcgtgtctgccgaagcctggggcagagccgatgatgtgattaagatccactggcaggaaaagaagtccaacaccatcctgggcagccaggaaggcaacaccatgaagaccaacgacacctacatgaagttcagctggctgaccgtgcccgagaagtccctggacaaagaacacagatgcatcgtgcggcacgaaaacaacaagaacggcgtggaccaggaaatcatcttcccacccatcaagaccgatgtgattacaatggaccccaaggacaactgctccaaggacgccaacgataccctgctgctccagctgaccaacaccagcgcctactacatgtacttgttgctgctgctgaagtccgtggtgtacttcgccatcatcacatgctgcctgctgatggctatggtcaagcggaaggacagccggggaagggccaagcgatctggatctggagcaacaaacttctcactactcaaacaagcaggtgacgtggaggagaatcccgggcctactagtatggactggatttggcgcatccttttccttgtcggcgctgctaccggcgcgcattccgggccccagctccagctgcaagagtctggacctggcctggtcaagcctagcgagacactgagcctgacctgtaccgtgtccggcgatagcatcagcagcggcgattactactggggctggatcagacagcctcctggcaaaggactggaatggatcggccacatctactacagcggcgtgacctactacaaccccagcctgaagtccagagtgaccatcagcgtggacaccagccggaaccagttctccctgaagctgtctagcgtgacagccgccgataccgccgtgtactactgcaccagagaggacagcagcaactggcggagtagaggccagggaacactggtcacagttagctctggatccggcggaggcggaagtggaggcggaggatctggcggcggaggctctttcgaacaggtgcaactgcagcagcctggcgctgaacttgtgcggccaggcgcctctgtgaagctgagctgtaaagccagcggctacaccttcaccagctactggatgaactgggtcaagcagcgcccaggccagggcctggaatggatcggaatgatcgaccccagcgacagcgagacacactacaaccacatcttcaaggacaaggccaccctgaccgtggacaagtccagcagcacagcctacctgcaactgtccagcctgaccagcgaggacagcgccgtgtactactgcgcccggaacctgtatctgtggggccagggaacaagcgtgaccgtgtctagcacgcgtatccagaaccctgatcctgccgtgtaccagctgcgggatagcaagagcagcgacaagagcgtgtgtctgttcaccgacttcgacagccagaccaacgtgtcccagagcaaggactccgacgtgtacatcaccgataagtgcgtgctggacatgcggagcatggacttcaagagcaactccgccgtggcctggtccaacaagtccgatttcgcctgcgccaacgccttcaacaacagcattatccccgaggacacattcttcccaagccccgagagcagcgactccaccgaccacgtgaagcccaaagagacagagaacaccaagcagcccagcaagagctgccacaagcccaaggccatcgtgcacaccgagaaagtgaacatgatgagcctgaccgtgctgggcctgcggatgctgttcgccaaaaccgtggccgtgaacttcctgctgaccgccaagctgttcttcctcctcaccgcc

SEQ ID NO: 6690 - DNA, 3009 bp, synthetic construct
  source 1..3009: mol_type = other DNA
atggccttaccagtgaccgccttgctcctgccgctggccttgctgctccacgccgccaggccggaagtgcagctggttgaatctggcggaggactggttcagcctggcggatctctgagactgtcttgtgccgccagcggcttcagcttcagcgacttttggatgagctgggtccgacaggcccctggcaaaggacttgaatgggtcgccacaatcagccaggccggcagcgagaaggactacgtggactctgtgaagggcagattcaccatcagccgggacaacgccaagaagtccctgtacctccagatgaacagcctgagagccgaggacaccgccgtgtactattgtgcctctggcgtgtacagcttcgactacagaggccagggcaccctggtcacagtctcttctggtaccggcggaggcggatctggcggcggaggtagcggtggcggaggatctgaattcgacatcgtgatgacccagagccccgatagcctggccgtgtctctgggagagagagccaccatcaactgcgagagcagccagagcctgctgaacagcggcaaccagaagaactacctgacctggtatcagcagaagcccggccagccccccaagcccctgatctattgggccagcaccagagaaagcggcgtgcccgatagattcagcggcagcggaagcggcaccgacttcaccctgaccatcagttctcttcaggccgaggacgtggccgtgtactactgccagaacgactacagctacccctacaccttcggccagggcaccaagctggaaatcaagagactcgaggacctgaagaacgtgttcccacctgaggtggccgtgttcgagcctagcgaggccgagatcagccacacccagaaagccaccctcgtgtgcctggctaccggcttctaccccgaccatgtggaactgtcttggtgggtcaacggcaaagaggtgcacagcggcgtgtgtaccgacccccagccactgaaagaacagcccgccctgaacgacagccggtactgcctgagcagcagactgagagtgtccgccaccttctggcagaacccccggaaccacttcagatgccaggtgcagttctacggcctgagcgagaacgacgagtggacccaggacagagccaagcccgtgacccagatcgtgtctgccgaagcctggggcagagccgatgatgtgattaagatccactggcaggaaaagaagtccaacaccatcctgggcagccaggaaggcaacaccatgaagaccaacgacacctacatgaagttcagctggctgaccgtgcccgagaagtccctggacaaagaacacagatgcatcgtgcggcacgaaaacaacaagaacggcgtggaccaggaaatcatcttcccacccatcaagaccgatgtgattacaatggaccccaaggacaactgctccaaggacgccaacgataccctgctgctccagctgaccaacaccagcgcctactacatgtacttgttgctgctgctgaagtccgtggtgtacttcgccatcatcacatgctgcctgctgatggctatggtcaagcggaaggacagccggggaagggccaagcgatctggatctggagcaacaaacttctcactactcaaacaagcaggtgacgtggaggagaatcccgggcctactagtatggactggatttggcgcatccttttccttgtcggcgctgctaccggcgcgcattccgggccccagctccagctgcaagagtctggacctggcctggtcaagcctagcgagacactgagcctgacctgtaccgtgtccggcgatagcatcagcagcggcgattactactggggctggatcagacagcctcctggcaaaggactggaatggatcggccacatctactacagcggcgtgacctactacaaccccagcctgaagtccagagtgaccatcagcgtggacaccagccggaaccagttctccctgaagctgtctagcgtgacagccgccgataccgccgtgtactactgcaccagagaggacagcagcaactggcggagtagaggccagggaacactggtcacagttagctctggatccggcggaggcggaagtggaggcggaggatctggcggcggaggctctttcgaagaagtgcagctggtgcagtctggggccgaagtgaagaagcctggcgagagcctgaagatcagctgcaagggcagcggctacagcttcaccgactactacatgaagtgggccagacagatgcccggcaagggcctggaatggatgggcgacatcatccccagcaacggggccaccttctacaaccagaaattcaagggccaagtgaccatctccgccgacaagagcatcagcaccacctacctccagtggtccagcctgaaggccagcgacaccgccatgtactattgcgccagaagccatctgctgcgggccagttggttcgcctattggggccagggaacaatggtcacagtgtccagcacgcgtatccagaaccctgatcctgccgtgtaccagctgcgggatagcaagagcagcgacaagagcgtgtgtctgttcaccgacttcgacagccagaccaacgtgtcccagagcaaggactccgacgtgtacatcaccgataagtgcgtgctggacatgcggagcatggacttcaagagcaactccgccgtggcctggtccaacaagtccgatttcgcctgcgccaacgccttcaacaacagcattatccccgaggacacattcttcccaagccccgagagcagcgactccaccgaccacgtgaagcccaaagagacagagaacaccaagcagcccagcaagagctgccacaagcccaaggccatcgtgcacaccgagaaagtgaacatgatgagcctgaccgtgctgggcctgcggatgctgttcgccaaaaccgtggccgtgaacttcctgctgaccgccaagctgttcttcctcctcaccgcc

SEQ ID NO: 6691 - DNA, 2994 bp, synthetic construct
  source 1..2994: mol_type = other DNA
atggccttaccagtgaccgccttgctcctgccgctggccttgctgctccacgccgccaggccggaagtgcagctggttgaatctggcggaggactggttcagcctggcggatctctgagactgtcttgtgccgccagcggcttcagcttcagcgacttttggatgagctgggtccgacaggcccctggcaaaggacttgaatgggtcgccacaatcagccaggccggcagcgagaaggactacgtggactctgtgaagggcagattcaccatcagccgggacaacgccaagaagtccctgtacctccagatgaacagcctgagagccgaggacaccgccgtgtactattgtgcctctggcgtgtacagcttcgactacagaggccagggcaccctggtcacagtctcttctggtaccggcggaggcggatctggcggcggaggtagcggtggcggaggatctgaattcgacatccagatgacccagtctaccagttccctgagtgcatccctcggagacagggtgacgatcagttgcagcgcaagccaagggatcaataactatctgaactggtatcagcagaaaccggacggaacagtcgaactcctgatttattacaccagcacccttcagagtggcgtcccttcccggttcagtggctccggaagcgggaccgattactccctgaccatttctaatctggagccagaggacataggaacgtattattgccagcagtatagtaaactgccacgaacttttggaggggggacgaaactggagatcaaactcgaggacctgaagaacgtgttcccacctgaggtggccgtgttcgagcctagcgaggccgagatcagccacacccagaaagccaccctcgtgtgcctggctaccggcttctaccccgaccatgtggaactgtcttggtgggtcaacggcaaagaggtgcacagcggcgtgtgtaccgacccccagccactgaaagaacagcccgccctgaacgacagccggtactgcctgagcagcagactgagagtgtccgccaccttctggcagaacccccggaaccacttcagatgccaggtgcagttctacggcctgagcgagaacgacgagtggacccaggacagagccaagcccgtgacccagatcgtgtctgccgaagcctggggcagagccgatgatgtgattaagatccactggcaggaaaagaagtccaacaccatcctgggcagccaggaaggcaacaccatgaagaccaacgacacctacatgaagttcagctggctgaccgtgcccgagaagtccctggacaaagaacacagatgcatcgtgcggcacgaaaacaacaagaacggcgtggaccaggaaatcatcttcccacccatcaagaccgatgtgattacaatggaccccaaggacaactgctccaaggacgccaacgataccctgctgctccagctgaccaacaccagcgcctactacatgtacttgttgctgctgctgaagtccgtggtgtacttcgccatcatcacatgctgcctgctgatggctatggtcaagcggaaggacagccggggaagggccaagcgatctggatctggagcaacaaacttctcactactcaaacaagcaggtgacgtggaggagaatcccgggcctactagtatggactggatttggcgcatccttttccttgtcggcgctgctaccggcgcgcattccgggccccagctccagctgcaagagtctggacctggcctggtcaagcctagcgagacactgagcctgacctgtaccgtgtccggcgatagcatcagcagcggcgattactactggggctggatcagacagcctcctggcaaaggactggaatggatcggccacatctactacagcggcgtgacctactacaaccccagcctgaagtccagagtgaccatcagcgtggacaccagccggaaccagttctccctgaagctgtctagcgtgacagccgccgataccgccgtgtactactgcaccagagaggacagcagcaactggcggagtagaggccagggaacactggtcacagttagctctggatccggcggaggcggaagtggaggcggaggatctggcggcggaggctctttcgaacaggtgcaactccagcagtccggaagcgagcttatgatgccaggggcatcagtgaagatcagctgcaaggctactggctacaccttctctaattactggatagagtgggttaaacaaaggccagggcacggcctggaatggatcggcgagatcctgcctgggacaggccgaaccatttataacgagaagttcaaaggcaaggctactttcaccgcagatataagctctaatacagtgcaaatgcagctctcttccctgacaagtgaggatagtgccgtgtattattgcgcacgaagagattactatggaaatttttattacgctatggattattggggtcaaggaacaagtgtgaccgttagcagcacgcgtatccagaaccctgatcctgccgtgtaccagctgcgggatagcaagagcagcgacaagagcgtgtgtctgttcaccgacttcgacagccagaccaacgtgtcccagagcaaggactccgacgtgtacatcaccgataagtgcgtgctggacatgcggagcatggacttcaagagcaactccgccgtggcctggtccaacaagtccgatttcgcctgcgccaacgccttcaacaacagcattatccccgaggacacattcttcccaagccccgagagcagcgactccaccgaccacgtgaagcccaaagagacagagaacaccaagcagcccagcaagagctgccacaagcccaaggccatcgtgcacaccgagaaagtgaacatgatgagcctgaccgtgctgggcctgcggatgctgttcgccaaaaccgtggccgtgaacttcctgctgaccgccaagctgttcttcctcctcaccgcc

SEQ ID NO: 6692 - DNA, 2979 bp, synthetic construct
  source 1..2979: mol_type = other DNA
atggccttaccagtgaccgccttgctcctgccgctggccttgctgctccacgccgccaggccggaagtgcagctggttgaatctggcggaggactggttcagcctggcggatctctgagactgtcttgtgccgccagcggcttcagcttcagcgacttttggatgagctgggtccgacaggcccctggcaaaggacttgaatgggtcgccacaatcagccaggccggcagcgagaaggactacgtggactctgtgaagggcagattcaccatcagccgggacaacgccaagaagtccctgtacctccagatgaacagcctgagagccgaggacaccgccgtgtactattgtgcctctggcgtgtacagcttcgactacagaggccagggcaccctggtcacagtctcttctggtaccggcggaggcggatctggcggcggaggtagcggtggcggaggatctgaattcgacatccagatgacccagagccctgccagcctgtccgtgtctgtgggcgagacagtgaccatcacctgtcgggccagcgagaacatctacagcaacctggcctggtatcagcagaagcagggcaagagcccccaactgctggtgtacgccgccaccaatctggccgatggcgtgcccagcagattttccggctctggcagcggcacccagtacagcctgaagatcaacagcctccagagcgaggacttcggcagctactactgccagcacttctggggcacctggacctttggaggaggcaccaccctggaaatcaagctcgaggacctgaagaacgtgttcccacctgaggtggccgtgttcgagcctagcgaggccgagatcagccacacccagaaagccaccctcgtgtgcctggctaccggcttctaccccgaccatgtggaactgtcttggtgggtcaacggcaaagaggtgcacagcggcgtgtgtaccgacccccagccactgaaagaacagcccgccctgaacgacagccggtactgcctgagcagcagactgagagtgtccgccaccttctggcagaacccccggaaccacttcagatgccaggtgcagttctacggcctgagcgagaacgacgagtggacccaggacagagccaagcccgtgacccagatcgtgtctgccgaagcctggggcagagccgatgatgtgattaagatccactggcaggaaaagaagtccaacaccatcctgggcagccaggaaggcaacaccatgaagaccaacgacacctacatgaagttcagctggctgaccgtgcccgagaagtccctggacaaagaacacagatgcatcgtgcggcacgaaaacaacaagaacggcgtggaccaggaaatcatcttcccacccatcaagaccgatgtgattacaatggaccccaaggacaactgctccaaggacgccaacgataccctgctgctccagctgaccaacaccagcgcctactacatgtacttgttgctgctgctgaagtccgtggtgtacttcgccatcatcacatgctgcctgctgatggctatggtcaagcggaaggacagccggggaagggccaagcgatctggatctggagcaacaaacttctcactactcaaacaagcaggtgacgtggaggagaatcccgggcctactagtatggactggatttggcgcatccttttccttgtcggcgctgctaccggcgcgcattccgggccccagctccagctgcaagagtctggacctggcctggtcaagcctagcgagacactgagcctgacctgtaccgtgtccggcgatagcatcagcagcggcgattactactggggctggatcagacagcctcctggcaaaggactggaatggatcggccacatctactacagcggcgtgacctactacaaccccagcctgaagtccagagtgaccatcagcgtggacaccagccggaaccagttctccctgaagctgtctagcgtgacagccgccgataccgccgtgtactactgcaccagagaggacagcagcaactggcggagtagaggccagggaacactggtcacagttagctctggatccggcggaggcggaagtggaggcggaggatctggcggcggaggctctttcgaagaagtgcaactccagcagagcggccctgagcttgtgaagcctggcgcttccgtgaagatgagctgcaaggccagcggctacaccttcaccgactactacatgaagtggatgaagcagagccacggcaagtccctggaatggatcggcgacatcaaccccaacaacggcggcaccacctacaaccagaagttcaagggcaaggccaccctgaccgtggacaagagcagcagcaccgcctacatgcaactgaacagcctgaccagcgaggacagcgccgtgtactactgcgccagagactacggctacggctatttcgactactggggccagggcacaaccctgacagtgtcctctacgcgtatccagaaccctgatcctgccgtgtaccagctgcgggatagcaagagcagcgacaagagcgtgtgtctgttcaccgacttcgacagccagaccaacgtgtcccagagcaaggactccgacgtgtacatcaccgataagtgcgtgctggacatgcggagcatggacttcaagagcaactccgccgtggcctggtccaacaagtccgatttcgcctgcgccaacgccttcaacaacagcattatccccgaggacacattcttcccaagccccgagagcagcgactccaccgaccacgtgaagcccaaagagacagagaacaccaagcagcccagcaagagctgccacaagcccaaggccatcgtgcacaccgagaaagtgaacatgatgagcctgaccgtgctgggcctgcggatgctgttcgccaaaaccgtggccgtgaacttcctgctgaccgccaagctgttcttcctcctcaccgcc

SEQ ID NO: 6693 - DNA, 2988 bp, synthetic construct
  source 1..2988: mol_type = other DNA
atggccttaccagtgaccgccttgctcctgccgctggccttgctgctccacgccgccaggccggaagtgcagctggttgaatctggcggaggactggttcagcctggcggatctctgagactgtcttgtgccgccagcggcttcagcttcagcgacttttggatgagctgggtccgacaggcccctggcaaaggacttgaatgggtcgccacaatcagccaggccggcagcgagaaggactacgtggactctgtgaagggcagattcaccatcagccgggacaacgccaagaagtccctgtacctccagatgaacagcctgagagccgaggacaccgccgtgtactattgtgcctctggcgtgtacagcttcgactacagaggccagggcaccctggtcacagtctcttctggtaccggcggaggcggatctggcggcggaggtagcggtggcggaggatctgaattcgagatcgtgctgacacagagccctggcaccctgagcctgtctccaggcgaaagagccacactgagctgtcgggcctctcagagcgtgggaggctacctggcttggtatcagcagaagccaggccaggcccccagactgctgatctacgacgccagcaatcgggccacaggcatccccgccagattttctggcagcggctccggcaccgacttcaccctgacaatcagcagcctggaacccgaggacttcgccgtgtactactgccagcagcggaacaactggccccccatgtacacattcggccagggcaccaagctggaaatcaagagactcgaggacctgaagaacgtgttcccacctgaggtggccgtgttcgagcctagcgaggccgagatcagccacacccagaaagccaccctcgtgtgcctggctaccggcttctaccccgaccatgtggaactgtcttggtgggtcaacggcaaagaggtgcacagcggcgtgtgtaccgacccccagccactgaaagaacagcccgccctgaacgacagccggtactgcctgagcagcagactgagagtgtccgccaccttctggcagaacccccggaaccacttcagatgccaggtgcagttctacggcctgagcgagaacgacgagtggacccaggacagagccaagcccgtgacccagatcgtgtctgccgaagcctggggcagagccgatgatgtgattaagatccactggcaggaaaagaagtccaacaccatcctgggcagccaggaaggcaacaccatgaagaccaacgacacctacatgaagttcagctggctgaccgtgcccgagaagtccctggacaaagaacacagatgcatcgtgcggcacgaaaacaacaagaacggcgtggaccaggaaatcatcttcccacccatcaagaccgatgtgattacaatggaccccaaggacaactgctccaaggacgccaacgataccctgctgctccagctgaccaacaccagcgcctactacatgtacttgttgctgctgctgaagtccgtggtgtacttcgccatcatcacatgctgcctgctgatggctatggtcaagcggaaggacagccggggaagggccaagcgatctggatctggagcaacaaacttctcactactcaaacaagcaggtgacgtggaggagaatcccgggcctactagtatggactggatttggcgcatccttttccttgtcggcgctgctaccggcgcgcattccgggccccagctccagctgcaagagtctggacctggcctggtcaagcctagcgagacactgagcctgacctgtaccgtgtccggcgatagcatcagcagcggcgattactactggggctggatcagacagcctcctggcaaaggactggaatggatcggccacatctactacagcggcgtgacctactacaaccccagcctgaagtccagagtgaccatcagcgtggacaccagccggaaccagttctccctgaagctgtctagcgtgacagccgccgataccgccgtgtactactgcaccagagaggacagcagcaactggcggagtagaggccagggaacactggtcacagttagctctggatccggcggaggcggaagtggaggcggaggatctggcggcggaggctctttcgaacaggtgcaactggtgcagagcggagccgaagtgaagaaacccggcagcagcgtgaaggtgtcctgcaaggcttccggcggcaccttcagcagctacgccatttcttgggtgcgccaggctcctggacagggcctggaatggatgggcggcatcatccctatcctgggcaccgccaactacgcccagaaattccagggcagagtgaccatcaccgccgacgagagcaccagcaccgcctacatggaactgagcagcctgcggagcgaggacacagccgtgtattattgcgccagatggggcggaggggccttcgacatttggggccagggaacaatggtcaccgtgtccagcacgcgtatccagaaccctgatcctgccgtgtaccagctgcgggatagcaagagcagcgacaagagcgtgtgtctgttcaccgacttcgacagccagaccaacgtgtcccagagcaaggactccgacgtgtacatcaccgataagtgcgtgctggacatgcggagcatggacttcaagagcaactccgccgtggcctggtccaacaagtccgatttcgcctgcgccaacgccttcaacaacagcattatccccgaggacacattcttcccaagccccgagagcagcgactccaccgaccacgtgaagcccaaagagacagagaacaccaagcagcccagcaagagctgccacaagcccaaggccatcgtgcacaccgagaaagtgaacatgatgagcctgaccgtgctgggcctgcggatgctgttcgccaaaaccgtggccgtgaacttcctgctgaccgccaagctgttcttcctcctcaccgcc

SEQ ID NO: 6694 - DNA, 2973 bp, synthetic construct
  source 1..2973: mol_type = other DNA
atggccttaccagtgaccgccttgctcctgccgctggccttgctgctccacgccgccaggccggaagtgcagctggttgaatctggcggaggactggttcagcctggcggatctctgagactgtcttgtgccgccagcggcttcagcttcagcgacttttggatgagctgggtccgacaggcccctggcaaaggacttgaatgggtcgccacaatcagccaggccggcagcgagaaggactacgtggactctgtgaagggcagattcaccatcagccgggacaacgccaagaagtccctgtacctccagatgaacagcctgagagccgaggacaccgccgtgtactattgtgcctctggcgtgtacagcttcgactacagaggccagggcaccctggtcacagtctcttctggtaccggcggaggcggatctggcggcggaggtagcggtggcggaggatctgaattccagatcgtgctgacacagagccctgccctgatgagcgccagccctggcgagaaagtgaccatgacctgtagcgccagcagcagcgtgcgctacatgtactggtatcagcagaagcccagaagcagccccaagccctggattcacctgaccagcaatctggcctctggcgtgcccgctagattttccggctctggcagcggcaccagctacagcctgaccatcagcagcatggaagccgaggacgccgccacctactactgccagcagtggtccagccaccccttcacatttggctccggcaccaagctggaaatcaagctcgaggacctgaagaacgtgttcccacctgaggtggccgtgttcgagcctagcgaggccgagatcagccacacccagaaagccaccctcgtgtgcctggctaccggcttctaccccgaccatgtggaactgtcttggtgggtcaacggcaaagaggtgcacagcggcgtgtgtaccgacccccagccactgaaagaacagcccgccctgaacgacagccggtactgcctgagcagcagactgagagtgtccgccaccttctggcagaacccccggaaccacttcagatgccaggtgcagttctacggcctgagcgagaacgacgagtggacccaggacagagccaagcccgtgacccagatcgtgtctgccgaagcctggggcagagccgatgatgtgattaagatccactggcaggaaaagaagtccaacaccatcctgggcagccaggaaggcaacaccatgaagaccaacgacacctacatgaagttcagctggctgaccgtgcccgagaagtccctggacaaagaacacagatgcatcgtgcggcacgaaaacaacaagaacggcgtggaccaggaaatcatcttcccacccatcaagaccgatgtgattacaatggaccccaaggacaactgctccaaggacgccaacgataccctgctgctccagctgaccaacaccagcgcctactacatgtacttgttgctgctgctgaagtccgtggtgtacttcgccatcatcacatgctgcctgctgatggctatggtcaagcggaaggacagccggggaagggccaagcgatctggatctggagcaacaaacttctcactactcaaacaagcaggtgacgtggaggagaatcccgggcctactagtatggactggatttggcgcatccttttccttgtcggcgctgctaccggcgcgcattccgggccccagctccagctgcaagagtctggacctggcctggtcaagcctagcgagacactgagcctgacctgtaccgtgtccggcgatagcatcagcagcggcgattactactggggctggatcagacagcctcctggcaaaggactggaatggatcggccacatctactacagcggcgtgacctactacaaccccagcctgaagtccagagtgaccatcagcgtggacaccagccggaaccagttctccctgaagctgtctagcgtgacagccgccgataccgccgtgtactactgcaccagagaggacagcagcaactggcggagtagaggccagggaacactggtcacagttagctctggatccggcggaggcggaagtggaggcggaggatctggcggcggaggctctttcgaagatgtgcaactccaggaaagcggccctggccttgtgaagcctagccagagcctgtccctgacctgtaccgtgaccggcttcagcatcaccagcgactactcttggaactggatcagacagttccctggcaacaaactggaatggatgggctacatcagctactccggccacacctcctacaaccccagcctggaaagccggatctccatcaccagagacaccagcaagaaccagttcttcttgcaactgaacagcgtgaccaccgaggataccgccacatattactgtaccagaggcaactgggacgtggtgtactggggccagggcacacttgtgaccgtgtctgctacgcgtatccagaaccctgatcctgccgtgtaccagctgcgggatagcaagagcagcgacaagagcgtgtgtctgttcaccgacttcgacagccagaccaacgtgtcccagagcaaggactccgacgtgtacatcaccgataagtgcgtgctggacatgcggagcatggacttcaagagcaactccgccgtggcctggtccaacaagtccgatttcgcctgcgccaacgccttcaacaacagcattatccccgaggacacattcttcccaagccccgagagcagcgactccaccgaccacgtgaagcccaaagagacagagaacaccaagcagcccagcaagagctgccacaagcccaaggccatcgtgcacaccgagaaagtgaacatgatgagcctgaccgtgctgggcctgcggatgctgttcgccaaaaccgtggccgtgaacttcctgctgaccgccaagctgttcttcctcctcaccgcc

SEQ ID NO: 6695 - DNA, 3003 bp, synthetic construct
  source 1..3003: mol_type = other DNA
atggccttaccagtgaccgccttgctcctgccgctggccttgctgctccacgccgccaggccggaagtgcagctggttgaatctggcggaggactggttcagcctggcggatctctgagactgtcttgtgccgccagcggcttcagcttcagcgacttttggatgagctgggtccgacaggcccctggcaaaggacttgaatgggtcgccacaatcagccaggccggcagcgagaaggactacgtggactctgtgaagggcagattcaccatcagccgggacaacgccaagaagtccctgtacctccagatgaacagcctgagagccgaggacaccgccgtgtactattgtgcctctggcgtgtacagcttcgactacagaggccagggcaccctggtcacagtctcttctggtaccggcggaggcggatctggcggcggaggtagcggtggcggaggatctgaattcgacgtcgtgatgacccagagccctctgagcctgcctgtgacactgggacagcctgccagcatctcctgtcggagcagccagagcatcgtgcacagcgacggcaacacctacctggaatggtatcagcagcggccaggccagagccccagacggctgatctacaaggtgtccaacagattcagcggcgtgcccgacagattctccggcagcggctctggcaccgacttcaccctgaagatcagcagagtggaagccgaggacgtgggcgtgtactactgttttcaaggcagccacgccccctggacctttggcggaggaacaaaggtggaaatcaagctcgaggacctgaagaacgtgttcccacctgaggtggccgtgttcgagcctagcgaggccgagatcagccacacccagaaagccaccctcgtgtgcctggctaccggcttctaccccgaccatgtggaactgtcttggtgggtcaacggcaaagaggtgcacagcggcgtgtgtaccgacccccagccactgaaagaacagcccgccctgaacgacagccggtactgcctgagcagcagactgagagtgtccgccaccttctggcagaacccccggaaccacttcagatgccaggtgcagttctacggcctgagcgagaacgacgagtggacccaggacagagccaagcccgtgacccagatcgtgtctgccgaagcctggggcagagccgatgatgtgattaagatccactggcaggaaaagaagtccaacaccatcctgggcagccaggaaggcaacaccatgaagaccaacgacacctacatgaagttcagctggctgaccgtgcccgagaagtccctggacaaagaacacagatgcatcgtgcggcacgaaaacaacaagaacggcgtggaccaggaaatcatcttcccacccatcaagaccgatgtgattacaatggaccccaaggacaactgctccaaggacgccaacgataccctgctgctccagctgaccaacaccagcgcctactacatgtacttgttgctgctgctgaagtccgtggtgtacttcgccatcatcacatgctgcctgctgatggctatggtcaagcggaaggacagccggggaagggccaagcgatctggatctggagcaacaaacttctcactactcaaacaagcaggtgacgtggaggagaatcccgggcctactagtatggactggatttggcgcatccttttccttgtcggcgctgctaccggcgcgcattccgggccccagctccagctgcaagagtctggacctggcctggtcaagcctagcgagacactgagcctgacctgtaccgtgtccggcgatagcatcagcagcggcgattactactggggctggatcagacagcctcctggcaaaggactggaatggatcggccacatctactacagcggcgtgacctactacaaccccagcctgaagtccagagtgaccatcagcgtggacaccagccggaaccagttctccctgaagctgtctagcgtgacagccgccgataccgccgtgtactactgcaccagagaggacagcagcaactggcggagtagaggccagggaacactggtcacagttagctctggatccggcggaggcggaagtggaggcggaggatctggcggcggaggctctttcgaagaagtgcaactggtggaatcaggcggcggactggtgcagcctggcggatctctgagactgagctgtgccgccagcggcttcaccttcagcagctacggaatgcactgggtgcgccaggcccctggcaaaggactggaatgggtggcctacatcaccaccagaagcagcaccatctactacgccgacagcgtgaagggccggttcaccatctccagagacaacgccaagaacagcctgtacctccagatgaactccctgcgggccgaggacaccgccgtgtactattgcaccagagagcccctgaccggctactacgctatggactattggggccagggcaccagcgtgaccgtgtctagtacgcgtatccagaaccctgatcctgccgtgtaccagctgcgggatagcaagagcagcgacaagagcgtgtgtctgttcaccgacttcgacagccagaccaacgtgtcccagagcaaggactccgacgtgtacatcaccgataagtgcgtgctggacatgcggagcatggacttcaagagcaactccgccgtggcctggtccaacaagtccgatttcgcctgcgccaacgccttcaacaacagcattatccccgaggacacattcttcccaagccccgagagcagcgactccaccgaccacgtgaagcccaaagagacagagaacaccaagcagcccagcaagagctgccacaagcccaaggccatcgtgcacaccgagaaagtgaacatgatgagcctgaccgtgctgggcctgcggatgctgttcgccaaaaccgtggccgtgaacttcctgctgaccgccaagctgttcttcctcctcaccgcc

SEQ ID NO: 6696 - DNA, 2979 bp, synthetic construct
  source 1..2979: mol_type = other DNA
atggccttaccagtgaccgccttgctcctgccgctggccttgctgctccacgccgccaggccggaagtgcagctggttgaatctggcggaggactggttcagcctggcggatctctgagactgtcttgtgccgccagcggcttcagcttcagcgacttttggatgagctgggtccgacaggcccctggcaaaggacttgaatgggtcgccacaatcagccaggccggcagcgagaaggactacgtggactctgtgaagggcagattcaccatcagccgggacaacgccaagaagtccctgtacctccagatgaacagcctgagagccgaggacaccgccgtgtactattgtgcctctggcgtgtacagcttcgactacagaggccagggcaccctggtcacagtctcttctggtaccggcggaggcggatctggcggcggaggtagcggtggcggaggatctgaattcgacatccagatgacccagagccccagcagcctgtctgccagcgtgggcgacagagtgaccatcacctgtagagccagccagagcatcagcctgtggctgaactggtatcagcagaagcccggcaaggcccccaagctgctgatctacgccgccagcacactccagagcggcgtgccaagcagattttccggcagcggctccggcaccgacttcaccctgacaatcagctccctccagcccgaggacttcgccacctactactgccagcagtactacaccagcccctacaccttcggccagggcaccaaggtggaaatcaagagactcgaggacctgaagaacgtgttcccacctgaggtggccgtgttcgagcctagcgaggccgagatcagccacacccagaaagccaccctcgtgtgcctggctaccggcttctaccccgaccatgtggaactgtcttggtgggtcaacggcaaagaggtgcacagcggcgtgtgtaccgacccccagccactgaaagaacagcccgccctgaacgacagccggtactgcctgagcagcagactgagagtgtccgccaccttctggcagaacccccggaaccacttcagatgccaggtgcagttctacggcctgagcgagaacgacgagtggacccaggacagagccaagcccgtgacccagatcgtgtctgccgaagcctggggcagagccgatgatgtgattaagatccactggcaggaaaagaagtccaacaccatcctgggcagccaggaaggcaacaccatgaagaccaacgacacctacatgaagttcagctggctgaccgtgcccgagaagtccctggacaaagaacacagatgcatcgtgcggcacgaaaacaacaagaacggcgtggaccaggaaatcatcttcccacccatcaagaccgatgtgattacaatggaccccaaggacaactgctccaaggacgccaacgataccctgctgctccagctgaccaacaccagcgcctactacatgtacttgttgctgctgctgaagtccgtggtgtacttcgccatcatcacatgctgcctgctgatggctatggtcaagcggaaggacagccggggaagggccaagcgatctggatctggagcaacaaacttctcactactcaaacaagcaggtgacgtggaggagaatcccgggcctactagtatggactggatttggcgcatccttttccttgtcggcgctgctaccggcgcgcattccgggccccagctccagctgcaagagtctggacctggcctggtcaagcctagcgagacactgagcctgacctgtaccgtgtccggcgatagcatcagcagcggcgattactactggggctggatcagacagcctcctggcaaaggactggaatggatcggccacatctactacagcggcgtgacctactacaaccccagcctgaagtccagagtgaccatcagcgtggacaccagccggaaccagttctccctgaagctgtctagcgtgacagccgccgataccgccgtgtactactgcaccagagaggacagcagcaactggcggagtagaggccagggaacactggtcacagttagctctggatccggcggaggcggaagtggaggcggaggatctggcggcggaggctctttcgaacaggtgcaactgctggaatctggcggcggactggtgcagcctggcggatctctgagactgagctgtgccgccagcggcttcaccttcagcagctacgccatgagctgggtgcgccaggcccctggaaaaggactggaatgggtgtccgtgatccggtccagcggcagcagcacctattacgccgatagcgtgaagggccggttcaccatcagccgggacaacagcaagaacaccctgtacctccagatgaacagcctgcgggccgaggacaccgccgtgtactattgtgctaggggaggcggctacttcgactactggggccagggaacactcgtgaccgtgtcctctacgcgtatccagaaccctgatcctgccgtgtaccagctgcgggatagcaagagcagcgacaagagcgtgtgtctgttcaccgacttcgacagccagaccaacgtgtcccagagcaaggactccgacgtgtacatcaccgataagtgcgtgctggacatgcggagcatggacttcaagagcaactccgccgtggcctggtccaacaagtccgatttcgcctgcgccaacgccttcaacaacagcattatccccgaggacacattcttcccaagccccgagagcagcgactccaccgaccacgtgaagcccaaagagacagagaacaccaagcagcccagcaagagctgccacaagcccaaggccatcgtgcacaccgagaaagtgaacatgatgagcctgaccgtgctgggcctgcggatgctgttcgccaaaaccgtggccgtgaacttcctgctgaccgccaagctgttcttcctcctcaccgcc

SEQ ID NO: 6697 - DNA, 2988 bp, synthetic construct
  source 1..2988: mol_type = other DNA
atggccttaccagtgaccgccttgctcctgccgctggccttgctgctccacgccgccaggccggaagtgcagctggttgaatctggcggaggactggttcagcctggcggatctctgagactgtcttgtgccgccagcggcttcagcttcagcgacttttggatgagctgggtccgacaggcccctggcaaaggacttgaatgggtcgccacaatcagccaggccggcagcgagaaggactacgtggactctgtgaagggcagattcaccatcagccgggacaacgccaagaagtccctgtacctccagatgaacagcctgagagccgaggacaccgccgtgtactattgtgcctctggcgtgtacagcttcgactacagaggccagggcaccctggtcacagtctcttctggtaccggcggaggcggatctggcggcggaggtagcggtggcggaggatctgaattcgacatccagatgacccagagccccagcagcctgtctgccagcgtgggcgacagagtgaccatcacctgtagagccagccagagcatcagcagctacctgaactggtatcagcagaagcccggcaaggcccccaaactgctgatctacgccgtgtccacactccagagcggcgtgcccagcagattttctggcagcggctccggcaccgacttcaccctgacaatcagctccctccagcccgaggacttcgccacctactactgtcagcagagcggcaccttccctcccaccacatttggacagggcaccaaggtggaaatcaagagactcgaggacctgaagaacgtgttcccacctgaggtggccgtgttcgagcctagcgaggccgagatcagccacacccagaaagccaccctcgtgtgcctggctaccggcttctaccccgaccatgtggaactgtcttggtgggtcaacggcaaagaggtgcacagcggcgtgtgtaccgacccccagccactgaaagaacagcccgccctgaacgacagccggtactgcctgagcagcagactgagagtgtccgccaccttctggcagaacccccggaaccacttcagatgccaggtgcagttctacggcctgagcgagaacgacgagtggacccaggacagagccaagcccgtgacccagatcgtgtctgccgaagcctggggcagagccgatgatgtgattaagatccactggcaggaaaagaagtccaacaccatcctgggcagccaggaaggcaacaccatgaagaccaacgacacctacatgaagttcagctggctgaccgtgcccgagaagtccctggacaaagaacacagatgcatcgtgcggcacgaaaacaacaagaacggcgtggaccaggaaatcatcttcccacccatcaagaccgatgtgattacaatggaccccaaggacaactgctccaaggacgccaacgataccctgctgctccagctgaccaacaccagcgcctactacatgtacttgttgctgctgctgaagtccgtggtgtacttcgccatcatcacatgctgcctgctgatggctatggtcaagcggaaggacagccggggaagggccaagcgatctggatctggagcaacaaacttctcactactcaaacaagcaggtgacgtggaggagaatcccgggcctactagtatggactggatttggcgcatccttttccttgtcggcgctgctaccggcgcgcattccgggccccagctccagctgcaagagtctggacctggcctggtcaagcctagcgagacactgagcctgacctgtaccgtgtccggcgatagcatcagcagcggcgattactactggggctggatcagacagcctcctggcaaaggactggaatggatcggccacatctactacagcggcgtgacctactacaaccccagcctgaagtccagagtgaccatcagcgtggacaccagccggaaccagttctccctgaagctgtctagcgtgacagccgccgataccgccgtgtactactgcaccagagaggacagcagcaactggcggagtagaggccagggaacactggtcacagttagctctggatccggcggaggcggaagtggaggcggaggatctggcggcggaggctctttcgaacaggtgcaactgctggaatctggcggcggactggtgcagcctggcggatctctgagactgagctgtgccgccagcggcttcaccttcagcagccacggaatgcactgggtgcgccaggcccctggaaagggactggaatgggtgtccgtgatctccggcagcggcagcaataccggctacgccgatagcgtgaagggccggttcaccatcagccgggacaacagcaagaacaccctgtacctccagatgaacagcctgcgggccgaggacaccgccgtgtactattgtgccagacagtggggcagctacgccttcgattcttggggccagggcaccctcgtgaccgtgtcatctacgcgtatccagaaccctgatcctgccgtgtaccagctgcgggatagcaagagcagcgacaagagcgtgtgtctgttcaccgacttcgacagccagaccaacgtgtcccagagcaaggactccgacgtgtacatcaccgataagtgcgtgctggacatgcggagcatggacttcaagagcaactccgccgtggcctggtccaacaagtccgatttcgcctgcgccaacgccttcaacaacagcattatccccgaggacacattcttcccaagccccgagagcagcgactccaccgaccacgtgaagcccaaagagacagagaacaccaagcagcccagcaagagctgccacaagcccaaggccatcgtgcacaccgagaaagtgaacatgatgagcctgaccgtgctgggcctgcggatgctgttcgccaaaaccgtggccgtgaacttcctgctgaccgccaagctgttcttcctcctcaccgcc

SEQ ID NO: 6698 - DNA, 3018 bp, synthetic construct
  source 1..3018: mol_type = other DNA
atggccttaccagtgaccgccttgctcctgccgctggccttgctgctccacgccgccaggccggaagtgcagctggttgaatctggcggaggactggttcagcctggcggatctctgagactgtcttgtgccgccagcggcttcagcttcagcgacttttggatgagctgggtccgacaggcccctggcaaaggacttgaatgggtcgccacaatcagccaggccggcagcgagaaggactacgtggactctgtgaagggcagattcaccatcagccgggacaacgccaagaagtccctgtacctccagatgaacagcctgagagccgaggacaccgccgtgtactattgtgcctctggcgtgtacagcttcgactacagaggccagggcaccctggtcacagtctcttctggtaccggcggaggcggatctggcggcggaggtagcggtggcggaggatctgaattcgacatcgtgatgagccagagccctagcagcctggccgtgtccgtgggcgagaaagtgaccatgagctgcaagagcagccagtccctgctgcacagcagcaaccagaagaactacctggcctggtatcagcagaagcccggccagtcccccaaggtgctgatctactgggccagcaccagagaaagcggcgtgcccgatagattcaccggcagcggctctggcaccgacttcaccctgaccatcaccagcgtgaagtccgaggacctggctgtgtactactgccagcagtattacagctacccctggaccttcggcggaggcacccggctggaaatcaaaagactcgaggacctgaagaacgtgttcccacctgaggtggccgtgttcgagcctagcgaggccgagatcagccacacccagaaagccaccctcgtgtgcctggctaccggcttctaccccgaccatgtggaactgtcttggtgggtcaacggcaaagaggtgcacagcggcgtgtgtaccgacccccagccactgaaagaacagcccgccctgaacgacagccggtactgcctgagcagcagactgagagtgtccgccaccttctggcagaacccccggaaccacttcagatgccaggtgcagttctacggcctgagcgagaacgacgagtggacccaggacagagccaagcccgtgacccagatcgtgtctgccgaagcctggggcagagccgatgatgtgattaagatccactggcaggaaaagaagtccaacaccatcctgggcagccaggaaggcaacaccatgaagaccaacgacacctacatgaagttcagctggctgaccgtgcccgagaagtccctggacaaagaacacagatgcatcgtgcggcacgaaaacaacaagaacggcgtggaccaggaaatcatcttcccacccatcaagaccgatgtgattacaatggaccccaaggacaactgctccaaggacgccaacgataccctgctgctccagctgaccaacaccagcgcctactacatgtacttgttgctgctgctgaagtccgtggtgtacttcgccatcatcacatgctgcctgctgatggctatggtcaagcggaaggacagccggggaagggccaagcgatctggatctggagcaacaaacttctcactactcaaacaagcaggtgacgtggaggagaatcccgggcctactagtatggactggatttggcgcatccttttccttgtcggcgctgctaccggcgcgcattccgggccccagctccagctgcaagagtctggacctggcctggtcaagcctagcgagacactgagcctgacctgtaccgtgtccggcgatagcatcagcagcggcgattactactggggctggatcagacagcctcctggcaaaggactggaatggatcggccacatctactacagcggcgtgacctactacaaccccagcctgaagtccagagtgaccatcagcgtggacaccagccggaaccagttctccctgaagctgtctagcgtgacagccgccgataccgccgtgtactactgcaccagagaggacagcagcaactggcggagtagaggccagggaacactggtcacagttagctctggatccggcggaggcggaagtggaggcggaggatctggcggcggaggctctttcgaagaagtgcaactccagcagagcgtggccgagcttgtgaagcctggcgcttccgtgaagatgtcctgcaaggtgtccggctacaccctgacagaccacaccatccactggatgaagcagcggcctgagcagggcctggaatggatcggctacatctaccccagggacggcatcaccggctacaacgagaagttcaagggcaaggccacactgaccgccgacaccagcagcagcacagcctacatgcaactgaacagcctgaccagcgaggacagcgccgtgtacttctgtgccagatggggctacagctacagaaactacgcctactactacgactactggggccagggcacaaccctgaccgtgtctagtacgcgtatccagaaccctgatcctgccgtgtaccagctgcgggatagcaagagcagcgacaagagcgtgtgtctgttcaccgacttcgacagccagaccaacgtgtcccagagcaaggactccgacgtgtacatcaccgataagtgcgtgctggacatgcggagcatggacttcaagagcaactccgccgtggcctggtccaacaagtccgatttcgcctgcgccaacgccttcaacaacagcattatccccgaggacacattcttcccaagccccgagagcagcgactccaccgaccacgtgaagcccaaagagacagagaacaccaagcagcccagcaagagctgccacaagcccaaggccatcgtgcacaccgagaaagtgaacatgatgagcctgaccgtgctgggcctgcggatgctgttcgccaaaaccgtggccgtgaacttcctgctgaccgccaagctgttcttcctcctcaccgcc

SEQ ID NO: 6699 - DNA, 3009 bp, synthetic construct
  source 1..3009: mol_type = other DNA
atggccttaccagtgaccgccttgctcctgccgctggccttgctgctccacgccgccaggccggaagtgcagctggttgaatctggcggaggactggttcagcctggcggatctctgagactgtcttgtgccgccagcggcttcagcttcagcgacttttggatgagctgggtccgacaggcccctggcaaaggacttgaatgggtcgccacaatcagccaggccggcagcgagaaggactacgtggactctgtgaagggcagattcaccatcagccgggacaacgccaagaagtccctgtacctccagatgaacagcctgagagccgaggacaccgccgtgtactattgtgcctctggcgtgtacagcttcgactacagaggccagggcaccctggtcacagtctcttctggtaccggcggaggcggatctggcggcggaggtagcggtggcggaggatctgaattcgagatcgtgctgacacagagccctggcaccctgagcctgtctccaggcgaaagagccacactgagctgtcgggccagccagagcgtgtccagctcttacctggcctggtatcagcagaagcccggccaggctccccggctgctgatctacggaacaagcagcagagccaccggcatccccgacagattttctggcagcggctccggcaccgacttcaccctgacaatcagcagactggaacccgaggacttcgccgtgtactactgccagcagtacggcagcagccccttcacctttggcggaggcaccaaggtggaaatcaagagactcgaggacctgaagaacgtgttcccacctgaggtggccgtgttcgagcctagcgaggccgagatcagccacacccagaaagccaccctcgtgtgcctggctaccggcttctaccccgaccatgtggaactgtcttggtgggtcaacggcaaagaggtgcacagcggcgtgtgtaccgacccccagccactgaaagaacagcccgccctgaacgacagccggtactgcctgagcagcagactgagagtgtccgccaccttctggcagaacccccggaaccacttcagatgccaggtgcagttctacggcctgagcgagaacgacgagtggacccaggacagagccaagcccgtgacccagatcgtgtctgccgaagcctggggcagagccgatgatgtgattaagatccactggcaggaaaagaagtccaacaccatcctgggcagccaggaaggcaacaccatgaagaccaacgacacctacatgaagttcagctggctgaccgtgcccgagaagtccctggacaaagaacacagatgcatcgtgcggcacgaaaacaacaagaacggcgtggaccaggaaatcatcttcccacccatcaagaccgatgtgattacaatggaccccaaggacaactgctccaaggacgccaacgataccctgctgctccagctgaccaacaccagcgcctactacatgtacttgttgctgctgctgaagtccgtggtgtacttcgccatcatcacatgctgcctgctgatggctatggtcaagcggaaggacagccggggaagggccaagcgatctggatctggagcaacaaacttctcactactcaaacaagcaggtgacgtggaggagaatcccgggcctactagtatggactggatttggcgcatccttttccttgtcggcgctgctaccggcgcgcattccgggccccagctccagctgcaagagtctggacctggcctggtcaagcctagcgagacactgagcctgacctgtaccgtgtccggcgatagcatcagcagcggcgattactactggggctggatcagacagcctcctggcaaaggactggaatggatcggccacatctactacagcggcgtgacctactacaaccccagcctgaagtccagagtgaccatcagcgtggacaccagccggaaccagttctccctgaagctgtctagcgtgacagccgccgataccgccgtgtactactgcaccagagaggacagcagcaactggcggagtagaggccagggaacactggtcacagttagctctggatccggcggaggcggaagtggaggcggaggatctggcggcggaggctctttcgaacaggtgcaactccaggaatctggccccggactggctaagcccagcgagacactgagcctgacctgtaccgtgtccggcgacagcatcaccagctactactggtcctggatcagacagccccctggcaagggcctggaatggatcggctacatctactacagcggcagcaccaactacaaccccagcctgaagtccagagtgaccatcagcgtggacaccagcaagaaccagttctccctgaagctgagcagcgtgacagccgccgacaccgccgtgtattattgcgccagagatcagcggagaatcgccgctgccggcacccacttttacggcatggatgtgtggggccagggcaccaccgtgaccgtgtcatctacgcgtatccagaaccctgatcctgccgtgtaccagctgcgggatagcaagagcagcgacaagagcgtgtgtctgttcaccgacttcgacagccagaccaacgtgtcccagagcaaggactccgacgtgtacatcaccgataagtgcgtgctggacatgcggagcatggacttcaagagcaactccgccgtggcctggtccaacaagtccgatttcgcctgcgccaacgccttcaacaacagcattatccccgaggacacattcttcccaagccccgagagcagcgactccaccgaccacgtgaagcccaaagagacagagaacaccaagcagcccagcaagagctgccacaagcccaaggccatcgtgcacaccgagaaagtgaacatgatgagcctgaccgtgctgggcctgcggatgctgttcgccaaaaccgtggccgtgaacttcctgctgaccgccaagctgttcttcctcctcaccgcc

SEQ ID NO: 6700 - DNA, 2985 bp, synthetic construct
  source 1..2985: mol_type = other DNA
atggccttaccagtgaccgccttgctcctgccgctggccttgctgctccacgccgccaggccggaagtgcagctggttgaatctggcggaggactggttcagcctggcggatctctgagactgtcttgtgccgccagcggcttcagcttcagcgacttttggatgagctgggtccgacaggcccctggcaaaggacttgaatgggtcgccacaatcagccaggccggcagcgagaaggactacgtggactctgtgaagggcagattcaccatcagccgggacaacgccaagaagtccctgtacctccagatgaacagcctgagagccgaggacaccgccgtgtactattgtgcctctggcgtgtacagcttcgactacagaggccagggcaccctggtcacagtctcttctggtaccggcggaggcggatctggcggcggaggtagcggtggcggaggatctgaattcgacatcctgctgacccagagccccgtgatcctgtccgtgtctcctggcgagagagtgtccttcagctgtcgggccagccagagcatcggcaccaacatccactggtatcagcagcggaccaacggcagccccagactgctgattaagtacgccagcgagtccatcagcggcatccccagcagattttccggcagcggctccggcaccgacttcaccctgagcatcaacagcgtggaaagcgaggacattgccgactactactgccagcagaacaacaactggcccaccaccttcggagccggcaccaagctggaactgaagctcgaggacctgaagaacgtgttcccacctgaggtggccgtgttcgagcctagcgaggccgagatcagccacacccagaaagccaccctcgtgtgcctggctaccggcttctaccccgaccatgtggaactgtcttggtgggtcaacggcaaagaggtgcacagcggcgtgtgtaccgacccccagccactgaaagaacagcccgccctgaacgacagccggtactgcctgagcagcagactgagagtgtccgccaccttctggcagaacccccggaaccacttcagatgccaggtgcagttctacggcctgagcgagaacgacgagtggacccaggacagagccaagcccgtgacccagatcgtgtctgccgaagcctggggcagagccgatgatgtgattaagatccactggcaggaaaagaagtccaacaccatcctgggcagccaggaaggcaacaccatgaagaccaacgacacctacatgaagttcagctggctgaccgtgcccgagaagtccctggacaaagaacacagatgcatcgtgcggcacgaaaacaacaagaacggcgtggaccaggaaatcatcttcccacccatcaagaccgatgtgattacaatggaccccaaggacaactgctccaaggacgccaacgataccctgctgctccagctgaccaacaccagcgcctactacatgtacttgttgctgctgctgaagtccgtggtgtacttcgccatcatcacatgctgcctgctgatggctatggtcaagcggaaggacagccggggaagggccaagcgatctggatctggagcaacaaacttctcactactcaaacaagcaggtgacgtggaggagaatcccgggcctactagtatggactggatttggcgcatccttttccttgtcggcgctgctaccggcgcgcattccgggccccagctccagctgcaagagtctggacctggcctggtcaagcctagcgagacactgagcctgacctgtaccgtgtccggcgatagcatcagcagcggcgattactactggggctggatcagacagcctcctggcaaaggactggaatggatcggccacatctactacagcggcgtgacctactacaaccccagcctgaagtccagagtgaccatcagcgtggacaccagccggaaccagttctccctgaagctgtctagcgtgacagccgccgataccgccgtgtactactgcaccagagaggacagcagcaactggcggagtagaggccagggaacactggtcacagttagctctggatccggcggaggcggaagtggaggcggaggatctggcggcggaggctctttcgaacaggtgcagctgaagcagagcggacctggcctggtgcagcctagccagagcctgtccatcacctgtaccgtgtccggcttcagcctgaccaactacggcgtgcactgggtgcgccagagccctggaaaaggactggaatggctgggagtgatttggagcggcggcaacaccgactacaacacccccttcaccagcagactgtctatcaacaaggacaacagcaagagccaggtgttcttcaagatgaacagcctccagagcaacgacaccgccatctactactgtgctagagccctgacctactatgactacgagttcgcctactggggccagggcacactcgtgacagtgtctgctacgcgtatccagaaccctgatcctgccgtgtaccagctgcgggatagcaagagcagcgacaagagcgtgtgtctgttcaccgacttcgacagccagaccaacgtgtcccagagcaaggactccgacgtgtacatcaccgataagtgcgtgctggacatgcggagcatggacttcaagagcaactccgccgtggcctggtccaacaagtccgatttcgcctgcgccaacgccttcaacaacagcattatccccgaggacacattcttcccaagccccgagagcagcgactccaccgaccacgtgaagcccaaagagacagagaacaccaagcagcccagcaagagctgccacaagcccaaggccatcgtgcacaccgagaaagtgaacatgatgagcctgaccgtgctgggcctgcggatgctgttcgccaaaaccgtggccgtgaacttcctgctgaccgccaagctgttcttcctcctcaccgcc

SEQ ID NO: 6701 - DNA, 2964 bp, synthetic construct
  source 1..2964: mol_type = other DNA
atggccttaccagtgaccgccttgctcctgccgctggccttgctgctccacgccgccaggccggaagtgcagctggttgaatctggcggaggactggttcagcctggcggatctctgagactgtcttgtgccgccagcggcttcagcttcagcgacttttggatgagctgggtccgacaggcccctggcaaaggacttgaatgggtcgccacaatcagccaggccggcagcgagaaggactacgtggactctgtgaagggcagattcaccatcagccgggacaacgccaagaagtccctgtacctccagatgaacagcctgagagccgaggacaccgccgtgtactattgtgcctctggcgtgtacagcttcgactacagaggccagggcaccctggtcacagtctcttctggtaccggcggaggcggatctggcggcggaggtagcggtggcggaggatctgaattcatgacccagagccccaagttcctgctggtgtctgccggcgacagagtgaccctgacatgcaaggccagccagagcgtgaacaacgacgtgtactggtatcagcaggaacccggccagtcccccaagctgctgatctactgggccagcaccagagaaagcggcgtgcccgatagattcaccggcagcggctctggcaccgacttcaccctgacaatcagcagcgtgcaggccgaggacctggccgtgtactactgcaagcagagctacaacctgtacaccttcggcggaggcaccaagctggaaatcaagagactcgaggacctgaagaacgtgttcccacctgaggtggccgtgttcgagcctagcgaggccgagatcagccacacccagaaagccaccctcgtgtgcctggctaccggcttctaccccgaccatgtggaactgtcttggtgggtcaacggcaaagaggtgcacagcggcgtgtgtaccgacccccagccactgaaagaacagcccgccctgaacgacagccggtactgcctgagcagcagactgagagtgtccgccaccttctggcagaacccccggaaccacttcagatgccaggtgcagttctacggcctgagcgagaacgacgagtggacccaggacagagccaagcccgtgacccagatcgtgtctgccgaagcctggggcagagccgatgatgtgattaagatccactggcaggaaaagaagtccaacaccatcctgggcagccaggaaggcaacaccatgaagaccaacgacacctacatgaagttcagctggctgaccgtgcccgagaagtccctggacaaagaacacagatgcatcgtgcggcacgaaaacaacaagaacggcgtggaccaggaaatcatcttcccacccatcaagaccgatgtgattacaatggaccccaaggacaactgctccaaggacgccaacgataccctgctgctccagctgaccaacaccagcgcctactacatgtacttgttgctgctgctgaagtccgtggtgtacttcgccatcatcacatgctgcctgctgatggctatggtcaagcggaaggacagccggggaagggccaagcgatctggatctggagcaacaaacttctcactactcaaacaagcaggtgacgtggaggagaatcccgggcctactagtatggactggatttggcgcatccttttccttgtcggcgctgctaccggcgcgcattccgggccccagctccagctgcaagagtctggacctggcctggtcaagcctagcgagacactgagcctgacctgtaccgtgtccggcgatagcatcagcagcggcgattactactggggctggatcagacagcctcctggcaaaggactggaatggatcggccacatctactacagcggcgtgacctactacaaccccagcctgaagtccagagtgaccatcagcgtggacaccagccggaaccagttctccctgaagctgtctagcgtgacagccgccgataccgccgtgtactactgcaccagagaggacagcagcaactggcggagtagaggccagggaacactggtcacagttagctctggatccggcggaggcggaagtggaggcggaggatctggcggcggaggctctttcgaagaatctggaagaggactggtgcagcctggcggcagcagaaagctgtcttgtgccgccagcggcttcaccttcagcaccagcggaatgcactgggtgcgccaggcccctgagaagggactggaatgggtggcctacatcagctccggcagcaccaccatctaccacgccgataccgtgaagggccggttcaccatcagccgggacaaccccaagaataccctgttcctccagatgaccagcctgcggagcgaggacaccgccatgtactattgctgcgccagaagcggccagttcggcaactacttcgactactggggccagggcaccaccctgaccgtgtcatctacgcgtatccagaaccctgatcctgccgtgtaccagctgcgggatagcaagagcagcgacaagagcgtgtgtctgttcaccgacttcgacagccagaccaacgtgtcccagagcaaggactccgacgtgtacatcaccgataagtgcgtgctggacatgcggagcatggacttcaagagcaactccgccgtggcctggtccaacaagtccgatttcgcctgcgccaacgccttcaacaacagcattatccccgaggacacattcttcccaagccccgagagcagcgactccaccgaccacgtgaagcccaaagagacagagaacaccaagcagcccagcaagagctgccacaagcccaaggccatcgtgcacaccgagaaagtgaacatgatgagcctgaccgtgctgggcctgcggatgctgttcgccaaaaccgtggccgtgaacttcctgctgaccgccaagctgttcttcctcctcaccgcc

SEQ ID NO: 6702 - DNA, 2979 bp, synthetic construct
  source 1..2979: mol_type = other DNA
atggccttaccagtgaccgccttgctcctgccgctggccttgctgctccacgccgccaggccggaagtgcagctggttgaatctggcggaggactggttcagcctggcggatctctgagactgtcttgtgccgccagcggcttcagcttcagcgacttttggatgagctgggtccgacaggcccctggcaaaggacttgaatgggtcgccacaatcagccaggccggcagcgagaaggactacgtggactctgtgaagggcagattcaccatcagccgggacaacgccaagaagtccctgtacctccagatgaacagcctgagagccgaggacaccgccgtgtactattgtgcctctggcgtgtacagcttcgactacagaggccagggcaccctggtcacagtctcttctggtaccggcggaggcggatctggcggcggaggtagcggtggcggaggatctgaattccagagcccatctagcctggctgtgtctgccggcgagaaagtgaccatgagctgcaagagcagccagagcctgctgaacagccggacccggaagaactacctggcctggtatcagcagaagcccggccagagccccaagctgctgatctactgggccagcaccagagaaagcggcgtgcccgatagattcaccggctctggcagcggcaccgacttcaccctgacaatcagcagcgtgcaggccgaggacctggccgtgtactactgcaagcagagcaacctgtacaccttcggcggaggcaccaagctggaaatcaagctcgaggacctgaagaacgtgttcccacctgaggtggccgtgttcgagcctagcgaggccgagatcagccacacccagaaagccaccctcgtgtgcctggctaccggcttctaccccgaccatgtggaactgtcttggtgggtcaacggcaaagaggtgcacagcggcgtgtgtaccgacccccagccactgaaagaacagcccgccctgaacgacagccggtactgcctgagcagcagactgagagtgtccgccaccttctggcagaacccccggaaccacttcagatgccaggtgcagttctacggcctgagcgagaacgacgagtggacccaggacagagccaagcccgtgacccagatcgtgtctgccgaagcctggggcagagccgatgatgtgattaagatccactggcaggaaaagaagtccaacaccatcctgggcagccaggaaggcaacaccatgaagaccaacgacacctacatgaagttcagctggctgaccgtgcccgagaagtccctggacaaagaacacagatgcatcgtgcggcacgaaaacaacaagaacggcgtggaccaggaaatcatcttcccacccatcaagaccgatgtgattacaatggaccccaaggacaactgctccaaggacgccaacgataccctgctgctccagctgaccaacaccagcgcctactacatgtacttgttgctgctgctgaagtccgtggtgtacttcgccatcatcacatgctgcctgctgatggctatggtcaagcggaaggacagccggggaagggccaagcgatctggatctggagcaacaaacttctcactactcaaacaagcaggtgacgtggaggagaatcccgggcctactagtatggactggatttggcgcatccttttccttgtcggcgctgctaccggcgcgcattccgggccccagctccagctgcaagagtctggacctggcctggtcaagcctagcgagacactgagcctgacctgtaccgtgtccggcgatagcatcagcagcggcgattactactggggctggatcagacagcctcctggcaaaggactggaatggatcggccacatctactacagcggcgtgacctactacaaccccagcctgaagtccagagtgaccatcagcgtggacaccagccggaaccagttctccctgaagctgtctagcgtgacagccgccgataccgccgtgtactactgcaccagagaggacagcagcaactggcggagtagaggccagggaacactggtcacagttagctctggatccggcggaggcggaagtggaggcggaggatctggcggcggaggctctttcgaacaggtgcagctggaagagtctggacccgagcttgtgaagcctggggccagcgtgaagctgtcctgtaaagccagcggctacaccttcaccgagtacatcatccactgggtcaagcagcggagcggccagggcctggaatggatcggctggttttaccctggctccggcagcatcaagtacaacgagaagttcaaggacaaggccaccctgaccgccgacaagtccagcagcaccgtgtacatggaactgagcggcctgaccagcgaggacagcgccgtgtatttctgcgccagacacgacggctacagctacttcgactattggggccagggcaccacactgaccgtgtcctctacgcgtatccagaaccctgatcctgccgtgtaccagctgcgggatagcaagagcagcgacaagagcgtgtgtctgttcaccgacttcgacagccagaccaacgtgtcccagagcaaggactccgacgtgtacatcaccgataagtgcgtgctggacatgcggagcatggacttcaagagcaactccgccgtggcctggtccaacaagtccgatttcgcctgcgccaacgccttcaacaacagcattatccccgaggacacattcttcccaagccccgagagcagcgactccaccgaccacgtgaagcccaaagagacagagaacaccaagcagcccagcaagagctgccacaagcccaaggccatcgtgcacaccgagaaagtgaacatgatgagcctgaccgtgctgggcctgcggatgctgttcgccaaaaccgtggccgtgaacttcctgctgaccgccaagctgttcttcctcctcaccgcc

SEQ ID NO: 6703 - DNA, 2988 bp, synthetic construct
  source 1..2988: mol_type = other DNA
atggccttaccagtgaccgccttgctcctgccgctggccttgctgctccacgccgccaggccggaagtgcagctggttgaatctggcggaggactggttcagcctggcggatctctgagactgtcttgtgccgccagcggcttcagcttcagcgacttttggatgagctgggtccgacaggcccctggcaaaggacttgaatgggtcgccacaatcagccaggccggcagcgagaaggactacgtggactctgtgaagggcagattcaccatcagccgggacaacgccaagaagtccctgtacctccagatgaacagcctgagagccgaggacaccgccgtgtactattgtgcctctggcgtgtacagcttcgactacagaggccagggcaccctggtcacagtctcttctggtaccggcggaggcggatctggcggcggaggtagcggtggcggaggatctgaattcgacatccagatgacccagagccccagcagcctgtctgcctctctgggcgagagagtgtccctgacctgtcgggccacacaggaactgagcggctacctgtcttggctgcagcagaagcccgacggcaccatcaagcggctgatctacgccgccagcaccctggatagcggcgtgcccaagagattcagcggcaacagaagcggcagcgactacagcctgaccatcagctccctggaaagcgaggacttcgccgactactactgcctgcagtacgccatctacccctacaccttcggcggaggcaccaagctggaaatcaagctcgaggacctgaagaacgtgttcccacctgaggtggccgtgttcgagcctagcgaggccgagatcagccacacccagaaagccaccctcgtgtgcctggctaccggcttctaccccgaccatgtggaactgtcttggtgggtcaacggcaaagaggtgcacagcggcgtgtgtaccgacccccagccactgaaagaacagcccgccctgaacgacagccggtactgcctgagcagcagactgagagtgtccgccaccttctggcagaacccccggaaccacttcagatgccaggtgcagttctacggcctgagcgagaacgacgagtggacccaggacagagccaagcccgtgacccagatcgtgtctgccgaagcctggggcagagccgatgatgtgattaagatccactggcaggaaaagaagtccaacaccatcctgggcagccaggaaggcaacaccatgaagaccaacgacacctacatgaagttcagctggctgaccgtgcccgagaagtccctggacaaagaacacagatgcatcgtgcggcacgaaaacaacaagaacggcgtggaccaggaaatcatcttcccacccatcaagaccgatgtgattacaatggaccccaaggacaactgctccaaggacgccaacgataccctgctgctccagctgaccaacaccagcgcctactacatgtacttgttgctgctgctgaagtccgtggtgtacttcgccatcatcacatgctgcctgctgatggctatggtcaagcggaaggacagccggggaagggccaagcgatctggatctggagcaacaaacttctcactactcaaacaagcaggtgacgtggaggagaatcccgggcctactagtatggactggatttggcgcatccttttccttgtcggcgctgctaccggcgcgcattccgggccccagctccagctgcaagagtctggacctggcctggtcaagcctagcgagacactgagcctgacctgtaccgtgtccggcgatagcatcagcagcggcgattactactggggctggatcagacagcctcctggcaaaggactggaatggatcggccacatctactacagcggcgtgacctactacaaccccagcctgaagtccagagtgaccatcagcgtggacaccagccggaaccagttctccctgaagctgtctagcgtgacagccgccgataccgccgtgtactactgcaccagagaggacagcagcaactggcggagtagaggccagggaacactggtcacagttagctctggatccggcggaggcggaagtggaggcggaggatctggcggcggaggctctttcgaagaggtgcaactgcagcagtctggccccgagcttgtgaagcctggcgcctccgtgaagatgagctgcaaggccagcggctacacctttaccagctacttcatccactgggtcaagcagaaacccggccagggcctggaatggatcggcttcatcaacccttacaacgacggcagcaagtacaacgagaagttcaagggcaaggccaccctgaccagcgacaagagcagcagcaccgcctacatggaactgtccagcctgacatccgaggacagcgccgtgtactactgcaccagggacgacggctactacggctacgccatggactactggggccagggaacaagcgtcaccgtgtcctctacgcgtatccagaaccctgatcctgccgtgtaccagctgcgggatagcaagagcagcgacaagagcgtgtgtctgttcaccgacttcgacagccagaccaacgtgtcccagagcaaggactccgacgtgtacatcaccgataagtgcgtgctggacatgcggagcatggacttcaagagcaactccgccgtggcctggtccaacaagtccgatttcgcctgcgccaacgccttcaacaacagcattatccccgaggacacattcttcccaagccccgagagcagcgactccaccgaccacgtgaagcccaaagagacagagaacaccaagcagcccagcaagagctgccacaagcccaaggccatcgtgcacaccgagaaagtgaacatgatgagcctgaccgtgctgggcctgcggatgctgttcgccaaaaccgtggccgtgaacttcctgctgaccgccaagctgttcttcctcctcaccgcc

SEQ ID NO: 6704 - DNA, 3003 bp, synthetic construct
  source 1..3003: mol_type = other DNA
atggccttaccagtgaccgccttgctcctgccgctggccttgctgctccacgccgccaggccggaagtgcagctggttgaatctggcggaggactggttcagcctggcggatctctgagactgtcttgtgccgccagcggcttcagcttcagcgacttttggatgagctgggtccgacaggcccctggcaaaggacttgaatgggtcgccacaatcagccaggccggcagcgagaaggactacgtggactctgtgaagggcagattcaccatcagccgggacaacgccaagaagtccctgtacctccagatgaacagcctgagagccgaggacaccgccgtgtactattgtgcctctggcgtgtacagcttcgactacagaggccagggcaccctggtcacagtctcttctggtaccggcggaggcggatctggcggcggaggtagcggtggcggaggatctgaattcgacaccatcgtgctgacacagagccctgcttccctggccgtgtccctgggacagagagccaccatctcttgcagagccagcgagagcgtggacagctacggcaacagcttcatgcactggtatcagcagaagcccggccagccccccaagctgctgatctacctggcctccaacctggaaagcggcgtgcccgccagattttctggcagcggcagcagaaccgacttcaccctgaccatcgaccccgtggaagccgatgatgccgccacctactactgccagcagaacaactacgacccctggaccttcggcggaggcaccaagctggaaatcaagctcgaggacctgaagaacgtgttcccacctgaggtggccgtgttcgagcctagcgaggccgagatcagccacacccagaaagccaccctcgtgtgcctggctaccggcttctaccccgaccatgtggaactgtcttggtgggtcaacggcaaagaggtgcacagcggcgtgtgtaccgacccccagccactgaaagaacagcccgccctgaacgacagccggtactgcctgagcagcagactgagagtgtccgccaccttctggcagaacccccggaaccacttcagatgccaggtgcagttctacggcctgagcgagaacgacgagtggacccaggacagagccaagcccgtgacccagatcgtgtctgccgaagcctggggcagagccgatgatgtgattaagatccactggcaggaaaagaagtccaacaccatcctgggcagccaggaaggcaacaccatgaagaccaacgacacctacatgaagttcagctggctgaccgtgcccgagaagtccctggacaaagaacacagatgcatcgtgcggcacgaaaacaacaagaacggcgtggaccaggaaatcatcttcccacccatcaagaccgatgtgattacaatggaccccaaggacaactgctccaaggacgccaacgataccctgctgctccagctgaccaacaccagcgcctactacatgtacttgttgctgctgctgaagtccgtggtgtacttcgccatcatcacatgctgcctgctgatggctatggtcaagcggaaggacagccggggaagggccaagcgatctggatctggagcaacaaacttctcactactcaaacaagcaggtgacgtggaggagaatcccgggcctactagtatggactggatttggcgcatccttttccttgtcggcgctgctaccggcgcgcattccgggccccagctccagctgcaagagtctggacctggcctggtcaagcctagcgagacactgagcctgacctgtaccgtgtccggcgatagcatcagcagcggcgattactactggggctggatcagacagcctcctggcaaaggactggaatggatcggccacatctactacagcggcgtgacctactacaaccccagcctgaagtccagagtgaccatcagcgtggacaccagccggaaccagttctccctgaagctgtctagcgtgacagccgccgataccgccgtgtactactgcaccagagaggacagcagcaactggcggagtagaggccagggaacactggtcacagttagctctggatccggcggaggcggaagtggaggcggaggatctggcggcggaggctctttcgaagaagtgcaactccagcagagcggccctgagcttgtgaagcctggcgcttccgtgaagatgagctgcaaggccagcggctacaccttcaccagctacgtgatgcactgggtcaagcagaaacctggacagggcctggaatggatcggctacatcaacccctacaacgacggcaccaagtacaacgagaagttcaagggcaaggccaccctgacaagcgacaccagcagcagcaccgcctacatggaactgaacagcctgaccagcgaggacagcgccgtgtacttctgcgccagacccatctacttcgacaacgactacttcgattactggggccagggcaccaccctgaaggtgtcctctacgcgtatccagaaccctgatcctgccgtgtaccagctgcgggatagcaagagcagcgacaagagcgtgtgtctgttcaccgacttcgacagccagaccaacgtgtcccagagcaaggactccgacgtgtacatcaccgataagtgcgtgctggacatgcggagcatggacttcaagagcaactccgccgtggcctggtccaacaagtccgatttcgcctgcgccaacgccttcaacaacagcattatccccgaggacacattcttcccaagccccgagagcagcgactccaccgaccacgtgaagcccaaagagacagagaacaccaagcagcccagcaagagctgccacaagcccaaggccatcgtgcacaccgagaaagtgaacatgatgagcctgaccgtgctgggcctgcggatgctgttcgccaaaaccgtggccgtgaacttcctgctgaccgccaagctgttcttcctcctcaccgcc

SEQ ID NO: 6705 - DNA, 2988 bp, synthetic construct
  source 1..2988: mol_type = other DNA
atggccttaccagtgaccgccttgctcctgccgctggccttgctgctccacgccgccaggccggaagtgcagctggttgaatctggcggaggactggttcagcctggcggatctctgagactgtcttgtgccgccagcggcttcagcttcagcgacttttggatgagctgggtccgacaggcccctggcaaaggacttgaatgggtcgccacaatcagccaggccggcagcgagaaggactacgtggactctgtgaagggcagattcaccatcagccgggacaacgccaagaagtccctgtacctccagatgaacagcctgagagccgaggacaccgccgtgtactattgtgcctctggcgtgtacagcttcgactacagaggccagggcaccctggtcacagtctcttctggtaccggcggaggcggatctggcggcggaggtagcggtggcggaggatctgaattcgacatccagatgacccagagccccagcagcctgtctgccagcgtgggcgacagagtgaccatcacatgcaaggccagccaggacgtgggaatcgccgtggcctggtatcagcagaaacccggcaaggtgcccaagctgctgatctactgggccagcaccagacacaccggcgtgcccgatagattttccggcagcggctccggcaccgacttcaccctgacaatcagctccctccagcccgaggacgtggcaacctactactgccagcagtacagcagctacccctacaccttcggccagggcaccaaggtggaaatcaagagactcgaggacctgaagaacgtgttcccacctgaggtggccgtgttcgagcctagcgaggccgagatcagccacacccagaaagccaccctcgtgtgcctggctaccggcttctaccccgaccatgtggaactgtcttggtgggtcaacggcaaagaggtgcacagcggcgtgtgtaccgacccccagccactgaaagaacagcccgccctgaacgacagccggtactgcctgagcagcagactgagagtgtccgccaccttctggcagaacccccggaaccacttcagatgccaggtgcagttctacggcctgagcgagaacgacgagtggacccaggacagagccaagcccgtgacccagatcgtgtctgccgaagcctggggcagagccgatgatgtgattaagatccactggcaggaaaagaagtccaacaccatcctgggcagccaggaaggcaacaccatgaagaccaacgacacctacatgaagttcagctggctgaccgtgcccgagaagtccctggacaaagaacacagatgcatcgtgcggcacgaaaacaacaagaacggcgtggaccaggaaatcatcttcccacccatcaagaccgatgtgattacaatggaccccaaggacaactgctccaaggacgccaacgataccctgctgctccagctgaccaacaccagcgcctactacatgtacttgttgctgctgctgaagtccgtggtgtacttcgccatcatcacatgctgcctgctgatggctatggtcaagcggaaggacagccggggaagggccaagcgatctggatctggagcaacaaacttctcactactcaaacaagcaggtgacgtggaggagaatcccgggcctactagtatggactggatttggcgcatccttttccttgtcggcgctgctaccggcgcgcattccgggccccagctccagctgcaagagtctggacctggcctggtcaagcctagcgagacactgagcctgacctgtaccgtgtccggcgatagcatcagcagcggcgattactactggggctggatcagacagcctcctggcaaaggactggaatggatcggccacatctactacagcggcgtgacctactacaaccccagcctgaagtccagagtgaccatcagcgtggacaccagccggaaccagttctccctgaagctgtctagcgtgacagccgccgataccgccgtgtactactgcaccagagaggacagcagcaactggcggagtagaggccagggaacactggtcacagttagctctggatccggcggaggcggaagtggaggcggaggatctggcggcggaggctctttcgaagaagtgcaactggtggaatcaggcggcggactggtgcagcctggcggatctctgagactgagctgtgccgccagcggcttcgacttcagccggtactggatgagctgggtgcgccaggcccctggcaaaggactggaatggatcggcgagatcaaccccgacagcagcaccatcaactacgcccccagcctgaaggacaagttcatcatcagccgggacaacgccaagaacagcctgtacctccagatgaactccctgcgggccgaggacaccgccgtgtactattgcgccagacccgacggcaactactggtacttcgacgtgtggggccagggaaccctcgtgaccgtgtcatctacgcgtatccagaaccctgatcctgccgtgtaccagctgcgggatagcaagagcagcgacaagagcgtgtgtctgttcaccgacttcgacagccagaccaacgtgtcccagagcaaggactccgacgtgtacatcaccgataagtgcgtgctggacatgcggagcatggacttcaagagcaactccgccgtggcctggtccaacaagtccgatttcgcctgcgccaacgccttcaacaacagcattatccccgaggacacattcttcccaagccccgagagcagcgactccaccgaccacgtgaagcccaaagagacagagaacaccaagcagcccagcaagagctgccacaagcccaaggccatcgtgcacaccgagaaagtgaacatgatgagcctgaccgtgctgggcctgcggatgctgttcgccaaaaccgtggccgtgaacttcctgctgaccgccaagctgttcttcctcctcaccgcc

SEQ ID NO: 6706 - DNA, 2988 bp, synthetic construct
  source 1..2988: mol_type = other DNA
atggccttaccagtgaccgccttgctcctgccgctggccttgctgctccacgccgccaggccggaagtgcagctggttgaatctggcggaggactggttcagcctggcggatctctgagactgtcttgtgccgccagcggcttcagcttcagcgacttttggatgagctgggtccgacaggcccctggcaaaggacttgaatgggtcgccacaatcagccaggccggcagcgagaaggactacgtggactctgtgaagggcagattcaccatcagccgggacaacgccaagaagtccctgtacctccagatgaacagcctgagagccgaggacaccgccgtgtactattgtgcctctggcgtgtacagcttcgactacagaggccagggcaccctggtcacagtctcttctggtaccggcggaggcggatctggcggcggaggtagcggtggcggaggatctgaattcgacatcgtgatgacccagagccagaagagcatgagcaccagcgtgggcgacagagtgagcatcacctgcaaggccagccaggacgtgatcaccggcgtggcctggtaccagcagaagcccggccagagccccaagctgctgatctacagcgccagctacagatacaccggcgtgcccgacagattcaccggcagcggcagcggcaccgacttcaccttcaccatcagcaacgtgcaggccgaggacctggccgtgtactactgccagcagcactacagcacccccctgaccttcggcgccggcaccaagctggagctgaagctcgaggacctgaagaacgtgttcccacctgaggtggccgtgttcgagcctagcgaggccgagatcagccacacccagaaagccaccctcgtgtgcctggctaccggcttctaccccgaccatgtggaactgtcttggtgggtcaacggcaaagaggtgcacagcggcgtgtgtaccgacccccagccactgaaagaacagcccgccctgaacgacagccggtactgcctgagcagcagactgagagtgtccgccaccttctggcagaacccccggaaccacttcagatgccaggtgcagttctacggcctgagcgagaacgacgagtggacccaggacagagccaagcccgtgacccagatcgtgtctgccgaagcctggggcagagccgatgatgtgattaagatccactggcaggaaaagaagtccaacaccatcctgggcagccaggaaggcaacaccatgaagaccaacgacacctacatgaagttcagctggctgaccgtgcccgagaagtccctggacaaagaacacagatgcatcgtgcggcacgaaaacaacaagaacggcgtggaccaggaaatcatcttcccacccatcaagaccgatgtgattacaatggaccccaaggacaactgctccaaggacgccaacgataccctgctgctccagctgaccaacaccagcgcctactacatgtacttgttgctgctgctgaagtccgtggtgtacttcgccatcatcacatgctgcctgctgatggctatggtcaagcggaaggacagccggggaagggccaagcgatctggatctggagcaacaaacttctcactactcaaacaagcaggtgacgtggaggagaatcccgggcctactagtatggactggatttggcgcatccttttccttgtcggcgctgctaccggcgcgcattccgggccccagctccagctgcaagagtctggacctggcctggtcaagcctagcgagacactgagcctgacctgtaccgtgtccggcgatagcatcagcagcggcgattactactggggctggatcagacagcctcctggcaaaggactggaatggatcggccacatctactacagcggcgtgacctactacaaccccagcctgaagtccagagtgaccatcagcgtggacaccagccggaaccagttctccctgaagctgtctagcgtgacagccgccgataccgccgtgtactactgcaccagagaggacagcagcaactggcggagtagaggccagggaacactggtcacagttagctctggatccggcggaggcggaagtggaggcggaggatctggcggcggaggctctttcgaacaggtgcagctgcagcagcccggcgccgagctggtgagacccggcgccagcgtgaagctgagctgcaaggccagcggctacagcttcaccacctactggatgaactgggtgaagcagagacccggccagggcctggagtggatcggcatgatccaccccagcgacagcgagaccagactgaaccagaagttcaaggacaaggccaccctgaccgtggacaagagcagcagcaccgcctacatgcagctgagcagccccaccagcgaggacagcgccgtgtactactgcgccagaagcaccatgatcgccaccagagccatggactactggggccagggcaccagcgtgaccgtgagcagcacgcgtatccagaaccctgatcctgccgtgtaccagctgcgggatagcaagagcagcgacaagagcgtgtgtctgttcaccgacttcgacagccagaccaacgtgtcccagagcaaggactccgacgtgtacatcaccgataagtgcgtgctggacatgcggagcatggacttcaagagcaactccgccgtggcctggtccaacaagtccgatttcgcctgcgccaacgccttcaacaacagcattatccccgaggacacattcttcccaagccccgagagcagcgactccaccgaccacgtgaagcccaaagagacagagaacaccaagcagcccagcaagagctgccacaagcccaaggccatcgtgcacaccgagaaagtgaacatgatgagcctgaccgtgctgggcctgcggatgctgttcgccaaaaccgtggccgtgaacttcctgctgaccgccaagctgttcttcctcctcaccgcc

SEQ ID NO: 6707 - DNA, 3006 bp, synthetic construct
  source 1..3006: mol_type = other DNA
atggccttaccagtgaccgccttgctcctgccgctggccttgctgctccacgccgccaggccggaagtgcagctggttgaatctggcggaggactggttcagcctggcggatctctgagactgtcttgtgccgccagcggcttcagcttcagcgacttttggatgagctgggtccgacaggcccctggcaaaggacttgaatgggtcgccacaatcagccaggccggcagcgagaaggactacgtggactctgtgaagggcagattcaccatcagccgggacaacgccaagaagtccctgtacctccagatgaacagcctgagagccgaggacaccgccgtgtactattgtgcctctggcgtgtacagcttcgactacagaggccagggcaccctggtcacagtctcttctggtaccggcggaggcggatctggcggcggaggtagcggtggcggaggatctgaattccagagcgtgctgacacagcctccatccgtgtctggcgctccaggccagagagtgaccatctcctgtaccggcagcggcagcaacatcggagccccctacgacgtgtcctggtatcagcaactgcctggcaccgcccccaagctgctgatctaccacaacaacaagcggcccagcggcgtgcccgatagattcagcggctctaagagcggcaccagcgccagcctggctatcactggactccaggccgaggacgaggccgactactactgtgccacagtggaagccggcctgagcggctctgtgtttggcggcggaacaaagctgaccgtgctgggagctctcgaggacctgaagaacgtgttcccacctgaggtggccgtgttcgagcctagcgaggccgagatcagccacacccagaaagccaccctcgtgtgcctggctaccggcttctaccccgaccatgtggaactgtcttggtgggtcaacggcaaagaggtgcacagcggcgtgtgtaccgacccccagccactgaaagaacagcccgccctgaacgacagccggtactgcctgagcagcagactgagagtgtccgccaccttctggcagaacccccggaaccacttcagatgccaggtgcagttctacggcctgagcgagaacgacgagtggacccaggacagagccaagcccgtgacccagatcgtgtctgccgaagcctggggcagagccgatgatgtgattaagatccactggcaggaaaagaagtccaacaccatcctgggcagccaggaaggcaacaccatgaagaccaacgacacctacatgaagttcagctggctgaccgtgcccgagaagtccctggacaaagaacacagatgcatcgtgcggcacgaaaacaacaagaacggcgtggaccaggaaatcatcttcccacccatcaagaccgatgtgattacaatggaccccaaggacaactgctccaaggacgccaacgataccctgctgctccagctgaccaacaccagcgcctactacatgtacttgttgctgctgctgaagtccgtggtgtacttcgccatcatcacatgctgcctgctgatggctatggtcaagcggaaggacagccggggaagggccaagcgatctggatctggagcaacaaacttctcactactcaaacaagcaggtgacgtggaggagaatcccgggcctactagtatggactggatttggcgcatccttttccttgtcggcgctgctaccggcgcgcattccgggccccagctccagctgcaagagtctggacctggcctggtcaagcctagcgagacactgagcctgacctgtaccgtgtccggcgatagcatcagcagcggcgattactactggggctggatcagacagcctcctggcaaaggactggaatggatcggccacatctactacagcggcgtgacctactacaaccccagcctgaagtccagagtgaccatcagcgtggacaccagccggaaccagttctccctgaagctgtctagcgtgacagccgccgataccgccgtgtactactgcaccagagaggacagcagcaactggcggagtagaggccagggaacactggtcacagttagctctggatccggcggaggcggaagtggaggcggaggatctggcggcggaggctctttcgaacaggtgcaactggtgcagagcggagccgaagtgaagaaacctggggccagcgtgaaggtgtcctgcaaggtgtccggctacaccctgaccgagctgagcattcactgggtgcgccaggcccctggcaagggactggaatggatgggcggcttcgaccccgaagagaacgagatcgtgtacgcccagcggttccagggcagagtgacaatgaccgaggacaccagcaccgacaccgcctacatggaactgagcagcctgcggagcgaggataccgccgtgtactactgcgccatcgtgggcagcttcagccctctgacactgggcctgtggggccagggaactatggtcaccgtgtccagcacgcgtatccagaaccctgatcctgccgtgtaccagctgcgggatagcaagagcagcgacaagagcgtgtgtctgttcaccgacttcgacagccagaccaacgtgtcccagagcaaggactccgacgtgtacatcaccgataagtgcgtgctggacatgcggagcatggacttcaagagcaactccgccgtggcctggtccaacaagtccgatttcgcctgcgccaacgccttcaacaacagcattatccccgaggacacattcttcccaagccccgagagcagcgactccaccgaccacgtgaagcccaaagagacagagaacaccaagcagcccagcaagagctgccacaagcccaaggccatcgtgcacaccgagaaagtgaacatgatgagcctgaccgtgctgggcctgcggatgctgttcgccaaaaccgtggccgtgaacttcctgctgaccgccaagctgttcttcctcctcaccgcc

SEQ ID NO: 6708 - DNA, 3006 bp, synthetic construct
  source 1..3006: mol_type = other DNA
atggccttaccagtgaccgccttgctcctgccgctggccttgctgctccacgccgccaggccggaagtgcagctggttgaatctggcggaggactggttcagcctggcggatctctgagactgtcttgtgccgccagcggcttcagcttcagcgacttttggatgagctgggtccgacaggcccctggcaaaggacttgaatgggtcgccacaatcagccaggccggcagcgagaaggactacgtggactctgtgaagggcagattcaccatcagccgggacaacgccaagaagtccctgtacctccagatgaacagcctgagagccgaggacaccgccgtgtactattgtgcctctggcgtgtacagcttcgactacagaggccagggcaccctggtcacagtctcttctggtaccggcggaggcggatctggcggcggaggtagcggtggcggaggatctgaattccagagcgtgctgacacagcctccatccgtgtctggcgctccaggccagagagtgaccatctcctgtaccggcagcggcagcaacatcggagccccctacgacgtgtcctggtatcagcaactgcctggcaccgcccccaagctgctgatctaccacaacaacaagcggcccagcggcgtgcccgatagattcagcggctctaagagcggcaccagcgccagcctggctatcactggactccaggccgaggacgaggccgactactactgccagagctacgacagcagcagcatcagcaccatcttcggcggaggcaccaagctgacagtgctgggagctctcgaggacctgaagaacgtgttcccacctgaggtggccgtgttcgagcctagcgaggccgagatcagccacacccagaaagccaccctcgtgtgcctggctaccggcttctaccccgaccatgtggaactgtcttggtgggtcaacggcaaagaggtgcacagcggcgtgtgtaccgacccccagccactgaaagaacagcccgccctgaacgacagccggtactgcctgagcagcagactgagagtgtccgccaccttctggcagaacccccggaaccacttcagatgccaggtgcagttctacggcctgagcgagaacgacgagtggacccaggacagagccaagcccgtgacccagatcgtgtctgccgaagcctggggcagagccgatgatgtgattaagatccactggcaggaaaagaagtccaacaccatcctgggcagccaggaaggcaacaccatgaagaccaacgacacctacatgaagttcagctggctgaccgtgcccgagaagtccctggacaaagaacacagatgcatcgtgcggcacgaaaacaacaagaacggcgtggaccaggaaatcatcttcccacccatcaagaccgatgtgattacaatggaccccaaggacaactgctccaaggacgccaacgataccctgctgctccagctgaccaacaccagcgcctactacatgtacttgttgctgctgctgaagtccgtggtgtacttcgccatcatcacatgctgcctgctgatggctatggtcaagcggaaggacagccggggaagggccaagcgatctggatctggagcaacaaacttctcactactcaaacaagcaggtgacgtggaggagaatcccgggcctactagtatggactggatttggcgcatccttttccttgtcggcgctgctaccggcgcgcattccgggccccagctccagctgcaagagtctggacctggcctggtcaagcctagcgagacactgagcctgacctgtaccgtgtccggcgatagcatcagcagcggcgattactactggggctggatcagacagcctcctggcaaaggactggaatggatcggccacatctactacagcggcgtgacctactacaaccccagcctgaagtccagagtgaccatcagcgtggacaccagccggaaccagttctccctgaagctgtctagcgtgacagccgccgataccgccgtgtactactgcaccagagaggacagcagcaactggcggagtagaggccagggaacactggtcacagttagctctggatccggcggaggcggaagtggaggcggaggatctggcggcggaggctctttcgaacaggtgcaactggtgcagagcggagccgaagtgaagaaacctggggccagcgtgaaggtgtcctgcaaggtgtccggctacaccctgaccgagctgagcattcactgggtgcgccaggcccctggcaagggactggaatggatgggcggcttcgaccccgaagagaacgagatcgtgtacgcccagcggttccagggcagagtgacaatgaccgaggacaccagcaccgacaccgcctacatggaactgagcagcctgcggagcgaggataccgccgtgtactactgtgccatcgtgggcagcttcagcggaatcgcctacagaccttggggccagggcacaatggtcaccgtgtctagcacgcgtatccagaaccctgatcctgccgtgtaccagctgcgggatagcaagagcagcgacaagagcgtgtgtctgttcaccgacttcgacagccagaccaacgtgtcccagagcaaggactccgacgtgtacatcaccgataagtgcgtgctggacatgcggagcatggacttcaagagcaactccgccgtggcctggtccaacaagtccgatttcgcctgcgccaacgccttcaacaacagcattatccccgaggacacattcttcccaagccccgagagcagcgactccaccgaccacgtgaagcccaaagagacagagaacaccaagcagcccagcaagagctgccacaagcccaaggccatcgtgcacaccgagaaagtgaacatgatgagcctgaccgtgctgggcctgcggatgctgttcgccaaaaccgtggccgtgaacttcctgctgaccgccaagctgttcttcctcctcaccgcc

SEQ ID NO: 6709 - DNA, 2970 bp, synthetic construct
  source 1..2970: mol_type = other DNA
atggccttaccagtgaccgccttgctcctgccgctggccttgctgctccacgccgccaggccggaagtgcagctggttgaatctggcggaggactggttcagcctggcggatctctgagactgtcttgtgccgccagcggcttcagcttcagcgacttttggatgagctgggtccgacaggcccctggcaaaggacttgaatgggtcgccacaatcagccaggccggcagcgagaaggactacgtggactctgtgaagggcagattcaccatcagccgggacaacgccaagaagtccctgtacctccagatgaacagcctgagagccgaggacaccgccgtgtactattgtgcctctggcgtgtacagcttcgactacagaggccagggcaccctggtcacagtctcttctggtaccggcggaggcggatctggcggcggaggtagcggtggcggaggatctgaattcgacatccagatgacccagagccccagcagcctgtctgccagcgtgggcgacagagtgaccatcacctgtagagccagccagggcatcagaaacaacctggcctggtatcagcagaagcccggcaaggcccccaagcggctgatctacgccgccagcaatctccagagcggcgtgcccagcagattcacaggctctggcagcggcaccgagttcaccctgatcgtgtctagcctccagcccgaggacttcgccacctactactgcctccagcaccacagctaccccctgacatctggcggaggcaccaaggtggaactcgaggacctgaagaacgtgttcccacctgaggtggccgtgttcgagcctagcgaggccgagatcagccacacccagaaagccaccctcgtgtgcctggctaccggcttctaccccgaccatgtggaactgtcttggtgggtcaacggcaaagaggtgcacagcggcgtgtgtaccgacccccagccactgaaagaacagcccgccctgaacgacagccggtactgcctgagcagcagactgagagtgtccgccaccttctggcagaacccccggaaccacttcagatgccaggtgcagttctacggcctgagcgagaacgacgagtggacccaggacagagccaagcccgtgacccagatcgtgtctgccgaagcctggggcagagccgatgatgtgattaagatccactggcaggaaaagaagtccaacaccatcctgggcagccaggaaggcaacaccatgaagaccaacgacacctacatgaagttcagctggctgaccgtgcccgagaagtccctggacaaagaacacagatgcatcgtgcggcacgaaaacaacaagaacggcgtggaccaggaaatcatcttcccacccatcaagaccgatgtgattacaatggaccccaaggacaactgctccaaggacgccaacgataccctgctgctccagctgaccaacaccagcgcctactacatgtacttgttgctgctgctgaagtccgtggtgtacttcgccatcatcacatgctgcctgctgatggctatggtcaagcggaaggacagccggggaagggccaagcgatctggatctggagcaacaaacttctcactactcaaacaagcaggtgacgtggaggagaatcccgggcctactagtatggactggatttggcgcatccttttccttgtcggcgctgctaccggcgcgcattccgggccccagctccagctgcaagagtctggacctggcctggtcaagcctagcgagacactgagcctgacctgtaccgtgtccggcgatagcatcagcagcggcgattactactggggctggatcagacagcctcctggcaaaggactggaatggatcggccacatctactacagcggcgtgacctactacaaccccagcctgaagtccagagtgaccatcagcgtggacaccagccggaaccagttctccctgaagctgtctagcgtgacagccgccgataccgccgtgtactactgcaccagagaggacagcagcaactggcggagtagaggccagggaacactggtcacagttagctctggatccggcggaggcggaagtggaggcggaggatctggcggcggaggctctttcgaagaggtgcaggtgctggaaagtggcggaggactggtgcagcctggcggctctctgagactgtcttgtgccgccagcggcttcaccttcagcagctacgccatgagctgggtgcgccaggcccctggaaaaggactggaatgggtgtccgccatcagcggctctggcgggtctaccaactacgccgatagcgtgaagggccggttcaccatcagccgggacaacagcaagaacaccctgtacctccagatgaacagcctgcgggccgaggacaccgccgtgtattattgtgccggcagcagcgggtggagcgagtattggggacagggcaccctcgtgaccgtgtcctctacgcgtatccagaaccctgatcctgccgtgtaccagctgcgggatagcaagagcagcgacaagagcgtgtgtctgttcaccgacttcgacagccagaccaacgtgtcccagagcaaggactccgacgtgtacatcaccgataagtgcgtgctggacatgcggagcatggacttcaagagcaactccgccgtggcctggtccaacaagtccgatttcgcctgcgccaacgccttcaacaacagcattatccccgaggacacattcttcccaagccccgagagcagcgactccaccgaccacgtgaagcccaaagagacagagaacaccaagcagcccagcaagagctgccacaagcccaaggccatcgtgcacaccgagaaagtgaacatgatgagcctgaccgtgctgggcctgcggatgctgttcgccaaaaccgtggccgtgaacttcctgctgaccgccaagctgttcttcctcctcaccgcc

SEQ ID NO: 6710 - DNA, 2988 bp, synthetic construct
  source 1..2988: mol_type = other DNA
atggccttaccagtgaccgccttgctcctgccgctggccttgctgctccacgccgccaggccggaagtgcagctggttgaatctggcggaggactggttcagcctggcggatctctgagactgtcttgtgccgccagcggcttcagcttcagcgacttttggatgagctgggtccgacaggcccctggcaaaggacttgaatgggtcgccacaatcagccaggccggcagcgagaaggactacgtggactctgtgaagggcagattcaccatcagccgggacaacgccaagaagtccctgtacctccagatgaacagcctgagagccgaggacaccgccgtgtactattgtgcctctggcgtgtacagcttcgactacagaggccagggcaccctggtcacagtctcttctggtaccggcggaggcggatctggcggcggaggtagcggtggcggaggatctgaattcgacgagatccagctggtgcagagcggagccgaagtgaagaagcctggcgagagcctgcggatcagctgcaagggcagcggcttcaacatcgaggactactacatccactgggtgcgccagatgcccggcaagggcctggaatggatgggcagaatcgaccccgagaacgacgagactaagtacggccccatcttccagggccacgtgaccatcagcgccgacaccagcatcaacaccgtgtacctccagtggtccagcctgaaggccagcgacaccgccatgtactactgcgcctttagaggcggcgtgtactggggccagggcaccacagtgacagtgtctagcctcgaggacctgaagaacgtgttcccacctgaggtggccgtgttcgagcctagcgaggccgagatcagccacacccagaaagccaccctcgtgtgcctggctaccggcttctaccccgaccatgtggaactgtcttggtgggtcaacggcaaagaggtgcacagcggcgtgtgtaccgacccccagccactgaaagaacagcccgccctgaacgacagccggtactgcctgagcagcagactgagagtgtccgccaccttctggcagaacccccggaaccacttcagatgccaggtgcagttctacggcctgagcgagaacgacgagtggacccaggacagagccaagcccgtgacccagatcgtgtctgccgaagcctggggcagagccgatgatgtgattaagatccactggcaggaaaagaagtccaacaccatcctgggcagccaggaaggcaacaccatgaagaccaacgacacctacatgaagttcagctggctgaccgtgcccgagaagtccctggacaaagaacacagatgcatcgtgcggcacgaaaacaacaagaacggcgtggaccaggaaatcatcttcccacccatcaagaccgatgtgattacaatggaccccaaggacaactgctccaaggacgccaacgataccctgctgctccagctgaccaacaccagcgcctactacatgtacttgttgctgctgctgaagtccgtggtgtacttcgccatcatcacatgctgcctgctgatggctatggtcaagcggaaggacagccggggaagggccaagcgatctggatctggagcaacaaacttctcactactcaaacaagcaggtgacgtggaggagaatcccgggcctactagtatggactggatttggcgcatccttttccttgtcggcgctgctaccggcgcgcattccgggccccagctccagctgcaagagtctggacctggcctggtcaagcctagcgagacactgagcctgacctgtaccgtgtccggcgatagcatcagcagcggcgattactactggggctggatcagacagcctcctggcaaaggactggaatggatcggccacatctactacagcggcgtgacctactacaaccccagcctgaagtccagagtgaccatcagcgtggacaccagccggaaccagttctccctgaagctgtctagcgtgacagccgccgataccgccgtgtactactgcaccagagaggacagcagcaactggcggagtagaggccagggaacactggtcacagttagctctggatccggcggaggcggaagtggaggcggaggatctggcggcggaggctctttcgaagatgtcgtgatgacccagagccccgacagcctggctgtgtctctgggagagagagccaccatcaactgcaagtccagccagtccctgctggacagcgacggcaagacctacctgaactggctccagcagaagcccggccagccccccaagagactgatctccctggtgtccaagctggactccggcgtgcccgatagattttccggctctggcagcggcaccgacttcaccctgacaatcagctcccttcaggccgaggacgtggccgtgtactattgctggcagggcacacacttccccggcacctttggcggaggcaccaaggtggaaatcaagacgcgtatccagaaccctgatcctgccgtgtaccagctgcgggatagcaagagcagcgacaagagcgtgtgtctgttcaccgacttcgacagccagaccaacgtgtcccagagcaaggactccgacgtgtacatcaccgataagtgcgtgctggacatgcggagcatggacttcaagagcaactccgccgtggcctggtccaacaagtccgatttcgcctgcgccaacgccttcaacaacagcattatccccgaggacacattcttcccaagccccgagagcagcgactccaccgaccacgtgaagcccaaagagacagagaacaccaagcagcccagcaagagctgccacaagcccaaggccatcgtgcacaccgagaaagtgaacatgatgagcctgaccgtgctgggcctgcggatgctgttcgccaaaaccgtggccgtgaacttcctgctgaccgccaagctgttcttcctcctcaccgcc

SEQ ID NO: 6711 - DNA, 3009 bp, synthetic construct
  source 1..3009: mol_type = other DNA
atggccttaccagtgaccgccttgctcctgccgctggccttgctgctccacgccgccaggccggaagtgcagctggttgaatctggcggaggactggttcagcctggcggatctctgagactgtcttgtgccgccagcggcttcagcttcagcgacttttggatgagctgggtccgacaggcccctggcaaaggacttgaatgggtcgccacaatcagccaggccggcagcgagaaggactacgtggactctgtgaagggcagattcaccatcagccgggacaacgccaagaagtccctgtacctccagatgaacagcctgagagccgaggacaccgccgtgtactattgtgcctctggcgtgtacagcttcgactacagaggccagggcaccctggtcacagtctcttctggtaccggcggaggcggatctggcggcggaggtagcggtggcggaggatctgaattcgacgagcttgtgatgacccagagccccagcagcctgacagtgacagccggcgagaaagtgaccatgagctgcaagagcagccagagcctgctgaacagcggcaaccagaagaactacctgacctggtatcagcagaagcccggccagccccccaagctgctgatctactgggccagcaccagagaaagcggcgtgcccgatagattcaccggctctggcagcggcaccgacttcaccctgacaatcagcagcgtgcaggccgaggacctggccgtgtactactgccagaacgactacagctaccccctgaccttcggagccggcaccaagctggaaatcaagctcgaggacctgaagaacgtgttcccacctgaggtggccgtgttcgagcctagcgaggccgagatcagccacacccagaaagccaccctcgtgtgcctggctaccggcttctaccccgaccatgtggaactgtcttggtgggtcaacggcaaagaggtgcacagcggcgtgtgtaccgacccccagccactgaaagaacagcccgccctgaacgacagccggtactgcctgagcagcagactgagagtgtccgccaccttctggcagaacccccggaaccacttcagatgccaggtgcagttctacggcctgagcgagaacgacgagtggacccaggacagagccaagcccgtgacccagatcgtgtctgccgaagcctggggcagagccgatgatgtgattaagatccactggcaggaaaagaagtccaacaccatcctgggcagccaggaaggcaacaccatgaagaccaacgacacctacatgaagttcagctggctgaccgtgcccgagaagtccctggacaaagaacacagatgcatcgtgcggcacgaaaacaacaagaacggcgtggaccaggaaatcatcttcccacccatcaagaccgatgtgattacaatggaccccaaggacaactgctccaaggacgccaacgataccctgctgctccagctgaccaacaccagcgcctactacatgtacttgttgctgctgctgaagtccgtggtgtacttcgccatcatcacatgctgcctgctgatggctatggtcaagcggaaggacagccggggaagggccaagcgatctggatctggagcaacaaacttctcactactcaaacaagcaggtgacgtggaggagaatcccgggcctactagtatggactggatttggcgcatccttttccttgtcggcgctgctaccggcgcgcattccgggccccagctccagctgcaagagtctggacctggcctggtcaagcctagcgagacactgagcctgacctgtaccgtgtccggcgatagcatcagcagcggcgattactactggggctggatcagacagcctcctggcaaaggactggaatggatcggccacatctactacagcggcgtgacctactacaaccccagcctgaagtccagagtgaccatcagcgtggacaccagccggaaccagttctccctgaagctgtctagcgtgacagccgccgataccgccgtgtactactgcaccagagaggacagcagcaactggcggagtagaggccagggaacactggtcacagttagctctggatccggcggaggcggaagtggaggcggaggatctggcggcggaggctctttcgaagaagtgcagctgctggaacagtctggcgccgaacttgtgcggcctggcaccagcgtgaagatcagctgtaaagccagcggctacgccttcaccaactactggctgggctgggtcaagcagaggcctggacacggcctggaatggatcggcgacatctttcccggctccggcaacatccactacaacgagaagttcaagggcaaggccaccctgaccgccgacaagtctagcagcaccgcctacatgcagctgtccagcctgacctttgaggacagcgccgtgtatttctgtgcccggctgcggaactgggacgagcccatggattattggggccagggcaccaccgtgaccgtgtctagtacgcgtatccagaaccctgatcctgccgtgtaccagctgcgggatagcaagagcagcgacaagagcgtgtgtctgttcaccgacttcgacagccagaccaacgtgtcccagagcaaggactccgacgtgtacatcaccgataagtgcgtgctggacatgcggagcatggacttcaagagcaactccgccgtggcctggtccaacaagtccgatttcgcctgcgccaacgccttcaacaacagcattatccccgaggacacattcttcccaagccccgagagcagcgactccaccgaccacgtgaagcccaaagagacagagaacaccaagcagcccagcaagagctgccacaagcccaaggccatcgtgcacaccgagaaagtgaacatgatgagcctgaccgtgctgggcctgcggatgctgttcgccaaaaccgtggccgtgaacttcctgctgaccgccaagctgttcttcctcctcaccgcc

SEQ ID NO: 6712 - DNA, 3012 bp, synthetic construct
  source 1..3012: mol_type = other DNA
atggccttaccagtgaccgccttgctcctgccgctggccttgctgctccacgccgccaggccggaagtgcagctggttgaatctggcggaggactggttcagcctggcggatctctgagactgtcttgtgccgccagcggcttcagcttcagcgacttttggatgagctgggtccgacaggcccctggcaaaggacttgaatgggtcgccacaatcagccaggccggcagcgagaaggactacgtggactctgtgaagggcagattcaccatcagccgggacaacgccaagaagtccctgtacctccagatgaacagcctgagagccgaggacaccgccgtgtactattgtgcctctggcgtgtacagcttcgactacagaggccagggcaccctggtcacagtctcttctggtaccggcggaggcggatctggcggcggaggtagcggtggcggaggatctgaattcgacgagctgcagatgacccagagccctagcagcctgtctgccagcgtgggcgacagagtgaccatcacctgtagagccagccagagcatcagcagctacctgaactggtatcagcagaagcccggccagccccccaaactgctgatctactgggccagcaccagagaaagcggcgtgcccgatagattcagcggcagcgagagcggcaccaactacaccctgaccatcagctccctgcagcccgaggacttcgccacctacttttgccagcagagcgacagcctgcccatcacctttggacagggcacccggctggacattcagctcgaggacctgaagaacgtgttcccacctgaggtggccgtgttcgagcctagcgaggccgagatcagccacacccagaaagccaccctcgtgtgcctggctaccggcttctaccccgaccatgtggaactgtcttggtgggtcaacggcaaagaggtgcacagcggcgtgtgtaccgacccccagccactgaaagaacagcccgccctgaacgacagccggtactgcctgagcagcagactgagagtgtccgccaccttctggcagaacccccggaaccacttcagatgccaggtgcagttctacggcctgagcgagaacgacgagtggacccaggacagagccaagcccgtgacccagatcgtgtctgccgaagcctggggcagagccgatgatgtgattaagatccactggcaggaaaagaagtccaacaccatcctgggcagccaggaaggcaacaccatgaagaccaacgacacctacatgaagttcagctggctgaccgtgcccgagaagtccctggacaaagaacacagatgcatcgtgcggcacgaaaacaacaagaacggcgtggaccaggaaatcatcttcccacccatcaagaccgatgtgattacaatggaccccaaggacaactgctccaaggacgccaacgataccctgctgctccagctgaccaacaccagcgcctactacatgtacttgttgctgctgctgaagtccgtggtgtacttcgccatcatcacatgctgcctgctgatggctatggtcaagcggaaggacagccggggaagggccaagcgatctggatctggagcaacaaacttctcactactcaaacaagcaggtgacgtggaggagaatcccgggcctactagtatggactggatttggcgcatccttttccttgtcggcgctgctaccggcgcgcattccgggccccagctccagctgcaagagtctggacctggcctggtcaagcctagcgagacactgagcctgacctgtaccgtgtccggcgatagcatcagcagcggcgattactactggggctggatcagacagcctcctggcaaaggactggaatggatcggccacatctactacagcggcgtgacctactacaaccccagcctgaagtccagagtgaccatcagcgtggacaccagccggaaccagttctccctgaagctgtctagcgtgacagccgccgataccgccgtgtactactgcaccagagaggacagcagcaactggcggagtagaggccagggaacactggtcacagttagctctggatccggcggaggcggaagtggaggcggaggatctggcggcggaggctctttcgaagaggtgcaactgctggaatctgggggcggagtggtgcagcctggcagaagcctgagactgagctgtgccgccagcggcttcaccttcagctcctacggaatgcactgggtgcgccaggcccctggcaaaggactggaatgggtggccgtgatctcctacgacggcagcaacaagtactacgccgacagcgtgaagggccggttcaccatcagccgggacaacagcaagaacaccctgtacctgcagatgaacagcctgcgggccgaggacaccgccgtgtactactgcgccaaggatatgggctggggcagcggctggcggccttactactactacggcatggacgtgtggggccagggcaccaccgtgacagtgtcatctacgcgtatccagaaccctgatcctgccgtgtaccagctgcgggatagcaagagcagcgacaagagcgtgtgtctgttcaccgacttcgacagccagaccaacgtgtcccagagcaaggactccgacgtgtacatcaccgataagtgcgtgctggacatgcggagcatggacttcaagagcaactccgccgtggcctggtccaacaagtccgatttcgcctgcgccaacgccttcaacaacagcattatccccgaggacacattcttcccaagccccgagagcagcgactccaccgaccacgtgaagcccaaagagacagagaacaccaagcagcccagcaagagctgccacaagcccaaggccatcgtgcacaccgagaaagtgaacatgatgagcctgaccgtgctgggcctgcggatgctgttcgccaaaaccgtggccgtgaacttcctgctgaccgccaagctgttcttcctcctcaccgcc

SEQ ID NO: 6713 - DNA, 3003 bp, synthetic construct
  source 1..3003: mol_type = other DNA
atggccttaccagtgaccgccttgctcctgccgctggccttgctgctccacgccgccaggccggaagtgcagctggttgaatctggcggaggactggttcagcctggcggatctctgagactgtcttgtgccgccagcggcttcagcttcagcgacttttggatgagctgggtccgacaggcccctggcaaaggacttgaatgggtcgccacaatcagccaggccggcagcgagaaggactacgtggactctgtgaagggcagattcaccatcagccgggacaacgccaagaagtccctgtacctccagatgaacagcctgagagccgaggacaccgccgtgtactattgtgcctctggcgtgtacagcttcgactacagaggccagggcaccctggtcacagtctcttctggtaccggcggaggcggatctggcggcggaggtagcggtggcggaggatctgaattcgacgacatccaaatgacacagagtccttctagtttgagtgcgagcgtgggggacagggtgaccattacctgcagggccagccagagcataagctcataccttaattggtaccagcaaaaaccaggtaaggcccctaagctcctgatctacgcggcctcttcacttcaatctggggtcccttcccgcttcagtggctccggcagcggcaccgacttcacgctcactatatcaagtctgcagcctgaggatctcgccacctattactgtcaacaaagttattccacccctttcacctttggaccgggcacgaaagtggatattaagctcgaggacctgaagaacgtgttcccacctgaggtggccgtgttcgagcctagcgaggccgagatcagccacacccagaaagccaccctcgtgtgcctggctaccggcttctaccccgaccatgtggaactgtcttggtgggtcaacggcaaagaggtgcacagcggcgtgtgtaccgacccccagccactgaaagaacagcccgccctgaacgacagccggtactgcctgagcagcagactgagagtgtccgccaccttctggcagaacccccggaaccacttcagatgccaggtgcagttctacggcctgagcgagaacgacgagtggacccaggacagagccaagcccgtgacccagatcgtgtctgccgaagcctggggcagagccgatgatgtgattaagatccactggcaggaaaagaagtccaacaccatcctgggcagccaggaaggcaacaccatgaagaccaacgacacctacatgaagttcagctggctgaccgtgcccgagaagtccctggacaaagaacacagatgcatcgtgcggcacgaaaacaacaagaacggcgtggaccaggaaatcatcttcccacccatcaagaccgatgtgattacaatggaccccaaggacaactgctccaaggacgccaacgataccctgctgctccagctgaccaacaccagcgcctactacatgtacttgttgctgctgctgaagtccgtggtgtacttcgccatcatcacatgctgcctgctgatggctatggtcaagcggaaggacagccggggaagggccaagcgatctggatctggagcaacaaacttctcactactcaaacaagcaggtgacgtggaggagaatcccgggcctactagtatggactggatttggcgcatccttttccttgtcggcgctgctaccggcgcgcattccgggccccagctccagctgcaagagtctggacctggcctggtcaagcctagcgagacactgagcctgacctgtaccgtgtccggcgatagcatcagcagcggcgattactactggggctggatcagacagcctcctggcaaaggactggaatggatcggccacatctactacagcggcgtgacctactacaaccccagcctgaagtccagagtgaccatcagcgtggacaccagccggaaccagttctccctgaagctgtctagcgtgacagccgccgataccgccgtgtactactgcaccagagaggacagcagcaactggcggagtagaggccagggaacactggtcacagttagctctggatccggcggaggcggaagtggaggcggaggatctggcggcggaggctctttcgaagtgcacgaggtccagcttgtgcagtccggggcagaggtcaagaagcctggttctagcgtaaaagtgagttgcaaagcctcaggtgggacattttcatcctacgcgatcagttgggttagacaggctcctggtcaagggctggaatggatgggcggaattattccaatcttcggaacagcgaattacgcgcagaagttccagggtagagtaaccatcactgctgacaagtccacctccaccgcatacatggaattgtctagtctccggagcgaggatacggcggtgtattattgtgctacgttcgccctgtttggcttccgcgaacaggctttcgacatctgggggcagggcacgacagtcacggttagtagtacgcgtatccagaaccctgatcctgccgtgtaccagctgcgggatagcaagagcagcgacaagagcgtgtgtctgttcaccgacttcgacagccagaccaacgtgtcccagagcaaggactccgacgtgtacatcaccgataagtgcgtgctggacatgcggagcatggacttcaagagcaactccgccgtggcctggtccaacaagtccgatttcgcctgcgccaacgccttcaacaacagcattatccccgaggacacattcttcccaagccccgagagcagcgactccaccgaccacgtgaagcccaaagagacagagaacaccaagcagcccagcaagagctgccacaagcccaaggccatcgtgcacaccgagaaagtgaacatgatgagcctgaccgtgctgggcctgcggatgctgttcgccaaaaccgtggccgtgaacttcctgctgaccgccaagctgttcttcctcctcaccgcc

SEQ ID NO: 6714 - DNA, 2997 bp, synthetic construct
  source 1..2997: mol_type = other DNA
atggccttaccagtgaccgccttgctcctgccgctggccttgctgctccacgccgccaggccggaagtgcagctggttgaatctggcggaggactggttcagcctggcggatctctgagactgtcttgtgccgccagcggcttcagcttcagcgacttttggatgagctgggtccgacaggcccctggcaaaggacttgaatgggtcgccacaatcagccaggccggcagcgagaaggactacgtggactctgtgaagggcagattcaccatcagccgggacaacgccaagaagtccctgtacctccagatgaacagcctgagagccgaggacaccgccgtgtactattgtgcctctggcgtgtacagcttcgactacagaggccagggcaccctggtcacagtctcttctggtaccggcggaggcggatctggcggcggaggtagcggtggcggaggatctgaattcgacatcgtgctgacccagagccctctgagcctggccgtgtctctgggacagcctgccatcatcagctgcaaggccagccagagcgtgtcctttgccggcacctctctgatgcactggtatcaccagaagcccggccagcagcccagactgctgatctacagagccagcaacctggaagccggcgtgcccgatagattttccggcagcggcagcaagaccgacttcaccctgaccatcagccccgtggaagccgaagatgccgccacctactactgccagcagagcagagagtacccctacaccttcggcggaggcaccaagctggaaatcaagaggctcgaggacctgaagaacgtgttcccacctgaggtggccgtgttcgagcctagcgaggccgagatcagccacacccagaaagccaccctcgtgtgcctggctaccggcttctaccccgaccatgtggaactgtcttggtgggtcaacggcaaagaggtgcacagcggcgtgtgtaccgacccccagccactgaaagaacagcccgccctgaacgacagccggtactgcctgagcagcagactgagagtgtccgccaccttctggcagaacccccggaaccacttcagatgccaggtgcagttctacggcctgagcgagaacgacgagtggacccaggacagagccaagcccgtgacccagatcgtgtctgccgaagcctggggcagagccgatgatgtgattaagatccactggcaggaaaagaagtccaacaccatcctgggcagccaggaaggcaacaccatgaagaccaacgacacctacatgaagttcagctggctgaccgtgcccgagaagtccctggacaaagaacacagatgcatcgtgcggcacgaaaacaacaagaacggcgtggaccaggaaatcatcttcccacccatcaagaccgatgtgattacaatggaccccaaggacaactgctccaaggacgccaacgataccctgctgctccagctgaccaacaccagcgcctactacatgtacttgttgctgctgctgaagtccgtggtgtacttcgccatcatcacatgctgcctgctgatggctatggtcaagcggaaggacagccggggaagggccaagcgatctggatctggagcaacaaacttctcactactcaaacaagcaggtgacgtggaggagaatcccgggcctactagtatggactggatttggcgcatccttttccttgtcggcgctgctaccggcgcgcattccgggccccagctccagctgcaagagtctggacctggcctggtcaagcctagcgagacactgagcctgacctgtaccgtgtccggcgatagcatcagcagcggcgattactactggggctggatcagacagcctcctggcaaaggactggaatggatcggccacatctactacagcggcgtgacctactacaaccccagcctgaagtccagagtgaccatcagcgtggacaccagccggaaccagttctccctgaagctgtctagcgtgacagccgccgataccgccgtgtactactgcaccagagaggacagcagcaactggcggagtagaggccagggaacactggtcacagttagctctggatccggcggaggcggaagtggaggcggaggatctggcggcggaggctctttcgaacaggtccaactggtgcagagcggagccgaggtcgtgaagcctggcgcttccgtgaagattagctgcaaagccagcggctacacctttaccggctactttatgaactgggtcaagcagagccctggccagagcctggaatggatcggcagaatccacccctacgacggcgacaccttctacaaccagaagttccagggcaaggccaccctgacagtggacaagagcagcaacaccgcccacatggaactgctgagcctgaccagcgaggacttcgccgtgtactactgcaccagatacgacggcagccgggctatggactattggggccagggcaccaccgtgaccgtgtctagtacgcgtatccagaaccctgatcctgccgtgtaccagctgcgggatagcaagagcagcgacaagagcgtgtgtctgttcaccgacttcgacagccagaccaacgtgtcccagagcaaggactccgacgtgtacatcaccgataagtgcgtgctggacatgcggagcatggacttcaagagcaactccgccgtggcctggtccaacaagtccgatttcgcctgcgccaacgccttcaacaacagcattatccccgaggacacattcttcccaagccccgagagcagcgactccaccgaccacgtgaagcccaaagagacagagaacaccaagcagcccagcaagagctgccacaagcccaaggccatcgtgcacaccgagaaagtgaacatgatgagcctgaccgtgctgggcctgcggatgctgttcgccaaaaccgtggccgtgaacttcctgctgaccgccaagctgttcttcctcctcaccgcc

SEQ ID NO: 6715 - DNA, 2988 bp, synthetic construct
  source 1..2988: mol_type = other DNA
atggccttaccagtgaccgccttgctcctgccgctggccttgctgctccacgccgccaggccggaagtgcagctggttgaatctggcggaggactggttcagcctggcggatctctgagactgtcttgtgccgccagcggcttcagcttcagcgacttttggatgagctgggtccgacaggcccctggcaaaggacttgaatgggtcgccacaatcagccaggccggcagcgagaaggactacgtggactctgtgaagggcagattcaccatcagccgggacaacgccaagaagtccctgtacctccagatgaacagcctgagagccgaggacaccgccgtgtactattgtgcctctggcgtgtacagcttcgactacagaggccagggcaccctggtcacagtctcttctggtaccggcggaggcggatctggcggcggaggtagcggtggcggaggatctgaattcgacgacgttgtgatgacccagacccccctgagcctgcctgtgacacctggcgaacctgccagcatcagctgtcggagcagccagagcctggtgcacagaaacggcaacacctacctgcactggtatctccagaagcccggccagagccccaagctgctgatccacaaggtgtccaacagattcagcggcgtgcccgacagattctccggcagcggctctggcaccgacttcaccctgaagatcagccgggtggaagccgaggacctgggcgtgtacttctgtagccagagcacccatgtgccccccctgacatttggagccggcaccaagctggaactgaagctcgaggacctgaagaacgtgttcccacctgaggtggccgtgttcgagcctagcgaggccgagatcagccacacccagaaagccaccctcgtgtgcctggctaccggcttctaccccgaccatgtggaactgtcttggtgggtcaacggcaaagaggtgcacagcggcgtgtgtaccgacccccagccactgaaagaacagcccgccctgaacgacagccggtactgcctgagcagcagactgagagtgtccgccaccttctggcagaacccccggaaccacttcagatgccaggtgcagttctacggcctgagcgagaacgacgagtggacccaggacagagccaagcccgtgacccagatcgtgtctgccgaagcctggggcagagccgatgatgtgattaagatccactggcaggaaaagaagtccaacaccatcctgggcagccaggaaggcaacaccatgaagaccaacgacacctacatgaagttcagctggctgaccgtgcccgagaagtccctggacaaagaacacagatgcatcgtgcggcacgaaaacaacaagaacggcgtggaccaggaaatcatcttcccacccatcaagaccgatgtgattacaatggaccccaaggacaactgctccaaggacgccaacgataccctgctgctccagctgaccaacaccagcgcctactacatgtacttgttgctgctgctgaagtccgtggtgtacttcgccatcatcacatgctgcctgctgatggctatggtcaagcggaaggacagccggggaagggccaagcgatctggatctggagcaacaaacttctcactactcaaacaagcaggtgacgtggaggagaatcccgggcctactagtatggactggatttggcgcatccttttccttgtcggcgctgctaccggcgcgcattccgggccccagctccagctgcaagagtctggacctggcctggtcaagcctagcgagacactgagcctgacctgtaccgtgtccggcgatagcatcagcagcggcgattactactggggctggatcagacagcctcctggcaaaggactggaatggatcggccacatctactacagcggcgtgacctactacaaccccagcctgaagtccagagtgaccatcagcgtggacaccagccggaaccagttctccctgaagctgtctagcgtgacagccgccgataccgccgtgtactactgcaccagagaggacagcagcaactggcggagtagaggccagggaacactggtcacagttagctctggatccggcggaggcggaagtggaggcggaggatctggcggcggaggctctttcgaagaagtgcagctggtgcagtctggcgctgaggtggaaaagcctggggccagcgtgaagattagctgcaaggccagcggcagcagcttcaccggctacaacatgaactgggtgcgccagaacatcggcaagagcctggaatggatcggagccatcgacccctactacggcggcaccagctacaaccagaagttcaagggcagagccaccctgaccgtggacaagagcaccagcaccgcctacatgcacctgaagtccctgcggagcgaggacaccgccgtgtactactgtgtgtccggcatggaatattggggccagggcaccagcgtgaccgtgtctagtacgcgtatccagaaccctgatcctgccgtgtaccagctgcgggatagcaagagcagcgacaagagcgtgtgtctgttcaccgacttcgacagccagaccaacgtgtcccagagcaaggactccgacgtgtacatcaccgataagtgcgtgctggacatgcggagcatggacttcaagagcaactccgccgtggcctggtccaacaagtccgatttcgcctgcgccaacgccttcaacaacagcattatccccgaggacacattcttcccaagccccgagagcagcgactccaccgaccacgtgaagcccaaagagacagagaacaccaagcagcccagcaagagctgccacaagcccaaggccatcgtgcacaccgagaaagtgaacatgatgagcctgaccgtgctgggcctgcggatgctgttcgccaaaaccgtggccgtgaacttcctgctgaccgccaagctgttcttcctcctcaccgcc

SEQ ID NO: 6716 - DNA, 2982 bp, synthetic construct
  source 1..2982: mol_type = other DNA
atggccttaccagtgaccgccttgctcctgccgctggccttgctgctccacgccgccaggccggaagtgcagctggttgaatctggcggaggactggttcagcctggcggatctctgagactgtcttgtgccgccagcggcttcagcttcagcgacttttggatgagctgggtccgacaggcccctggcaaaggacttgaatgggtcgccacaatcagccaggccggcagcgagaaggactacgtggactctgtgaagggcagattcaccatcagccgggacaacgccaagaagtccctgtacctccagatgaacagcctgagagccgaggacaccgccgtgtactattgtgcctctggcgtgtacagcttcgactacagaggccagggcaccctggtcacagtctcttctggtaccggcggaggcggatctggcggcggaggtagcggtggcggaggatctgaattcgacgagatcgtgatgacccagacccctgccaccctgtctgtgtctgccggcgagagagtgaccattacctgcaaggccagccagagcgtgtccaacgacgtgacctggtatcagcagaagcccggccaggcccccagactgctgatctacagcgccagcaacagatacagcggcgtgcccgccagattttccggcagcggctacggcaccgagttcaccttcaccatcagcagcgtgcagagcgaggacttcgccgtgtacttctgtcagcaagactacagcagcttcggccagggcaccaagctggaaatcaagaggctcgaggacctgaagaacgtgttcccacctgaggtggccgtgttcgagcctagcgaggccgagatcagccacacccagaaagccaccctcgtgtgcctggctaccggcttctaccccgaccatgtggaactgtcttggtgggtcaacggcaaagaggtgcacagcggcgtgtgtaccgacccccagccactgaaagaacagcccgccctgaacgacagccggtactgcctgagcagcagactgagagtgtccgccaccttctggcagaacccccggaaccacttcagatgccaggtgcagttctacggcctgagcgagaacgacgagtggacccaggacagagccaagcccgtgacccagatcgtgtctgccgaagcctggggcagagccgatgatgtgattaagatccactggcaggaaaagaagtccaacaccatcctgggcagccaggaaggcaacaccatgaagaccaacgacacctacatgaagttcagctggctgaccgtgcccgagaagtccctggacaaagaacacagatgcatcgtgcggcacgaaaacaacaagaacggcgtggaccaggaaatcatcttcccacccatcaagaccgatgtgattacaatggaccccaaggacaactgctccaaggacgccaacgataccctgctgctccagctgaccaacaccagcgcctactacatgtacttgttgctgctgctgaagtccgtggtgtacttcgccatcatcacatgctgcctgctgatggctatggtcaagcggaaggacagccggggaagggccaagcgatctggatctggagcaacaaacttctcactactcaaacaagcaggtgacgtggaggagaatcccgggcctactagtatggactggatttggcgcatccttttccttgtcggcgctgctaccggcgcgcattccgggccccagctccagctgcaagagtctggacctggcctggtcaagcctagcgagacactgagcctgacctgtaccgtgtccggcgatagcatcagcagcggcgattactactggggctggatcagacagcctcctggcaaaggactggaatggatcggccacatctactacagcggcgtgacctactacaaccccagcctgaagtccagagtgaccatcagcgtggacaccagccggaaccagttctccctgaagctgtctagcgtgacagccgccgataccgccgtgtactactgcaccagagaggacagcagcaactggcggagtagaggccagggaacactggtcacagttagctctggatccggcggaggcggaagtggaggcggaggatctggcggcggaggctctttcgaacaggtgcagctggtggaatctggacctggcgtggtgcagcctggcagaagcctgagaatcagctgtgccgtgtccggcttcagcgtgaccaactacggcgtgcactgggtgcgccagccacctggaaaaggactggaatggctgggcgtgatctgggctggcggcatcaccaactacaacagcgccttcatgtcccggctgaccatctccaaggacaacagcaagaacaccgtgtacctccagatgaacagcctgcgggccgaggacaccgccatgtactactgtgcttccagaggcggccactacggctacgccctggattattggggccagggaaccctcgtgaccgtgtcctctacgcgtatccagaaccctgatcctgccgtgtaccagctgcgggatagcaagagcagcgacaagagcgtgtgtctgttcaccgacttcgacagccagaccaacgtgtcccagagcaaggactccgacgtgtacatcaccgataagtgcgtgctggacatgcggagcatggacttcaagagcaactccgccgtggcctggtccaacaagtccgatttcgcctgcgccaacgccttcaacaacagcattatccccgaggacacattcttcccaagccccgagagcagcgactccaccgaccacgtgaagcccaaagagacagagaacaccaagcagcccagcaagagctgccacaagcccaaggccatcgtgcacaccgagaaagtgaacatgatgagcctgaccgtgctgggcctgcggatgctgttcgccaaaaccgtggccgtgaacttcctgctgaccgccaagctgttcttcctcctcaccgcc

SEQ ID NO: 6717 - DNA, 2988 bp, synthetic construct
  source 1..2988: mol_type = other DNA
atggccttaccagtgaccgccttgctcctgccgctggccttgctgctccacgccgccaggccggaagtgcagctggttgaatctggcggaggactggttcagcctggcggatctctgagactgtcttgtgccgccagcggcttcagcttcagcgacttttggatgagctgggtccgacaggcccctggcaaaggacttgaatgggtcgccacaatcagccaggccggcagcgagaaggactacgtggactctgtgaagggcagattcaccatcagccgggacaacgccaagaagtccctgtacctccagatgaacagcctgagagccgaggacaccgccgtgtactattgtgcctctggcgtgtacagcttcgactacagaggccagggcaccctggtcacagtctcttctggtaccggcggaggcggatctggcggcggaggtagcggtggcggaggatctgaattcgacatccagatgacccagaccgccagcagcctgcctgcctctctgggcgacagagtgaccatctcctgtagcgccagccaggacatcagcaactacctgaactggtatcagcagaaacccgacggcaccgtgaagctgctgatcttctacagcagcaacctgcacagcggcgtgcccagcagattttctggcggcggaagcggcaccgactacagcctgaccatcagcaatctggaacccgaggacattgccacctacttttgccaccagtacagcaagctgccctggacctttggcggaggcaccaagctggaaatcaagagactcgaggacctgaagaacgtgttcccacctgaggtggccgtgttcgagcctagcgaggccgagatcagccacacccagaaagccaccctcgtgtgcctggctaccggcttctaccccgaccatgtggaactgtcttggtgggtcaacggcaaagaggtgcacagcggcgtgtgtaccgacccccagccactgaaagaacagcccgccctgaacgacagccggtactgcctgagcagcagactgagagtgtccgccaccttctggcagaacccccggaaccacttcagatgccaggtgcagttctacggcctgagcgagaacgacgagtggacccaggacagagccaagcccgtgacccagatcgtgtctgccgaagcctggggcagagccgatgatgtgattaagatccactggcaggaaaagaagtccaacaccatcctgggcagccaggaaggcaacaccatgaagaccaacgacacctacatgaagttcagctggctgaccgtgcccgagaagtccctggacaaagaacacagatgcatcgtgcggcacgaaaacaacaagaacggcgtggaccaggaaatcatcttcccacccatcaagaccgatgtgattacaatggaccccaaggacaactgctccaaggacgccaacgataccctgctgctccagctgaccaacaccagcgcctactacatgtacttgttgctgctgctgaagtccgtggtgtacttcgccatcatcacatgctgcctgctgatggctatggtcaagcggaaggacagccggggaagggccaagcgatctggatctggagcaacaaacttctcactactcaaacaagcaggtgacgtggaggagaatcccgggcctactagtatggactggatttggcgcatccttttccttgtcggcgctgctaccggcgcgcattccgggccccagctccagctgcaagagtctggacctggcctggtcaagcctagcgagacactgagcctgacctgtaccgtgtccggcgatagcatcagcagcggcgattactactggggctggatcagacagcctcctggcaaaggactggaatggatcggccacatctactacagcggcgtgacctactacaaccccagcctgaagtccagagtgaccatcagcgtggacaccagccggaaccagttctccctgaagctgtctagcgtgacagccgccgataccgccgtgtactactgcaccagagaggacagcagcaactggcggagtagaggccagggaacactggtcacagttagctctggatccggcggaggcggaagtggaggcggaggatctggcggcggaggctctttcgaagaagtgaccctggtggaaagcggcggagacttcgtgaagcctggcggctctctgaaggtgtcctgtgccgccagcggcttcgcctttagccactacgccatgagctgggtgcgccagacccctgccaagagactggaatgggtggcctacatcagcagcggcggctccggcacctactactccgatagcgtgaagggccggttcaccatcagccgggacaacgccaagaacaccctgtacctccagatgcggagcctgcggagcgaggacagcgccatgtatttctgcaccagagtgaagctgggcacctattacttcgactcttggggccagggcaccaccctgaccgtgtcatctacgcgtatccagaaccctgatcctgccgtgtaccagctgcgggatagcaagagcagcgacaagagcgtgtgtctgttcaccgacttcgacagccagaccaacgtgtcccagagcaaggactccgacgtgtacatcaccgataagtgcgtgctggacatgcggagcatggacttcaagagcaactccgccgtggcctggtccaacaagtccgatttcgcctgcgccaacgccttcaacaacagcattatccccgaggacacattcttcccaagccccgagagcagcgactccaccgaccacgtgaagcccaaagagacagagaacaccaagcagcccagcaagagctgccacaagcccaaggccatcgtgcacaccgagaaagtgaacatgatgagcctgaccgtgctgggcctgcggatgctgttcgccaaaaccgtggccgtgaacttcctgctgaccgccaagctgttcttcctcctcaccgcc

SEQ ID NO: 6718 - DNA, 2994 bp, synthetic construct
  source 1..2994: mol_type = other DNA
atggccttaccagtgaccgccttgctcctgccgctggccttgctgctccacgccgccaggccggaagtgcagctggttgaatctggcggaggactggttcagcctggcggatctctgagactgtcttgtgccgccagcggcttcagcttcagcgacttttggatgagctgggtccgacaggcccctggcaaaggacttgaatgggtcgccacaatcagccaggccggcagcgagaaggactacgtggactctgtgaagggcagattcaccatcagccgggacaacgccaagaagtccctgtacctccagatgaacagcctgagagccgaggacaccgccgtgtactattgtgcctctggcgtgtacagcttcgactacagaggccagggcaccctggtcacagtctcttctggtaccggcggaggcggatctggcggcggaggtagcggtggcggaggatctgaattccagttcgtgctgacccagagcccttctgcctctgctgccctgggagcctctgccaagctgacctgtacactgagcagcgcccacaagacctacaccatcgactggtatcagcagcagaagggaaaggcccccagatacctgatccaagtgaagtccgacggcacctacacaaaggccaccggcgtgcccgatagattcagcggcagtagcagcggagccgatagatacctgattatccccagcgtgcaggccgacgacgaggccgattactactgcggcaccgattacaccggcggctacgtgttcggcggaggcacacaactgaccgtgacactcgaggacctgaagaacgtgttcccacctgaggtggccgtgttcgagcctagcgaggccgagatcagccacacccagaaagccaccctcgtgtgcctggctaccggcttctaccccgaccatgtggaactgtcttggtgggtcaacggcaaagaggtgcacagcggcgtgtgtaccgacccccagccactgaaagaacagcccgccctgaacgacagccggtactgcctgagcagcagactgagagtgtccgccaccttctggcagaacccccggaaccacttcagatgccaggtgcagttctacggcctgagcgagaacgacgagtggacccaggacagagccaagcccgtgacccagatcgtgtctgccgaagcctggggcagagccgatgatgtgattaagatccactggcaggaaaagaagtccaacaccatcctgggcagccaggaaggcaacaccatgaagaccaacgacacctacatgaagttcagctggctgaccgtgcccgagaagtccctggacaaagaacacagatgcatcgtgcggcacgaaaacaacaagaacggcgtggaccaggaaatcatcttcccacccatcaagaccgatgtgattacaatggaccccaaggacaactgctccaaggacgccaacgataccctgctgctccagctgaccaacaccagcgcctactacatgtacttgttgctgctgctgaagtccgtggtgtacttcgccatcatcacatgctgcctgctgatggctatggtcaagcggaaggacagccggggaagggccaagcgatctggatctggagcaacaaacttctcactactcaaacaagcaggtgacgtggaggagaatcccgggcctactagtatggactggatttggcgcatccttttccttgtcggcgctgctaccggcgcgcattccgggccccagctccagctgcaagagtctggacctggcctggtcaagcctagcgagacactgagcctgacctgtaccgtgtccggcgatagcatcagcagcggcgattactactggggctggatcagacagcctcctggcaaaggactggaatggatcggccacatctactacagcggcgtgacctactacaaccccagcctgaagtccagagtgaccatcagcgtggacaccagccggaaccagttctccctgaagctgtctagcgtgacagccgccgataccgccgtgtactactgcaccagagaggacagcagcaactggcggagtagaggccagggaacactggtcacagttagctctggatccggcggaggcggaagtggaggcggaggatctggcggcggaggctctttcgaagagcaactgaaagagtctggcggcggactgttcaagcccaccgataccctgaccctgacctgcaccgtgtccggcttcagcctgagctactacggcgtgaactgggtgcgccaggcccctggcaatggcctggaatggatcggcacaatcggcggcagcggcgacacctactatgcctcttgggccaagtccagaagcaccatcatcagaaacaccaacgagaacaccgtgaccctgaagatgaccagcctgacagccgccgacaccgccacctacttttgcgtcagatacgccaacatcggctacgagtatttcaacgtgtggggacccggcaccctcgtgaccgtgtcatctacgcgtatccagaaccctgatcctgccgtgtaccagctgcgggatagcaagagcagcgacaagagcgtgtgtctgttcaccgacttcgacagccagaccaacgtgtcccagagcaaggactccgacgtgtacatcaccgataagtgcgtgctggacatgcggagcatggacttcaagagcaactccgccgtggcctggtccaacaagtccgatttcgcctgcgccaacgccttcaacaacagcattatccccgaggacacattcttcccaagccccgagagcagcgactccaccgaccacgtgaagcccaaagagacagagaacaccaagcagcccagcaagagctgccacaagcccaaggccatcgtgcacaccgagaaagtgaacatgatgagcctgaccgtgctgggcctgcggatgctgttcgccaaaaccgtggccgtgaacttcctgctgaccgccaagctgttcttcctcctcaccgcc

SEQ ID NO: 6719 - DNA, 3009 bp, synthetic construct
  source 1..3009: mol_type = other DNA
atggccttaccagtgaccgccttgctcctgccgctggccttgctgctccacgccgccaggccggaagtgcagctggttgaatctggcggaggactggttcagcctggcggatctctgagactgtcttgtgccgccagcggcttcagcttcagcgacttttggatgagctgggtccgacaggcccctggcaaaggacttgaatgggtcgccacaatcagccaggccggcagcgagaaggactacgtggactctgtgaagggcagattcaccatcagccgggacaacgccaagaagtccctgtacctccagatgaacagcctgagagccgaggacaccgccgtgtactattgtgcctctggcgtgtacagcttcgactacagaggccagggcaccctggtcacagtctcttctggtaccggcggaggcggatctggcggcggaggtagcggtggcggaggatctgaattccagttcgtgctgacccagagcccttctgtgtctgccgccctgggagcctctgccaagctgacctgtacactgagcagcgcccacaagacctacaccatcgactggtatcagcagcagcagggcgaggcccccagatacctgatgcaagtgaagtccgacggcagctacaccaagggcaccggcgtgcccgatagattcagcggcagtagcagcggagccgatagatacctgattatccccagcgtgcaggccgacgacgaggccggatatgtgtgcggcgctgacgacaatggcggctacgtgttcggcggaggcacccaactgacagtgacactcgaggacctgaagaacgtgttcccacctgaggtggccgtgttcgagcctagcgaggccgagatcagccacacccagaaagccaccctcgtgtgcctggctaccggcttctaccccgaccatgtggaactgtcttggtgggtcaacggcaaagaggtgcacagcggcgtgtgtaccgacccccagccactgaaagaacagcccgccctgaacgacagccggtactgcctgagcagcagactgagagtgtccgccaccttctggcagaacccccggaaccacttcagatgccaggtgcagttctacggcctgagcgagaacgacgagtggacccaggacagagccaagcccgtgacccagatcgtgtctgccgaagcctggggcagagccgatgatgtgattaagatccactggcaggaaaagaagtccaacaccatcctgggcagccaggaaggcaacaccatgaagaccaacgacacctacatgaagttcagctggctgaccgtgcccgagaagtccctggacaaagaacacagatgcatcgtgcggcacgaaaacaacaagaacggcgtggaccaggaaatcatcttcccacccatcaagaccgatgtgattacaatggaccccaaggacaactgctccaaggacgccaacgataccctgctgctccagctgaccaacaccagcgcctactacatgtacttgttgctgctgctgaagtccgtggtgtacttcgccatcatcacatgctgcctgctgatggctatggtcaagcggaaggacagccggggaagggccaagcgatctggatctggagcaacaaacttctcactactcaaacaagcaggtgacgtggaggagaatcccgggcctactagtatggactggatttggcgcatccttttccttgtcggcgctgctaccggcgcgcattccgggccccagctccagctgcaagagtctggacctggcctggtcaagcctagcgagacactgagcctgacctgtaccgtgtccggcgatagcatcagcagcggcgattactactggggctggatcagacagcctcctggcaaaggactggaatggatcggccacatctactacagcggcgtgacctactacaaccccagcctgaagtccagagtgaccatcagcgtggacaccagccggaaccagttctccctgaagctgtctagcgtgacagccgccgataccgccgtgtactactgcaccagagaggacagcagcaactggcggagtagaggccagggaacactggtcacagttagctctggatccggcggaggcggaagtggaggcggaggatctggcggcggaggctctttcgaacagagcgtgaaagagtctgagggcggcctgttcaagcccaccgataccctgaccctgacctgcaccgtgtccggcttcagcctgagcagacacgccctgacatgggtgcgccaggcccctggaaatggcctggaatggatcggagccatcgacaacgccggcaccacctactatgcctcttgggccaagtccagaagcaccatcacccggaacaccgacctgcacaccgtgaccctgaagatgaccagcctgaccgccagcgacaccgccacctacttttgcgccagagtgttctacgacatcaacagcggctactacctggacggcatggacctgtggggacctggcacacttgtgaccgtgtccagcacgcgtatccagaaccctgatcctgccgtgtaccagctgcgggatagcaagagcagcgacaagagcgtgtgtctgttcaccgacttcgacagccagaccaacgtgtcccagagcaaggactccgacgtgtacatcaccgataagtgcgtgctggacatgcggagcatggacttcaagagcaactccgccgtggcctggtccaacaagtccgatttcgcctgcgccaacgccttcaacaacagcattatccccgaggacacattcttcccaagccccgagagcagcgactccaccgaccacgtgaagcccaaagagacagagaacaccaagcagcccagcaagagctgccacaagcccaaggccatcgtgcacaccgagaaagtgaacatgatgagcctgaccgtgctgggcctgcggatgctgttcgccaaaaccgtggccgtgaacttcctgctgaccgccaagctgttcttcctcctcaccgcc

SEQ ID NO: 6720 - DNA, 2991 bp, synthetic construct
  source 1..2991: mol_type = other DNA
atggccttaccagtgaccgccttgctcctgccgctggccttgctgctccacgccgccaggccggaagtgcagctggttgaatctggcggaggactggttcagcctggcggatctctgagactgtcttgtgccgccagcggcttcagcttcagcgacttttggatgagctgggtccgacaggcccctggcaaaggacttgaatgggtcgccacaatcagccaggccggcagcgagaaggactacgtggactctgtgaagggcagattcaccatcagccgggacaacgccaagaagtccctgtacctccagatgaacagcctgagagccgaggacaccgccgtgtactattgtgcctctggcgtgtacagcttcgactacagaggccagggcaccctggtcacagtctcttctggtaccggcggaggcggatctggcggcggaggtagcggtggcggaggatctgaattcgacatccagatgacccagagccccagcagcctgtctgccagcgtgggcgacagagtgaccatcacctgtagagccagccagggcatcagctcttggctggcctggtatcagcagaagcccgagaaggcccccaagagcctgatctacgccgcctctagtctccagagcggcgtgcccagcagattttctggcagcggctccggcaccgacttcaccctgacaatcagctccctccagcccgaggacttcgccacctactactgccagcagtacaacagctacccccccacctttggcggaggcaccaaggtggaaatcaagctcgaggacctgaagaacgtgttcccacctgaggtggccgtgttcgagcctagcgaggccgagatcagccacacccagaaagccaccctcgtgtgcctggctaccggcttctaccccgaccatgtggaactgtcttggtgggtcaacggcaaagaggtgcacagcggcgtgtgtaccgacccccagccactgaaagaacagcccgccctgaacgacagccggtactgcctgagcagcagactgagagtgtccgccaccttctggcagaacccccggaaccacttcagatgccaggtgcagttctacggcctgagcgagaacgacgagtggacccaggacagagccaagcccgtgacccagatcgtgtctgccgaagcctggggcagagccgatgatgtgattaagatccactggcaggaaaagaagtccaacaccatcctgggcagccaggaaggcaacaccatgaagaccaacgacacctacatgaagttcagctggctgaccgtgcccgagaagtccctggacaaagaacacagatgcatcgtgcggcacgaaaacaacaagaacggcgtggaccaggaaatcatcttcccacccatcaagaccgatgtgattacaatggaccccaaggacaactgctccaaggacgccaacgataccctgctgctccagctgaccaacaccagcgcctactacatgtacttgttgctgctgctgaagtccgtggtgtacttcgccatcatcacatgctgcctgctgatggctatggtcaagcggaaggacagccggggaagggccaagcgatctggatctggagcaacaaacttctcactactcaaacaagcaggtgacgtggaggagaatcccgggcctactagtatggactggatttggcgcatccttttccttgtcggcgctgctaccggcgcgcattccgggccccagctccagctgcaagagtctggacctggcctggtcaagcctagcgagacactgagcctgacctgtaccgtgtccggcgatagcatcagcagcggcgattactactggggctggatcagacagcctcctggcaaaggactggaatggatcggccacatctactacagcggcgtgacctactacaaccccagcctgaagtccagagtgaccatcagcgtggacaccagccggaaccagttctccctgaagctgtctagcgtgacagccgccgataccgccgtgtactactgcaccagagaggacagcagcaactggcggagtagaggccagggaacactggtcacagttagctctggatccggcggaggcggaagtggaggcggaggatctggcggcggaggctctttcgaagaagtgcaactggtggaatcaggcggcggactggtgcagcctggcgagtctctgagactgagctgtgtggcctccggcttcaccttcagccggtacaagatgaactgggtgcgccaggcccctggcaagggactggaatgggtgtcctacatcagccgcagcggcagagacatctactacgccgacagcgtgaagggccggttcaccatcagcagagacaacgccaagaacagcctgtacctccagatgaactccctgcgggacgaggacaccgccgtgtactactgtgccggaaccgtgaccacctattactacttcggcatggacgtgtggggccacggcaccaccgtgacagtgtcatctacgcgtatccagaaccctgatcctgccgtgtaccagctgcgggatagcaagagcagcgacaagagcgtgtgtctgttcaccgacttcgacagccagaccaacgtgtcccagagcaaggactccgacgtgtacatcaccgataagtgcgtgctggacatgcggagcatggacttcaagagcaactccgccgtggcctggtccaacaagtccgatttcgcctgcgccaacgccttcaacaacagcattatccccgaggacacattcttcccaagccccgagagcagcgactccaccgaccacgtgaagcccaaagagacagagaacaccaagcagcccagcaagagctgccacaagcccaaggccatcgtgcacaccgagaaagtgaacatgatgagcctgaccgtgctgggcctgcggatgctgttcgccaaaaccgtggccgtgaacttcctgctgaccgccaagctgttcttcctcctcaccgcc

SEQ ID NO: 6721 - DNA, 2994 bp, synthetic construct
  source 1..2994: mol_type = other DNA
atggccttaccagtgaccgccttgctcctgccgctggccttgctgctccacgccgccaggccggaagtgcagctggttgaatctggcggaggactggttcagcctggcggatctctgagactgtcttgtgccgccagcggcttcagcttcagcgacttttggatgagctgggtccgacaggcccctggcaaaggacttgaatgggtcgccacaatcagccaggccggcagcgagaaggactacgtggactctgtgaagggcagattcaccatcagccgggacaacgccaagaagtccctgtacctccagatgaacagcctgagagccgaggacaccgccgtgtactattgtgcctctggcgtgtacagcttcgactacagaggccagggcaccctggtcacagtctcttctggtaccggcggaggcggatctggcggcggaggtagcggtggcggaggatctgaattcgacatccagatgacccagagccccagcagcctgtctgccagcgtgggcgacagagtgaccatcacctgtagagccagccagggcatcagctcttggctggcctggtatcagcagaagcccgagaaggcccccaagagcctgatctacgccgcctctagtctccagagcggcgtgcccagcagattttctggcagcggctccggcaccgacttcaccctgacaatcagctccctccagcccgaggacttcgccacctactactgccagcagtacaacagctaccctcccacctttggcggaggcaccaaggtggaaatcaagctcgaggacctgaagaacgtgttcccacctgaggtggccgtgttcgagcctagcgaggccgagatcagccacacccagaaagccaccctcgtgtgcctggctaccggcttctaccccgaccatgtggaactgtcttggtgggtcaacggcaaagaggtgcacagcggcgtgtgtaccgacccccagccactgaaagaacagcccgccctgaacgacagccggtactgcctgagcagcagactgagagtgtccgccaccttctggcagaacccccggaaccacttcagatgccaggtgcagttctacggcctgagcgagaacgacgagtggacccaggacagagccaagcccgtgacccagatcgtgtctgccgaagcctggggcagagccgatgatgtgattaagatccactggcaggaaaagaagtccaacaccatcctgggcagccaggaaggcaacaccatgaagaccaacgacacctacatgaagttcagctggctgaccgtgcccgagaagtccctggacaaagaacacagatgcatcgtgcggcacgaaaacaacaagaacggcgtggaccaggaaatcatcttcccacccatcaagaccgatgtgattacaatggaccccaaggacaactgctccaaggacgccaacgataccctgctgctccagctgaccaacaccagcgcctactacatgtacttgttgctgctgctgaagtccgtggtgtacttcgccatcatcacatgctgcctgctgatggctatggtcaagcggaaggacagccggggaagggccaagcgatctggatctggagcaacaaacttctcactactcaaacaagcaggtgacgtggaggagaatcccgggcctactagtatggactggatttggcgcatccttttccttgtcggcgctgctaccggcgcgcattccgggccccagctccagctgcaagagtctggacctggcctggtcaagcctagcgagacactgagcctgacctgtaccgtgtccggcgatagcatcagcagcggcgattactactggggctggatcagacagcctcctggcaaaggactggaatggatcggccacatctactacagcggcgtgacctactacaaccccagcctgaagtccagagtgaccatcagcgtggacaccagccggaaccagttctccctgaagctgtctagcgtgacagccgccgataccgccgtgtactactgcaccagagaggacagcagcaactggcggagtagaggccagggaacactggtcacagttagctctggatccggcggaggcggaagtggaggcggaggatctggcggcggaggctctttcgaagaagtgcaactggtggaatccgggggaggctctgtgcagcctggcgagtctctgagactgagctgtgtggcctccggcttcaccttcagccggtacaagatgaactgggtgcgccaggcccctggcaagggactggaatgggtgtcctacatcagccgcagcggcagagacatctactacgccgacagcgtgaagggccggttcaccatcagcagagacaacgccaagaacagcctgtacctccagatgaactccctgcgggacgaggacaccgccgtgtactactgtgccggaaccgtgaccacctattactacgacttcggcatggacgtgtggggccagggcacaaccgtgacagtgtctagcacgcgtatccagaaccctgatcctgccgtgtaccagctgcgggatagcaagagcagcgacaagagcgtgtgtctgttcaccgacttcgacagccagaccaacgtgtcccagagcaaggactccgacgtgtacatcaccgataagtgcgtgctggacatgcggagcatggacttcaagagcaactccgccgtggcctggtccaacaagtccgatttcgcctgcgccaacgccttcaacaacagcattatccccgaggacacattcttcccaagccccgagagcagcgactccaccgaccacgtgaagcccaaagagacagagaacaccaagcagcccagcaagagctgccacaagcccaaggccatcgtgcacaccgagaaagtgaacatgatgagcctgaccgtgctgggcctgcggatgctgttcgccaaaaccgtggccgtgaacttcctgctgaccgccaagctgttcttcctcctcaccgcc

SEQ ID NO: 6722 - DNA, 2988 bp, synthetic construct
  source 1..2988: mol_type = other DNA
atggccttaccagtgaccgccttgctcctgccgctggccttgctgctccacgccgccaggccggaagtgcagctggttgaatctggcggaggactggttcagcctggcggatctctgagactgtcttgtgccgccagcggcttcagcttcagcgacttttggatgagctgggtccgacaggcccctggcaaaggacttgaatgggtcgccacaatcagccaggccggcagcgagaaggactacgtggactctgtgaagggcagattcaccatcagccgggacaacgccaagaagtccctgtacctccagatgaacagcctgagagccgaggacaccgccgtgtactattgtgcctctggcgtgtacagcttcgactacagaggccagggcaccctggtcacagtctcttctggtaccggcggaggcggatctggcggcggaggtagcggtggcggaggatctgaattccagtctgtgctgacacagcctccatctgcctctggcacacctggacagagagtgaccatcagctgtagcggcagcagaagcaacgtcggcggcaactacgtgttctggtatcagcaggtcccaggcgctacccctaagctgctgatctacagaagcaatcagcggcctagcggcgtgcccgatagatttgccggaagcaagagcggcagctctgccagccttgccatctctggactgagaagcgaggacgaggccgactactactgtgccacctgggatgatagcctgagcggcttcgtgtttggcaccggcaccaaagtgacagtgcttggtctcgaggacctgaagaacgtgttcccacctgaggtggccgtgttcgagcctagcgaggccgagatcagccacacccagaaagccaccctcgtgtgcctggctaccggcttctaccccgaccatgtggaactgtcttggtgggtcaacggcaaagaggtgcacagcggcgtgtgtaccgacccccagccactgaaagaacagcccgccctgaacgacagccggtactgcctgagcagcagactgagagtgtccgccaccttctggcagaacccccggaaccacttcagatgccaggtgcagttctacggcctgagcgagaacgacgagtggacccaggacagagccaagcccgtgacccagatcgtgtctgccgaagcctggggcagagccgatgatgtgattaagatccactggcaggaaaagaagtccaacaccatcctgggcagccaggaaggcaacaccatgaagaccaacgacacctacatgaagttcagctggctgaccgtgcccgagaagtccctggacaaagaacacagatgcatcgtgcggcacgaaaacaacaagaacggcgtggaccaggaaatcatcttcccacccatcaagaccgatgtgattacaatggaccccaaggacaactgctccaaggacgccaacgataccctgctgctccagctgaccaacaccagcgcctactacatgtacttgttgctgctgctgaagtccgtggtgtacttcgccatcatcacatgctgcctgctgatggctatggtcaagcggaaggacagccggggaagggccaagcgatctggatctggagcaacaaacttctcactactcaaacaagcaggtgacgtggaggagaatcccgggcctactagtatggactggatttggcgcatccttttccttgtcggcgctgctaccggcgcgcattccgggccccagctccagctgcaagagtctggacctggcctggtcaagcctagcgagacactgagcctgacctgtaccgtgtccggcgatagcatcagcagcggcgattactactggggctggatcagacagcctcctggcaaaggactggaatggatcggccacatctactacagcggcgtgacctactacaaccccagcctgaagtccagagtgaccatcagcgtggacaccagccggaaccagttctccctgaagctgtctagcgtgacagccgccgataccgccgtgtactactgcaccagagaggacagcagcaactggcggagtagaggccagggaacactggtcacagttagctctggatccggcggaggcggaagtggaggcggaggatctggcggcggaggctctttcgaagttcagctggttgaatctggcggcggactggttaagcctggcggatctctgagactgtcttgtgccgccagcggcttcaccttcagcgattactacatgagctggatcagacaggcccctggcaaaggactggaatgggtgtcctacatcagcagcagcggctccaccatctactacgccgatagcgtgaagggcagattcaccatcagccgggacaacgccaagaacagcctgtacctccagatgaactccctgagagccgaggacaccgccgtgtactattgcgccagaggctacggcaaagcctacgatcaatggggccagggcacactggtcaccgtttcttctacgcgtatccagaaccctgatcctgccgtgtaccagctgcgggatagcaagagcagcgacaagagcgtgtgtctgttcaccgacttcgacagccagaccaacgtgtcccagagcaaggactccgacgtgtacatcaccgataagtgcgtgctggacatgcggagcatggacttcaagagcaactccgccgtggcctggtccaacaagtccgatttcgcctgcgccaacgccttcaacaacagcattatccccgaggacacattcttcccaagccccgagagcagcgactccaccgaccacgtgaagcccaaagagacagagaacaccaagcagcccagcaagagctgccacaagcccaaggccatcgtgcacaccgagaaagtgaacatgatgagcctgaccgtgctgggcctgcggatgctgttcgccaaaaccgtggccgtgaacttcctgctgaccgccaagctgttcttcctcctcaccgcc

SEQ ID NO: 6723 - DNA, 2985 bp, synthetic construct
  source 1..2985: mol_type = other DNA
atggccttaccagtgaccgccttgctcctgccgctggccttgctgctccacgccgccaggccggaagtgcagctggttgaatctggcggaggactggttcagcctggcggatctctgagactgtcttgtgccgccagcggcttcagcttcagcgacttttggatgagctgggtccgacaggcccctggcaaaggacttgaatgggtcgccacaatcagccaggccggcagcgagaaggactacgtggactctgtgaagggcagattcaccatcagccgggacaacgccaagaagtccctgtacctccagatgaacagcctgagagccgaggacaccgccgtgtactattgtgcctctggcgtgtacagcttcgactacagaggccagggcaccctggtcacagtctcttctggtaccggcggaggcggatctggcggcggaggtagcggtggcggaggatctgaattccagtctgtggtcacacagccacctagcatgtctgccgctccaggccagcaagtgaccatctcttgtagcggcggcaacagcaacatcgagcggaactacgtgtcctggtatctgcaactgcctggcacagcccctaagctggtcatcttcgacaacgacagacggcccagcggcatccccgatagattttctggcagcaagagcggcaccagcgccacactgggaattaccggacttcagacaggcgacgaggccgactactactgtggcacatgggactctagcctgagaggctgggttttcggcggaggcacaaagctgacagtgcttggtctcgaggacctgaagaacgtgttcccacctgaggtggccgtgttcgagcctagcgaggccgagatcagccacacccagaaagccaccctcgtgtgcctggctaccggcttctaccccgaccatgtggaactgtcttggtgggtcaacggcaaagaggtgcacagcggcgtgtgtaccgacccccagccactgaaagaacagcccgccctgaacgacagccggtactgcctgagcagcagactgagagtgtccgccaccttctggcagaacccccggaaccacttcagatgccaggtgcagttctacggcctgagcgagaacgacgagtggacccaggacagagccaagcccgtgacccagatcgtgtctgccgaagcctggggcagagccgatgatgtgattaagatccactggcaggaaaagaagtccaacaccatcctgggcagccaggaaggcaacaccatgaagaccaacgacacctacatgaagttcagctggctgaccgtgcccgagaagtccctggacaaagaacacagatgcatcgtgcggcacgaaaacaacaagaacggcgtggaccaggaaatcatcttcccacccatcaagaccgatgtgattacaatggaccccaaggacaactgctccaaggacgccaacgataccctgctgctccagctgaccaacaccagcgcctactacatgtacttgttgctgctgctgaagtccgtggtgtacttcgccatcatcacatgctgcctgctgatggctatggtcaagcggaaggacagccggggaagggccaagcgatctggatctggagcaacaaacttctcactactcaaacaagcaggtgacgtggaggagaatcccgggcctactagtatggactggatttggcgcatccttttccttgtcggcgctgctaccggcgcgcattccgggccccagctccagctgcaagagtctggacctggcctggtcaagcctagcgagacactgagcctgacctgtaccgtgtccggcgatagcatcagcagcggcgattactactggggctggatcagacagcctcctggcaaaggactggaatggatcggccacatctactacagcggcgtgacctactacaaccccagcctgaagtccagagtgaccatcagcgtggacaccagccggaaccagttctccctgaagctgtctagcgtgacagccgccgataccgccgtgtactactgcaccagagaggacagcagcaactggcggagtagaggccagggaacactggtcacagttagctctggatccggcggaggcggaagtggaggcggaggatctggcggcggaggctctttcgaagtgcagctcgttgagtctggcggcggactgattcaacctggcggaagcctgagactgagctgtgccgcttccggcttcaccttcagcaactacgccatgaactgggttcgacaggcccctggcaaaggactggaatgggtgtccaccatcaacggcagaggcagcagcaccatctacgccgattctgtgaagggcagattcaccatcagccgggacaacagcaagaacaccctgtacctccagatgaactccctgagagccgaggacaccgccacctattactgtgcccggtacatcagcagaggactgggcgattcttggggccagggcacactggttacagtgacgcgtatccagaaccctgatcctgccgtgtaccagctgcgggatagcaagagcagcgacaagagcgtgtgtctgttcaccgacttcgacagccagaccaacgtgtcccagagcaaggactccgacgtgtacatcaccgataagtgcgtgctggacatgcggagcatggacttcaagagcaactccgccgtggcctggtccaacaagtccgatttcgcctgcgccaacgccttcaacaacagcattatccccgaggacacattcttcccaagccccgagagcagcgactccaccgaccacgtgaagcccaaagagacagagaacaccaagcagcccagcaagagctgccacaagcccaaggccatcgtgcacaccgagaaagtgaacatgatgagcctgaccgtgctgggcctgcggatgctgttcgccaaaaccgtggccgtgaacttcctgctgaccgccaagctgttcttcctcctcaccgcc

SEQ ID NO: 6724 - DNA, 2988 bp, synthetic construct
  source 1..2988: mol_type = other DNA
atggccttaccagtgaccgccttgctcctgccgctggccttgctgctccacgccgccaggccggaagtgcagctggttgaatctggcggaggactggttcagcctggcggatctctgagactgtcttgtgccgccagcggcttcagcttcagcgacttttggatgagctgggtccgacaggcccctggcaaaggacttgaatgggtcgccacaatcagccaggccggcagcgagaaggactacgtggactctgtgaagggcagattcaccatcagccgggacaacgccaagaagtccctgtacctccagatgaacagcctgagagccgaggacaccgccgtgtactattgtgcctctggcgtgtacagcttcgactacagaggccagggcaccctggtcacagtctcttctggtaccggcggaggcggatctggcggcggaggtagcggtggcggaggatctgaattcgacgtcgtgatgacccagacccctctgagcctgcctgtgtccctgggcgatcaggccagcatcagctgtagaagcagccagagcctggtgcacagcaacggcaacacctacctgcactggtatctccagaagcccggccagagccccaagctgctgatctacaaggtgtccaacagattcagcggcgtgcccgacagattctccggcagcggctctggcaccgacttcaccctgaagatcagccgggtggaagccgaggacctgggcgtgtacttctgtagccagaacacccccgtgccccccaagtttggcagcggcaccaagctggaaatcaagctcgaggacctgaagaacgtgttcccacctgaggtggccgtgttcgagcctagcgaggccgagatcagccacacccagaaagccaccctcgtgtgcctggctaccggcttctaccccgaccatgtggaactgtcttggtgggtcaacggcaaagaggtgcacagcggcgtgtgtaccgacccccagccactgaaagaacagcccgccctgaacgacagccggtactgcctgagcagcagactgagagtgtccgccaccttctggcagaacccccggaaccacttcagatgccaggtgcagttctacggcctgagcgagaacgacgagtggacccaggacagagccaagcccgtgacccagatcgtgtctgccgaagcctggggcagagccgatgatgtgattaagatccactggcaggaaaagaagtccaacaccatcctgggcagccaggaaggcaacaccatgaagaccaacgacacctacatgaagttcagctggctgaccgtgcccgagaagtccctggacaaagaacacagatgcatcgtgcggcacgaaaacaacaagaacggcgtggaccaggaaatcatcttcccacccatcaagaccgatgtgattacaatggaccccaaggacaactgctccaaggacgccaacgataccctgctgctccagctgaccaacaccagcgcctactacatgtacttgttgctgctgctgaagtccgtggtgtacttcgccatcatcacatgctgcctgctgatggctatggtcaagcggaaggacagccggggaagggccaagcgatctggatctggagcaacaaacttctcactactcaaacaagcaggtgacgtggaggagaatcccgggcctactagtatggactggatttggcgcatccttttccttgtcggcgctgctaccggcgcgcattccgggccccagctccagctgcaagagtctggacctggcctggtcaagcctagcgagacactgagcctgacctgtaccgtgtccggcgatagcatcagcagcggcgattactactggggctggatcagacagcctcctggcaaaggactggaatggatcggccacatctactacagcggcgtgacctactacaaccccagcctgaagtccagagtgaccatcagcgtggacaccagccggaaccagttctccctgaagctgtctagcgtgacagccgccgataccgccgtgtactactgcaccagagaggacagcagcaactggcggagtagaggccagggaacactggtcacagttagctctggatccggcggaggcggaagtggaggcggaggatctggcggcggaggctctttcgaacaggtgcagctccagcagtctggcgctgaactcgtgcggcctggcgcttctgtgaagctgtcttgcaaggccagcggctacaccttcaacgactacgagatgcactgggtcaagcagacccctgtgcacggcctgaagtggatcggagccctggaacccaagaccggcgataccgcctacagccagaagttcaagggcaaggccaccctgaccgccgacaagagcagcagcacagcctacatggaactgcggagcctgaccagcgaggacagcgccgtgtactactgcaccagctgctactactacacctacagcggccagggcaccctcgtgacagtgtctgctacgcgtatccagaaccctgatcctgccgtgtaccagctgcgggatagcaagagcagcgacaagagcgtgtgtctgttcaccgacttcgacagccagaccaacgtgtcccagagcaaggactccgacgtgtacatcaccgataagtgcgtgctggacatgcggagcatggacttcaagagcaactccgccgtggcctggtccaacaagtccgatttcgcctgcgccaacgccttcaacaacagcattatccccgaggacacattcttcccaagccccgagagcagcgactccaccgaccacgtgaagcccaaagagacagagaacaccaagcagcccagcaagagctgccacaagcccaaggccatcgtgcacaccgagaaagtgaacatgatgagcctgaccgtgctgggcctgcggatgctgttcgccaaaaccgtggccgtgaacttcctgctgaccgccaagctgttcttcctcctcaccgcc

SEQ ID NO: 6725 - DNA, 2985 bp, synthetic construct
  source 1..2985: mol_type = other DNA
atggccttaccagtgaccgccttgctcctgccgctggccttgctgctccacgccgccaggccggaagtgcagctggttgaatctggcggaggactggttcagcctggcggatctctgagactgtcttgtgccgccagcggcttcagcttcagcgacttttggatgagctgggtccgacaggcccctggcaaaggacttgaatgggtcgccacaatcagccaggccggcagcgagaaggactacgtggactctgtgaagggcagattcaccatcagccgggacaacgccaagaagtccctgtacctccagatgaacagcctgagagccgaggacaccgccgtgtactattgtgcctctggcgtgtacagcttcgactacagaggccagggcaccctggtcacagtctcttctggtaccggcggaggcggatctggcggcggaggtagcggtggcggaggatctgaattcgacatccaactgacccagagccccagcagcctgtctgcctctgtgggcgacagagtgaccatcacctgtagagccagccagggcatcagaaacgacctgggctggtatcagcagaagcccggcaaggcccccaagcggctgatctatgctgccagctccctccagaatggcgtgcccagcagattttccggcagcggctctggcaccgagttcaccctgaccatcagctccctccagcccgaggacttcgccacctactactgcctccagcacaacacctaccccgccttcggccagggcaccaaggtggaaatcaagagactcgaggacctgaagaacgtgttcccacctgaggtggccgtgttcgagcctagcgaggccgagatcagccacacccagaaagccaccctcgtgtgcctggctaccggcttctaccccgaccatgtggaactgtcttggtgggtcaacggcaaagaggtgcacagcggcgtgtgtaccgacccccagccactgaaagaacagcccgccctgaacgacagccggtactgcctgagcagcagactgagagtgtccgccaccttctggcagaacccccggaaccacttcagatgccaggtgcagttctacggcctgagcgagaacgacgagtggacccaggacagagccaagcccgtgacccagatcgtgtctgccgaagcctggggcagagccgatgatgtgattaagatccactggcaggaaaagaagtccaacaccatcctgggcagccaggaaggcaacaccatgaagaccaacgacacctacatgaagttcagctggctgaccgtgcccgagaagtccctggacaaagaacacagatgcatcgtgcggcacgaaaacaacaagaacggcgtggaccaggaaatcatcttcccacccatcaagaccgatgtgattacaatggaccccaaggacaactgctccaaggacgccaacgataccctgctgctccagctgaccaacaccagcgcctactacatgtacttgttgctgctgctgaagtccgtggtgtacttcgccatcatcacatgctgcctgctgatggctatggtcaagcggaaggacagccggggaagggccaagcgatctggatctggagcaacaaacttctcactactcaaacaagcaggtgacgtggaggagaatcccgggcctactagtatggactggatttggcgcatccttttccttgtcggcgctgctaccggcgcgcattccgggccccagctccagctgcaagagtctggacctggcctggtcaagcctagcgagacactgagcctgacctgtaccgtgtccggcgatagcatcagcagcggcgattactactggggctggatcagacagcctcctggcaaaggactggaatggatcggccacatctactacagcggcgtgacctactacaaccccagcctgaagtccagagtgaccatcagcgtggacaccagccggaaccagttctccctgaagctgtctagcgtgacagccgccgataccgccgtgtactactgcaccagagaggacagcagcaactggcggagtagaggccagggaacactggtcacagttagctctggatccggcggaggcggaagtggaggcggaggatctggcggcggaggctctttcgaacaggtgcaactccaggaatctggccctggcctcgtgaagcctagccagaccctgagcctgacctgtaccgtgtctggcggcagcatcagcagcttcaactactactggtcctggatcagacaccaccctggcaagggcctggaatggatcggctacatctactacagcggcagcacctacagcaaccccagcctgaagtcccgcgtgaccatctccgtggacaccagcaagaaccagtttagcctgaccctgtccagcgtgacagccgccgataccgccgtgtactactgcgccagaggctacaactggaactacttcgactactggggccagggaaccctcgtgaccgtgtctagtacgcgtatccagaaccctgatcctgccgtgtaccagctgcgggatagcaagagcagcgacaagagcgtgtgtctgttcaccgacttcgacagccagaccaacgtgtcccagagcaaggactccgacgtgtacatcaccgataagtgcgtgctggacatgcggagcatggacttcaagagcaactccgccgtggcctggtccaacaagtccgatttcgcctgcgccaacgccttcaacaacagcattatccccgaggacacattcttcccaagccccgagagcagcgactccaccgaccacgtgaagcccaaagagacagagaacaccaagcagcccagcaagagctgccacaagcccaaggccatcgtgcacaccgagaaagtgaacatgatgagcctgaccgtgctgggcctgcggatgctgttcgccaaaaccgtggccgtgaacttcctgctgaccgccaagctgttcttcctcctcaccgcc

SEQ ID NO: 6726 - DNA, 2991 bp, synthetic construct
  source 1..2991: mol_type = other DNA
atggccttaccagtgaccgccttgctcctgccgctggccttgctgctccacgccgccaggccggaagtgcagctggttgaatctggcggaggactggttcagcctggcggatctctgagactgtcttgtgccgccagcggcttcagcttcagcgacttttggatgagctgggtccgacaggcccctggcaaaggacttgaatgggtcgccacaatcagccaggccggcagcgagaaggactacgtggactctgtgaagggcagattcaccatcagccgggacaacgccaagaagtccctgtacctccagatgaacagcctgagagccgaggacaccgccgtgtactattgtgcctctggcgtgtacagcttcgactacagaggccagggcaccctggtcacagtctcttctggtaccggcggaggcggatctggcggcggaggtagcggtggcggaggatctgaattcgacgacatcgtgctgacccagagccccgccagcctggccgtgagcctgggccagagcgtgaccatcagctgcagagccagcgagagcgtggagtactacggcaccagcctgatgcagtggtaccagcagaagcccggccagccccccaagctgctgatctacgccaccagcaacgtggagagcggcgtgcccgccagattcagcggcagcggcagcggcaccgacttcagcctgaacatccaccccgtggaggaggacgacatcgccatgtacttctgccagcagagcagaaagctgcccagcaccttcggcggcggcaccaagctggagatcaagctcgaggacctgaagaacgtgttcccacctgaggtggccgtgttcgagcctagcgaggccgagatcagccacacccagaaagccaccctcgtgtgcctggctaccggcttctaccccgaccatgtggaactgtcttggtgggtcaacggcaaagaggtgcacagcggcgtgtgtaccgacccccagccactgaaagaacagcccgccctgaacgacagccggtactgcctgagcagcagactgagagtgtccgccaccttctggcagaacccccggaaccacttcagatgccaggtgcagttctacggcctgagcgagaacgacgagtggacccaggacagagccaagcccgtgacccagatcgtgtctgccgaagcctggggcagagccgatgatgtgattaagatccactggcaggaaaagaagtccaacaccatcctgggcagccaggaaggcaacaccatgaagaccaacgacacctacatgaagttcagctggctgaccgtgcccgagaagtccctggacaaagaacacagatgcatcgtgcggcacgaaaacaacaagaacggcgtggaccaggaaatcatcttcccacccatcaagaccgatgtgattacaatggaccccaaggacaactgctccaaggacgccaacgataccctgctgctccagctgaccaacaccagcgcctactacatgtacttgttgctgctgctgaagtccgtggtgtacttcgccatcatcacatgctgcctgctgatggctatggtcaagcggaaggacagccggggaagggccaagcgatctggatctggagcaacaaacttctcactactcaaacaagcaggtgacgtggaggagaatcccgggcctactagtatggactggatttggcgcatccttttccttgtcggcgctgctaccggcgcgcattccgggccccagctccagctgcaagagtctggacctggcctggtcaagcctagcgagacactgagcctgacctgtaccgtgtccggcgatagcatcagcagcggcgattactactggggctggatcagacagcctcctggcaaaggactggaatggatcggccacatctactacagcggcgtgacctactacaaccccagcctgaagtccagagtgaccatcagcgtggacaccagccggaaccagttctccctgaagctgtctagcgtgacagccgccgataccgccgtgtactactgcaccagagaggacagcagcaactggcggagtagaggccagggaacactggtcacagttagctctggatccggcggaggcggaagtggaggcggaggatctggcggcggaggctctttcgaagacgtgagactgcaggagagcggccccggccaggtgaagcccagccagaccgtgagcctgacctgcagcgtgaccggctacagcatcaccaacggcaaccactggtggaactggatcagacaggtgagcggcagcaagctggagtggatcggctacatcagcagcagcggcagcaccgacagcaaccccagcctgaagagcagaatcagcatcaccagagacaccagcaagaaccagctgttcctgcagctgaacagcgtgaccaccgaggacatcgccacctactactgcgccagaggctactacttcgactactggggccagggcaccaccctgaccgtgagcagcacgcgtatccagaaccctgatcctgccgtgtaccagctgcgggatagcaagagcagcgacaagagcgtgtgtctgttcaccgacttcgacagccagaccaacgtgtcccagagcaaggactccgacgtgtacatcaccgataagtgcgtgctggacatgcggagcatggacttcaagagcaactccgccgtggcctggtccaacaagtccgatttcgcctgcgccaacgccttcaacaacagcattatccccgaggacacattcttcccaagccccgagagcagcgactccaccgaccacgtgaagcccaaagagacagagaacaccaagcagcccagcaagagctgccacaagcccaaggccatcgtgcacaccgagaaagtgaacatgatgagcctgaccgtgctgggcctgcggatgctgttcgccaaaaccgtggccgtgaacttcctgctgaccgccaagctgttcttcctcctcaccgcc

SEQ ID NO: 6727 - DNA, 2988 bp, synthetic construct
  source 1..2988: mol_type = other DNA
atggccttaccagtgaccgccttgctcctgccgctggccttgctgctccacgccgccaggccggaagtgcagctggttgaatctggcggaggactggttcagcctggcggatctctgagactgtcttgtgccgccagcggcttcagcttcagcgacttttggatgagctgggtccgacaggcccctggcaaaggacttgaatgggtcgccacaatcagccaggccggcagcgagaaggactacgtggactctgtgaagggcagattcaccatcagccgggacaacgccaagaagtccctgtacctccagatgaacagcctgagagccgaggacaccgccgtgtactattgtgcctctggcgtgtacagcttcgactacagaggccagggcaccctggtcacagtctcttctggtaccggcggaggcggatctggcggcggaggtagcggtggcggaggatctgaattcgacatccagatgacccagagccccagcagcctgtctgccagcgtgggcgacagagtgaccatcacctgtagagccagccaggacgtgaacaccgccgtggcctggtatcagcagaagcctggcaaggcccccaagctgctgatctacagcgccagcttcctggaaagcggcgtgcccagcagattcagcggaagcagaagcggcaccgacttcaccctgaccatcagctccctccagcccgaggacttcgccacctactactgccagcagcactacaccacccctcccaccttcggccagaccaaggtggaaatcaagagactcgaggacctgaagaacgtgttcccacctgaggtggccgtgttcgagcctagcgaggccgagatcagccacacccagaaagccaccctcgtgtgcctggctaccggcttctaccccgaccatgtggaactgtcttggtgggtcaacggcaaagaggtgcacagcggcgtgtgtaccgacccccagccactgaaagaacagcccgccctgaacgacagccggtactgcctgagcagcagactgagagtgtccgccaccttctggcagaacccccggaaccacttcagatgccaggtgcagttctacggcctgagcgagaacgacgagtggacccaggacagagccaagcccgtgacccagatcgtgtctgccgaagcctggggcagagccgatgatgtgattaagatccactggcaggaaaagaagtccaacaccatcctgggcagccaggaaggcaacaccatgaagaccaacgacacctacatgaagttcagctggctgaccgtgcccgagaagtccctggacaaagaacacagatgcatcgtgcggcacgaaaacaacaagaacggcgtggaccaggaaatcatcttcccacccatcaagaccgatgtgattacaatggaccccaaggacaactgctccaaggacgccaacgataccctgctgctccagctgaccaacaccagcgcctactacatgtacttgttgctgctgctgaagtccgtggtgtacttcgccatcatcacatgctgcctgctgatggctatggtcaagcggaaggacagccggggaagggccaagcgatctggatctggagcaacaaacttctcactactcaaacaagcaggtgacgtggaggagaatcccgggcctactagtatggactggatttggcgcatccttttccttgtcggcgctgctaccggcgcgcattccgggccccagctccagctgcaagagtctggacctggcctggtcaagcctagcgagacactgagcctgacctgtaccgtgtccggcgatagcatcagcagcggcgattactactggggctggatcagacagcctcctggcaaaggactggaatggatcggccacatctactacagcggcgtgacctactacaaccccagcctgaagtccagagtgaccatcagcgtggacaccagccggaaccagttctccctgaagctgtctagcgtgacagccgccgataccgccgtgtactactgcaccagagaggacagcagcaactggcggagtagaggccagggaacactggtcacagttagctctggatccggcggaggcggaagtggaggcggaggatctggcggcggaggctctttcgaagaagtgcaactggtggaatctggcggcggactggtgcagcctggcggatctctgagactgagctgtgccgccagcggcttcaacatcaaggacacctacatccactgggtgcgccaggcccctggaaagggactggaatgggtggcccggatctaccccaccaacggctacaccagatacgccgacagcgtgaagggccggttcaccatcagcgccgacaccagcaagaataccgcctacctccagatgaacagcctgcgggccgaggataccgccgtgtactactgctcaagatggggaggcgacggcttctacgctatggacgtgtggggccagggcacccttgtgaccgtgtcatctacgcgtatccagaaccctgatcctgccgtgtaccagctgcgggatagcaagagcagcgacaagagcgtgtgtctgttcaccgacttcgacagccagaccaacgtgtcccagagcaaggactccgacgtgtacatcaccgataagtgcgtgctggacatgcggagcatggacttcaagagcaactccgccgtggcctggtccaacaagtccgatttcgcctgcgccaacgccttcaacaacagcattatccccgaggacacattcttcccaagccccgagagcagcgactccaccgaccacgtgaagcccaaagagacagagaacaccaagcagcccagcaagagctgccacaagcccaaggccatcgtgcacaccgagaaagtgaacatgatgagcctgaccgtgctgggcctgcggatgctgttcgccaaaaccgtggccgtgaacttcctgctgaccgccaagctgttcttcctcctcaccgcc

SEQ ID NO: 6728 - DNA, 2985 bp, synthetic construct
  source 1..2985: mol_type = other DNA
atggccttaccagtgaccgccttgctcctgccgctggccttgctgctccacgccgccaggccggaagtgcagctggttgaatctggcggaggactggttcagcctggcggatctctgagactgtcttgtgccgccagcggcttcagcttcagcgacttttggatgagctgggtccgacaggcccctggcaaaggacttgaatgggtcgccacaatcagccaggccggcagcgagaaggactacgtggactctgtgaagggcagattcaccatcagccgggacaacgccaagaagtccctgtacctccagatgaacagcctgagagccgaggacaccgccgtgtactattgtgcctctggcgtgtacagcttcgactacagaggccagggcaccctggtcacagtctcttctggtaccggcggaggcggatctggcggcggaggtagcggtggcggaggatctgaattcgaccagagcgtgctgacacagcctcctagcgtgtcagtggcccctggcaagaccgccagaatcccctgcgagggcaactacatcggcagcagcaacgtgcactggtatcagcagaagcccggccaggctcccgtgctcgtgatccacttcgacagcgacagacccagcggcatccccgacagattcagcggcagcaacagcggcaacatggctaccctgaccatcagcagagtggaagccggggacgaggccgactactactgtcaagtgtgggagaaccacggctgggtgttcggcggaggcaccaagctgacagtgctgtctctcgaggacctgaagaacgtgttcccacctgaggtggccgtgttcgagcctagcgaggccgagatcagccacacccagaaagccaccctcgtgtgcctggctaccggcttctaccccgaccatgtggaactgtcttggtgggtcaacggcaaagaggtgcacagcggcgtgtgtaccgacccccagccactgaaagaacagcccgccctgaacgacagccggtactgcctgagcagcagactgagagtgtccgccaccttctggcagaacccccggaaccacttcagatgccaggtgcagttctacggcctgagcgagaacgacgagtggacccaggacagagccaagcccgtgacccagatcgtgtctgccgaagcctggggcagagccgatgatgtgattaagatccactggcaggaaaagaagtccaacaccatcctgggcagccaggaaggcaacaccatgaagaccaacgacacctacatgaagttcagctggctgaccgtgcccgagaagtccctggacaaagaacacagatgcatcgtgcggcacgaaaacaacaagaacggcgtggaccaggaaatcatcttcccacccatcaagaccgatgtgattacaatggaccccaaggacaactgctccaaggacgccaacgataccctgctgctccagctgaccaacaccagcgcctactacatgtacttgttgctgctgctgaagtccgtggtgtacttcgccatcatcacatgctgcctgctgatggctatggtcaagcggaaggacagccggggaagggccaagcgatctggatctggagcaacaaacttctcactactcaaacaagcaggtgacgtggaggagaatcccgggcctactagtatggactggatttggcgcatccttttccttgtcggcgctgctaccggcgcgcattccgggccccagctccagctgcaagagtctggacctggcctggtcaagcctagcgagacactgagcctgacctgtaccgtgtccggcgatagcatcagcagcggcgattactactggggctggatcagacagcctcctggcaaaggactggaatggatcggccacatctactacagcggcgtgacctactacaaccccagcctgaagtccagagtgaccatcagcgtggacaccagccggaaccagttctccctgaagctgtctagcgtgacagccgccgataccgccgtgtactactgcaccagagaggacagcagcaactggcggagtagaggccagggaacactggtcacagttagctctggatccggcggaggcggaagtggaggcggaggatctggcggcggaggctctttcgaagaggtgcaactggtggaaacaggcggcggactggtgcagcctggcgagtctctgagactgagctgtgccgccagcggcttcaccttcagcgactacgagatgaactgggtgcgccaggcccctggaaagggcctggaatgggtgtcctacatcagcagctccggcagcaccatctactacgccgacagcgtgaagggccggtttaccatctaccgggacaacgccaagaacagcctgtacctccagatgaactccctgcgggccgaggacaccgccctgtactattgtgccagagcctggggcgtgggaccccctgattattggggacagggcaccctcgtgaccgtgtcctctacgcgtatccagaaccctgatcctgccgtgtaccagctgcgggatagcaagagcagcgacaagagcgtgtgtctgttcaccgacttcgacagccagaccaacgtgtcccagagcaaggactccgacgtgtacatcaccgataagtgcgtgctggacatgcggagcatggacttcaagagcaactccgccgtggcctggtccaacaagtccgatttcgcctgcgccaacgccttcaacaacagcattatccccgaggacacattcttcccaagccccgagagcagcgactccaccgaccacgtgaagcccaaagagacagagaacaccaagcagcccagcaagagctgccacaagcccaaggccatcgtgcacaccgagaaagtgaacatgatgagcctgaccgtgctgggcctgcggatgctgttcgccaaaaccgtggccgtgaacttcctgctgaccgccaagctgttcttcctcctcaccgcc

SEQ ID NO: 6729 - DNA, 3009 bp, synthetic construct
  source 1..3009: mol_type = other DNA
atggccttaccagtgaccgccttgctcctgccgctggccttgctgctccacgccgccaggccggaagtgcagctggttgaatctggcggaggactggttcagcctggcggatctctgagactgtcttgtgccgccagcggcttcagcttcagcgacttttggatgagctgggtccgacaggcccctggcaaaggacttgaatgggtcgccacaatcagccaggccggcagcgagaaggactacgtggactctgtgaagggcagattcaccatcagccgggacaacgccaagaagtccctgtacctccagatgaacagcctgagagccgaggacaccgccgtgtactattgtgcctctggcgtgtacagcttcgactacagaggccagggcaccctggtcacagtctcttctggtaccggcggaggcggatctggcggcggaggtagcggtggcggaggatctgaattcgacatccagatgacccagagccccagcagcctgtctgccagcgtgggcgataccgtgaccatcacctgtcaggccaacggctacctgaactggtatcagcagcggagaggcaaggcccccaagctgctgatctacgacggcagcaagctggaaagaggcgtgcccagcagattcagcggcagaagatggggccaggagtacaacctgaccatcaacaacctccagcccgaggatattgccacatacttttgccaggtgtacgagttcgtggtgcccggcacacggctggacctgaagagaacagtggctgctcctctcgaggacctgaagaacgtgttcccacctgaggtggccgtgttcgagcctagcgaggccgagatcagccacacccagaaagccaccctcgtgtgcctggctaccggcttctaccccgaccatgtggaactgtcttggtgggtcaacggcaaagaggtgcacagcggcgtgtgtaccgacccccagccactgaaagaacagcccgccctgaacgacagccggtactgcctgagcagcagactgagagtgtccgccaccttctggcagaacccccggaaccacttcagatgccaggtgcagttctacggcctgagcgagaacgacgagtggacccaggacagagccaagcccgtgacccagatcgtgtctgccgaagcctggggcagagccgatgatgtgattaagatccactggcaggaaaagaagtccaacaccatcctgggcagccaggaaggcaacaccatgaagaccaacgacacctacatgaagttcagctggctgaccgtgcccgagaagtccctggacaaagaacacagatgcatcgtgcggcacgaaaacaacaagaacggcgtggaccaggaaatcatcttcccacccatcaagaccgatgtgattacaatggaccccaaggacaactgctccaaggacgccaacgataccctgctgctccagctgaccaacaccagcgcctactacatgtacttgttgctgctgctgaagtccgtggtgtacttcgccatcatcacatgctgcctgctgatggctatggtcaagcggaaggacagccggggaagggccaagcgatctggatctggagcaacaaacttctcactactcaaacaagcaggtgacgtggaggagaatcccgggcctactagtatggactggatttggcgcatccttttccttgtcggcgctgctaccggcgcgcattccgggccccagctccagctgcaagagtctggacctggcctggtcaagcctagcgagacactgagcctgacctgtaccgtgtccggcgatagcatcagcagcggcgattactactggggctggatcagacagcctcctggcaaaggactggaatggatcggccacatctactacagcggcgtgacctactacaaccccagcctgaagtccagagtgaccatcagcgtggacaccagccggaaccagttctccctgaagctgtctagcgtgacagccgccgataccgccgtgtactactgcaccagagaggacagcagcaactggcggagtagaggccagggaacactggtcacagttagctctggatccggcggaggcggaagtggaggcggaggatctggcggcggaggctctttcgaacaggtgcagctgctccagtctggcgctgccgtgacaaagcctggcgcttctgtgcgggtgtcctgtgaagccagcggctacaacatccgggactacttcatccactggtggcggcaggctccaggccagggactccagtgggtgggatggatcaaccccaagaccggccagcccaacaaccccagacagttccagggcagagtgtccctgaccagacacgccagctgggacttcgacaccttcagcttctacatggatctgaaggccctgcggagcgacgataccgccgtgtacttctgcgccagacagagaagcgactactgggatttcgacgtgtggggcagcggcacccaagtgacagtgtctagcgccagcaccaagggacccacgcgtatccagaaccctgatcctgccgtgtaccagctgcgggatagcaagagcagcgacaagagcgtgtgtctgttcaccgacttcgacagccagaccaacgtgtcccagagcaaggactccgacgtgtacatcaccgataagtgcgtgctggacatgcggagcatggacttcaagagcaactccgccgtggcctggtccaacaagtccgatttcgcctgcgccaacgccttcaacaacagcattatccccgaggacacattcttcccaagccccgagagcagcgactccaccgaccacgtgaagcccaaagagacagagaacaccaagcagcccagcaagagctgccacaagcccaaggccatcgtgcacaccgagaaagtgaacatgatgagcctgaccgtgctgggcctgcggatgctgttcgccaaaaccgtggccgtgaacttcctgctgaccgccaagctgttcttcctcctcaccgcc

SEQ ID NO: 6730 - DNA, 3027 bp, synthetic construct
  source 1..3027: mol_type = other DNA
atggccttaccagtgaccgccttgctcctgccgctggccttgctgctccacgccgccaggccggaagtgcagctggttgaatctggcggaggactggttcagcctggcggatctctgagactgtcttgtgccgccagcggcttcagcttcagcgacttttggatgagctgggtccgacaggcccctggcaaaggacttgaatgggtcgccacaatcagccaggccggcagcgagaaggactacgtggactctgtgaagggcagattcaccatcagccgggacaacgccaagaagtccctgtacctccagatgaacagcctgagagccgaggacaccgccgtgtactattgtgcctctggcgtgtacagcttcgactacagaggccagggcaccctggtcacagtctcttctggtaccggcggaggcggatctggcggcggaggtagcggtggcggaggatctgaattccagtctgccctgacacagcctcctagcgcctctggctctcccggccagagcatcaccatcagctgtaccggcaccagcaacaacttcgtgtcctggtatcagcagcacgccggcaaggcccccaagctcgtgatctacgacgtgaacaagcggcccagcggcgtgcccgatagattcagcggcagcaagagcggcaacaccgccagcctgacagtgtctggcctccagaccgatgacgaggccgtgtactactgcggcagcctcgtgggcaactgggacgtgatctttggcggaggcaccaagctgaccgtgctgctcgaggacctgaagaacgtgttcccacctgaggtggccgtgttcgagcctagcgaggccgagatcagccacacccagaaagccaccctcgtgtgcctggctaccggcttctaccccgaccatgtggaactgtcttggtgggtcaacggcaaagaggtgcacagcggcgtgtgtaccgacccccagccactgaaagaacagcccgccctgaacgacagccggtactgcctgagcagcagactgagagtgtccgccaccttctggcagaacccccggaaccacttcagatgccaggtgcagttctacggcctgagcgagaacgacgagtggacccaggacagagccaagcccgtgacccagatcgtgtctgccgaagcctggggcagagccgatgatgtgattaagatccactggcaggaaaagaagtccaacaccatcctgggcagccaggaaggcaacaccatgaagaccaacgacacctacatgaagttcagctggctgaccgtgcccgagaagtccctggacaaagaacacagatgcatcgtgcggcacgaaaacaacaagaacggcgtggaccaggaaatcatcttcccacccatcaagaccgatgtgattacaatggaccccaaggacaactgctccaaggacgccaacgataccctgctgctccagctgaccaacaccagcgcctactacatgtacttgttgctgctgctgaagtccgtggtgtacttcgccatcatcacatgctgcctgctgatggctatggtcaagcggaaggacagccggggaagggccaagcgatctggatctggagcaacaaacttctcactactcaaacaagcaggtgacgtggaggagaatcccgggcctactagtatggactggatttggcgcatccttttccttgtcggcgctgctaccggcgcgcattccgggccccagctccagctgcaagagtctggacctggcctggtcaagcctagcgagacactgagcctgacctgtaccgtgtccggcgatagcatcagcagcggcgattactactggggctggatcagacagcctcctggcaaaggactggaatggatcggccacatctactacagcggcgtgacctactacaaccccagcctgaagtccagagtgaccatcagcgtggacaccagccggaaccagttctccctgaagctgtctagcgtgacagccgccgataccgccgtgtactactgcaccagagaggacagcagcaactggcggagtagaggccagggaacactggtcacagttagctctggatccggcggaggcggaagtggaggcggaggatctggcggcggaggctctttcgaacagccccagctccaggaatctggccccacactggtggaagccagcgagacactgagcctgacctgtgccgtgtccggcgattctaccgccgcctgcaatagcttctggggctgggtgcgccagcctcctggaaagggactggaatgggtgggaagcctgagccactgcgccagctattggaaccggggctggacctaccacaaccccagcctgaagtccagactgaccctggccctggacacccccaagaacctggtgttcctgaagctgaacagcgtgacagccgccgacaccgccacctactactgtgccagatttggcggcgaggtgctgcggtacaccgactggcctaaacctgcctgggtggacctgtggggcagaggaacactcgtgaccgtgtccagcacgcgtatccagaaccctgatcctgccgtgtaccagctgcgggatagcaagagcagcgacaagagcgtgtgtctgttcaccgacttcgacagccagaccaacgtgtcccagagcaaggactccgacgtgtacatcaccgataagtgcgtgctggacatgcggagcatggacttcaagagcaactccgccgtggcctggtccaacaagtccgatttcgcctgcgccaacgccttcaacaacagcattatccccgaggacacattcttcccaagccccgagagcagcgactccaccgaccacgtgaagcccaaagagacagagaacaccaagcagcccagcaagagctgccacaagcccaaggccatcgtgcacaccgagaaagtgaacatgatgagcctgaccgtgctgggcctgcggatgctgttcgccaaaaccgtggccgtgaacttcctgctgaccgccaagctgttcttcctcctcaccgcc

SEQ ID NO: 6731 - DNA, 2982 bp, synthetic construct
  source 1..2982: mol_type = other DNA
atggccttaccagtgaccgccttgctcctgccgctggccttgctgctccacgccgccaggccggaagtgcagctggttgaatctggcggaggactggttcagcctggcggatctctgagactgtcttgtgccgccagcggcttcagcttcagcgacttttggatgagctgggtccgacaggcccctggcaaaggacttgaatgggtcgccacaatcagccaggccggcagcgagaaggactacgtggactctgtgaagggcagattcaccatcagccgggacaacgccaagaagtccctgtacctccagatgaacagcctgagagccgaggacaccgccgtgtactattgtgcctctggcgtgtacagcttcgactacagaggccagggcaccctggtcacagtctcttctggtaccggcggaggcggatctggcggcggaggtagcggtggcggaggatctgaattcgagatcgtgctgacacagagccctggcaccctgagcctgtctccaggcgagacagccatcatcagctgccggacaagccagtacggcagcctggcctggtatcagcagaggccaggacaggcccccagactcgtgatctacagcggcagcacaagagccgccggaatccccgatagattcagcggctccagatggggacccgactacaacctgaccatcagcaacctggaaagcggcgacttcggcgtgtactactgccagcagtacgagttcttcggccagggcaccaaggtgcaggtggacatcaaaagactcgaggacctgaagaacgtgttcccacctgaggtggccgtgttcgagcctagcgaggccgagatcagccacacccagaaagccaccctcgtgtgcctggctaccggcttctaccccgaccatgtggaactgtcttggtgggtcaacggcaaagaggtgcacagcggcgtgtgtaccgacccccagccactgaaagaacagcccgccctgaacgacagccggtactgcctgagcagcagactgagagtgtccgccaccttctggcagaacccccggaaccacttcagatgccaggtgcagttctacggcctgagcgagaacgacgagtggacccaggacagagccaagcccgtgacccagatcgtgtctgccgaagcctggggcagagccgatgatgtgattaagatccactggcaggaaaagaagtccaacaccatcctgggcagccaggaaggcaacaccatgaagaccaacgacacctacatgaagttcagctggctgaccgtgcccgagaagtccctggacaaagaacacagatgcatcgtgcggcacgaaaacaacaagaacggcgtggaccaggaaatcatcttcccacccatcaagaccgatgtgattacaatggaccccaaggacaactgctccaaggacgccaacgataccctgctgctccagctgaccaacaccagcgcctactacatgtacttgttgctgctgctgaagtccgtggtgtacttcgccatcatcacatgctgcctgctgatggctatggtcaagcggaaggacagccggggaagggccaagcgatctggatctggagcaacaaacttctcactactcaaacaagcaggtgacgtggaggagaatcccgggcctactagtatggactggatttggcgcatccttttccttgtcggcgctgctaccggcgcgcattccgggccccagctccagctgcaagagtctggacctggcctggtcaagcctagcgagacactgagcctgacctgtaccgtgtccggcgatagcatcagcagcggcgattactactggggctggatcagacagcctcctggcaaaggactggaatggatcggccacatctactacagcggcgtgacctactacaaccccagcctgaagtccagagtgaccatcagcgtggacaccagccggaaccagttctccctgaagctgtctagcgtgacagccgccgataccgccgtgtactactgcaccagagaggacagcagcaactggcggagtagaggccagggaacactggtcacagttagctctggatccggcggaggcggaagtggaggcggaggatctggcggcggaggctctttcgaacaggtgcagctggtgcagtctggcggccagatgaagaaacccggcgagagcatgagaatcagctgtcgggcctccggctacgagttcatcgactgcaccctgaactggatcagactggcccctggcaagcggcctgagtggatgggatggctgaagcctagaggcggagccgtgaactacgccagacctctccagggcagagtgaccatgaccagggacgtgtacagcgataccgccttcctggaactgcggagcctgaccgtggatgataccgccgtgtacttctgcaccagaggcaagaactgcgattacaactgggacttcgagcactggggcagaggcacccctgtgatcgtgtctagcacgcgtatccagaaccctgatcctgccgtgtaccagctgcgggatagcaagagcagcgacaagagcgtgtgtctgttcaccgacttcgacagccagaccaacgtgtcccagagcaaggactccgacgtgtacatcaccgataagtgcgtgctggacatgcggagcatggacttcaagagcaactccgccgtggcctggtccaacaagtccgatttcgcctgcgccaacgccttcaacaacagcattatccccgaggacacattcttcccaagccccgagagcagcgactccaccgaccacgtgaagcccaaagagacagagaacaccaagcagcccagcaagagctgccacaagcccaaggccatcgtgcacaccgagaaagtgaacatgatgagcctgaccgtgctgggcctgcggatgctgttcgccaaaaccgtggccgtgaacttcctgctgaccgccaagctgttcttcctcctcaccgcc

SEQ ID NO: 6732 - DNA, 3012 bp, synthetic construct
  source 1..3012: mol_type = other DNA
atggccttaccagtgaccgccttgctcctgccgctggccttgctgctccacgccgccaggccggaagtgcagctggttgaatctggcggaggactggttcagcctggcggatctctgagactgtcttgtgccgccagcggcttcagcttcagcgacttttggatgagctgggtccgacaggcccctggcaaaggacttgaatgggtcgccacaatcagccaggccggcagcgagaaggactacgtggactctgtgaagggcagattcaccatcagccgggacaacgccaagaagtccctgtacctccagatgaacagcctgagagccgaggacaccgccgtgtactattgtgcctctggcgtgtacagcttcgactacagaggccagggcaccctggtcacagtctcttctggtaccggcggaggcggatctggcggcggaggtagcggtggcggaggatctgaattcgagctggtgctgacacagagccctggcaccctgtctctgtctgccggcgaaagagccaccctgagctgtagagccagccagagcgtgtcctctggcagcctggcttggtatcagcagaagccaggccaggcccccagactgctgatctacggcgcttctaccagagccaccggcatccccgatagattcagcggctctggctccggcaccgacttcaccctgacaatcggcagactggaacccgaggacctggccgtgtactactgccagcagtacggcaccagcccctacacattcggccagggcaccaagctggaaatcctcgaggacctgaagaacgtgttcccacctgaggtggccgtgttcgagcctagcgaggccgagatcagccacacccagaaagccaccctcgtgtgcctggctaccggcttctaccccgaccatgtggaactgtcttggtgggtcaacggcaaagaggtgcacagcggcgtgtgtaccgacccccagccactgaaagaacagcccgccctgaacgacagccggtactgcctgagcagcagactgagagtgtccgccaccttctggcagaacccccggaaccacttcagatgccaggtgcagttctacggcctgagcgagaacgacgagtggacccaggacagagccaagcccgtgacccagatcgtgtctgccgaagcctggggcagagccgatgatgtgattaagatccactggcaggaaaagaagtccaacaccatcctgggcagccaggaaggcaacaccatgaagaccaacgacacctacatgaagttcagctggctgaccgtgcccgagaagtccctggacaaagaacacagatgcatcgtgcggcacgaaaacaacaagaacggcgtggaccaggaaatcatcttcccacccatcaagaccgatgtgattacaatggaccccaaggacaactgctccaaggacgccaacgataccctgctgctccagctgaccaacaccagcgcctactacatgtacttgttgctgctgctgaagtccgtggtgtacttcgccatcatcacatgctgcctgctgatggctatggtcaagcggaaggacagccggggaagggccaagcgatctggatctggagcaacaaacttctcactactcaaacaagcaggtgacgtggaggagaatcccgggcctactagtatggactggatttggcgcatccttttccttgtcggcgctgctaccggcgcgcattccgggccccagctccagctgcaagagtctggacctggcctggtcaagcctagcgagacactgagcctgacctgtaccgtgtccggcgatagcatcagcagcggcgattactactggggctggatcagacagcctcctggcaaaggactggaatggatcggccacatctactacagcggcgtgacctactacaaccccagcctgaagtccagagtgaccatcagcgtggacaccagccggaaccagttctccctgaagctgtctagcgtgacagccgccgataccgccgtgtactactgcaccagagaggacagcagcaactggcggagtagaggccagggaacactggtcacagttagctctggatccggcggaggcggaagtggaggcggaggatctggcggcggaggctctttcgaactggaacagagcggagccgaagtgaagaaacccggcagcagcgtgcaggtgtcctgcaaagcaagcggcggcaccttctctatgtacggcttcaactgggtgcgccaggctcctggacacggcctggaatggatgggcggcatcatccccatcttcggcacctccaactacgcccagaaattccggggcagagtgaccttcaccgccgaccaggccacaagcaccgcctacatggaactgaccaacctgcggagcgacgacaccgccgtgtattattgcgccagagacttcggccccgactgggaggatggcgacagctacgatggcagcggcagaggcttcttcgacttctggggccagggaacccttgtgaccgtgtcctcaacgcgtatccagaaccctgatcctgccgtgtaccagctgcgggatagcaagagcagcgacaagagcgtgtgtctgttcaccgacttcgacagccagaccaacgtgtcccagagcaaggactccgacgtgtacatcaccgataagtgcgtgctggacatgcggagcatggacttcaagagcaactccgccgtggcctggtccaacaagtccgatttcgcctgcgccaacgccttcaacaacagcattatccccgaggacacattcttcccaagccccgagagcagcgactccaccgaccacgtgaagcccaaagagacagagaacaccaagcagcccagcaagagctgccacaagcccaaggccatcgtgcacaccgagaaagtgaacatgatgagcctgaccgtgctgggcctgcggatgctgttcgccaaaaccgtggccgtgaacttcctgctgaccgccaagctgttcttcctcctcaccgcc

SEQ ID NO: 6733 - DNA, 2952 bp, synthetic construct
  source 1..2952: mol_type = other DNA
atggccttaccagtgaccgccttgctcctgccgctggccttgctgctccacgccgccaggccggaagtgcagctggttgaatctggcggaggactggttcagcctggcggatctctgagactgtcttgtgccgccagcggcttcagcttcagcgacttttggatgagctgggtccgacaggcccctggcaaaggacttgaatgggtcgccacaatcagccaggccggcagcgagaaggactacgtggactctgtgaagggcagattcaccatcagccgggacaacgccaagaagtccctgtacctccagatgaacagcctgagagccgaggacaccgccgtgtactattgtgcctctggcgtgtacagcttcgactacagaggccagggcaccctggtcacagtctcttctggtaccggcggaggcggatctggcggcggaggtagcggtggcggaggatctgaattcgacatccagatgacccagagccccagcagcctgtctgccagcgtgggcgacagagtgaccatcacctgtcaggccagccaggacatcaacaactacctgaactggtatcagcagaagcccggcaaggcccccaagctgctgatctacgacgccagcaatctgcagaccggcgtgcccagcagattttccggctctggcagcggcaccgacttcaccttcaccatcgaggacattgccacctactactgccagcagtacaccttcggccctggcaccaaggtggacatcaaactcgaggacctgaagaacgtgttcccacctgaggtggccgtgttcgagcctagcgaggccgagatcagccacacccagaaagccaccctcgtgtgcctggctaccggcttctaccccgaccatgtggaactgtcttggtgggtcaacggcaaagaggtgcacagcggcgtgtgtaccgacccccagccactgaaagaacagcccgccctgaacgacagccggtactgcctgagcagcagactgagagtgtccgccaccttctggcagaacccccggaaccacttcagatgccaggtgcagttctacggcctgagcgagaacgacgagtggacccaggacagagccaagcccgtgacccagatcgtgtctgccgaagcctggggcagagccgatgatgtgattaagatccactggcaggaaaagaagtccaacaccatcctgggcagccaggaaggcaacaccatgaagaccaacgacacctacatgaagttcagctggctgaccgtgcccgagaagtccctggacaaagaacacagatgcatcgtgcggcacgaaaacaacaagaacggcgtggaccaggaaatcatcttcccacccatcaagaccgatgtgattacaatggaccccaaggacaactgctccaaggacgccaacgataccctgctgctccagctgaccaacaccagcgcctactacatgtacttgttgctgctgctgaagtccgtggtgtacttcgccatcatcacatgctgcctgctgatggctatggtcaagcggaaggacagccggggaagggccaagcgatctggatctggagcaacaaacttctcactactcaaacaagcaggtgacgtggaggagaatcccgggcctactagtatggactggatttggcgcatccttttccttgtcggcgctgctaccggcgcgcattccgggccccagctccagctgcaagagtctggacctggcctggtcaagcctagcgagacactgagcctgacctgtaccgtgtccggcgatagcatcagcagcggcgattactactggggctggatcagacagcctcctggcaaaggactggaatggatcggccacatctactacagcggcgtgacctactacaaccccagcctgaagtccagagtgaccatcagcgtggacaccagccggaaccagttctccctgaagctgtctagcgtgacagccgccgataccgccgtgtactactgcaccagagaggacagcagcaactggcggagtagaggccagggaacactggtcacagttagctctggatccggcggaggcggaagtggaggcggaggatctggcggcggaggctctttcgaagaagtgcaactgctggaatctggcggcggactggtgcagcctggcggatctctgagactgagctgtgccgccagcggcttcacctttagctggtacagcatgacctgggtgcgccaggcccctggcaaaggactggaatgggtgtccagcatcgtgccctggggcgatttcacccagtacgccgatagcgtgaagggccggttcaccatcagccgggacaacagcaagaacaccctgtacctgcagatgaacagcctgcgggccgaggacaccgccgtgtactattgtgccaagggacctggctggggcagcttcgatctgtggggcagaggaacccttgtgaccgtgtccagcacgcgtatccagaaccctgatcctgccgtgtaccagctgcgggatagcaagagcagcgacaagagcgtgtgtctgttcaccgacttcgacagccagaccaacgtgtcccagagcaaggactccgacgtgtacatcaccgataagtgcgtgctggacatgcggagcatggacttcaagagcaactccgccgtggcctggtccaacaagtccgatttcgcctgcgccaacgccttcaacaacagcattatccccgaggacacattcttcccaagccccgagagcagcgactccaccgaccacgtgaagcccaaagagacagagaacaccaagcagcccagcaagagctgccacaagcccaaggccatcgtgcacaccgagaaagtgaacatgatgagcctgaccgtgctgggcctgcggatgctgttcgccaaaaccgtggccgtgaacttcctgctgaccgccaagctgttcttcctcctcaccgcc

SEQ ID NO: 6734 - DNA, 2982 bp, synthetic construct
  source 1..2982: mol_type = other DNA
atggccttaccagtgaccgccttgctcctgccgctggccttgctgctccacgccgccaggccggaagtgcagctggttgaatctggcggaggactggttcagcctggcggatctctgagactgtcttgtgccgccagcggcttcagcttcagcgacttttggatgagctgggtccgacaggcccctggcaaaggacttgaatgggtcgccacaatcagccaggccggcagcgagaaggactacgtggactctgtgaagggcagattcaccatcagccgggacaacgccaagaagtccctgtacctccagatgaacagcctgagagccgaggacaccgccgtgtactattgtgcctctggcgtgtacagcttcgactacagaggccagggcaccctggtcacagtctcttctggtaccggcggaggcggatctggcggcggaggtagcggtggcggaggatctgaattcgacatccagatgacccagagccccagcagcctgtctgccagcgtgggcgacagagtgaccatcacctgtaccgccagcctgagcgtgtccagcacctacctgcactggtatcagcagaagcccggcagcagccccaagctgtggatctacagcaccagcaacctggcctccggcgtgcccagcagattttctggcagcggctctggcaccagctacaccctgaccatcagctccctccagcccgaggacttcgccacctactactgccaccagtaccacagaagccccctgacctttggcggaggcaccaaggtggaaatcaagagactcgaggacctgaagaacgtgttcccacctgaggtggccgtgttcgagcctagcgaggccgagatcagccacacccagaaagccaccctcgtgtgcctggctaccggcttctaccccgaccatgtggaactgtcttggtgggtcaacggcaaagaggtgcacagcggcgtgtgtaccgacccccagccactgaaagaacagcccgccctgaacgacagccggtactgcctgagcagcagactgagagtgtccgccaccttctggcagaacccccggaaccacttcagatgccaggtgcagttctacggcctgagcgagaacgacgagtggacccaggacagagccaagcccgtgacccagatcgtgtctgccgaagcctggggcagagccgatgatgtgattaagatccactggcaggaaaagaagtccaacaccatcctgggcagccaggaaggcaacaccatgaagaccaacgacacctacatgaagttcagctggctgaccgtgcccgagaagtccctggacaaagaacacagatgcatcgtgcggcacgaaaacaacaagaacggcgtggaccaggaaatcatcttcccacccatcaagaccgatgtgattacaatggaccccaaggacaactgctccaaggacgccaacgataccctgctgctccagctgaccaacaccagcgcctactacatgtacttgttgctgctgctgaagtccgtggtgtacttcgccatcatcacatgctgcctgctgatggctatggtcaagcggaaggacagccggggaagggccaagcgatctggatctggagcaacaaacttctcactactcaaacaagcaggtgacgtggaggagaatcccgggcctactagtatggactggatttggcgcatccttttccttgtcggcgctgctaccggcgcgcattccgggccccagctccagctgcaagagtctggacctggcctggtcaagcctagcgagacactgagcctgacctgtaccgtgtccggcgatagcatcagcagcggcgattactactggggctggatcagacagcctcctggcaaaggactggaatggatcggccacatctactacagcggcgtgacctactacaaccccagcctgaagtccagagtgaccatcagcgtggacaccagccggaaccagttctccctgaagctgtctagcgtgacagccgccgataccgccgtgtactactgcaccagagaggacagcagcaactggcggagtagaggccagggaacactggtcacagttagctctggatccggcggaggcggaagtggaggcggaggatctggcggcggaggctctttcgaagaagtgcaactggtggaatctggcggcggactggtgcagcctggcggatctctgagactgagctgtgccgccagcggcttcagcctgaccaaatacggcgtgcactgggtgcgccaggcccctggaaaaggactggaatgggtgggagtgaagtgggctggcggctccaccgactacaacagcgccctgatgagccggttcaccatcagcaaggacaacgccaagaacagcctgtacctccagatgaactccctgcgggccgaggacaccgccgtgtactactgtgccagagatcaccgggacgctatggactactggggccagggaacactcgtgaccgtgtcctctacgcgtatccagaaccctgatcctgccgtgtaccagctgcgggatagcaagagcagcgacaagagcgtgtgtctgttcaccgacttcgacagccagaccaacgtgtcccagagcaaggactccgacgtgtacatcaccgataagtgcgtgctggacatgcggagcatggacttcaagagcaactccgccgtggcctggtccaacaagtccgatttcgcctgcgccaacgccttcaacaacagcattatccccgaggacacattcttcccaagccccgagagcagcgactccaccgaccacgtgaagcccaaagagacagagaacaccaagcagcccagcaagagctgccacaagcccaaggccatcgtgcacaccgagaaagtgaacatgatgagcctgaccgtgctgggcctgcggatgctgttcgccaaaaccgtggccgtgaacttcctgctgaccgccaagctgttcttcctcctcaccgcc

SEQ ID NO: 6735 - DNA, 2994 bp, synthetic construct
  source 1..2994: mol_type = other DNA
atggccttaccagtgaccgccttgctcctgccgctggccttgctgctccacgccgccaggccggaagtgcagctggttgaatctggcggaggactggttcagcctggcggatctctgagactgtcttgtgccgccagcggcttcagcttcagcgacttttggatgagctgggtccgacaggcccctggcaaaggacttgaatgggtcgccacaatcagccaggccggcagcgagaaggactacgtggactctgtgaagggcagattcaccatcagccgggacaacgccaagaagtccctgtacctccagatgaacagcctgagagccgaggacaccgccgtgtactattgtgcctctggcgtgtacagcttcgactacagaggccagggcaccctggtcacagtctcttctggtaccggcggaggcggatctggcggcggaggtagcggtggcggaggatctgaattcgacatccagatgacccagagccccagcagcctgtctgccagcgtgggcgacagagtgaccatcacatgcaaggccagccaggacgtgggaacagccgtggcctggtatcagcagaagcctggcaaggcccccaagctgctgatctacagcgccagctacagatccaccggcgtgcccagcagattttccggctctggcagcggcaccgacttcaccctgaccatctctagcctccagcccgaggacttcgccacctactactgccagcaccactactccgccccctggacatttggcggaggcaccaaggtggaaatcaagctcgaggacctgaagaacgtgttcccacctgaggtggccgtgttcgagcctagcgaggccgagatcagccacacccagaaagccaccctcgtgtgcctggctaccggcttctaccccgaccatgtggaactgtcttggtgggtcaacggcaaagaggtgcacagcggcgtgtgtaccgacccccagccactgaaagaacagcccgccctgaacgacagccggtactgcctgagcagcagactgagagtgtccgccaccttctggcagaacccccggaaccacttcagatgccaggtgcagttctacggcctgagcgagaacgacgagtggacccaggacagagccaagcccgtgacccagatcgtgtctgccgaagcctggggcagagccgatgatgtgattaagatccactggcaggaaaagaagtccaacaccatcctgggcagccaggaaggcaacaccatgaagaccaacgacacctacatgaagttcagctggctgaccgtgcccgagaagtccctggacaaagaacacagatgcatcgtgcggcacgaaaacaacaagaacggcgtggaccaggaaatcatcttcccacccatcaagaccgatgtgattacaatggaccccaaggacaactgctccaaggacgccaacgataccctgctgctccagctgaccaacaccagcgcctactacatgtacttgttgctgctgctgaagtccgtggtgtacttcgccatcatcacatgctgcctgctgatggctatggtcaagcggaaggacagccggggaagggccaagcgatctggatctggagcaacaaacttctcactactcaaacaagcaggtgacgtggaggagaatcccgggcctactagtatggactggatttggcgcatccttttccttgtcggcgctgctaccggcgcgcattccgggccccagctccagctgcaagagtctggacctggcctggtcaagcctagcgagacactgagcctgacctgtaccgtgtccggcgatagcatcagcagcggcgattactactggggctggatcagacagcctcctggcaaaggactggaatggatcggccacatctactacagcggcgtgacctactacaaccccagcctgaagtccagagtgaccatcagcgtggacaccagccggaaccagttctccctgaagctgtctagcgtgacagccgccgataccgccgtgtactactgcaccagagaggacagcagcaactggcggagtagaggccagggaacactggtcacagttagctctggatccggcggaggcggaagtggaggcggaggatctggcggcggaggctctttcgaagaagtgcaactggtggaatcaggcggcggactggtgcagcctggcggatctctgagactgagctgtgccgccagcggcttcaccttcagcagaaacggcatgagctgggtgcgccaggcccctggaaaaggactggaatgggtggcaaccgtgtccagcggcggcagctacatctactacgccgacagcgtgaagggccggttcaccatctccagagacaacgccaagaacagcctgtacctccagatgaactccctgcgggccgaggacaccgccgtgtactattgtgccagacagggcaccaccgccctggctaccagattcttcgatgtgtggggccagggcaccctcgtgaccgtgtcatctacgcgtatccagaaccctgatcctgccgtgtaccagctgcgggatagcaagagcagcgacaagagcgtgtgtctgttcaccgacttcgacagccagaccaacgtgtcccagagcaaggactccgacgtgtacatcaccgataagtgcgtgctggacatgcggagcatggacttcaagagcaactccgccgtggcctggtccaacaagtccgatttcgcctgcgccaacgccttcaacaacagcattatccccgaggacacattcttcccaagccccgagagcagcgactccaccgaccacgtgaagcccaaagagacagagaacaccaagcagcccagcaagagctgccacaagcccaaggccatcgtgcacaccgagaaagtgaacatgatgagcctgaccgtgctgggcctgcggatgctgttcgccaaaaccgtggccgtgaacttcctgctgaccgccaagctgttcttcctcctcaccgcc

SEQ ID NO: 6736 - DNA, 2982 bp, synthetic construct
  source 1..2982: mol_type = other DNA
atggccttaccagtgaccgccttgctcctgccgctggccttgctgctccacgccgccaggccggaagtgcagctggttgaatctggcggaggactggttcagcctggcggatctctgagactgtcttgtgccgccagcggcttcagcttcagcgacttttggatgagctgggtccgacaggcccctggcaaaggacttgaatgggtcgccacaatcagccaggccggcagcgagaaggactacgtggactctgtgaagggcagattcaccatcagccgggacaacgccaagaagtccctgtacctccagatgaacagcctgagagccgaggacaccgccgtgtactattgtgcctctggcgtgtacagcttcgactacagaggccagggcaccctggtcacagtctcttctggtaccggcggaggcggatctggcggcggaggtagcggtggcggaggatctgaattcgacatccagatgacccagagcccccctagcctgtctgcctctgtgggcggcaaagtgaccatcacatgcaaggccagccaggacatcgaccgctacatggcctggtatcaggacaagcccggcaagggacccaagctgctgatccacgataccagcaccctccagcccggcatccccagcagattttctggcagcggctccggcagagactacagcttcagcatcagcaacctggaacccgaggacattgccacctactactgcctccagtacgacaacctgtggaccttcggcggaggcaccaagctggaaatcaagagactcgaggacctgaagaacgtgttcccacctgaggtggccgtgttcgagcctagcgaggccgagatcagccacacccagaaagccaccctcgtgtgcctggctaccggcttctaccccgaccatgtggaactgtcttggtgggtcaacggcaaagaggtgcacagcggcgtgtgtaccgacccccagccactgaaagaacagcccgccctgaacgacagccggtactgcctgagcagcagactgagagtgtccgccaccttctggcagaacccccggaaccacttcagatgccaggtgcagttctacggcctgagcgagaacgacgagtggacccaggacagagccaagcccgtgacccagatcgtgtctgccgaagcctggggcagagccgatgatgtgattaagatccactggcaggaaaagaagtccaacaccatcctgggcagccaggaaggcaacaccatgaagaccaacgacacctacatgaagttcagctggctgaccgtgcccgagaagtccctggacaaagaacacagatgcatcgtgcggcacgaaaacaacaagaacggcgtggaccaggaaatcatcttcccacccatcaagaccgatgtgattacaatggaccccaaggacaactgctccaaggacgccaacgataccctgctgctccagctgaccaacaccagcgcctactacatgtacttgttgctgctgctgaagtccgtggtgtacttcgccatcatcacatgctgcctgctgatggctatggtcaagcggaaggacagccggggaagggccaagcgatctggatctggagcaacaaacttctcactactcaaacaagcaggtgacgtggaggagaatcccgggcctactagtatggactggatttggcgcatccttttccttgtcggcgctgctaccggcgcgcattccgggccccagctccagctgcaagagtctggacctggcctggtcaagcctagcgagacactgagcctgacctgtaccgtgtccggcgatagcatcagcagcggcgattactactggggctggatcagacagcctcctggcaaaggactggaatggatcggccacatctactacagcggcgtgacctactacaaccccagcctgaagtccagagtgaccatcagcgtggacaccagccggaaccagttctccctgaagctgtctagcgtgacagccgccgataccgccgtgtactactgcaccagagaggacagcagcaactggcggagtagaggccagggaacactggtcacagttagctctggatccggcggaggcggaagtggaggcggaggatctggcggcggaggctctttcgaacaggtgcaactggtgcagagcggagccgagcttgtgaagcctggcgcttccgtgaagatgagctgcaaagccagcggctacatcttcaccaactacaacatccactgggtcaagaagtccccaggccagggcctggaatggatcggagccatctaccccggaaacggcgacgccccttacagccagaagttccaggacagagccaccctgaccgccgacaccagcagcagcaccacctacatggaactgagcagcctgaccagcgaggacagcgccgtgtactattgcgtgcgggccaactgggatgtggccttcgcctattggggccagggcacactggtgtccgtgtcctctacgcgtatccagaaccctgatcctgccgtgtaccagctgcgggatagcaagagcagcgacaagagcgtgtgtctgttcaccgacttcgacagccagaccaacgtgtcccagagcaaggactccgacgtgtacatcaccgataagtgcgtgctggacatgcggagcatggacttcaagagcaactccgccgtggcctggtccaacaagtccgatttcgcctgcgccaacgccttcaacaacagcattatccccgaggacacattcttcccaagccccgagagcagcgactccaccgaccacgtgaagcccaaagagacagagaacaccaagcagcccagcaagagctgccacaagcccaaggccatcgtgcacaccgagaaagtgaacatgatgagcctgaccgtgctgggcctgcggatgctgttcgccaaaaccgtggccgtgaacttcctgctgaccgccaagctgttcttcctcctcaccgcc

SEQ ID NO: 6737 - DNA, 2985 bp, synthetic construct
  source 1..2985: mol_type = other DNA
atggccttaccagtgaccgccttgctcctgccgctggccttgctgctccacgccgccaggccggaagtgcagctggttgaatctggcggaggactggttcagcctggcggatctctgagactgtcttgtgccgccagcggcttcagcttcagcgacttttggatgagctgggtccgacaggcccctggcaaaggacttgaatgggtcgccacaatcagccaggccggcagcgagaaggactacgtggactctgtgaagggcagattcaccatcagccgggacaacgccaagaagtccctgtacctccagatgaacagcctgagagccgaggacaccgccgtgtactattgtgcctctggcgtgtacagcttcgactacagaggccagggcaccctggtcacagtctcttctggtaccggcggaggcggatctggcggcggaggtagcggtggcggaggatctgaattcgacatccagatgacccagagccctgccagcctgtctgcctctgtgggcgagacagtgaccatcacctgtcgggtgtccggcaacatccacaactacctggcctggtatcagcagaagcagggcaagagcccccaactgctggtgtacaacgccaagaccctggccgatggcgtgcccagcagattttctggctctggcagcggcacccagtacagcctgaagatcaacagcctccagcccgaggacttcggcagctactactgccagcacttctggtccaacccctacaccttcggcggaggcaccaagctggaaatcaagctcgaggacctgaagaacgtgttcccacctgaggtggccgtgttcgagcctagcgaggccgagatcagccacacccagaaagccaccctcgtgtgcctggctaccggcttctaccccgaccatgtggaactgtcttggtgggtcaacggcaaagaggtgcacagcggcgtgtgtaccgacccccagccactgaaagaacagcccgccctgaacgacagccggtactgcctgagcagcagactgagagtgtccgccaccttctggcagaacccccggaaccacttcagatgccaggtgcagttctacggcctgagcgagaacgacgagtggacccaggacagagccaagcccgtgacccagatcgtgtctgccgaagcctggggcagagccgatgatgtgattaagatccactggcaggaaaagaagtccaacaccatcctgggcagccaggaaggcaacaccatgaagaccaacgacacctacatgaagttcagctggctgaccgtgcccgagaagtccctggacaaagaacacagatgcatcgtgcggcacgaaaacaacaagaacggcgtggaccaggaaatcatcttcccacccatcaagaccgatgtgattacaatggaccccaaggacaactgctccaaggacgccaacgataccctgctgctccagctgaccaacaccagcgcctactacatgtacttgttgctgctgctgaagtccgtggtgtacttcgccatcatcacatgctgcctgctgatggctatggtcaagcggaaggacagccggggaagggccaagcgatctggatctggagcaacaaacttctcactactcaaacaagcaggtgacgtggaggagaatcccgggcctactagtatggactggatttggcgcatccttttccttgtcggcgctgctaccggcgcgcattccgggccccagctccagctgcaagagtctggacctggcctggtcaagcctagcgagacactgagcctgacctgtaccgtgtccggcgatagcatcagcagcggcgattactactggggctggatcagacagcctcctggcaaaggactggaatggatcggccacatctactacagcggcgtgacctactacaaccccagcctgaagtccagagtgaccatcagcgtggacaccagccggaaccagttctccctgaagctgtctagcgtgacagccgccgataccgccgtgtactactgcaccagagaggacagcagcaactggcggagtagaggccagggaacactggtcacagttagctctggatccggcggaggcggaagtggaggcggaggatctggcggcggaggctctttcgaacaggtgcaactccagcagtctggcgcttccgtgaaggtgtcctgcaaggccagcgaactcgtgcggcctggcacaggctacgccttcaccaattacctgatcgagtgggtcaagcagaggcccggacagggcctggaatggatcggagtgattaacccaggcagcggcggcaccaactacaacgagaagttcaagggcaaggccaccctgaccgccgacaagagcagcagcacagcctacatgcaactgagcagcctgaccagcgacgacagcgccgtgtacttctgcgcccggtacagaagctacgactggtacttcgacgtgtggggagccggcaccaccgtgacagtgtcatctacgcgtatccagaaccctgatcctgccgtgtaccagctgcgggatagcaagagcagcgacaagagcgtgtgtctgttcaccgacttcgacagccagaccaacgtgtcccagagcaaggactccgacgtgtacatcaccgataagtgcgtgctggacatgcggagcatggacttcaagagcaactccgccgtggcctggtccaacaagtccgatttcgcctgcgccaacgccttcaacaacagcattatccccgaggacacattcttcccaagccccgagagcagcgactccaccgaccacgtgaagcccaaagagacagagaacaccaagcagcccagcaagagctgccacaagcccaaggccatcgtgcacaccgagaaagtgaacatgatgagcctgaccgtgctgggcctgcggatgctgttcgccaaaaccgtggccgtgaacttcctgctgaccgccaagctgttcttcctcctcaccgcc

SEQ ID NO: 6738 - DNA, 2982 bp, synthetic construct
  source 1..2982: mol_type = other DNA
atggccttaccagtgaccgccttgctcctgccgctggccttgctgctccacgccgccaggccggaagtgcagctggttgaatctggcggaggactggttcagcctggcggatctctgagactgtcttgtgccgccagcggcttcagcttcagcgacttttggatgagctgggtccgacaggcccctggcaaaggacttgaatgggtcgccacaatcagccaggccggcagcgagaaggactacgtggactctgtgaagggcagattcaccatcagccgggacaacgccaagaagtccctgtacctccagatgaacagcctgagagccgaggacaccgccgtgtactattgtgcctctggcgtgtacagcttcgactacagaggccagggcaccctggtcacagtctcttctggtaccggcggaggcggatctggcggcggaggtagcggtggcggaggatctgaattcgacatccagatgacccagagcttcagcagcctgagcgccagcgtgggcgacagagtgaccatcacctgtagagccagccaggacatcagcaactacctgaactggtatcagcagaagcccggcaaggcccccaagctgctgatctactacaccagcagactgcacagcggcgtgcccagcagattttctggcagcggctccggcaccgactacaccctgacaatcagctccctgcagcccgaggacttcgctacctacttctgtcagcaaggcaacaccctgccctggacctttggcggaggcaccaagctggaaatcaagagactcgaggacctgaagaacgtgttcccacctgaggtggccgtgttcgagcctagcgaggccgagatcagccacacccagaaagccaccctcgtgtgcctggctaccggcttctaccccgaccatgtggaactgtcttggtgggtcaacggcaaagaggtgcacagcggcgtgtgtaccgacccccagccactgaaagaacagcccgccctgaacgacagccggtactgcctgagcagcagactgagagtgtccgccaccttctggcagaacccccggaaccacttcagatgccaggtgcagttctacggcctgagcgagaacgacgagtggacccaggacagagccaagcccgtgacccagatcgtgtctgccgaagcctggggcagagccgatgatgtgattaagatccactggcaggaaaagaagtccaacaccatcctgggcagccaggaaggcaacaccatgaagaccaacgacacctacatgaagttcagctggctgaccgtgcccgagaagtccctggacaaagaacacagatgcatcgtgcggcacgaaaacaacaagaacggcgtggaccaggaaatcatcttcccacccatcaagaccgatgtgattacaatggaccccaaggacaactgctccaaggacgccaacgataccctgctgctccagctgaccaacaccagcgcctactacatgtacttgttgctgctgctgaagtccgtggtgtacttcgccatcatcacatgctgcctgctgatggctatggtcaagcggaaggacagccggggaagggccaagcgatctggatctggagcaacaaacttctcactactcaaacaagcaggtgacgtggaggagaatcccgggcctactagtatggactggatttggcgcatccttttccttgtcggcgctgctaccggcgcgcattccgggccccagctccagctgcaagagtctggacctggcctggtcaagcctagcgagacactgagcctgacctgtaccgtgtccggcgatagcatcagcagcggcgattactactggggctggatcagacagcctcctggcaaaggactggaatggatcggccacatctactacagcggcgtgacctactacaaccccagcctgaagtccagagtgaccatcagcgtggacaccagccggaaccagttctccctgaagctgtctagcgtgacagccgccgataccgccgtgtactactgcaccagagaggacagcagcaactggcggagtagaggccagggaacactggtcacagttagctctggatccggcggaggcggaagtggaggcggaggatctggcggcggaggctctttcgaagaagtgcaactggtgcagtccggcggagggctggtgcagagcggaggatctctgagactgagctgcagagccagcggctacaccttcacccggtactggatgctgtgggtgcgccagaggccaggcaagggactggaatgggtggccgagatcaacccccggaacgaccggaccaactacaacgagaagttcaagacccggttcaccatcagcgtggacagaagcaagaacaccctgtacctgcagatggacagcctgcgggccgaggataccgccgtgtacttttgtgctctgggaggcggctacgctatggactactggggccagggaacccttgtgaccgtgtcctctacgcgtatccagaaccctgatcctgccgtgtaccagctgcgggatagcaagagcagcgacaagagcgtgtgtctgttcaccgacttcgacagccagaccaacgtgtcccagagcaaggactccgacgtgtacatcaccgataagtgcgtgctggacatgcggagcatggacttcaagagcaactccgccgtggcctggtccaacaagtccgatttcgcctgcgccaacgccttcaacaacagcattatccccgaggacacattcttcccaagccccgagagcagcgactccaccgaccacgtgaagcccaaagagacagagaacaccaagcagcccagcaagagctgccacaagcccaaggccatcgtgcacaccgagaaagtgaacatgatgagcctgaccgtgctgggcctgcggatgctgttcgccaaaaccgtggccgtgaacttcctgctgaccgccaagctgttcttcctcctcaccgcc

SEQ ID NO: 6739 - DNA, 2985 bp, synthetic construct
  source 1..2985: mol_type = other DNA
atggccttaccagtgaccgccttgctcctgccgctggccttgctgctccacgccgccaggccggaagtgcagctggttgaatctggcggaggactggttcagcctggcggatctctgagactgtcttgtgccgccagcggcttcagcttcagcgacttttggatgagctgggtccgacaggcccctggcaaaggacttgaatgggtcgccacaatcagccaggccggcagcgagaaggactacgtggactctgtgaagggcagattcaccatcagccgggacaacgccaagaagtccctgtacctccagatgaacagcctgagagccgaggacaccgccgtgtactattgtgcctctggcgtgtacagcttcgactacagaggccagggcaccctggtcacagtctcttctggtaccggcggaggcggatctggcggcggaggtagcggtggcggaggatctgaattcgacatccagatgacacagtctccggcgtcactgtccgcctccgtgggggagactgtgactattatttgtagggcatcagttaacatctactcttatttggcctggtaccagcagaagcaaggcaagagtcctcagctgctggtgtataatgcgaagatcctggcagagggcgtgccgagccggttctccggcagcggctcaggtacccaattttccctcaagatcaattcactgcagccagaggactttggcagttactattgtcaacaccactacggcacattcactttcgggtccggtacaaaattggagattaagcgactcgaggacctgaagaacgtgttcccacctgaggtggccgtgttcgagcctagcgaggccgagatcagccacacccagaaagccaccctcgtgtgcctggctaccggcttctaccccgaccatgtggaactgtcttggtgggtcaacggcaaagaggtgcacagcggcgtgtgtaccgacccccagccactgaaagaacagcccgccctgaacgacagccggtactgcctgagcagcagactgagagtgtccgccaccttctggcagaacccccggaaccacttcagatgccaggtgcagttctacggcctgagcgagaacgacgagtggacccaggacagagccaagcccgtgacccagatcgtgtctgccgaagcctggggcagagccgatgatgtgattaagatccactggcaggaaaagaagtccaacaccatcctgggcagccaggaaggcaacaccatgaagaccaacgacacctacatgaagttcagctggctgaccgtgcccgagaagtccctggacaaagaacacagatgcatcgtgcggcacgaaaacaacaagaacggcgtggaccaggaaatcatcttcccacccatcaagaccgatgtgattacaatggaccccaaggacaactgctccaaggacgccaacgataccctgctgctccagctgaccaacaccagcgcctactacatgtacttgttgctgctgctgaagtccgtggtgtacttcgccatcatcacatgctgcctgctgatggctatggtcaagcggaaggacagccggggaagggccaagcgatctggatctggagcaacaaacttctcactactcaaacaagcaggtgacgtggaggagaatcccgggcctactagtatggactggatttggcgcatccttttccttgtcggcgctgctaccggcgcgcattccgggccccagctccagctgcaagagtctggacctggcctggtcaagcctagcgagacactgagcctgacctgtaccgtgtccggcgatagcatcagcagcggcgattactactggggctggatcagacagcctcctggcaaaggactggaatggatcggccacatctactacagcggcgtgacctactacaaccccagcctgaagtccagagtgaccatcagcgtggacaccagccggaaccagttctccctgaagctgtctagcgtgacagccgccgataccgccgtgtactactgcaccagagaggacagcagcaactggcggagtagaggccagggaacactggtcacagttagctctggatccggcggaggcggaagtggaggcggaggatctggcggcggaggctctttcgaacaggtacagttgaaagaaagcgggcctggactggtagcgccttcccaatctctctccatcacgtgcaccatctctggcttctccctgacttcctatggagttcactgggtgaggcagccccccggcaagggactggaatggctggtcgtcatctggtccgacgggtccacaacctacaactccgctctgaaaagtcggctctctatttctaaagataatagcaagagccaggtgtttctgaaaatgaactctctgcagaccgatgatacggccatttactactgcgcttcacactatggctcaaccttggcattcgcttcctggggccacggaacactggtgaccgtttccgcagccacgcgtatccagaaccctgatcctgccgtgtaccagctgcgggatagcaagagcagcgacaagagcgtgtgtctgttcaccgacttcgacagccagaccaacgtgtcccagagcaaggactccgacgtgtacatcaccgataagtgcgtgctggacatgcggagcatggacttcaagagcaactccgccgtggcctggtccaacaagtccgatttcgcctgcgccaacgccttcaacaacagcattatccccgaggacacattcttcccaagccccgagagcagcgactccaccgaccacgtgaagcccaaagagacagagaacaccaagcagcccagcaagagctgccacaagcccaaggccatcgtgcacaccgagaaagtgaacatgatgagcctgaccgtgctgggcctgcggatgctgttcgccaaaaccgtggccgtgaacttcctgctgaccgccaagctgttcttcctcctcaccgcc

SEQ ID NO: 6740 - DNA, 3009 bp, synthetic construct
  source 1..3009: mol_type = other DNA
atggccttaccagtgaccgccttgctcctgccgctggccttgctgctccacgccgccaggccggaagtgcagctggttgaatctggcggaggactggttcagcctggcggatctctgagactgtcttgtgccgccagcggcttcagcttcagcgacttttggatgagctgggtccgacaggcccctggcaaaggacttgaatgggtcgccacaatcagccaggccggcagcgagaaggactacgtggactctgtgaagggcagattcaccatcagccgggacaacgccaagaagtccctgtacctccagatgaacagcctgagagccgaggacaccgccgtgtactattgtgcctctggcgtgtacagcttcgactacagaggccagggcaccctggtcacagtctcttctggtaccggcggaggcggatctggcggcggaggtagcggtggcggaggatctgaattcgacattgtgatgacccagtctcacaaattcatgtccacatcagtaggagacagggtcagcgtcacctgcaaggccagtcagaatgtgggtaataatgtagcctggtatcaacagaaaccagggcaatctcctaaagtactgatttactcggcatcctaccggtacagtggagtccctgatcgcttcacaggcagtggatctgggacagatttcactctcaccatcagtaatgtgcagtctgaagacttggcagagtatttctgtcagcaatataacacctatccattcacgttcggctcggggacaaagttggaaataaaactcgaggacctgaagaacgtgttcccacctgaggtggccgtgttcgagcctagcgaggccgagatcagccacacccagaaagccaccctcgtgtgcctggctaccggcttctaccccgaccatgtggaactgtcttggtgggtcaacggcaaagaggtgcacagcggcgtgtgtaccgacccccagccactgaaagaacagcccgccctgaacgacagccggtactgcctgagcagcagactgagagtgtccgccaccttctggcagaacccccggaaccacttcagatgccaggtgcagttctacggcctgagcgagaacgacgagtggacccaggacagagccaagcccgtgacccagatcgtgtctgccgaagcctggggcagagccgatgatgtgattaagatccactggcaggaaaagaagtccaacaccatcctgggcagccaggaaggcaacaccatgaagaccaacgacacctacatgaagttcagctggctgaccgtgcccgagaagtccctggacaaagaacacagatgcatcgtgcggcacgaaaacaacaagaacggcgtggaccaggaaatcatcttcccacccatcaagaccgatgtgattacaatggaccccaaggacaactgctccaaggacgccaacgataccctgctgctccagctgaccaacaccagcgcctactacatgtacttgttgctgctgctgaagtccgtggtgtacttcgccatcatcacatgctgcctgctgatggctatggtcaagcggaaggacagccggggaagggccaagcgatctggatctggagcaacaaacttctcactactcaaacaagcaggtgacgtggaggagaatcccgggcctactagtatggactggatttggcgcatccttttccttgtcggcgctgctaccggcgcgcattccgggccccagctccagctgcaagagtctggacctggcctggtcaagcctagcgagacactgagcctgacctgtaccgtgtccggcgatagcatcagcagcggcgattactactggggctggatcagacagcctcctggcaaaggactggaatggatcggccacatctactacagcggcgtgacctactacaaccccagcctgaagtccagagtgaccatcagcgtggacaccagccggaaccagttctccctgaagctgtctagcgtgacagccgccgataccgccgtgtactactgcaccagagaggacagcagcaactggcggagtagaggccagggaacactggtcacagttagctctggatccggcggaggcggaagtggaggcggaggatctggcggcggaggctctttcgaagaggtacagctggaggaaagcggtggaggactggtgcaacctggagggtctatgaagctctcttgcgtagcttctgggttcacgttctccaattactggatgaactgggtgcggcagtcccccgagaaaggcctggaatgggtagcagaaattcggttcaagtcccataactatgctacacactttgccgagtctgtcaaaggccggttcactattagtcgagacgacagcaagtcttcagtctacctgcagatgaataacttgcgggcagaggacacaggtatctactactgcaccaggagaatcggcaactccgactatgactggtggtactttgacgtctggggagcaggcaccagcgtgacggtgagttcagcctcaacgcgtatccagaaccctgatcctgccgtgtaccagctgcgggatagcaagagcagcgacaagagcgtgtgtctgttcaccgacttcgacagccagaccaacgtgtcccagagcaaggactccgacgtgtacatcaccgataagtgcgtgctggacatgcggagcatggacttcaagagcaactccgccgtggcctggtccaacaagtccgatttcgcctgcgccaacgccttcaacaacagcattatccccgaggacacattcttcccaagccccgagagcagcgactccaccgaccacgtgaagcccaaagagacagagaacaccaagcagcccagcaagagctgccacaagcccaaggccatcgtgcacaccgagaaagtgaacatgatgagcctgaccgtgctgggcctgcggatgctgttcgccaaaaccgtggccgtgaacttcctgctgaccgccaagctgttcttcctcctcaccgcc

SEQ ID NO: 6741 - DNA, 2988 bp, synthetic construct
  source 1..2988: mol_type = other DNA
atggccttaccagtgaccgccttgctcctgccgctggccttgctgctccacgccgccaggccggaagtgcagctggttgaatctggcggaggactggttcagcctggcggatctctgagactgtcttgtgccgccagcggcttcagcttcagcgacttttggatgagctgggtccgacaggcccctggcaaaggacttgaatgggtcgccacaatcagccaggccggcagcgagaaggactacgtggactctgtgaagggcagattcaccatcagccgggacaacgccaagaagtccctgtacctccagatgaacagcctgagagccgaggacaccgccgtgtactattgtgcctctggcgtgtacagcttcgactacagaggccagggcaccctggtcacagtctcttctggtaccggcggaggcggatctggcggcggaggtagcggtggcggaggatctgaattcgaccagatcgtgctgacccagtcccccgctattatgtccgcatcaccgggcgaaaaagtgacgatctcctgtagcgcttcatctagcgtctcctacatgtattggtatcaacagaaacctgggtctagcccaaagccgtggatctacagaaccagtaaccttgccagtggggtgccagcccgcttcagcggtagtggcagtggaacttcctatagcctcacaataagcaacatggaggctgaagatgccgctgcctattactgccagcagtaccacagttacccaaccacgttcggcgggggaactaagctcgaagtaaaactcgaggacctgaagaacgtgttcccacctgaggtggccgtgttcgagcctagcgaggccgagatcagccacacccagaaagccaccctcgtgtgcctggctaccggcttctaccccgaccatgtggaactgtcttggtgggtcaacggcaaagaggtgcacagcggcgtgtgtaccgacccccagccactgaaagaacagcccgccctgaacgacagccggtactgcctgagcagcagactgagagtgtccgccaccttctggcagaacccccggaaccacttcagatgccaggtgcagttctacggcctgagcgagaacgacgagtggacccaggacagagccaagcccgtgacccagatcgtgtctgccgaagcctggggcagagccgatgatgtgattaagatccactggcaggaaaagaagtccaacaccatcctgggcagccaggaaggcaacaccatgaagaccaacgacacctacatgaagttcagctggctgaccgtgcccgagaagtccctggacaaagaacacagatgcatcgtgcggcacgaaaacaacaagaacggcgtggaccaggaaatcatcttcccacccatcaagaccgatgtgattacaatggaccccaaggacaactgctccaaggacgccaacgataccctgctgctccagctgaccaacaccagcgcctactacatgtacttgttgctgctgctgaagtccgtggtgtacttcgccatcatcacatgctgcctgctgatggctatggtcaagcggaaggacagccggggaagggccaagcgatctggatctggagcaacaaacttctcactactcaaacaagcaggtgacgtggaggagaatcccgggcctactagtatggactggatttggcgcatccttttccttgtcggcgctgctaccggcgcgcattccgggccccagctccagctgcaagagtctggacctggcctggtcaagcctagcgagacactgagcctgacctgtaccgtgtccggcgatagcatcagcagcggcgattactactggggctggatcagacagcctcctggcaaaggactggaatggatcggccacatctactacagcggcgtgacctactacaaccccagcctgaagtccagagtgaccatcagcgtggacaccagccggaaccagttctccctgaagctgtctagcgtgacagccgccgataccgccgtgtactactgcaccagagaggacagcagcaactggcggagtagaggccagggaacactggtcacagttagctctggatccggcggaggcggaagtggaggcggaggatctggcggcggaggctctttcgaagaggtgcagctggtggaatctgggggcggcctggtccaacctaagggatcactcaagctctcttgtgcggccagcggattctctttcaatacctatgctatgaattgggtgagacaggcgcccggaaagggcctcgaatggatagcccatatccggtcaaaatcaaacaatttcgcaacctactatgcggactccgtgaaggaccgattttccatctcccgagatgcctccgagaatattctgttcctgcagatgaataacctcaagacagaggacaccgccatgtactactgtgtgcgccagggcggtgactttcccatggattactgggggcaggggaccagcgtgaccgtgagctctacgcgtatccagaaccctgatcctgccgtgtaccagctgcgggatagcaagagcagcgacaagagcgtgtgtctgttcaccgacttcgacagccagaccaacgtgtcccagagcaaggactccgacgtgtacatcaccgataagtgcgtgctggacatgcggagcatggacttcaagagcaactccgccgtggcctggtccaacaagtccgatttcgcctgcgccaacgccttcaacaacagcattatccccgaggacacattcttcccaagccccgagagcagcgactccaccgaccacgtgaagcccaaagagacagagaacaccaagcagcccagcaagagctgccacaagcccaaggccatcgtgcacaccgagaaagtgaacatgatgagcctgaccgtgctgggcctgcggatgctgttcgccaaaaccgtggccgtgaacttcctgctgaccgccaagctgttcttcctcctcaccgcc

SEQ ID NO: 6742 - DNA, 2985 bp, synthetic construct
  source 1..2985: mol_type = other DNA
atggccttaccagtgaccgccttgctcctgccgctggccttgctgctccacgccgccaggccggaagtgcagctggttgaatctggcggaggactggttcagcctggcggatctctgagactgtcttgtgccgccagcggcttcagcttcagcgacttttggatgagctgggtccgacaggcccctggcaaaggacttgaatgggtcgccacaatcagccaggccggcagcgagaaggactacgtggactctgtgaagggcagattcaccatcagccgggacaacgccaagaagtccctgtacctccagatgaacagcctgagagccgaggacaccgccgtgtactattgtgcctctggcgtgtacagcttcgactacagaggccagggcaccctggtcacagtctcttctggtaccggcggaggcggatctggcggcggaggtagcggtggcggaggatctgaattcgacgacatccagatgacccagagcagcagcagcttcagcgtgagcctgggcgacagagtgaccatcacctgcatggccagcgaggacatctacatcagactggcctggtaccagcagaagcccggcaacgcccccagactgctgatcagcgccgccaccagcctggagaccggcgtgcccagcagattcagcggcagcggcagcggcaaggactacaccctgagcatcaccagcctgcagaccgaggacgtgggcacctactactgccagcagtactggagcagcccctggaccttcggcggcggcaccaagctggagatcaacctcgaggacctgaagaacgtgttcccacctgaggtggccgtgttcgagcctagcgaggccgagatcagccacacccagaaagccaccctcgtgtgcctggctaccggcttctaccccgaccatgtggaactgtcttggtgggtcaacggcaaagaggtgcacagcggcgtgtgtaccgacccccagccactgaaagaacagcccgccctgaacgacagccggtactgcctgagcagcagactgagagtgtccgccaccttctggcagaacccccggaaccacttcagatgccaggtgcagttctacggcctgagcgagaacgacgagtggacccaggacagagccaagcccgtgacccagatcgtgtctgccgaagcctggggcagagccgatgatgtgattaagatccactggcaggaaaagaagtccaacaccatcctgggcagccaggaaggcaacaccatgaagaccaacgacacctacatgaagttcagctggctgaccgtgcccgagaagtccctggacaaagaacacagatgcatcgtgcggcacgaaaacaacaagaacggcgtggaccaggaaatcatcttcccacccatcaagaccgatgtgattacaatggaccccaaggacaactgctccaaggacgccaacgataccctgctgctccagctgaccaacaccagcgcctactacatgtacttgttgctgctgctgaagtccgtggtgtacttcgccatcatcacatgctgcctgctgatggctatggtcaagcggaaggacagccggggaagggccaagcgatctggatctggagcaacaaacttctcactactcaaacaagcaggtgacgtggaggagaatcccgggcctactagtatggactggatttggcgcatccttttccttgtcggcgctgctaccggcgcgcattccgggccccagctccagctgcaagagtctggacctggcctggtcaagcctagcgagacactgagcctgacctgtaccgtgtccggcgatagcatcagcagcggcgattactactggggctggatcagacagcctcctggcaaaggactggaatggatcggccacatctactacagcggcgtgacctactacaaccccagcctgaagtccagagtgaccatcagcgtggacaccagccggaaccagttctccctgaagctgtctagcgtgacagccgccgataccgccgtgtactactgcaccagagaggacagcagcaactggcggagtagaggccagggaacactggtcacagttagctctggatccggcggaggcggaagtggaggcggaggatctggcggcggaggctctttcgaagacgtgcagctgcaggagagcggccccggcctggtgaagcccagccagagcctgagcctgacctgcaccgtgaccggctacagcatcaccagcgactacacctggaactggatcagacagttccccggcaacaagctggagtggatgggctacatcacctacagcggcagcaccagctacaaccccagcctgaagagcagaaacagcatcaccagagacaccagcaagaaccagttcttcctgcagctgaacagcgtgaccaccgaggacaccgccacctactactgcgccagactgggcagaagatacacaatggactactggggccagggcaccagcgtgaccgtgagcagcacgcgtatccagaaccctgatcctgccgtgtaccagctgcgggatagcaagagcagcgacaagagcgtgtgtctgttcaccgacttcgacagccagaccaacgtgtcccagagcaaggactccgacgtgtacatcaccgataagtgcgtgctggacatgcggagcatggacttcaagagcaactccgccgtggcctggtccaacaagtccgatttcgcctgcgccaacgccttcaacaacagcattatccccgaggacacattcttcccaagccccgagagcagcgactccaccgaccacgtgaagcccaaagagacagagaacaccaagcagcccagcaagagctgccacaagcccaaggccatcgtgcacaccgagaaagtgaacatgatgagcctgaccgtgctgggcctgcggatgctgttcgccaaaaccgtggccgtgaacttcctgctgaccgccaagctgttcttcctcctcaccgcc

SEQ ID NO: 6743 - DNA, 2994 bp, synthetic construct
  source 1..2994: mol_type = other DNA
atggccttaccagtgaccgccttgctcctgccgctggccttgctgctccacgccgccaggccggaagtgcagctggttgaatctggcggaggactggttcagcctggcggatctctgagactgtcttgtgccgccagcggcttcagcttcagcgacttttggatgagctgggtccgacaggcccctggcaaaggacttgaatgggtcgccacaatcagccaggccggcagcgagaaggactacgtggactctgtgaagggcagattcaccatcagccgggacaacgccaagaagtccctgtacctccagatgaacagcctgagagccgaggacaccgccgtgtactattgtgcctctggcgtgtacagcttcgactacagaggccagggcaccctggtcacagtctcttctggtaccggcggaggcggatctggcggcggaggtagcggtggcggaggatctgaattcgacgacatccagatgacccagagccccagcagcctgtctgccagcgtgggcgacagagtgaccatcacctgtagagccagccagagcatcagcagctacctgaactggtatcagcagaagcccggcaaggcccccaaactgctgatctacgacgccagcaacctggaaaccggcgtgcccagcagattttccggcagcggctctggcaccgacttcaccttcaccatcagctccctccagcccgaggacattgccacctactactgccagcagtacgacaacctgcccctgacctttggcggaggcaccaaggtggacatcaagagactcgaggacctgaagaacgtgttcccacctgaggtggccgtgttcgagcctagcgaggccgagatcagccacacccagaaagccaccctcgtgtgcctggctaccggcttctaccccgaccatgtggaactgtcttggtgggtcaacggcaaagaggtgcacagcggcgtgtgtaccgacccccagccactgaaagaacagcccgccctgaacgacagccggtactgcctgagcagcagactgagagtgtccgccaccttctggcagaacccccggaaccacttcagatgccaggtgcagttctacggcctgagcgagaacgacgagtggacccaggacagagccaagcccgtgacccagatcgtgtctgccgaagcctggggcagagccgatgatgtgattaagatccactggcaggaaaagaagtccaacaccatcctgggcagccaggaaggcaacaccatgaagaccaacgacacctacatgaagttcagctggctgaccgtgcccgagaagtccctggacaaagaacacagatgcatcgtgcggcacgaaaacaacaagaacggcgtggaccaggaaatcatcttcccacccatcaagaccgatgtgattacaatggaccccaaggacaactgctccaaggacgccaacgataccctgctgctccagctgaccaacaccagcgcctactacatgtacttgttgctgctgctgaagtccgtggtgtacttcgccatcatcacatgctgcctgctgatggctatggtcaagcggaaggacagccggggaagggccaagcgatctggatctggagcaacaaacttctcactactcaaacaagcaggtgacgtggaggagaatcccgggcctactagtatggactggatttggcgcatccttttccttgtcggcgctgctaccggcgcgcattccgggccccagctccagctgcaagagtctggacctggcctggtcaagcctagcgagacactgagcctgacctgtaccgtgtccggcgatagcatcagcagcggcgattactactggggctggatcagacagcctcctggcaaaggactggaatggatcggccacatctactacagcggcgtgacctactacaaccccagcctgaagtccagagtgaccatcagcgtggacaccagccggaaccagttctccctgaagctgtctagcgtgacagccgccgataccgccgtgtactactgcaccagagaggacagcagcaactggcggagtagaggccagggaacactggtcacagttagctctggatccggcggaggcggaagtggaggcggaggatctggcggcggaggctctttcgaacaggtgcaactggtggaatctggcggcggagtggtgcagcctggcagaagcctgagactgagctgtgccgccagcggcttcacctttagcagctacgccatgcactgggtgcgccaggcccctggaaaaggcctggaatgggtggccgtgatctcctacgacggctccaacaagtattacgccgacagcgtgaagggccggttcaccatctccagagacaacagcaagaacaccctgtacctccagatgaacagcctgcgggccgaggacaccgccgtgtactattgtgccagggctcacaacagcagctcttggagcttcgactactggggccagggcaccctcgtgaccgtgtcatctacgcgtatccagaaccctgatcctgccgtgtaccagctgcgggatagcaagagcagcgacaagagcgtgtgtctgttcaccgacttcgacagccagaccaacgtgtcccagagcaaggactccgacgtgtacatcaccgataagtgcgtgctggacatgcggagcatggacttcaagagcaactccgccgtggcctggtccaacaagtccgatttcgcctgcgccaacgccttcaacaacagcattatccccgaggacacattcttcccaagccccgagagcagcgactccaccgaccacgtgaagcccaaagagacagagaacaccaagcagcccagcaagagctgccacaagcccaaggccatcgtgcacaccgagaaagtgaacatgatgagcctgaccgtgctgggcctgcggatgctgttcgccaaaaccgtggccgtgaacttcctgctgaccgccaagctgttcttcctcctcaccgcc

SEQ ID NO: 6744 - DNA, 3021 bp, synthetic construct
  source 1..3021: mol_type = other DNA
atggccttaccagtgaccgccttgctcctgccgctggccttgctgctccacgccgccaggccggaagtgcagctggttgaatctggcggaggactggttcagcctggcggatctctgagactgtcttgtgccgccagcggcttcagcttcagcgacttttggatgagctgggtccgacaggcccctggcaaaggacttgaatgggtcgccacaatcagccaggccggcagcgagaaggactacgtggactctgtgaagggcagattcaccatcagccgggacaacgccaagaagtccctgtacctccagatgaacagcctgagagccgaggacaccgccgtgtactattgtgcctctggcgtgtacagcttcgactacagaggccagggcaccctggtcacagtctcttctggtaccggcggaggcggatctggcggcggaggtagcggtggcggaggatctgaattcgacgacgtcgtgatgacccagagccctctgagcctgcctgtgtccctgggcgatcaggccagcatctcctgcagatccagccagagactggtgcacagcaacggcaacacctacctgcactggtatctgcagaagcccggccagagccccaagctgctgatctaccgggtgtccaacagattccccggcgtgcccgatagattcagcggctctggcagcggcaccgacttcaccctgaagatcagccgggtggaagccgaggacctgggcatctatttctgcagccagagcacccacgtgccctacacctttggcggaggcaccaagctggaaatcaagcggctcgaggacctgaagaacgtgttcccacctgaggtggccgtgttcgagcctagcgaggccgagatcagccacacccagaaagccaccctcgtgtgcctggctaccggcttctaccccgaccatgtggaactgtcttggtgggtcaacggcaaagaggtgcacagcggcgtgtgtaccgacccccagccactgaaagaacagcccgccctgaacgacagccggtactgcctgagcagcagactgagagtgtccgccaccttctggcagaacccccggaaccacttcagatgccaggtgcagttctacggcctgagcgagaacgacgagtggacccaggacagagccaagcccgtgacccagatcgtgtctgccgaagcctggggcagagccgatgatgtgattaagatccactggcaggaaaagaagtccaacaccatcctgggcagccaggaaggcaacaccatgaagaccaacgacacctacatgaagttcagctggctgaccgtgcccgagaagtccctggacaaagaacacagatgcatcgtgcggcacgaaaacaacaagaacggcgtggaccaggaaatcatcttcccacccatcaagaccgatgtgattacaatggaccccaaggacaactgctccaaggacgccaacgataccctgctgctccagctgaccaacaccagcgcctactacatgtacttgttgctgctgctgaagtccgtggtgtacttcgccatcatcacatgctgcctgctgatggctatggtcaagcggaaggacagccggggaagggccaagcgatctggatctggagcaacaaacttctcactactcaaacaagcaggtgacgtggaggagaatcccgggcctactagtatggactggatttggcgcatccttttccttgtcggcgctgctaccggcgcgcattccgggccccagctccagctgcaagagtctggacctggcctggtcaagcctagcgagacactgagcctgacctgtaccgtgtccggcgatagcatcagcagcggcgattactactggggctggatcagacagcctcctggcaaaggactggaatggatcggccacatctactacagcggcgtgacctactacaaccccagcctgaagtccagagtgaccatcagcgtggacaccagccggaaccagttctccctgaagctgtctagcgtgacagccgccgataccgccgtgtactactgcaccagagaggacagcagcaactggcggagtagaggccagggaacactggtcacagttagctctggatccggcggaggcggaagtggaggcggaggatctggcggcggaggctctttcgaagaagtgcggctgcagcagtctggccccgacctgattaagcctggggccagcgtgaagatgagctgcaaggccagcggctacaccttcaccggctacgtgatgcactgggtcaagcagaggccaggccagggcctggaatggatcggcttcatcaacccctacaacgacgacatccagagcaacgagcggttccggggcaaggccaccctgaccagcgataagagcagcaccaccgcctacatggaactgagcagcctgacctccgaggacagcgccgtgtactactgtgctaggggagccggctacaacttcgacggggcctacagattcttcgacttttggggccagggcaccacactgaccgtgtcctctacgcgtatccagaaccctgatcctgccgtgtaccagctgcgggatagcaagagcagcgacaagagcgtgtgtctgttcaccgacttcgacagccagaccaacgtgtcccagagcaaggactccgacgtgtacatcaccgataagtgcgtgctggacatgcggagcatggacttcaagagcaactccgccgtggcctggtccaacaagtccgatttcgcctgcgccaacgccttcaacaacagcattatccccgaggacacattcttcccaagccccgagagcagcgactccaccgaccacgtgaagcccaaagagacagagaacaccaagcagcccagcaagagctgccacaagcccaaggccatcgtgcacaccgagaaagtgaacatgatgagcctgaccgtgctgggcctgcggatgctgttcgccaaaaccgtggccgtgaacttcctgctgaccgccaagctgttcttcctcctcaccgcc

SEQ ID NO: 6745 - DNA, 2994 bp, synthetic construct
  source 1..2994: mol_type = other DNA
atggccttaccagtgaccgccttgctcctgccgctggccttgctgctccacgccgccaggccggaagtgcagctggttgaatctggcggaggactggttcagcctggcggatctctgagactgtcttgtgccgccagcggcttcagcttcagcgacttttggatgagctgggtccgacaggcccctggcaaaggacttgaatgggtcgccacaatcagccaggccggcagcgagaaggactacgtggactctgtgaagggcagattcaccatcagccgggacaacgccaagaagtccctgtacctccagatgaacagcctgagagccgaggacaccgccgtgtactattgtgcctctggcgtgtacagcttcgactacagaggccagggcaccctggtcacagtctcttctggtaccggcggaggcggatctggcggcggaggtagcggtggcggaggatctgaattcgacagctacgagctgacccagcctcctagcgtgtccgtgtctcctggacagaccgccaccatctcttgcagcggcgatcaactgggcgggaagtacggccactggtatcagaagaagcccggccagagccccgtgctggtgctgtaccaggacagaaaacggcctgccggcatccccgagagattcagcggaagcagcagcggcaacaccatcaccctgaccatcagcggcacccaggccgtggatgaggccgactactactgccaggcttgggacaccaatctgggcggcgtgttcggcggaggcaccaaagtgacagtgctgggacagctcgaggacctgaagaacgtgttcccacctgaggtggccgtgttcgagcctagcgaggccgagatcagccacacccagaaagccaccctcgtgtgcctggctaccggcttctaccccgaccatgtggaactgtcttggtgggtcaacggcaaagaggtgcacagcggcgtgtgtaccgacccccagccactgaaagaacagcccgccctgaacgacagccggtactgcctgagcagcagactgagagtgtccgccaccttctggcagaacccccggaaccacttcagatgccaggtgcagttctacggcctgagcgagaacgacgagtggacccaggacagagccaagcccgtgacccagatcgtgtctgccgaagcctggggcagagccgatgatgtgattaagatccactggcaggaaaagaagtccaacaccatcctgggcagccaggaaggcaacaccatgaagaccaacgacacctacatgaagttcagctggctgaccgtgcccgagaagtccctggacaaagaacacagatgcatcgtgcggcacgaaaacaacaagaacggcgtggaccaggaaatcatcttcccacccatcaagaccgatgtgattacaatggaccccaaggacaactgctccaaggacgccaacgataccctgctgctccagctgaccaacaccagcgcctactacatgtacttgttgctgctgctgaagtccgtggtgtacttcgccatcatcacatgctgcctgctgatggctatggtcaagcggaaggacagccggggaagggccaagcgatctggatctggagcaacaaacttctcactactcaaacaagcaggtgacgtggaggagaatcccgggcctactagtatggactggatttggcgcatccttttccttgtcggcgctgctaccggcgcgcattccgggccccagctccagctgcaagagtctggacctggcctggtcaagcctagcgagacactgagcctgacctgtaccgtgtccggcgatagcatcagcagcggcgattactactggggctggatcagacagcctcctggcaaaggactggaatggatcggccacatctactacagcggcgtgacctactacaaccccagcctgaagtccagagtgaccatcagcgtggacaccagccggaaccagttctccctgaagctgtctagcgtgacagccgccgataccgccgtgtactactgcaccagagaggacagcagcaactggcggagtagaggccagggaacactggtcacagttagctctggatccggcggaggcggaagtggaggcggaggatctggcggcggaggctctttcgaacaggtgcaactggtggaaagcggagccgaagtgaagaaacctggggccagcgtgaaggtgtcctgcaaggccagcggctacacctttaccggctactacatgcactgggtgcgccaggctccaggccagggactggaatggatgggccggatcaaccccaatagcggcggcaccaactacgcccagaaattccagggcagagtgaccatgaccagagacaccagcatcagcaccgcctacatggaactgagccggctgagaagcgacgacaccgccgtgtactactgcgccagccctagaggcagaggcagcgccttcgatatttggggccagggcacactcgtgaccgtgtcctctacgcgtatccagaaccctgatcctgccgtgtaccagctgcgggatagcaagagcagcgacaagagcgtgtgtctgttcaccgacttcgacagccagaccaacgtgtcccagagcaaggactccgacgtgtacatcaccgataagtgcgtgctggacatgcggagcatggacttcaagagcaactccgccgtggcctggtccaacaagtccgatttcgcctgcgccaacgccttcaacaacagcattatccccgaggacacattcttcccaagccccgagagcagcgactccaccgaccacgtgaagcccaaagagacagagaacaccaagcagcccagcaagagctgccacaagcccaaggccatcgtgcacaccgagaaagtgaacatgatgagcctgaccgtgctgggcctgcggatgctgttcgccaaaaccgtggccgtgaacttcctgctgaccgccaagctgttcttcctcctcaccgcc

SEQ ID NO: 6746 - DNA, 3003 bp, synthetic construct
  source 1..3003: mol_type = other DNA
atggccttaccagtgaccgccttgctcctgccgctggccttgctgctccacgccgccaggccggaagtgcagctggttgaatctggcggaggactggttcagcctggcggatctctgagactgtcttgtgccgccagcggcttcagcttcagcgacttttggatgagctgggtccgacaggcccctggcaaaggacttgaatgggtcgccacaatcagccaggccggcagcgagaaggactacgtggactctgtgaagggcagattcaccatcagccgggacaacgccaagaagtccctgtacctccagatgaacagcctgagagccgaggacaccgccgtgtactattgtgcctctggcgtgtacagcttcgactacagaggccagggcaccctggtcacagtctcttctggtaccggcggaggcggatctggcggcggaggtagcggtggcggaggatctgaattcgacaacttcatgctgacccagccccacagcgtgtccgagagccctggcaagaccgtgaccatctcctgcaccagaagcagcggctctatcgccagcaaatacgtgcagtggtatcagcagaggcccggcagcagccctaccaccgtgatctacgaggacaaccagaggcctagcggcgtgcccgatagattcagcggcagcatcgacaccagcagcaacagcgccagcctgaccatcagcggcctgagaacagaggacgaggccgactactactgccacagctacgacagcaacaaccactccgtgttcggcggaggcaccaaagtgacagtgctgggacagctcgaggacctgaagaacgtgttcccacctgaggtggccgtgttcgagcctagcgaggccgagatcagccacacccagaaagccaccctcgtgtgcctggctaccggcttctaccccgaccatgtggaactgtcttggtgggtcaacggcaaagaggtgcacagcggcgtgtgtaccgacccccagccactgaaagaacagcccgccctgaacgacagccggtactgcctgagcagcagactgagagtgtccgccaccttctggcagaacccccggaaccacttcagatgccaggtgcagttctacggcctgagcgagaacgacgagtggacccaggacagagccaagcccgtgacccagatcgtgtctgccgaagcctggggcagagccgatgatgtgattaagatccactggcaggaaaagaagtccaacaccatcctgggcagccaggaaggcaacaccatgaagaccaacgacacctacatgaagttcagctggctgaccgtgcccgagaagtccctggacaaagaacacagatgcatcgtgcggcacgaaaacaacaagaacggcgtggaccaggaaatcatcttcccacccatcaagaccgatgtgattacaatggaccccaaggacaactgctccaaggacgccaacgataccctgctgctccagctgaccaacaccagcgcctactacatgtacttgttgctgctgctgaagtccgtggtgtacttcgccatcatcacatgctgcctgctgatggctatggtcaagcggaaggacagccggggaagggccaagcgatctggatctggagcaacaaacttctcactactcaaacaagcaggtgacgtggaggagaatcccgggcctactagtatggactggatttggcgcatccttttccttgtcggcgctgctaccggcgcgcattccgggccccagctccagctgcaagagtctggacctggcctggtcaagcctagcgagacactgagcctgacctgtaccgtgtccggcgatagcatcagcagcggcgattactactggggctggatcagacagcctcctggcaaaggactggaatggatcggccacatctactacagcggcgtgacctactacaaccccagcctgaagtccagagtgaccatcagcgtggacaccagccggaaccagttctccctgaagctgtctagcgtgacagccgccgataccgccgtgtactactgcaccagagaggacagcagcaactggcggagtagaggccagggaacactggtcacagttagctctggatccggcggaggcggaagtggaggcggaggatctggcggcggaggctctttcgaagaagtgcaactggtggaaagcgggggaggcgtggtgcagccaggcggatctctgagactgagctgtgccgccagcggcttcaccttcagcagctacgccatgagctgggtgcgccaggcccctggaaaaggcctggaatgggtgtccgccatctctggctctggcggcagcacctactacgccgatagcgtgaagggccggttcagcatcagccgggacaacagcaagaacaccctgtacctccagatgaacagcctgcgggccgaggacaccgccgtgtactactgtgccagaaccagaagctccggggccttcgacatctggggccagggaacactcgtgaccgtgtcctctacgcgtatccagaaccctgatcctgccgtgtaccagctgcgggatagcaagagcagcgacaagagcgtgtgtctgttcaccgacttcgacagccagaccaacgtgtcccagagcaaggactccgacgtgtacatcaccgataagtgcgtgctggacatgcggagcatggacttcaagagcaactccgccgtggcctggtccaacaagtccgatttcgcctgcgccaacgccttcaacaacagcattatccccgaggacacattcttcccaagccccgagagcagcgactccaccgaccacgtgaagcccaaagagacagagaacaccaagcagcccagcaagagctgccacaagcccaaggccatcgtgcacaccgagaaagtgaacatgatgagcctgaccgtgctgggcctgcggatgctgttcgccaaaaccgtggccgtgaacttcctgctgaccgccaagctgttcttcctcctcaccgcc

SEQ ID NO: 6747 - DNA, 2988 bp, synthetic construct
  source 1..2988: mol_type = other DNA
atggccttaccagtgaccgccttgctcctgccgctggccttgctgctccacgccgccaggccggaagtgcagctggttgaatctggcggaggactggttcagcctggcggatctctgagactgtcttgtgccgccagcggcttcagcttcagcgacttttggatgagctgggtccgacaggcccctggcaaaggacttgaatgggtcgccacaatcagccaggccggcagcgagaaggactacgtggactctgtgaagggcagattcaccatcagccgggacaacgccaagaagtccctgtacctccagatgaacagcctgagagccgaggacaccgccgtgtactattgtgcctctggcgtgtacagcttcgactacagaggccagggcaccctggtcacagtctcttctggtaccggcggaggcggatctggcggcggaggtagcggtggcggaggatctgaattcgacatccagatgaaccagagccccagcagcctgagcgccagcctgggcgataccatcaccatcacctgtcacgccagccagaacatcaacgtgtggctgagctggtatcagcagaagcccggcaacatccccaagctgctgatctacaaggccagcaacctgcacaccggcgtgcccagcagattttctggcagcggctctggcaccggcttcaccattaccatcagctccctccagcccgaggacattgccacctactactgccagcagggccagagctacccctggacatttggcggaggcaccaagctggaaatcaagagactcgaggacctgaagaacgtgttcccacctgaggtggccgtgttcgagcctagcgaggccgagatcagccacacccagaaagccaccctcgtgtgcctggctaccggcttctaccccgaccatgtggaactgtcttggtgggtcaacggcaaagaggtgcacagcggcgtgtgtaccgacccccagccactgaaagaacagcccgccctgaacgacagccggtactgcctgagcagcagactgagagtgtccgccaccttctggcagaacccccggaaccacttcagatgccaggtgcagttctacggcctgagcgagaacgacgagtggacccaggacagagccaagcccgtgacccagatcgtgtctgccgaagcctggggcagagccgatgatgtgattaagatccactggcaggaaaagaagtccaacaccatcctgggcagccaggaaggcaacaccatgaagaccaacgacacctacatgaagttcagctggctgaccgtgcccgagaagtccctggacaaagaacacagatgcatcgtgcggcacgaaaacaacaagaacggcgtggaccaggaaatcatcttcccacccatcaagaccgatgtgattacaatggaccccaaggacaactgctccaaggacgccaacgataccctgctgctccagctgaccaacaccagcgcctactacatgtacttgttgctgctgctgaagtccgtggtgtacttcgccatcatcacatgctgcctgctgatggctatggtcaagcggaaggacagccggggaagggccaagcgatctggatctggagcaacaaacttctcactactcaaacaagcaggtgacgtggaggagaatcccgggcctactagtatggactggatttggcgcatccttttccttgtcggcgctgctaccggcgcgcattccgggccccagctccagctgcaagagtctggacctggcctggtcaagcctagcgagacactgagcctgacctgtaccgtgtccggcgatagcatcagcagcggcgattactactggggctggatcagacagcctcctggcaaaggactggaatggatcggccacatctactacagcggcgtgacctactacaaccccagcctgaagtccagagtgaccatcagcgtggacaccagccggaaccagttctccctgaagctgtctagcgtgacagccgccgataccgccgtgtactactgcaccagagaggacagcagcaactggcggagtagaggccagggaacactggtcacagttagctctggatccggcggaggcggaagtggaggcggaggatctggcggcggaggctctttcgaagaagtgcaactccagcagagcggcccagagcttgtgaagcctggcgcttccgtgaagattagctgcaaagccagcggctacagcttcaccggctacttcatgaactgggtcaagcagagccacggcaagagcctggagtacatcggcagattcaacccctacaacggcgagacactgtacaaccagaagttcaagggcaaggccaccctgaccgtggacaagagcagcagcaccgtgcacatggaactgctgagcgtgaccagcgaggacagcgccgtgtactactgtggcagaagcggcaacgacgacgctatggactattggggccagggcaccagcgtgaccgtgtctagtgctacgcgtatccagaaccctgatcctgccgtgtaccagctgcgggatagcaagagcagcgacaagagcgtgtgtctgttcaccgacttcgacagccagaccaacgtgtcccagagcaaggactccgacgtgtacatcaccgataagtgcgtgctggacatgcggagcatggacttcaagagcaactccgccgtggcctggtccaacaagtccgatttcgcctgcgccaacgccttcaacaacagcattatccccgaggacacattcttcccaagccccgagagcagcgactccaccgaccacgtgaagcccaaagagacagagaacaccaagcagcccagcaagagctgccacaagcccaaggccatcgtgcacaccgagaaagtgaacatgatgagcctgaccgtgctgggcctgcggatgctgttcgccaaaaccgtggccgtgaacttcctgctgaccgccaagctgttcttcctcctcaccgcc

SEQ ID NO: 6748 - DNA, 2991 bp, synthetic construct
  source 1..2991: mol_type = other DNA
atggccttaccagtgaccgccttgctcctgccgctggccttgctgctccacgccgccaggccggaagtgcagctggttgaatctggcggaggactggttcagcctggcggatctctgagactgtcttgtgccgccagcggcttcagcttcagcgacttttggatgagctgggtccgacaggcccctggcaaaggacttgaatgggtcgccacaatcagccaggccggcagcgagaaggactacgtggactctgtgaagggcagattcaccatcagccgggacaacgccaagaagtccctgtacctccagatgaacagcctgagagccgaggacaccgccgtgtactattgtgcctctggcgtgtacagcttcgactacagaggccagggcaccctggtcacagtctcttctggtaccggcggaggcggatctggcggcggaggtagcggtggcggaggatctgaattcgagatcgtgctgacacagagccctgccaccctgtctctgagccctggcgaaagagccaccctgagctgtagagccagccagagcgtgcggagctacctggcctggtatcagcagaagcctggacaggcccccagactgctgatctacgacgccagcaatcgggccacaggcatccccgccagattttctggctctggcagcggcaccgacttcaccctgacaatcagcagcctggaacccgaggacttcgccgtgtactactgccagcagcggagcaactggccccctacctttggacagggcaccaaggtggaaatcaagctcgaggacctgaagaacgtgttcccacctgaggtggccgtgttcgagcctagcgaggccgagatcagccacacccagaaagccaccctcgtgtgcctggctaccggcttctaccccgaccatgtggaactgtcttggtgggtcaacggcaaagaggtgcacagcggcgtgtgtaccgacccccagccactgaaagaacagcccgccctgaacgacagccggtactgcctgagcagcagactgagagtgtccgccaccttctggcagaacccccggaaccacttcagatgccaggtgcagttctacggcctgagcgagaacgacgagtggacccaggacagagccaagcccgtgacccagatcgtgtctgccgaagcctggggcagagccgatgatgtgattaagatccactggcaggaaaagaagtccaacaccatcctgggcagccaggaaggcaacaccatgaagaccaacgacacctacatgaagttcagctggctgaccgtgcccgagaagtccctggacaaagaacacagatgcatcgtgcggcacgaaaacaacaagaacggcgtggaccaggaaatcatcttcccacccatcaagaccgatgtgattacaatggaccccaaggacaactgctccaaggacgccaacgataccctgctgctccagctgaccaacaccagcgcctactacatgtacttgttgctgctgctgaagtccgtggtgtacttcgccatcatcacatgctgcctgctgatggctatggtcaagcggaaggacagccggggaagggccaagcgatctggatctggagcaacaaacttctcactactcaaacaagcaggtgacgtggaggagaatcccgggcctactagtatggactggatttggcgcatccttttccttgtcggcgctgctaccggcgcgcattccgggccccagctccagctgcaagagtctggacctggcctggtcaagcctagcgagacactgagcctgacctgtaccgtgtccggcgatagcatcagcagcggcgattactactggggctggatcagacagcctcctggcaaaggactggaatggatcggccacatctactacagcggcgtgacctactacaaccccagcctgaagtccagagtgaccatcagcgtggacaccagccggaaccagttctccctgaagctgtctagcgtgacagccgccgataccgccgtgtactactgcaccagagaggacagcagcaactggcggagtagaggccagggaacactggtcacagttagctctggatccggcggaggcggaagtggaggcggaggatctggcggcggaggctctttcgaacaactccaggtgcaggaatctggccccggactcgtgaagcccagcgagacactgagcctgacctgtaccgtgtccggcggcagcatcagcaacagctacttctcctggggctggatcagacagccccctggcaagggcctggaatggatcggcagcttctactacggcgagaaaacctactacaaccccagcctgaagtccagagccaccatcagcatcgacaccagcaagagccagttctccctgaagctgagcagcgtgacagccgccgacaccgccgtgtattattgccccagaggccccaccatgatccggggcgtgatcgactcttggggccagggaacactcgtgaccgtgtcctctacgcgtatccagaaccctgatcctgccgtgtaccagctgcgggatagcaagagcagcgacaagagcgtgtgtctgttcaccgacttcgacagccagaccaacgtgtcccagagcaaggactccgacgtgtacatcaccgataagtgcgtgctggacatgcggagcatggacttcaagagcaactccgccgtggcctggtccaacaagtccgatttcgcctgcgccaacgccttcaacaacagcattatccccgaggacacattcttcccaagccccgagagcagcgactccaccgaccacgtgaagcccaaagagacagagaacaccaagcagcccagcaagagctgccacaagcccaaggccatcgtgcacaccgagaaagtgaacatgatgagcctgaccgtgctgggcctgcggatgctgttcgccaaaaccgtggccgtgaacttcctgctgaccgccaagctgttcttcctcctcaccgcc

SEQ ID NO: 6749 - DNA, 3018 bp, synthetic construct
  source 1..3018: mol_type = other DNA
atggccttaccagtgaccgccttgctcctgccgctggccttgctgctccacgccgccaggccggaagtgcagctggttgaatctggcggaggactggttcagcctggcggatctctgagactgtcttgtgccgccagcggcttcagcttcagcgacttttggatgagctgggtccgacaggcccctggcaaaggacttgaatgggtcgccacaatcagccaggccggcagcgagaaggactacgtggactctgtgaagggcagattcaccatcagccgggacaacgccaagaagtccctgtacctccagatgaacagcctgagagccgaggacaccgccgtgtactattgtgcctctggcgtgtacagcttcgactacagaggccagggcaccctggtcacagtctcttctggtaccggcggaggcggatctggcggcggaggtagcggtggcggaggatctgaattcgacatcgtgatgacccagacccccctgagcctgcctgtgacacctggcgagcctgccagcatctcctgcagaagcagcagaagcctgctggacagcgacgacggcaacacctacctggactggtatctgcagaaacccggccagagcccccaactgctgatctacaccctgagctacagagccagcggcgtgcccgatagattttccggctctggcagcggcaccgacttcaccctgaagatcagccgggtggaagccgaggacgtgggcgtgtactactgtatgcagcgggtggaatttcccatcaccttcggccagggcaccagactggaaatcaagagactcgaggacctgaagaacgtgttcccacctgaggtggccgtgttcgagcctagcgaggccgagatcagccacacccagaaagccaccctcgtgtgcctggctaccggcttctaccccgaccatgtggaactgtcttggtgggtcaacggcaaagaggtgcacagcggcgtgtgtaccgacccccagccactgaaagaacagcccgccctgaacgacagccggtactgcctgagcagcagactgagagtgtccgccaccttctggcagaacccccggaaccacttcagatgccaggtgcagttctacggcctgagcgagaacgacgagtggacccaggacagagccaagcccgtgacccagatcgtgtctgccgaagcctggggcagagccgatgatgtgattaagatccactggcaggaaaagaagtccaacaccatcctgggcagccaggaaggcaacaccatgaagaccaacgacacctacatgaagttcagctggctgaccgtgcccgagaagtccctggacaaagaacacagatgcatcgtgcggcacgaaaacaacaagaacggcgtggaccaggaaatcatcttcccacccatcaagaccgatgtgattacaatggaccccaaggacaactgctccaaggacgccaacgataccctgctgctccagctgaccaacaccagcgcctactacatgtacttgttgctgctgctgaagtccgtggtgtacttcgccatcatcacatgctgcctgctgatggctatggtcaagcggaaggacagccggggaagggccaagcgatctggatctggagcaacaaacttctcactactcaaacaagcaggtgacgtggaggagaatcccgggcctactagtatggactggatttggcgcatccttttccttgtcggcgctgctaccggcgcgcattccgggccccagctccagctgcaagagtctggacctggcctggtcaagcctagcgagacactgagcctgacctgtaccgtgtccggcgatagcatcagcagcggcgattactactggggctggatcagacagcctcctggcaaaggactggaatggatcggccacatctactacagcggcgtgacctactacaaccccagcctgaagtccagagtgaccatcagcgtggacaccagccggaaccagttctccctgaagctgtctagcgtgacagccgccgataccgccgtgtactactgcaccagagaggacagcagcaactggcggagtagaggccagggaacactggtcacagttagctctggatccggcggaggcggaagtggaggcggaggatctggcggcggaggctctttcgaacaggtgcaactggtggaatctggcgggggagtggtgcagcctggcagatccctgagactgagctgtgccgccagcggcttcatcttcagcagatacggaatgcactgggtgcgccaggcccctggcaagggactgaaatgggtggccgtgatttggtacgacggcagcaacaagctgtacgccgacagcgtgaagggccggttcaccatcagcagagacaacagcaagaacaccctgtacctgcagatgaacagcctgcgggccgaggacaccgccgtgtactattgcgccagagactactacgacaacagccggcaccactggggcttcgactattggggccagggaacccttgtgaccgtgtcctctacgcgtatccagaaccctgatcctgccgtgtaccagctgcgggatagcaagagcagcgacaagagcgtgtgtctgttcaccgacttcgacagccagaccaacgtgtcccagagcaaggactccgacgtgtacatcaccgataagtgcgtgctggacatgcggagcatggacttcaagagcaactccgccgtggcctggtccaacaagtccgatttcgcctgcgccaacgccttcaacaacagcattatccccgaggacacattcttcccaagccccgagagcagcgactccaccgaccacgtgaagcccaaagagacagagaacaccaagcagcccagcaagagctgccacaagcccaaggccatcgtgcacaccgagaaagtgaacatgatgagcctgaccgtgctgggcctgcggatgctgttcgccaaaaccgtggccgtgaacttcctgctgaccgccaagctgttcttcctcctcaccgcc

SEQ ID NO: 6750 - DNA, 2988 bp, synthetic construct
  source 1..2988: mol_type = other DNA
atggccttaccagtgaccgccttgctcctgccgctggccttgctgctccacgccgccaggccggaagtgcagctggttgaatctggcggaggactggttcagcctggcggatctctgagactgtcttgtgccgccagcggcttcagcttcagcgacttttggatgagctgggtccgacaggcccctggcaaaggacttgaatgggtcgccacaatcagccaggccggcagcgagaaggactacgtggactctgtgaagggcagattcaccatcagccgggacaacgccaagaagtccctgtacctccagatgaacagcctgagagccgaggacaccgccgtgtactattgtgcctctggcgtgtacagcttcgactacagaggccagggcaccctggtcacagtctcttctggtaccggcggaggcggatctggcggcggaggtagcggtggcggaggatctgaattcgagatccagatgacccagagccccagcagcatgtctgccagcctgggcgacaccatcaccatcacatgccaggccacccaggacatcttcaagaacctgaactggtatcagcagaagcccggcaagccccccagcctgctgatctactatgccaccgaactggccgagggcgtgcccagcagattttctggcagcggcagcggctccgactacagcctgaccatcagcaacctggaaagcgaggacttcgccgcctactactgcctccagttcttcgagttcccattcaccttcggctccggcaccaagctggaaatgaagctcgaggacctgaagaacgtgttcccacctgaggtggccgtgttcgagcctagcgaggccgagatcagccacacccagaaagccaccctcgtgtgcctggctaccggcttctaccccgaccatgtggaactgtcttggtgggtcaacggcaaagaggtgcacagcggcgtgtgtaccgacccccagccactgaaagaacagcccgccctgaacgacagccggtactgcctgagcagcagactgagagtgtccgccaccttctggcagaacccccggaaccacttcagatgccaggtgcagttctacggcctgagcgagaacgacgagtggacccaggacagagccaagcccgtgacccagatcgtgtctgccgaagcctggggcagagccgatgatgtgattaagatccactggcaggaaaagaagtccaacaccatcctgggcagccaggaaggcaacaccatgaagaccaacgacacctacatgaagttcagctggctgaccgtgcccgagaagtccctggacaaagaacacagatgcatcgtgcggcacgaaaacaacaagaacggcgtggaccaggaaatcatcttcccacccatcaagaccgatgtgattacaatggaccccaaggacaactgctccaaggacgccaacgataccctgctgctccagctgaccaacaccagcgcctactacatgtacttgttgctgctgctgaagtccgtggtgtacttcgccatcatcacatgctgcctgctgatggctatggtcaagcggaaggacagccggggaagggccaagcgatctggatctggagcaacaaacttctcactactcaaacaagcaggtgacgtggaggagaatcccgggcctactagtatggactggatttggcgcatccttttccttgtcggcgctgctaccggcgcgcattccgggccccagctccagctgcaagagtctggacctggcctggtcaagcctagcgagacactgagcctgacctgtaccgtgtccggcgatagcatcagcagcggcgattactactggggctggatcagacagcctcctggcaaaggactggaatggatcggccacatctactacagcggcgtgacctactacaaccccagcctgaagtccagagtgaccatcagcgtggacaccagccggaaccagttctccctgaagctgtctagcgtgacagccgccgataccgccgtgtactactgcaccagagaggacagcagcaactggcggagtagaggccagggaacactggtcacagttagctctggatccggcggaggcggaagtggaggcggaggatctggcggcggaggctctttcgaacaggtgcaactccagcagtctggcgctgagcttgtgcggcctggcacctctgtgaaggtgtcctgtaaagccagcggctacgtgttcaccaactactggatcgagtggatcaagcagcggccaggccagggcctggaatggatcggcgtgatgaatccaggcagcggcgagacaacctacaacgagaagttcaagggcaaggccaccctgaccgccgacaagagcagcagcacagcctacatgcaactgtcctccctgaccagcgtggacagcgccgtgtacttctgcgccagggaccacgaccgggactactacgctatggactactggggccagggcaccagcgtgaccgtgtcatctacgcgtatccagaaccctgatcctgccgtgtaccagctgcgggatagcaagagcagcgacaagagcgtgtgtctgttcaccgacttcgacagccagaccaacgtgtcccagagcaaggactccgacgtgtacatcaccgataagtgcgtgctggacatgcggagcatggacttcaagagcaactccgccgtggcctggtccaacaagtccgatttcgcctgcgccaacgccttcaacaacagcattatccccgaggacacattcttcccaagccccgagagcagcgactccaccgaccacgtgaagcccaaagagacagagaacaccaagcagcccagcaagagctgccacaagcccaaggccatcgtgcacaccgagaaagtgaacatgatgagcctgaccgtgctgggcctgcggatgctgttcgccaaaaccgtggccgtgaacttcctgctgaccgccaagctgttcttcctcctcaccgcc

SEQ ID NO: 6751 - DNA, 2979 bp, synthetic construct
  source 1..2979: mol_type = other DNA
atggccttaccagtgaccgccttgctcctgccgctggccttgctgctccacgccgccaggccggaagtgcagctggttgaatctggcggaggactggttcagcctggcggatctctgagactgtcttgtgccgccagcggcttcagcttcagcgacttttggatgagctgggtccgacaggcccctggcaaaggacttgaatgggtcgccacaatcagccaggccggcagcgagaaggactacgtggactctgtgaagggcagattcaccatcagccgggacaacgccaagaagtccctgtacctccagatgaacagcctgagagccgaggacaccgccgtgtactattgtgcctctggcgtgtacagcttcgactacagaggccagggcaccctggtcacagtctcttctggtaccggcggaggcggatctggcggcggaggtagcggtggcggaggatctgaattcgacatcctgctgacacagagccccgccatcctgtccgtgtctccaggcgagagagtgtcctttagctgccgggccagccagaacatcggcaccagcatccactggtatcagcagcggaccaacggcagccccagactgctgattaagtacgccagcgagtccgtgtccggcatccccagcagattttctggcagcggctccggcaccgacttcaccctgagcatcaacagcgtggaaagcgaggacattgccgactactactgccagcacaccaatagctggcccaccacctttggcggaggcaccaagctggaaatcaagagactcgaggacctgaagaacgtgttcccacctgaggtggccgtgttcgagcctagcgaggccgagatcagccacacccagaaagccaccctcgtgtgcctggctaccggcttctaccccgaccatgtggaactgtcttggtgggtcaacggcaaagaggtgcacagcggcgtgtgtaccgacccccagccactgaaagaacagcccgccctgaacgacagccggtactgcctgagcagcagactgagagtgtccgccaccttctggcagaacccccggaaccacttcagatgccaggtgcagttctacggcctgagcgagaacgacgagtggacccaggacagagccaagcccgtgacccagatcgtgtctgccgaagcctggggcagagccgatgatgtgattaagatccactggcaggaaaagaagtccaacaccatcctgggcagccaggaaggcaacaccatgaagaccaacgacacctacatgaagttcagctggctgaccgtgcccgagaagtccctggacaaagaacacagatgcatcgtgcggcacgaaaacaacaagaacggcgtggaccaggaaatcatcttcccacccatcaagaccgatgtgattacaatggaccccaaggacaactgctccaaggacgccaacgataccctgctgctccagctgaccaacaccagcgcctactacatgtacttgttgctgctgctgaagtccgtggtgtacttcgccatcatcacatgctgcctgctgatggctatggtcaagcggaaggacagccggggaagggccaagcgatctggatctggagcaacaaacttctcactactcaaacaagcaggtgacgtggaggagaatcccgggcctactagtatggactggatttggcgcatccttttccttgtcggcgctgctaccggcgcgcattccgggccccagctccagctgcaagagtctggacctggcctggtcaagcctagcgagacactgagcctgacctgtaccgtgtccggcgatagcatcagcagcggcgattactactggggctggatcagacagcctcctggcaaaggactggaatggatcggccacatctactacagcggcgtgacctactacaaccccagcctgaagtccagagtgaccatcagcgtggacaccagccggaaccagttctccctgaagctgtctagcgtgacagccgccgataccgccgtgtactactgcaccagagaggacagcagcaactggcggagtagaggccagggaacactggtcacagttagctctggatccggcggaggcggaagtggaggcggaggatctggcggcggaggctctttcgaacaggtgcaactccagcagtccgacgccgagcttgtgaagcctggcgcttccgtgaagattagctgcaaggccagcggctacaccttcaccgaccacgccattcactgggtcaagcagaagcccgagcagggcctggaatggatcggctacttcagccccggcaacggcgacatcaagtacaacgagaagttcaagggcaaggccaccctgaccgccgacaagagcagcagcacagcctacatgcaactgaacagcctgaccagcgaggactccgccgtgtacttctgcaagcggagctacggcaactacgactactggggccagggcaccacactgaccgtgtctagtacgcgtatccagaaccctgatcctgccgtgtaccagctgcgggatagcaagagcagcgacaagagcgtgtgtctgttcaccgacttcgacagccagaccaacgtgtcccagagcaaggactccgacgtgtacatcaccgataagtgcgtgctggacatgcggagcatggacttcaagagcaactccgccgtggcctggtccaacaagtccgatttcgcctgcgccaacgccttcaacaacagcattatccccgaggacacattcttcccaagccccgagagcagcgactccaccgaccacgtgaagcccaaagagacagagaacaccaagcagcccagcaagagctgccacaagcccaaggccatcgtgcacaccgagaaagtgaacatgatgagcctgaccgtgctgggcctgcggatgctgttcgccaaaaccgtggccgtgaacttcctgctgaccgccaagctgttcttcctcctcaccgcc

SEQ ID NO: 6752 - DNA, 2994 bp, synthetic construct
  source 1..2994: mol_type = other DNA
atggccttaccagtgaccgccttgctcctgccgctggccttgctgctccacgccgccaggccggaagtgcagctggttgaatctggcggaggactggttcagcctggcggatctctgagactgtcttgtgccgccagcggcttcagcttcagcgacttttggatgagctgggtccgacaggcccctggcaaaggacttgaatgggtcgccacaatcagccaggccggcagcgagaaggactacgtggactctgtgaagggcagattcaccatcagccgggacaacgccaagaagtccctgtacctccagatgaacagcctgagagccgaggacaccgccgtgtactattgtgcctctggcgtgtacagcttcgactacagaggccagggcaccctggtcacagtctcttctggtaccggcggaggcggatctggcggcggaggtagcggtggcggaggatctgaattcgacatcgtgatgacccagagccccgatagcctggccgtgtctctgggagagagagccaccatcaactgcaagagcagccagagcctgctgaacagcggcgaccagaagaactacctgacctggtatcagcagaagcccggccagccccccaagctgctgatctactgggccagcaccagagaaagcggcgtgcccgatagattcagcggcagcggaagtggcaccgacttcaccctgaccatcagttctcttcaggccgaggacgtggccgtgtactactgccagaacgactacagctaccccctgaccttcggccagggcaccaaggtggaaatcaagctcgaggacctgaagaacgtgttcccacctgaggtggccgtgttcgagcctagcgaggccgagatcagccacacccagaaagccaccctcgtgtgcctggctaccggcttctaccccgaccatgtggaactgtcttggtgggtcaacggcaaagaggtgcacagcggcgtgtgtaccgacccccagccactgaaagaacagcccgccctgaacgacagccggtactgcctgagcagcagactgagagtgtccgccaccttctggcagaacccccggaaccacttcagatgccaggtgcagttctacggcctgagcgagaacgacgagtggacccaggacagagccaagcccgtgacccagatcgtgtctgccgaagcctggggcagagccgatgatgtgattaagatccactggcaggaaaagaagtccaacaccatcctgggcagccaggaaggcaacaccatgaagaccaacgacacctacatgaagttcagctggctgaccgtgcccgagaagtccctggacaaagaacacagatgcatcgtgcggcacgaaaacaacaagaacggcgtggaccaggaaatcatcttcccacccatcaagaccgatgtgattacaatggaccccaaggacaactgctccaaggacgccaacgataccctgctgctccagctgaccaacaccagcgcctactacatgtacttgttgctgctgctgaagtccgtggtgtacttcgccatcatcacatgctgcctgctgatggctatggtcaagcggaaggacagccggggaagggccaagcgatctggatctggagcaacaaacttctcactactcaaacaagcaggtgacgtggaggagaatcccgggcctactagtatggactggatttggcgcatccttttccttgtcggcgctgctaccggcgcgcattccgggccccagctccagctgcaagagtctggacctggcctggtcaagcctagcgagacactgagcctgacctgtaccgtgtccggcgatagcatcagcagcggcgattactactggggctggatcagacagcctcctggcaaaggactggaatggatcggccacatctactacagcggcgtgacctactacaaccccagcctgaagtccagagtgaccatcagcgtggacaccagccggaaccagttctccctgaagctgtctagcgtgacagccgccgataccgccgtgtactactgcaccagagaggacagcagcaactggcggagtagaggccagggaacactggtcacagttagctctggatccggcggaggcggaagtggaggcggaggatctggcggcggaggctctttcgaacaggtgcagctggtgcagtctggggccgaagtgaagaaaaccggcagcagcgtgaaggtgtcctgcaaggccagcggctacacctttaccgaccacgccattcacgtgtggcggcaggctccaggacaggccctggaatggatgggccacttcagccccggcaacaccgacatcaagtacaacgacaagttcaagggcagagtgaccctgaccgtggaccgcagcatgagcaccgcctacatggaactgagcagcctgcggagcgaggacaccgccatgtactattgcaagaccagcaccttctttttcgactactggggccagggaacaatggtcaccgtgtccagcacgcgtatccagaaccctgatcctgccgtgtaccagctgcgggatagcaagagcagcgacaagagcgtgtgtctgttcaccgacttcgacagccagaccaacgtgtcccagagcaaggactccgacgtgtacatcaccgataagtgcgtgctggacatgcggagcatggacttcaagagcaactccgccgtggcctggtccaacaagtccgatttcgcctgcgccaacgccttcaacaacagcattatccccgaggacacattcttcccaagccccgagagcagcgactccaccgaccacgtgaagcccaaagagacagagaacaccaagcagcccagcaagagctgccacaagcccaaggccatcgtgcacaccgagaaagtgaacatgatgagcctgaccgtgctgggcctgcggatgctgttcgccaaaaccgtggccgtgaacttcctgctgaccgccaagctgttcttcctcctcaccgcc

SEQ ID NO: 6753 - DNA, 2991 bp, synthetic construct
  source 1..2991: mol_type = other DNA
atggccttaccagtgaccgccttgctcctgccgctggccttgctgctccacgccgccaggccggaagtgcagctggttgaatctggcggaggactggttcagcctggcggatctctgagactgtcttgtgccgccagcggcttcagcttcagcgacttttggatgagctgggtccgacaggcccctggcaaaggacttgaatgggtcgccacaatcagccaggccggcagcgagaaggactacgtggactctgtgaagggcagattcaccatcagccgggacaacgccaagaagtccctgtacctccagatgaacagcctgagagccgaggacaccgccgtgtactattgtgcctctggcgtgtacagcttcgactacagaggccagggcaccctggtcacagtctcttctggtaccggcggaggcggatctggcggcggaggtagcggtggcggaggatctgaattcgacatccagatgacccagagccccagcagcctgtctgccagcgtgggcgacagagtgaccatcacatgcaaggccagccaggacgtgtccattgccgtggcctggtatcagcagaagcccggcaaggcccccaaggtgctgatctacagcgccagctacagatacaccggcgtgcccgacagattcagcggctctggcagcggcaccgacttcaccttcaccatcagctccctccagcccgaggatattgccgtgtactactgccagcagcactacatcacccccctgacctttggcggaggcaccaaggtggaaatcaagctcgaggacctgaagaacgtgttcccacctgaggtggccgtgttcgagcctagcgaggccgagatcagccacacccagaaagccaccctcgtgtgcctggctaccggcttctaccccgaccatgtggaactgtcttggtgggtcaacggcaaagaggtgcacagcggcgtgtgtaccgacccccagccactgaaagaacagcccgccctgaacgacagccggtactgcctgagcagcagactgagagtgtccgccaccttctggcagaacccccggaaccacttcagatgccaggtgcagttctacggcctgagcgagaacgacgagtggacccaggacagagccaagcccgtgacccagatcgtgtctgccgaagcctggggcagagccgatgatgtgattaagatccactggcaggaaaagaagtccaacaccatcctgggcagccaggaaggcaacaccatgaagaccaacgacacctacatgaagttcagctggctgaccgtgcccgagaagtccctggacaaagaacacagatgcatcgtgcggcacgaaaacaacaagaacggcgtggaccaggaaatcatcttcccacccatcaagaccgatgtgattacaatggaccccaaggacaactgctccaaggacgccaacgataccctgctgctccagctgaccaacaccagcgcctactacatgtacttgttgctgctgctgaagtccgtggtgtacttcgccatcatcacatgctgcctgctgatggctatggtcaagcggaaggacagccggggaagggccaagcgatctggatctggagcaacaaacttctcactactcaaacaagcaggtgacgtggaggagaatcccgggcctactagtatggactggatttggcgcatccttttccttgtcggcgctgctaccggcgcgcattccgggccccagctccagctgcaagagtctggacctggcctggtcaagcctagcgagacactgagcctgacctgtaccgtgtccggcgatagcatcagcagcggcgattactactggggctggatcagacagcctcctggcaaaggactggaatggatcggccacatctactacagcggcgtgacctactacaaccccagcctgaagtccagagtgaccatcagcgtggacaccagccggaaccagttctccctgaagctgtctagcgtgacagccgccgataccgccgtgtactactgcaccagagaggacagcagcaactggcggagtagaggccagggaacactggtcacagttagctctggatccggcggaggcggaagtggaggcggaggatctggcggcggaggctctttcgaacagatccaactggtgcagagcggccacgaagtgaagaaacctggggccagcgtgaaggtgtcctgcaaagccagcggctacacctttaccaactacggcatgaactgggtgcgccaggcccctggacagggcctggaatggatgggctggatcaacaccaagaccggcgagcccacctacgccgaagagttcaagggcagattcgtgttcagcctggaaaccagcgcctccaccgcctacctccagatcagctctctgaaggccgaggacaccgccatgtacttttgcggcagaggcggctacggcagcagctactggtacttcgatgtgtggggccagggcaccaccgtgaccgtgtcatctacgcgtatccagaaccctgatcctgccgtgtaccagctgcgggatagcaagagcagcgacaagagcgtgtgtctgttcaccgacttcgacagccagaccaacgtgtcccagagcaaggactccgacgtgtacatcaccgataagtgcgtgctggacatgcggagcatggacttcaagagcaactccgccgtggcctggtccaacaagtccgatttcgcctgcgccaacgccttcaacaacagcattatccccgaggacacattcttcccaagccccgagagcagcgactccaccgaccacgtgaagcccaaagagacagagaacaccaagcagcccagcaagagctgccacaagcccaaggccatcgtgcacaccgagaaagtgaacatgatgagcctgaccgtgctgggcctgcggatgctgttcgccaaaaccgtggccgtgaacttcctgctgaccgccaagctgttcttcctcctcaccgcc

SEQ ID NO: 6754 - DNA, 2997 bp, synthetic construct
  source 1..2997: mol_type = other DNA
atggccttaccagtgaccgccttgctcctgccgctggccttgctgctccacgccgccaggccggaagtgcagctggttgaatctggcggaggactggttcagcctggcggatctctgagactgtcttgtgccgccagcggcttcagcttcagcgacttttggatgagctgggtccgacaggcccctggcaaaggacttgaatgggtcgccacaatcagccaggccggcagcgagaaggactacgtggactctgtgaagggcagattcaccatcagccgggacaacgccaagaagtccctgtacctccagatgaacagcctgagagccgaggacaccgccgtgtactattgtgcctctggcgtgtacagcttcgactacagaggccagggcaccctggtcacagtctcttctggtaccggcggaggcggatctggcggcggaggtagcggtggcggaggatctgaattcgacatcgtgatgacccagagccccgatagcctggccgtgtctctgggagagagagccaccatcaactgccgggccagcaagagcgtgtccaccagcggctacagctacatgcactggtatcagcagaagcccggccagccccccaagctgctgatctacctggcctccaacctggaaagcggcgtgcccgatagattcagcggcagcggctctggcaccgacttcaccctgaccatcagttctcttcaggccgaggacgtggccgtgtactactgccagcacagcagagagctgccctacaccttcggccagggcaccaagctggaaatcaagctcgaggacctgaagaacgtgttcccacctgaggtggccgtgttcgagcctagcgaggccgagatcagccacacccagaaagccaccctcgtgtgcctggctaccggcttctaccccgaccatgtggaactgtcttggtgggtcaacggcaaagaggtgcacagcggcgtgtgtaccgacccccagccactgaaagaacagcccgccctgaacgacagccggtactgcctgagcagcagactgagagtgtccgccaccttctggcagaacccccggaaccacttcagatgccaggtgcagttctacggcctgagcgagaacgacgagtggacccaggacagagccaagcccgtgacccagatcgtgtctgccgaagcctggggcagagccgatgatgtgattaagatccactggcaggaaaagaagtccaacaccatcctgggcagccaggaaggcaacaccatgaagaccaacgacacctacatgaagttcagctggctgaccgtgcccgagaagtccctggacaaagaacacagatgcatcgtgcggcacgaaaacaacaagaacggcgtggaccaggaaatcatcttcccacccatcaagaccgatgtgattacaatggaccccaaggacaactgctccaaggacgccaacgataccctgctgctccagctgaccaacaccagcgcctactacatgtacttgttgctgctgctgaagtccgtggtgtacttcgccatcatcacatgctgcctgctgatggctatggtcaagcggaaggacagccggggaagggccaagcgatctggatctggagcaacaaacttctcactactcaaacaagcaggtgacgtggaggagaatcccgggcctactagtatggactggatttggcgcatccttttccttgtcggcgctgctaccggcgcgcattccgggccccagctccagctgcaagagtctggacctggcctggtcaagcctagcgagacactgagcctgacctgtaccgtgtccggcgatagcatcagcagcggcgattactactggggctggatcagacagcctcctggcaaaggactggaatggatcggccacatctactacagcggcgtgacctactacaaccccagcctgaagtccagagtgaccatcagcgtggacaccagccggaaccagttctccctgaagctgtctagcgtgacagccgccgataccgccgtgtactactgcaccagagaggacagcagcaactggcggagtagaggccagggaacactggtcacagttagctctggatccggcggaggcggaagtggaggcggaggatctggcggcggaggctctttcgaacaggtgcaactccaggaatctggccctggccttgtgaagcccagcgagacactgagcctgacctgtaccgtgtccggcggcagcatcagctcttacggcgtgcactggattcggcagcctccaggcaagggcctggaatggatcggcgtgatctggacctccggcgtgaccgactacaacagcgccctgatgggcagagtgaccatctccgtggacaccagcaagaaccagttcagcctgaagctgagcagcgtgacagccgccgataccgccgtgtattattgcgccagagatggcgactacgaccgctacacaatggactactggggccagggaacccttgtgaccgtgtcctctacgcgtatccagaaccctgatcctgccgtgtaccagctgcgggatagcaagagcagcgacaagagcgtgtgtctgttcaccgacttcgacagccagaccaacgtgtcccagagcaaggactccgacgtgtacatcaccgataagtgcgtgctggacatgcggagcatggacttcaagagcaactccgccgtggcctggtccaacaagtccgatttcgcctgcgccaacgccttcaacaacagcattatccccgaggacacattcttcccaagccccgagagcagcgactccaccgaccacgtgaagcccaaagagacagagaacaccaagcagcccagcaagagctgccacaagcccaaggccatcgtgcacaccgagaaagtgaacatgatgagcctgaccgtgctgggcctgcggatgctgttcgccaaaaccgtggccgtgaacttcctgctgaccgccaagctgttcttcctcctcaccgcc

SEQ ID NO: 6755 - DNA, 2997 bp, synthetic construct
  source 1..2997: mol_type = other DNA
atggccttaccagtgaccgccttgctcctgccgctggccttgctgctccacgccgccaggccggaagtgcagctggttgaatctggcggaggactggttcagcctggcggatctctgagactgtcttgtgccgccagcggcttcagcttcagcgacttttggatgagctgggtccgacaggcccctggcaaaggacttgaatgggtcgccacaatcagccaggccggcagcgagaaggactacgtggactctgtgaagggcagattcaccatcagccgggacaacgccaagaagtccctgtacctccagatgaacagcctgagagccgaggacaccgccgtgtactattgtgcctctggcgtgtacagcttcgactacagaggccagggcaccctggtcacagtctcttctggtaccggcggaggcggatctggcggcggaggtagcggtggcggaggatctgaattcgacatccagatgacccagagccccagcagcctgtctgccagcgtgggcgacagagtgaccatcacctgtagagccagccagagcatcggcaccagcctgcactggtatcagcagaagcctggcaaggcccccaagctgctgattaagttcgccagcagactgcagagcggcgtgcccagcagattttctggcagcggctccggcaccgacttcaccctgacaatcagctccctgcagcccgaggacttcgccacctactactgccagcagagccccggcttccctccaacctttggacagggcaccaagctggaaatcaagcggctcgaggacctgaagaacgtgttcccacctgaggtggccgtgttcgagcctagcgaggccgagatcagccacacccagaaagccaccctcgtgtgcctggctaccggcttctaccccgaccatgtggaactgtcttggtgggtcaacggcaaagaggtgcacagcggcgtgtgtaccgacccccagccactgaaagaacagcccgccctgaacgacagccggtactgcctgagcagcagactgagagtgtccgccaccttctggcagaacccccggaaccacttcagatgccaggtgcagttctacggcctgagcgagaacgacgagtggacccaggacagagccaagcccgtgacccagatcgtgtctgccgaagcctggggcagagccgatgatgtgattaagatccactggcaggaaaagaagtccaacaccatcctgggcagccaggaaggcaacaccatgaagaccaacgacacctacatgaagttcagctggctgaccgtgcccgagaagtccctggacaaagaacacagatgcatcgtgcggcacgaaaacaacaagaacggcgtggaccaggaaatcatcttcccacccatcaagaccgatgtgattacaatggaccccaaggacaactgctccaaggacgccaacgataccctgctgctccagctgaccaacaccagcgcctactacatgtacttgttgctgctgctgaagtccgtggtgtacttcgccatcatcacatgctgcctgctgatggctatggtcaagcggaaggacagccggggaagggccaagcgatctggatctggagcaacaaacttctcactactcaaacaagcaggtgacgtggaggagaatcccgggcctactagtatggactggatttggcgcatccttttccttgtcggcgctgctaccggcgcgcattccgggccccagctccagctgcaagagtctggacctggcctggtcaagcctagcgagacactgagcctgacctgtaccgtgtccggcgatagcatcagcagcggcgattactactggggctggatcagacagcctcctggcaaaggactggaatggatcggccacatctactacagcggcgtgacctactacaaccccagcctgaagtccagagtgaccatcagcgtggacaccagccggaaccagttctccctgaagctgtctagcgtgacagccgccgataccgccgtgtactactgcaccagagaggacagcagcaactggcggagtagaggccagggaacactggtcacagttagctctggatccggcggaggcggaagtggaggcggaggatctggcggcggaggctctttcgaacaggtgcaactggtggaatctggcggcggacttgtgaagccaggcggcagcctgagactgagctgtgccgccagcggcttcagcatcaccaccagcggctactactggacctggatcagacagttccccggcaagggcctggaatggatgggctacatcggctacaacagcaagacctactacaaccccgccctgaagtcccggatcaccatcagcagagacaacgccaagaacagcctgtacctgcagatgaactccctgagagccgaggataccgccgtgtactactgcgccagatccctgtacggcggctacaaggacgccttcgatagctggggccagggaacccttgtgaccgtgtctagcacgcgtatccagaaccctgatcctgccgtgtaccagctgcgggatagcaagagcagcgacaagagcgtgtgtctgttcaccgacttcgacagccagaccaacgtgtcccagagcaaggactccgacgtgtacatcaccgataagtgcgtgctggacatgcggagcatggacttcaagagcaactccgccgtggcctggtccaacaagtccgatttcgcctgcgccaacgccttcaacaacagcattatccccgaggacacattcttcccaagccccgagagcagcgactccaccgaccacgtgaagcccaaagagacagagaacaccaagcagcccagcaagagctgccacaagcccaaggccatcgtgcacaccgagaaagtgaacatgatgagcctgaccgtgctgggcctgcggatgctgttcgccaaaaccgtggccgtgaacttcctgctgaccgccaagctgttcttcctcctcaccgcc

SEQ ID NO: 6756 - DNA, 3012 bp, synthetic construct
  source 1..3012: mol_type = other DNA
atggccttaccagtgaccgccttgctcctgccgctggccttgctgctccacgccgccaggccggaagtgcagctggttgaatctggcggaggactggttcagcctggcggatctctgagactgtcttgtgccgccagcggcttcagcttcagcgacttttggatgagctgggtccgacaggcccctggcaaaggacttgaatgggtcgccacaatcagccaggccggcagcgagaaggactacgtggactctgtgaagggcagattcaccatcagccgggacaacgccaagaagtccctgtacctccagatgaacagcctgagagccgaggacaccgccgtgtactattgtgcctctggcgtgtacagcttcgactacagaggccagggcaccctggtcacagtctcttctggtaccggcggaggcggatctggcggcggaggtagcggtggcggaggatctgaattcgacgagatcgtgctgacccagagccctctgagcctgcctgtgacacctggcgagcctgccagcatctcctgtagaagcagccagagcctgctgcacagcatcggctacaactacctggactggtatctccagaagcccggccagagcccccaactgctgatctacctgggcagcaacagagccagcggcgtgcccgatagattttccggcagcggctccggcaccgacttcaccctgaagatcagccgggtggaagccgaggacgtgggcgtgtactactgtatgcaggccctccagacccccctgacctttggcggaggcaccaaggtggaaatcaagcggctcgaggacctgaagaacgtgttcccacctgaggtggccgtgttcgagcctagcgaggccgagatcagccacacccagaaagccaccctcgtgtgcctggctaccggcttctaccccgaccatgtggaactgtcttggtgggtcaacggcaaagaggtgcacagcggcgtgtgtaccgacccccagccactgaaagaacagcccgccctgaacgacagccggtactgcctgagcagcagactgagagtgtccgccaccttctggcagaacccccggaaccacttcagatgccaggtgcagttctacggcctgagcgagaacgacgagtggacccaggacagagccaagcccgtgacccagatcgtgtctgccgaagcctggggcagagccgatgatgtgattaagatccactggcaggaaaagaagtccaacaccatcctgggcagccaggaaggcaacaccatgaagaccaacgacacctacatgaagttcagctggctgaccgtgcccgagaagtccctggacaaagaacacagatgcatcgtgcggcacgaaaacaacaagaacggcgtggaccaggaaatcatcttcccacccatcaagaccgatgtgattacaatggaccccaaggacaactgctccaaggacgccaacgataccctgctgctccagctgaccaacaccagcgcctactacatgtacttgttgctgctgctgaagtccgtggtgtacttcgccatcatcacatgctgcctgctgatggctatggtcaagcggaaggacagccggggaagggccaagcgatctggatctggagcaacaaacttctcactactcaaacaagcaggtgacgtggaggagaatcccgggcctactagtatggactggatttggcgcatccttttccttgtcggcgctgctaccggcgcgcattccgggccccagctccagctgcaagagtctggacctggcctggtcaagcctagcgagacactgagcctgacctgtaccgtgtccggcgatagcatcagcagcggcgattactactggggctggatcagacagcctcctggcaaaggactggaatggatcggccacatctactacagcggcgtgacctactacaaccccagcctgaagtccagagtgaccatcagcgtggacaccagccggaaccagttctccctgaagctgtctagcgtgacagccgccgataccgccgtgtactactgcaccagagaggacagcagcaactggcggagtagaggccagggaacactggtcacagttagctctggatccggcggaggcggaagtggaggcggaggatctggcggcggaggctctttcgaagaagtgcaactggtggaaagcggaggcggcgtggtgcagcctggaagaagcctgagactgagctgtgccgccagcggcttcaccttccggtcctacggaatgcactgggtgcgccaggcccctggcaaaggactggaatgggtggccgtgatctcctacgacggctccaacaagtactacaccgacagcgtgaacggcagattcaccatcagcagagacaacagcaagaacaccctgtacctccagatgaacagcctgcgggccgaggacaccgccgtgtactattgtgctagaggcggaggctactacgagacaagcggccctgattactggggccagggcacactcgtgaccgtgtctagtacgcgtatccagaaccctgatcctgccgtgtaccagctgcgggatagcaagagcagcgacaagagcgtgtgtctgttcaccgacttcgacagccagaccaacgtgtcccagagcaaggactccgacgtgtacatcaccgataagtgcgtgctggacatgcggagcatggacttcaagagcaactccgccgtggcctggtccaacaagtccgatttcgcctgcgccaacgccttcaacaacagcattatccccgaggacacattcttcccaagccccgagagcagcgactccaccgaccacgtgaagcccaaagagacagagaacaccaagcagcccagcaagagctgccacaagcccaaggccatcgtgcacaccgagaaagtgaacatgatgagcctgaccgtgctgggcctgcggatgctgttcgccaaaaccgtggccgtgaacttcctgctgaccgccaagctgttcttcctcctcaccgcc

SEQ ID NO: 6757 - DNA, 3006 bp, synthetic construct
  source 1..3006: mol_type = other DNA
atggccttaccagtgaccgccttgctcctgccgctggccttgctgctccacgccgccaggccggaagtgcagctggttgaatctggcggaggactggttcagcctggcggatctctgagactgtcttgtgccgccagcggcttcagcttcagcgacttttggatgagctgggtccgacaggcccctggcaaaggacttgaatgggtcgccacaatcagccaggccggcagcgagaaggactacgtggactctgtgaagggcagattcaccatcagccgggacaacgccaagaagtccctgtacctccagatgaacagcctgagagccgaggacaccgccgtgtactattgtgcctctggcgtgtacagcttcgactacagaggccagggcaccctggtcacagtctcttctggtaccggcggaggcggatctggcggcggaggtagcggtggcggaggatctgaattcgacgacgtcgtgatgacccagagccctctgagcctgcctgtgacacctggcgagcctgccagcatctcctgtagaagcagccagagcctgctgcacagcatcggctacaactacctgcactggtttctccagaagcccggccagagcccccaactgctgatctacctgggcagcaacagagccagcggcgtgcccgatagattttccggcagcggctccggcaccgacttcaccctgaagatcagccgggtggaagccgaggacgtgggcgtgtactactgtatgcaggccctccagacccctcccacctttggacagggcaccagactggaaatcaagcggctcgaggacctgaagaacgtgttcccacctgaggtggccgtgttcgagcctagcgaggccgagatcagccacacccagaaagccaccctcgtgtgcctggctaccggcttctaccccgaccatgtggaactgtcttggtgggtcaacggcaaagaggtgcacagcggcgtgtgtaccgacccccagccactgaaagaacagcccgccctgaacgacagccggtactgcctgagcagcagactgagagtgtccgccaccttctggcagaacccccggaaccacttcagatgccaggtgcagttctacggcctgagcgagaacgacgagtggacccaggacagagccaagcccgtgacccagatcgtgtctgccgaagcctggggcagagccgatgatgtgattaagatccactggcaggaaaagaagtccaacaccatcctgggcagccaggaaggcaacaccatgaagaccaacgacacctacatgaagttcagctggctgaccgtgcccgagaagtccctggacaaagaacacagatgcatcgtgcggcacgaaaacaacaagaacggcgtggaccaggaaatcatcttcccacccatcaagaccgatgtgattacaatggaccccaaggacaactgctccaaggacgccaacgataccctgctgctccagctgaccaacaccagcgcctactacatgtacttgttgctgctgctgaagtccgtggtgtacttcgccatcatcacatgctgcctgctgatggctatggtcaagcggaaggacagccggggaagggccaagcgatctggatctggagcaacaaacttctcactactcaaacaagcaggtgacgtggaggagaatcccgggcctactagtatggactggatttggcgcatccttttccttgtcggcgctgctaccggcgcgcattccgggccccagctccagctgcaagagtctggacctggcctggtcaagcctagcgagacactgagcctgacctgtaccgtgtccggcgatagcatcagcagcggcgattactactggggctggatcagacagcctcctggcaaaggactggaatggatcggccacatctactacagcggcgtgacctactacaaccccagcctgaagtccagagtgaccatcagcgtggacaccagccggaaccagttctccctgaagctgtctagcgtgacagccgccgataccgccgtgtactactgcaccagagaggacagcagcaactggcggagtagaggccagggaacactggtcacagttagctctggatccggcggaggcggaagtggaggcggaggatctggcggcggaggctctttcgaacaactccaactccaggaaagcggccctggcctcgtgaagcctagcggcacactgagcctgacatgtgccgtgtctggcggcagcatcagcagcagcaactggtggtcttgggtgcgccagcctcctggcaagggcctggaatggatcggcgaaatctaccacagcggcagcaccaactacaaccccagcctgaagtccagagtgaccatcagcgtggacaagagcaagaaccagttctccctgaagctgagcagcgtgacagccgccgataccgccgtgtactattgcgtgggcagcccctacggcgactacgtgctggattattggggccagggcaccctcgtgaccgtgtctagtacgcgtatccagaaccctgatcctgccgtgtaccagctgcgggatagcaagagcagcgacaagagcgtgtgtctgttcaccgacttcgacagccagaccaacgtgtcccagagcaaggactccgacgtgtacatcaccgataagtgcgtgctggacatgcggagcatggacttcaagagcaactccgccgtggcctggtccaacaagtccgatttcgcctgcgccaacgccttcaacaacagcattatccccgaggacacattcttcccaagccccgagagcagcgactccaccgaccacgtgaagcccaaagagacagagaacaccaagcagcccagcaagagctgccacaagcccaaggccatcgtgcacaccgagaaagtgaacatgatgagcctgaccgtgctgggcctgcggatgctgttcgccaaaaccgtggccgtgaacttcctgctgaccgccaagctgttcttcctcctcaccgcc

SEQ ID NO: 6758 - DNA, 3000 bp, synthetic construct
  source 1..3000: mol_type = other DNA
atggccttaccagtgaccgccttgctcctgccgctggccttgctgctccacgccgccaggccggaagtgcagctggttgaatctggcggaggactggttcagcctggcggatctctgagactgtcttgtgccgccagcggcttcagcttcagcgacttttggatgagctgggtccgacaggcccctggcaaaggacttgaatgggtcgccacaatcagccaggccggcagcgagaaggactacgtggactctgtgaagggcagattcaccatcagccgggacaacgccaagaagtccctgtacctccagatgaacagcctgagagccgaggacaccgccgtgtactattgtgcctctggcgtgtacagcttcgactacagaggccagggcaccctggtcacagtctcttctggtaccggcggaggcggatctggcggcggaggtagcggtggcggaggatctgaattcgacgagatcgtgctgacacagagccctggcaccctgagcctgtctctgggagagagagccacactgagctgtcgggccagccagtctatcagcagcagcttcctggcctggtatcagcagaagcccggccaggcccctaagctgctgatctacgccgccagcacaagagccaccggcatccccgatagattcagcggctctggcagcggcaccgacttcaccctgaccatcagcagactggaacccgaggacttcgccgtgtactactgccagcagtacggcagaagcctgagcttcggcggaggcaccaaggtggaagtgaagctcgaggacctgaagaacgtgttcccacctgaggtggccgtgttcgagcctagcgaggccgagatcagccacacccagaaagccaccctcgtgtgcctggctaccggcttctaccccgaccatgtggaactgtcttggtgggtcaacggcaaagaggtgcacagcggcgtgtgtaccgacccccagccactgaaagaacagcccgccctgaacgacagccggtactgcctgagcagcagactgagagtgtccgccaccttctggcagaacccccggaaccacttcagatgccaggtgcagttctacggcctgagcgagaacgacgagtggacccaggacagagccaagcccgtgacccagatcgtgtctgccgaagcctggggcagagccgatgatgtgattaagatccactggcaggaaaagaagtccaacaccatcctgggcagccaggaaggcaacaccatgaagaccaacgacacctacatgaagttcagctggctgaccgtgcccgagaagtccctggacaaagaacacagatgcatcgtgcggcacgaaaacaacaagaacggcgtggaccaggaaatcatcttcccacccatcaagaccgatgtgattacaatggaccccaaggacaactgctccaaggacgccaacgataccctgctgctccagctgaccaacaccagcgcctactacatgtacttgttgctgctgctgaagtccgtggtgtacttcgccatcatcacatgctgcctgctgatggctatggtcaagcggaaggacagccggggaagggccaagcgatctggatctggagcaacaaacttctcactactcaaacaagcaggtgacgtggaggagaatcccgggcctactagtatggactggatttggcgcatccttttccttgtcggcgctgctaccggcgcgcattccgggccccagctccagctgcaagagtctggacctggcctggtcaagcctagcgagacactgagcctgacctgtaccgtgtccggcgatagcatcagcagcggcgattactactggggctggatcagacagcctcctggcaaaggactggaatggatcggccacatctactacagcggcgtgacctactacaaccccagcctgaagtccagagtgaccatcagcgtggacaccagccggaaccagttctccctgaagctgtctagcgtgacagccgccgataccgccgtgtactactgcaccagagaggacagcagcaactggcggagtagaggccagggaacactggtcacagttagctctggatccggcggaggcggaagtggaggcggaggatctggcggcggaggctctttcgaacaggtgcaactccagcagtctggccccggactcgtgaagcctagccagacactgagcctgacctgcgccatcagcggcgatagcgtgtccggcaatagcgccacctggaactggatcagacagagcccatctcggggcctggaatggctgggccggacctactaccgcagcaagtggaaccacgactacgccgagagcgtgaagtcccggatcaccatcaaccccgacaccagcaagaaccagttctccttgcaactgaacagcgtgacccccgaggacacagccgtgtattattgcgccagaggcgacagcagctcttggtacgccttcgactattggggccagggcaccctcgtgaccgtgtctagtacgcgtatccagaaccctgatcctgccgtgtaccagctgcgggatagcaagagcagcgacaagagcgtgtgtctgttcaccgacttcgacagccagaccaacgtgtcccagagcaaggactccgacgtgtacatcaccgataagtgcgtgctggacatgcggagcatggacttcaagagcaactccgccgtggcctggtccaacaagtccgatttcgcctgcgccaacgccttcaacaacagcattatccccgaggacacattcttcccaagccccgagagcagcgactccaccgaccacgtgaagcccaaagagacagagaacaccaagcagcccagcaagagctgccacaagcccaaggccatcgtgcacaccgagaaagtgaacatgatgagcctgaccgtgctgggcctgcggatgctgttcgccaaaaccgtggccgtgaacttcctgctgaccgccaagctgttcttcctcctcaccgcc

SEQ ID NO: 6759 - DNA, 2997 bp, synthetic construct
  source 1..2997: mol_type = other DNA
atggccttaccagtgaccgccttgctcctgccgctggccttgctgctccacgccgccaggccggaagtgcagctggttgaatctggcggaggactggttcagcctggcggatctctgagactgtcttgtgccgccagcggcttcagcttcagcgacttttggatgagctgggtccgacaggcccctggcaaaggacttgaatgggtcgccacaatcagccaggccggcagcgagaaggactacgtggactctgtgaagggcagattcaccatcagccgggacaacgccaagaagtccctgtacctccagatgaacagcctgagagccgaggacaccgccgtgtactattgtgcctctggcgtgtacagcttcgactacagaggccagggcaccctggtcacagtctcttctggtaccggcggaggcggatctggcggcggaggtagcggtggcggaggatctgaattcgaccagagcgtcgtgacacagcctcctagcgtgtcagtggcccctggcaagaccgccagaatcacctgtggccggaacaacatcggcagcaagagcgtgcactggtatcagcagaagcccggccaggctcctgtgctggtggtgtacgacgacagcgacagacccagcggcatccccgagagattcagcggcagcaactccggcaataccgccaccctgaccatcagcagagtggaagccggcgacgaggccgactactactgccaagtgtgggacagcagcagcgatcacgtggtgtttggcggaggcaccaagctgacagtgctgggtctcgaggacctgaagaacgtgttcccacctgaggtggccgtgttcgagcctagcgaggccgagatcagccacacccagaaagccaccctcgtgtgcctggctaccggcttctaccccgaccatgtggaactgtcttggtgggtcaacggcaaagaggtgcacagcggcgtgtgtaccgacccccagccactgaaagaacagcccgccctgaacgacagccggtactgcctgagcagcagactgagagtgtccgccaccttctggcagaacccccggaaccacttcagatgccaggtgcagttctacggcctgagcgagaacgacgagtggacccaggacagagccaagcccgtgacccagatcgtgtctgccgaagcctggggcagagccgatgatgtgattaagatccactggcaggaaaagaagtccaacaccatcctgggcagccaggaaggcaacaccatgaagaccaacgacacctacatgaagttcagctggctgaccgtgcccgagaagtccctggacaaagaacacagatgcatcgtgcggcacgaaaacaacaagaacggcgtggaccaggaaatcatcttcccacccatcaagaccgatgtgattacaatggaccccaaggacaactgctccaaggacgccaacgataccctgctgctccagctgaccaacaccagcgcctactacatgtacttgttgctgctgctgaagtccgtggtgtacttcgccatcatcacatgctgcctgctgatggctatggtcaagcggaaggacagccggggaagggccaagcgatctggatctggagcaacaaacttctcactactcaaacaagcaggtgacgtggaggagaatcccgggcctactagtatggactggatttggcgcatccttttccttgtcggcgctgctaccggcgcgcattccgggccccagctccagctgcaagagtctggacctggcctggtcaagcctagcgagacactgagcctgacctgtaccgtgtccggcgatagcatcagcagcggcgattactactggggctggatcagacagcctcctggcaaaggactggaatggatcggccacatctactacagcggcgtgacctactacaaccccagcctgaagtccagagtgaccatcagcgtggacaccagccggaaccagttctccctgaagctgtctagcgtgacagccgccgataccgccgtgtactactgcaccagagaggacagcagcaactggcggagtagaggccagggaacactggtcacagttagctctggatccggcggaggcggaagtggaggcggaggatctggcggcggaggctctttcgaagtgcaactggtgcagtctggcggaggggtcatgcggcctggcggatctctgagactgtcttgtgccgccagcggcttcaccttcgacgactacggcatgagctgggtgcgccaggcccctggaaaaggcctggaatgggtgtccggcatcaactggaatggcggcagcaccggctacgccgattctgtgcggggcagattcaccatcagccgggacaacgccaagaacagcctgtacctgcagatgaactccctgcgggccgaggacaccgccctgtactattgcgccagagagcggggctacggctaccacgaccctcacgattattggggccagggcacccttgttaccgtgtcctctacgcgtatccagaaccctgatcctgccgtgtaccagctgcgggatagcaagagcagcgacaagagcgtgtgtctgttcaccgacttcgacagccagaccaacgtgtcccagagcaaggactccgacgtgtacatcaccgataagtgcgtgctggacatgcggagcatggacttcaagagcaactccgccgtggcctggtccaacaagtccgatttcgcctgcgccaacgccttcaacaacagcattatccccgaggacacattcttcccaagccccgagagcagcgactccaccgaccacgtgaagcccaaagagacagagaacaccaagcagcccagcaagagctgccacaagcccaaggccatcgtgcacaccgagaaagtgaacatgatgagcctgaccgtgctgggcctgcggatgctgttcgccaaaaccgtggccgtgaacttcctgctgaccgccaagctgttcttcctcctcaccgcc

SEQ ID NO: 6760 - DNA, 3036 bp, synthetic construct
  source 1..3036: mol_type = other DNA
atggccttaccagtgaccgccttgctcctgccgctggccttgctgctccacgccgccaggccggaagtgcagctggttgaatctggcggaggactggttcagcctggcggatctctgagactgtcttgtgccgccagcggcttcagcttcagcgacttttggatgagctgggtccgacaggcccctggcaaaggacttgaatgggtcgccacaatcagccaggccggcagcgagaaggactacgtggactctgtgaagggcagattcaccatcagccgggacaacgccaagaagtccctgtacctccagatgaacagcctgagagccgaggacaccgccgtgtactattgtgcctctggcgtgtacagcttcgactacagaggccagggcaccctggtcacagtctcttctggtaccggcggaggcggatctggcggcggaggtagcggtggcggaggatctgaattcgaacagaaactcatcagtgaagaagacctggaattccaggctgtcgtgacacagcctcctagcgcctctggcacaccaggccagagagtgaccatctcctgtagcggcagcagcagcaacatcggcagcaacaccgtgaactggtatcagcaggtgcccggcaccgctcccaagctgctgatctacagcaacaaccagcggcccagcggcgtgcccgatagattttctggcagcaagagcggcaccagcgccagcctggctatctctggactccagtccgaggacgaggccgactactattgcgccgcctgggacgatagcctgaacggctgggtgttcggcggaggcaccaagctgacagtgctgctcgaggacctgaagaacgtgttcccacctgaggtggccgtgttcgagcctagcgaggccgagatcagccacacccagaaagccaccctcgtgtgcctggctaccggcttctaccccgaccatgtggaactgtcttggtgggtcaacggcaaagaggtgcacagcggcgtgtgtaccgacccccagccactgaaagaacagcccgccctgaacgacagccggtactgcctgagcagcagactgagagtgtccgccaccttctggcagaacccccggaaccacttcagatgccaggtgcagttctacggcctgagcgagaacgacgagtggacccaggacagagccaagcccgtgacccagatcgtgtctgccgaagcctggggcagagccgatgatgtgattaagatccactggcaggaaaagaagtccaacaccatcctgggcagccaggaaggcaacaccatgaagaccaacgacacctacatgaagttcagctggctgaccgtgcccgagaagtccctggacaaagaacacagatgcatcgtgcggcacgaaaacaacaagaacggcgtggaccaggaaatcatcttcccacccatcaagaccgatgtgattacaatggaccccaaggacaactgctccaaggacgccaacgataccctgctgctccagctgaccaacaccagcgcctactacatgtacttgttgctgctgctgaagtccgtggtgtacttcgccatcatcacatgctgcctgctgatggctatggtcaagcggaaggacagccggggaagggccaagcgatctggatctggagcaacaaacttctcactactcaaacaagcaggtgacgtggaggagaatcccgggcctactagtatggactggatttggcgcatccttttccttgtcggcgctgctaccggcgcgcattccgggccccagctccagctgcaagagtctggacctggcctggtcaagcctagcgagacactgagcctgacctgtaccgtgtccggcgatagcatcagcagcggcgattactactggggctggatcagacagcctcctggcaaaggactggaatggatcggccacatctactacagcggcgtgacctactacaaccccagcctgaagtccagagtgaccatcagcgtggacaccagccggaaccagttctccctgaagctgtctagcgtgacagccgccgataccgccgtgtactactgcaccagagaggacagcagcaactggcggagtagaggccagggaacactggtcacagttagctctggatccggcggaggcggaagtggaggcggaggatctggcggcggaggctctttcgaacagatgcaactggtgcagagcggagccgaagtgaaagagcctggcgagagcctgcggatctcctgcaagggcagcggctacagcttcaccaatttctggatctcttgggtgcgccagatgcccggcaagggcctggaatggatgggcagagtggaccccggctactcctacagcacctacagccctagcttccagggccacgtgaccatcagcgccgacaagagcaccagcaccgcctacctccagtggaacagcctgaaggccagcgacaccgccatgtactactgcgccagagtgcagtacagcggctattacgattggttcgacccctggggccagggcacactcgtgacagtgtcaagcacgcgtatccagaaccctgatcctgccgtgtaccagctgcgggatagcaagagcagcgacaagagcgtgtgtctgttcaccgacttcgacagccagaccaacgtgtcccagagcaaggactccgacgtgtacatcaccgataagtgcgtgctggacatgcggagcatggacttcaagagcaactccgccgtggcctggtccaacaagtccgatttcgcctgcgccaacgccttcaacaacagcattatccccgaggacacattcttcccaagccccgagagcagcgactccaccgaccacgtgaagcccaaagagacagagaacaccaagcagcccagcaagagctgccacaagcccaaggccatcgtgcacaccgagaaagtgaacatgatgagcctgaccgtgctgggcctgcggatgctgttcgccaaaaccgtggccgtgaacttcctgctgaccgccaagctgttcttcctcctcaccgcc

SEQ ID NO: 6761 - DNA, 3018 bp, synthetic construct
  source 1..3018: mol_type = other DNA
atggccttaccagtgaccgccttgctcctgccgctggccttgctgctccacgccgccaggccggaagtgcagctggttgaatctggcggaggactggttcagcctggcggatctctgagactgtcttgtgccgccagcggcttcagcttcagcgacttttggatgagctgggtccgacaggcccctggcaaaggacttgaatgggtcgccacaatcagccaggccggcagcgagaaggactacgtggactctgtgaagggcagattcaccatcagccgggacaacgccaagaagtccctgtacctccagatgaacagcctgagagccgaggacaccgccgtgtactattgtgcctctggcgtgtacagcttcgactacagaggccagggcaccctggtcacagtctcttctggtaccggcggaggcggatctggcggcggaggtagcggtggcggaggatctgaattcgaacagaaactcatcagtgaagaagacctggaattcgacatccagatgacccagagccccagcacactgagcgccagcgtgggcgacagagtgaccatcacctgtcgggccagccagaacatcaacaagtggctggcctggtatcagcagaggcccggaaaagccccccagctgctgatctacaaggccagcagcctggaaagcggcgtgcccagcagattttctggcagcggctctggcaccgagtacaccctgaccatcagctccctccagcccgacgacttcgccacctactactgccagcagtacaacagctacgccaccttcggccagggcaccaaggtggaaatcaagagactcgaggacctgaagaacgtgttcccacctgaggtggccgtgttcgagcctagcgaggccgagatcagccacacccagaaagccaccctcgtgtgcctggctaccggcttctaccccgaccatgtggaactgtcttggtgggtcaacggcaaagaggtgcacagcggcgtgtgtaccgacccccagccactgaaagaacagcccgccctgaacgacagccggtactgcctgagcagcagactgagagtgtccgccaccttctggcagaacccccggaaccacttcagatgccaggtgcagttctacggcctgagcgagaacgacgagtggacccaggacagagccaagcccgtgacccagatcgtgtctgccgaagcctggggcagagccgatgatgtgattaagatccactggcaggaaaagaagtccaacaccatcctgggcagccaggaaggcaacaccatgaagaccaacgacacctacatgaagttcagctggctgaccgtgcccgagaagtccctggacaaagaacacagatgcatcgtgcggcacgaaaacaacaagaacggcgtggaccaggaaatcatcttcccacccatcaagaccgatgtgattacaatggaccccaaggacaactgctccaaggacgccaacgataccctgctgctccagctgaccaacaccagcgcctactacatgtacttgttgctgctgctgaagtccgtggtgtacttcgccatcatcacatgctgcctgctgatggctatggtcaagcggaaggacagccggggaagggccaagcgatctggatctggagcaacaaacttctcactactcaaacaagcaggtgacgtggaggagaatcccgggcctactagtatggactggatttggcgcatccttttccttgtcggcgctgctaccggcgcgcattccgggccccagctccagctgcaagagtctggacctggcctggtcaagcctagcgagacactgagcctgacctgtaccgtgtccggcgatagcatcagcagcggcgattactactggggctggatcagacagcctcctggcaaaggactggaatggatcggccacatctactacagcggcgtgacctactacaaccccagcctgaagtccagagtgaccatcagcgtggacaccagccggaaccagttctccctgaagctgtctagcgtgacagccgccgataccgccgtgtactactgcaccagagaggacagcagcaactggcggagtagaggccagggaacactggtcacagttagctctggatccggcggaggcggaagtggaggcggaggatctggcggcggaggctctttcgaacaggtgcagctggtgcagtctggggccgaagtgaagaagcctggcgagagcctgaagatcagctgcaagggctccggctacaacttctctaacaagtggatcggctgggtgcgccagctgcctggcagaggactggaatggatcgccatcatctaccccggctacagcgacatcacctacagccccagcttccagggccgcgtgacaatcagcgccgacaccagcatcaacaccgcctacctgcactggcacagcctgaaggccagcgacaccgccatgtactactgcgtgcggcatacagccctggctggcttcgattattggggcctgggcaccctcgtgaccgtgtctagtacgcgtatccagaaccctgatcctgccgtgtaccagctgcgggatagcaagagcagcgacaagagcgtgtgtctgttcaccgacttcgacagccagaccaacgtgtcccagagcaaggactccgacgtgtacatcaccgataagtgcgtgctggacatgcggagcatggacttcaagagcaactccgccgtggcctggtccaacaagtccgatttcgcctgcgccaacgccttcaacaacagcattatccccgaggacacattcttcccaagccccgagagcagcgactccaccgaccacgtgaagcccaaagagacagagaacaccaagcagcccagcaagagctgccacaagcccaaggccatcgtgcacaccgagaaagtgaacatgatgagcctgaccgtgctgggcctgcggatgctgttcgccaaaaccgtggccgtgaacttcctgctgaccgccaagctgttcttcctcctcaccgcc

SEQ ID NO: 6762 - DNA, 2991 bp, synthetic construct
  source 1..2991: mol_type = other DNA
atggccttaccagtgaccgccttgctcctgccgctggccttgctgctccacgccgccaggccggaagtgcagctggttgaatctggcggaggactggttcagcctggcggatctctgagactgtcttgtgccgccagcggcttcagcttcagcgacttttggatgagctgggtccgacaggcccctggcaaaggacttgaatgggtcgccacaatcagccaggccggcagcgagaaggactacgtggactctgtgaagggcagattcaccatcagccgggacaacgccaagaagtccctgtacctccagatgaacagcctgagagccgaggacaccgccgtgtactattgtgcctctggcgtgtacagcttcgactacagaggccagggcaccctggtcacagtctcttctggtaccggcggaggcggatctggcggcggaggtagcggtggcggaggatctgaattcatcgtgctgacacagagccctgcttctctggccgtgtctctgggacagagagccaccatcagctgtagagccagcgagagcgtggacaactacggcaacaccttcatgcactggtatcagcagaagcccggccagcctcctaagctgctgatctacagagccagcaacctggaaagcggcatccccgccagattttctggcagcggcagcagaaccgacttcaccctgaccatcaatcccgtggaagccgacgacgtggcaacctactactgccagcagagcaacgaggaccctcctacatttggagccggcaccaagctggaactgaaactcgaggacctgaagaacgtgttcccacctgaggtggccgtgttcgagcctagcgaggccgagatcagccacacccagaaagccaccctcgtgtgcctggctaccggcttctaccccgaccatgtggaactgtcttggtgggtcaacggcaaagaggtgcacagcggcgtgtgtaccgacccccagccactgaaagaacagcccgccctgaacgacagccggtactgcctgagcagcagactgagagtgtccgccaccttctggcagaacccccggaaccacttcagatgccaggtgcagttctacggcctgagcgagaacgacgagtggacccaggacagagccaagcccgtgacccagatcgtgtctgccgaagcctggggcagagccgatgatgtgattaagatccactggcaggaaaagaagtccaacaccatcctgggcagccaggaaggcaacaccatgaagaccaacgacacctacatgaagttcagctggctgaccgtgcccgagaagtccctggacaaagaacacagatgcatcgtgcggcacgaaaacaacaagaacggcgtggaccaggaaatcatcttcccacccatcaagaccgatgtgattacaatggaccccaaggacaactgctccaaggacgccaacgataccctgctgctccagctgaccaacaccagcgcctactacatgtacttgttgctgctgctgaagtccgtggtgtacttcgccatcatcacatgctgcctgctgatggctatggtcaagcggaaggacagccggggaagggccaagcgatctggatctggagcaacaaacttctcactactcaaacaagcaggtgacgtggaggagaatcccgggcctactagtatggactggatttggcgcatccttttccttgtcggcgctgctaccggcgcgcattccgggccccagctccagctgcaagagtctggacctggcctggtcaagcctagcgagacactgagcctgacctgtaccgtgtccggcgatagcatcagcagcggcgattactactggggctggatcagacagcctcctggcaaaggactggaatggatcggccacatctactacagcggcgtgacctactacaaccccagcctgaagtccagagtgaccatcagcgtggacaccagccggaaccagttctccctgaagctgtctagcgtgacagccgccgataccgccgtgtactactgcaccagagaggacagcagcaactggcggagtagaggccagggaacactggtcacagttagctctggatccggcggaggcggaagtggaggcggaggatctggcggcggaggctctttcgaacagattcagctggtgcagtctggccccgagctgaagaaacctggcgagacagtgaagatcagctgcaaggccagcggctacatcttcaccaattacggcatgaactgggtcaagcaggcccctggcaagagcttcaagtggatgggctggatcaacacctacaccggcgagagcacatacagcgccgacttcaagggcagattcgccttcagcctggaaaccagcgccagcacagcctacctgcacatcaacgacctgaagaacgaggacaccgccacctacttttgcgccagaagcggcggctacgaccctatggattattggggccagggcaccagcgtgaccgtttcttctacgcgtatccagaaccctgatcctgccgtgtaccagctgcgggatagcaagagcagcgacaagagcgtgtgtctgttcaccgacttcgacagccagaccaacgtgtcccagagcaaggactccgacgtgtacatcaccgataagtgcgtgctggacatgcggagcatggacttcaagagcaactccgccgtggcctggtccaacaagtccgatttcgcctgcgccaacgccttcaacaacagcattatccccgaggacacattcttcccaagccccgagagcagcgactccaccgaccacgtgaagcccaaagagacagagaacaccaagcagcccagcaagagctgccacaagcccaaggccatcgtgcacaccgagaaagtgaacatgatgagcctgaccgtgctgggcctgcggatgctgttcgccaaaaccgtggccgtgaacttcctgctgaccgccaagctgttcttcctcctcaccgcc

SEQ ID NO: 6763 - DNA, 2988 bp, synthetic construct
  source 1..2988: mol_type = other DNA
atggccttaccagtgaccgccttgctcctgccgctggccttgctgctccacgccgccaggccggaagtgcagctggttgaatctggcggaggactggttcagcctggcggatctctgagactgtcttgtgccgccagcggcttcagcttcagcgacttttggatgagctgggtccgacaggcccctggcaaaggacttgaatgggtcgccacaatcagccaggccggcagcgagaaggactacgtggactctgtgaagggcagattcaccatcagccgggacaacgccaagaagtccctgtacctccagatgaacagcctgagagccgaggacaccgccgtgtactattgtgcctctggcgtgtacagcttcgactacagaggccagggcaccctggtcacagtctcttctggtaccggcggaggcggatctggcggcggaggtagcggtggcggaggatctgaattcgagatcgtgctgacacagagccctggcaccctgagcctgtctccaggcgaaagagccacactgagctgtcgggccagccagagcgtgtccaatacctacctggcctggtatcaccagaggcccggacaggctccccggctgctgatctatggcgcttctagcagagccaccggcatccccgatagattcagcggctctggcagcggcaccgacttcgccctgacaatcagctccctggaacccgaggacttcgccgtgtactactgccagcagtacagcaactcctggaccttcggccagggcaccaaggtggaaatcaagagactcgaggacctgaagaacgtgttcccacctgaggtggccgtgttcgagcctagcgaggccgagatcagccacacccagaaagccaccctcgtgtgcctggctaccggcttctaccccgaccatgtggaactgtcttggtgggtcaacggcaaagaggtgcacagcggcgtgtgtaccgacccccagccactgaaagaacagcccgccctgaacgacagccggtactgcctgagcagcagactgagagtgtccgccaccttctggcagaacccccggaaccacttcagatgccaggtgcagttctacggcctgagcgagaacgacgagtggacccaggacagagccaagcccgtgacccagatcgtgtctgccgaagcctggggcagagccgatgatgtgattaagatccactggcaggaaaagaagtccaacaccatcctgggcagccaggaaggcaacaccatgaagaccaacgacacctacatgaagttcagctggctgaccgtgcccgagaagtccctggacaaagaacacagatgcatcgtgcggcacgaaaacaacaagaacggcgtggaccaggaaatcatcttcccacccatcaagaccgatgtgattacaatggaccccaaggacaactgctccaaggacgccaacgataccctgctgctccagctgaccaacaccagcgcctactacatgtacttgttgctgctgctgaagtccgtggtgtacttcgccatcatcacatgctgcctgctgatggctatggtcaagcggaaggacagccggggaagggccaagcgatctggatctggagcaacaaacttctcactactcaaacaagcaggtgacgtggaggagaatcccgggcctactagtatggactggatttggcgcatccttttccttgtcggcgctgctaccggcgcgcattccgggccccagctccagctgcaagagtctggacctggcctggtcaagcctagcgagacactgagcctgacctgtaccgtgtccggcgatagcatcagcagcggcgattactactggggctggatcagacagcctcctggcaaaggactggaatggatcggccacatctactacagcggcgtgacctactacaaccccagcctgaagtccagagtgaccatcagcgtggacaccagccggaaccagttctccctgaagctgtctagcgtgacagccgccgataccgccgtgtactactgcaccagagaggacagcagcaactggcggagtagaggccagggaacactggtcacagttagctctggatccggcggaggcggaagtggaggcggaggatctggcggcggaggctctttcgaacaggtgcaactggtggaatctggcgggggagtggtgcagcctggcagaagcctgagactgtcttgtgccgccagcggcttcaccttcagcagctacgacatgcactgggtgcgccaggcccctggcaaaggactggaatgggtggccgtgatctcctacgacggcaccaacgagtattacgccgacagcgtgaagggccggttcaccatctccagagacaccagcaagaacaccctgtacctccagatgaacagcctgcgggccgaggacacagccgtgtattattgcgccagagagcggtacttcgactggtccttcgactactggggccagggaaccctggtgtccgtgtctagtacgcgtatccagaaccctgatcctgccgtgtaccagctgcgggatagcaagagcagcgacaagagcgtgtgtctgttcaccgacttcgacagccagaccaacgtgtcccagagcaaggactccgacgtgtacatcaccgataagtgcgtgctggacatgcggagcatggacttcaagagcaactccgccgtggcctggtccaacaagtccgatttcgcctgcgccaacgccttcaacaacagcattatccccgaggacacattcttcccaagccccgagagcagcgactccaccgaccacgtgaagcccaaagagacagagaacaccaagcagcccagcaagagctgccacaagcccaaggccatcgtgcacaccgagaaagtgaacatgatgagcctgaccgtgctgggcctgcggatgctgttcgccaaaaccgtggccgtgaacttcctgctgaccgccaagctgttcttcctcctcaccgcc

SEQ ID NO: 6764 - DNA, 2985 bp, synthetic construct
  source 1..2985: mol_type = other DNA
atggccttaccagtgaccgccttgctcctgccgctggccttgctgctccacgccgccaggccggaagtgcagctggttgaatctggcggaggactggttcagcctggcggatctctgagactgtcttgtgccgccagcggcttcagcttcagcgacttttggatgagctgggtccgacaggcccctggcaaaggacttgaatgggtcgccacaatcagccaggccggcagcgagaaggactacgtggactctgtgaagggcagattcaccatcagccgggacaacgccaagaagtccctgtacctccagatgaacagcctgagagccgaggacaccgccgtgtactattgtgcctctggcgtgtacagcttcgactacagaggccagggcaccctggtcacagtctcttctggtaccggcggaggcggatctggcggcggaggtagcggtggcggaggatctgaattcgagctgacacaggaccctgctgtgtctgttgccctgggccagacagtgcggattacctgtcaaggcgacagcctgagaagcaactacgccaactggtatcagcagaagcccggacaggctcccgtgctggttatctacggccagaacaacagacccagcggcatccccgatagattcagcggctctagctctggcaataccgccagcctgacaatcactggcgctcaggctgccgatgaggccgactactactgcgatagcagagtgtccaccggcaatcacgtggtgtttggcggcggaacaaagctgacagtgctcggacaactcgaggacctgaagaacgtgttcccacctgaggtggccgtgttcgagcctagcgaggccgagatcagccacacccagaaagccaccctcgtgtgcctggctaccggcttctaccccgaccatgtggaactgtcttggtgggtcaacggcaaagaggtgcacagcggcgtgtgtaccgacccccagccactgaaagaacagcccgccctgaacgacagccggtactgcctgagcagcagactgagagtgtccgccaccttctggcagaacccccggaaccacttcagatgccaggtgcagttctacggcctgagcgagaacgacgagtggacccaggacagagccaagcccgtgacccagatcgtgtctgccgaagcctggggcagagccgatgatgtgattaagatccactggcaggaaaagaagtccaacaccatcctgggcagccaggaaggcaacaccatgaagaccaacgacacctacatgaagttcagctggctgaccgtgcccgagaagtccctggacaaagaacacagatgcatcgtgcggcacgaaaacaacaagaacggcgtggaccaggaaatcatcttcccacccatcaagaccgatgtgattacaatggaccccaaggacaactgctccaaggacgccaacgataccctgctgctccagctgaccaacaccagcgcctactacatgtacttgttgctgctgctgaagtccgtggtgtacttcgccatcatcacatgctgcctgctgatggctatggtcaagcggaaggacagccggggaagggccaagcgatctggatctggagcaacaaacttctcactactcaaacaagcaggtgacgtggaggagaatcccgggcctactagtatggactggatttggcgcatccttttccttgtcggcgctgctaccggcgcgcattccgggccccagctccagctgcaagagtctggacctggcctggtcaagcctagcgagacactgagcctgacctgtaccgtgtccggcgatagcatcagcagcggcgattactactggggctggatcagacagcctcctggcaaaggactggaatggatcggccacatctactacagcggcgtgacctactacaaccccagcctgaagtccagagtgaccatcagcgtggacaccagccggaaccagttctccctgaagctgtctagcgtgacagccgccgataccgccgtgtactactgcaccagagaggacagcagcaactggcggagtagaggccagggaacactggtcacagttagctctggatccggcggaggcggaagtggaggcggaggatctggcggcggaggctctttcgaagaagttcagctggtgcagagcggagccgaagtgaagaaacctggggcctctgtgaaggtgtcctgcaaggcttccggctacacctttaccagctacgccatgcactgggtccgacaggcacctggacaacggcttgaatggatgggctggatcaacgccggcaacggcaacaccaagtacagccagaaattccagggccgcgtgaccatcaccagagatacaagcgccagcaccgcctacatggaactgtctagcctgagatccgaggacaccgccgtgtactactgtgccagagacatcagctacggcagcttcgactattggggccagggcacactggtcaccgttagctctacgcgtatccagaaccctgatcctgccgtgtaccagctgcgggatagcaagagcagcgacaagagcgtgtgtctgttcaccgacttcgacagccagaccaacgtgtcccagagcaaggactccgacgtgtacatcaccgataagtgcgtgctggacatgcggagcatggacttcaagagcaactccgccgtggcctggtccaacaagtccgatttcgcctgcgccaacgccttcaacaacagcattatccccgaggacacattcttcccaagccccgagagcagcgactccaccgaccacgtgaagcccaaagagacagagaacaccaagcagcccagcaagagctgccacaagcccaaggccatcgtgcacaccgagaaagtgaacatgatgagcctgaccgtgctgggcctgcggatgctgttcgccaaaaccgtggccgtgaacttcctgctgaccgccaagctgttcttcctcctcaccgcc

SEQ ID NO: 6765 - DNA, 2991 bp, synthetic construct
  source 1..2991: mol_type = other DNA
atggccttaccagtgaccgccttgctcctgccgctggccttgctgctccacgccgccaggccggaagtgcagctggttgaatctggcggaggactggttcagcctggcggatctctgagactgtcttgtgccgccagcggcttcagcttcagcgacttttggatgagctgggtccgacaggcccctggcaaaggacttgaatgggtcgccacaatcagccaggccggcagcgagaaggactacgtggactctgtgaagggcagattcaccatcagccgggacaacgccaagaagtccctgtacctccagatgaacagcctgagagccgaggacaccgccgtgtactattgtgcctctggcgtgtacagcttcgactacagaggccagggcaccctggtcacagtctcttctggtaccggcggaggcggatctggcggcggaggtagcggtggcggaggatctgaattcgacatcgtgctgacacagacaccagccacactgagcgtgacacctggcgattctgtgtccctgagctgtagagccagccagagcatcagcaacaacctgcactggtatcagcagaagtcccacgagagccccagactgctgattaagaacgccagccagtctatcagcggcatccccagcaagtttagcggctctggcagcggcaccgacttcaccctgagaatcaacagcgtggaaaccgaggacttcgggatgtacttctgccagcagagcaatagctggccctacacatttggctccggcaccaagctggaaatcaaactcgaggacctgaagaacgtgttcccacctgaggtggccgtgttcgagcctagcgaggccgagatcagccacacccagaaagccaccctcgtgtgcctggctaccggcttctaccccgaccatgtggaactgtcttggtgggtcaacggcaaagaggtgcacagcggcgtgtgtaccgacccccagccactgaaagaacagcccgccctgaacgacagccggtactgcctgagcagcagactgagagtgtccgccaccttctggcagaacccccggaaccacttcagatgccaggtgcagttctacggcctgagcgagaacgacgagtggacccaggacagagccaagcccgtgacccagatcgtgtctgccgaagcctggggcagagccgatgatgtgattaagatccactggcaggaaaagaagtccaacaccatcctgggcagccaggaaggcaacaccatgaagaccaacgacacctacatgaagttcagctggctgaccgtgcccgagaagtccctggacaaagaacacagatgcatcgtgcggcacgaaaacaacaagaacggcgtggaccaggaaatcatcttcccacccatcaagaccgatgtgattacaatggaccccaaggacaactgctccaaggacgccaacgataccctgctgctccagctgaccaacaccagcgcctactacatgtacttgttgctgctgctgaagtccgtggtgtacttcgccatcatcacatgctgcctgctgatggctatggtcaagcggaaggacagccggggaagggccaagcgatctggatctggagcaacaaacttctcactactcaaacaagcaggtgacgtggaggagaatcccgggcctactagtatggactggatttggcgcatccttttccttgtcggcgctgctaccggcgcgcattccgggccccagctccagctgcaagagtctggacctggcctggtcaagcctagcgagacactgagcctgacctgtaccgtgtccggcgatagcatcagcagcggcgattactactggggctggatcagacagcctcctggcaaaggactggaatggatcggccacatctactacagcggcgtgacctactacaaccccagcctgaagtccagagtgaccatcagcgtggacaccagccggaaccagttctccctgaagctgtctagcgtgacagccgccgataccgccgtgtactactgcaccagagaggacagcagcaactggcggagtagaggccagggaacactggtcacagttagctctggatccggcggaggcggaagtggaggcggaggatctggcggcggaggctctttcgaacaagtgaagctgcaacagagcggacccgagctggttaagccaggcgcttccgtgaagattagctgcaaggccagcggctacagcttcaccggctactacatgcactgggtcaagcagagccacggcaacatcctggactggatcggctacatctacccctacaacggcgtgtccagctacaaccagaagttcaagggcaaagccactctgaccgtggacaagagcagcagcaccgcctacatggaactgagaagcctgaccagcgaggacagcgccgtgtactattgtgccagagagcggggcctgtaccagctcagagcaatggattattggggccagggcaccagcgtgaccgtttcttctacgcgtatccagaaccctgatcctgccgtgtaccagctgcgggatagcaagagcagcgacaagagcgtgtgtctgttcaccgacttcgacagccagaccaacgtgtcccagagcaaggactccgacgtgtacatcaccgataagtgcgtgctggacatgcggagcatggacttcaagagcaactccgccgtggcctggtccaacaagtccgatttcgcctgcgccaacgccttcaacaacagcattatccccgaggacacattcttcccaagccccgagagcagcgactccaccgaccacgtgaagcccaaagagacagagaacaccaagcagcccagcaagagctgccacaagcccaaggccatcgtgcacaccgagaaagtgaacatgatgagcctgaccgtgctgggcctgcggatgctgttcgccaaaaccgtggccgtgaacttcctgctgaccgccaagctgttcttcctcctcaccgcc

SEQ ID NO: 6766 - DNA, 2964 bp, synthetic construct
  source 1..2964: mol_type = other DNA
atggccttaccagtgaccgccttgctcctgccgctggccttgctgctccacgccgccaggccggaagtgcagctggttgaatctggcggaggactggttcagcctggcggatctctgagactgtcttgtgccgccagcggcttcagcttcagcgacttttggatgagctgggtccgacaggcccctggcaaaggacttgaatgggtcgccacaatcagccaggccggcagcgagaaggactacgtggactctgtgaagggcagattcaccatcagccgggacaacgccaagaagtccctgtacctccagatgaacagcctgagagccgaggacaccgccgtgtactattgtgcctctggcgtgtacagcttcgactacagaggccagggcaccctggtcacagtctcttctggtaccggcggaggcggatctggcggcggaggtagcggtggcggaggatctgaattcgacatcgtgatgacacagacccctgccatcatgagcgcctctccaggccagaaagtgaccatcacatgtagcgccagcagcagcgtgaactacatgcactggtatcagcagaagctgggcagcagccccaagctgtggatctacgataccagcaaactggcccctggcgtgccagccagattttctggttctggcagcggcaccagctacagcctgacaatcagcagcatggaagccgaggatgccgccagctacttctgccatcagtggtctagctacccctacacctttggctccggcaccaagctggaaatcaaactcgaggacctgaagaacgtgttcccacctgaggtggccgtgttcgagcctagcgaggccgagatcagccacacccagaaagccaccctcgtgtgcctggctaccggcttctaccccgaccatgtggaactgtcttggtgggtcaacggcaaagaggtgcacagcggcgtgtgtaccgacccccagccactgaaagaacagcccgccctgaacgacagccggtactgcctgagcagcagactgagagtgtccgccaccttctggcagaacccccggaaccacttcagatgccaggtgcagttctacggcctgagcgagaacgacgagtggacccaggacagagccaagcccgtgacccagatcgtgtctgccgaagcctggggcagagccgatgatgtgattaagatccactggcaggaaaagaagtccaacaccatcctgggcagccaggaaggcaacaccatgaagaccaacgacacctacatgaagttcagctggctgaccgtgcccgagaagtccctggacaaagaacacagatgcatcgtgcggcacgaaaacaacaagaacggcgtggaccaggaaatcatcttcccacccatcaagaccgatgtgattacaatggaccccaaggacaactgctccaaggacgccaacgataccctgctgctccagctgaccaacaccagcgcctactacatgtacttgttgctgctgctgaagtccgtggtgtacttcgccatcatcacatgctgcctgctgatggctatggtcaagcggaaggacagccggggaagggccaagcgatctggatctggagcaacaaacttctcactactcaaacaagcaggtgacgtggaggagaatcccgggcctactagtatggactggatttggcgcatccttttccttgtcggcgctgctaccggcgcgcattccgggccccagctccagctgcaagagtctggacctggcctggtcaagcctagcgagacactgagcctgacctgtaccgtgtccggcgatagcatcagcagcggcgattactactggggctggatcagacagcctcctggcaaaggactggaatggatcggccacatctactacagcggcgtgacctactacaaccccagcctgaagtccagagtgaccatcagcgtggacaccagccggaaccagttctccctgaagctgtctagcgtgacagccgccgataccgccgtgtactactgcaccagagaggacagcagcaactggcggagtagaggccagggaacactggtcacagttagctctggatccggcggaggcggaagtggaggcggaggatctggcggcggaggctctttcgaagaagttcagctccaagagtctggccccgacctggtcaagcctagccaaagcctgagcctgacctgtaccgtgaccggctacagcatcacaagcggctatggatggcactggatcagacagttccccggcaacaaactggaatggatgggctacatccactacagcggcagcaccacctacaatcccagcctgaagtcccggatcagcatcagcagagacaccagcaagaaccagttcttcctgcaactgaacagcgtgaccaccgaggacaccgccacctactattgtgctcggagcctgagatattggggccagggcacaaccctgaccgtgtcatctacgcgtatccagaaccctgatcctgccgtgtaccagctgcgggatagcaagagcagcgacaagagcgtgtgtctgttcaccgacttcgacagccagaccaacgtgtcccagagcaaggactccgacgtgtacatcaccgataagtgcgtgctggacatgcggagcatggacttcaagagcaactccgccgtggcctggtccaacaagtccgatttcgcctgcgccaacgccttcaacaacagcattatccccgaggacacattcttcccaagccccgagagcagcgactccaccgaccacgtgaagcccaaagagacagagaacaccaagcagcccagcaagagctgccacaagcccaaggccatcgtgcacaccgagaaagtgaacatgatgagcctgaccgtgctgggcctgcggatgctgttcgccaaaaccgtggccgtgaacttcctgctgaccgccaagctgttcttcctcctcaccgcc

SEQ ID NO: 6767 - DNA, 2973 bp, synthetic construct
  source 1..2973: mol_type = other DNA
atggccttaccagtgaccgccttgctcctgccgctggccttgctgctccacgccgccaggccggaagtgcagctggttgaatctggcggaggactggttcagcctggcggatctctgagactgtcttgtgccgccagcggcttcagcttcagcgacttttggatgagctgggtccgacaggcccctggcaaaggacttgaatgggtcgccacaatcagccaggccggcagcgagaaggactacgtggactctgtgaagggcagattcaccatcagccgggacaacgccaagaagtccctgtacctccagatgaacagcctgagagccgaggacaccgccgtgtactattgtgcctctggcgtgtacagcttcgactacagaggccagggcaccctggtcacagtctcttctggtaccggcggaggcggatctggcggcggaggtagcggtggcggaggatctgaattcgacatccagatgacacagagccctagcagcctgtctgccagcgtgggagacagagtgaccatcacctgtagcgccaccagcagcatcagctacatgcactggtatcagcagaagcccggcaaggcccctaaaggctggatctacgataccagcaaactggcccacggcgtgcccagcagattttctggttctggcagcggcaccgacttcaccctgacaatatctagcctccagcctgaggacttcgccacctactactgccaccagagaagaagctaccccttcaccttcggccagggcaccaaggtggaaatcaaactcgaggacctgaagaacgtgttcccacctgaggtggccgtgttcgagcctagcgaggccgagatcagccacacccagaaagccaccctcgtgtgcctggctaccggcttctaccccgaccatgtggaactgtcttggtgggtcaacggcaaagaggtgcacagcggcgtgtgtaccgacccccagccactgaaagaacagcccgccctgaacgacagccggtactgcctgagcagcagactgagagtgtccgccaccttctggcagaacccccggaaccacttcagatgccaggtgcagttctacggcctgagcgagaacgacgagtggacccaggacagagccaagcccgtgacccagatcgtgtctgccgaagcctggggcagagccgatgatgtgattaagatccactggcaggaaaagaagtccaacaccatcctgggcagccaggaaggcaacaccatgaagaccaacgacacctacatgaagttcagctggctgaccgtgcccgagaagtccctggacaaagaacacagatgcatcgtgcggcacgaaaacaacaagaacggcgtggaccaggaaatcatcttcccacccatcaagaccgatgtgattacaatggaccccaaggacaactgctccaaggacgccaacgataccctgctgctccagctgaccaacaccagcgcctactacatgtacttgttgctgctgctgaagtccgtggtgtacttcgccatcatcacatgctgcctgctgatggctatggtcaagcggaaggacagccggggaagggccaagcgatctggatctggagcaacaaacttctcactactcaaacaagcaggtgacgtggaggagaatcccgggcctactagtatggactggatttggcgcatccttttccttgtcggcgctgctaccggcgcgcattccgggccccagctccagctgcaagagtctggacctggcctggtcaagcctagcgagacactgagcctgacctgtaccgtgtccggcgatagcatcagcagcggcgattactactggggctggatcagacagcctcctggcaaaggactggaatggatcggccacatctactacagcggcgtgacctactacaaccccagcctgaagtccagagtgaccatcagcgtggacaccagccggaaccagttctccctgaagctgtctagcgtgacagccgccgataccgccgtgtactactgcaccagagaggacagcagcaactggcggagtagaggccagggaacactggtcacagttagctctggatccggcggaggcggaagtggaggcggaggatctggcggcggaggctctttcgaagaagtgcaactggttcagagcggagccgaagtgaagaaacctggggcctctgtgaaggtgtcctgcaaggcttccggctacacctttaccaatttctggattcactgggtccgacaggctccaggccaaggactggaatggatcggagagatcgaccccagcgacagctacaccaactacaaccagaaattcaaaggccgggtcaccatcaccagagacaccagcacaagcaccgcctacctggaactgagcagcctgagaagcgaggacaccgccgtgtactactgcgccagggaaatcaccaccgtggattattggggccagggaaccctggtcaccgtgtcatctacgcgtatccagaaccctgatcctgccgtgtaccagctgcgggatagcaagagcagcgacaagagcgtgtgtctgttcaccgacttcgacagccagaccaacgtgtcccagagcaaggactccgacgtgtacatcaccgataagtgcgtgctggacatgcggagcatggacttcaagagcaactccgccgtggcctggtccaacaagtccgatttcgcctgcgccaacgccttcaacaacagcattatccccgaggacacattcttcccaagccccgagagcagcgactccaccgaccacgtgaagcccaaagagacagagaacaccaagcagcccagcaagagctgccacaagcccaaggccatcgtgcacaccgagaaagtgaacatgatgagcctgaccgtgctgggcctgcggatgctgttcgccaaaaccgtggccgtgaacttcctgctgaccgccaagctgttcttcctcctcaccgcc

SEQ ID NO: 6768 - DNA, 2994 bp, synthetic construct
  source 1..2994: mol_type = other DNA
atggccttaccagtgaccgccttgctcctgccgctggccttgctgctccacgccgccaggccggaagtgcagctggttgaatctggcggaggactggttcagcctggcggatctctgagactgtcttgtgccgccagcggcttcagcttcagcgacttttggatgagctgggtccgacaggcccctggcaaaggacttgaatgggtcgccacaatcagccaggccggcagcgagaaggactacgtggactctgtgaagggcagattcaccatcagccgggacaacgccaagaagtccctgtacctccagatgaacagcctgagagccgaggacaccgccgtgtactattgtgcctctggcgtgtacagcttcgactacagaggccagggcaccctggtcacagtctcttctggtaccggcggaggcggatctggcggcggaggtagcggtggcggaggatctgaattcgacatccagatgacacagagccctagcagcctgtctgccagcgtgggagacagagtgaccatcacatgcaaggccagccagggcttcaacaaatacgtggcctggtatcagcagaagcccggcaaggctcctaagctgctgatctactacaccagcacactccagcctggcgtgcccagcagattttctggctctggcagcggcagagactacaccctgacaatatccagcctccagccagaggacttcgccacctactactgtctccagtacggcaacctgctgtacgcctttggacagggcaccaaggtggaaatcaagagactcgaggacctgaagaacgtgttcccacctgaggtggccgtgttcgagcctagcgaggccgagatcagccacacccagaaagccaccctcgtgtgcctggctaccggcttctaccccgaccatgtggaactgtcttggtgggtcaacggcaaagaggtgcacagcggcgtgtgtaccgacccccagccactgaaagaacagcccgccctgaacgacagccggtactgcctgagcagcagactgagagtgtccgccaccttctggcagaacccccggaaccacttcagatgccaggtgcagttctacggcctgagcgagaacgacgagtggacccaggacagagccaagcccgtgacccagatcgtgtctgccgaagcctggggcagagccgatgatgtgattaagatccactggcaggaaaagaagtccaacaccatcctgggcagccaggaaggcaacaccatgaagaccaacgacacctacatgaagttcagctggctgaccgtgcccgagaagtccctggacaaagaacacagatgcatcgtgcggcacgaaaacaacaagaacggcgtggaccaggaaatcatcttcccacccatcaagaccgatgtgattacaatggaccccaaggacaactgctccaaggacgccaacgataccctgctgctccagctgaccaacaccagcgcctactacatgtacttgttgctgctgctgaagtccgtggtgtacttcgccatcatcacatgctgcctgctgatggctatggtcaagcggaaggacagccggggaagggccaagcgatctggatctggagcaacaaacttctcactactcaaacaagcaggtgacgtggaggagaatcccgggcctactagtatggactggatttggcgcatccttttccttgtcggcgctgctaccggcgcgcattccgggccccagctccagctgcaagagtctggacctggcctggtcaagcctagcgagacactgagcctgacctgtaccgtgtccggcgatagcatcagcagcggcgattactactggggctggatcagacagcctcctggcaaaggactggaatggatcggccacatctactacagcggcgtgacctactacaaccccagcctgaagtccagagtgaccatcagcgtggacaccagccggaaccagttctccctgaagctgtctagcgtgacagccgccgataccgccgtgtactactgcaccagagaggacagcagcaactggcggagtagaggccagggaacactggtcacagttagctctggatccggcggaggcggaagtggaggcggaggatctggcggcggaggctctttcgaagaagttcagcttgtgcagagcggagccgaagtgaagaaacctggggcctctgtgaaggtgtcctgcaaagccagcggctacacctttaccagctactggatcggctgggtccgacaggctcctggacaaggactggaatggatcggcgacatctatcccggcggaggctacaccaactacaacgagaagttcaagggccgcgtgacaatcaccagagacacctctacaagcaccgcctacctggaactgagcagcctgagaagcgaggacaccgccgtgtactactgcgccagactggatggcagcagctacagaggcgctatggattcttggggccagggcacactggtcaccgtttcttctacgcgtatccagaaccctgatcctgccgtgtaccagctgcgggatagcaagagcagcgacaagagcgtgtgtctgttcaccgacttcgacagccagaccaacgtgtcccagagcaaggactccgacgtgtacatcaccgataagtgcgtgctggacatgcggagcatggacttcaagagcaactccgccgtggcctggtccaacaagtccgatttcgcctgcgccaacgccttcaacaacagcattatccccgaggacacattcttcccaagccccgagagcagcgactccaccgaccacgtgaagcccaaagagacagagaacaccaagcagcccagcaagagctgccacaagcccaaggccatcgtgcacaccgagaaagtgaacatgatgagcctgaccgtgctgggcctgcggatgctgttcgccaaaaccgtggccgtgaacttcctgctgaccgccaagctgttcttcctcctcaccgcc

SEQ ID NO: 6769 - DNA, 2982 bp, synthetic construct
  source 1..2982: mol_type = other DNA
atggccttaccagtgaccgccttgctcctgccgctggccttgctgctccacgccgccaggccggaagtgcagctggttgaatctggcggaggactggttcagcctggcggatctctgagactgtcttgtgccgccagcggcttcagcttcagcgacttttggatgagctgggtccgacaggcccctggcaaaggacttgaatgggtcgccacaatcagccaggccggcagcgagaaggactacgtggactctgtgaagggcagattcaccatcagccgggacaacgccaagaagtccctgtacctccagatgaacagcctgagagccgaggacaccgccgtgtactattgtgcctctggcgtgtacagcttcgactacagaggccagggcaccctggtcacagtctcttctggtaccggcggaggcggatctggcggcggaggtagcggtggcggaggatctgaattcgacatccagatgacacagagccctagcagcctgtctgccagcgtgggagacagagtgaccatcacctgtagagccagccaggacatccggtactacctgaactggtatcagcagaagcccggcaaggcccctaagctgctgatctatgtggcctccagcctccagagcggagtgccttctagattttctggcagcggctccggcaccgagtttaccctgacagtgtctagcttgcagcccgaggacttcgccacctactactgcctgcaagtgtacagcacccctcggacctttggacagggcaccaaggtggaaatcaaactcgaggacctgaagaacgtgttcccacctgaggtggccgtgttcgagcctagcgaggccgagatcagccacacccagaaagccaccctcgtgtgcctggctaccggcttctaccccgaccatgtggaactgtcttggtgggtcaacggcaaagaggtgcacagcggcgtgtgtaccgacccccagccactgaaagaacagcccgccctgaacgacagccggtactgcctgagcagcagactgagagtgtccgccaccttctggcagaacccccggaaccacttcagatgccaggtgcagttctacggcctgagcgagaacgacgagtggacccaggacagagccaagcccgtgacccagatcgtgtctgccgaagcctggggcagagccgatgatgtgattaagatccactggcaggaaaagaagtccaacaccatcctgggcagccaggaaggcaacaccatgaagaccaacgacacctacatgaagttcagctggctgaccgtgcccgagaagtccctggacaaagaacacagatgcatcgtgcggcacgaaaacaacaagaacggcgtggaccaggaaatcatcttcccacccatcaagaccgatgtgattacaatggaccccaaggacaactgctccaaggacgccaacgataccctgctgctccagctgaccaacaccagcgcctactacatgtacttgttgctgctgctgaagtccgtggtgtacttcgccatcatcacatgctgcctgctgatggctatggtcaagcggaaggacagccggggaagggccaagcgatctggatctggagcaacaaacttctcactactcaaacaagcaggtgacgtggaggagaatcccgggcctactagtatggactggatttggcgcatccttttccttgtcggcgctgctaccggcgcgcattccgggccccagctccagctgcaagagtctggacctggcctggtcaagcctagcgagacactgagcctgacctgtaccgtgtccggcgatagcatcagcagcggcgattactactggggctggatcagacagcctcctggcaaaggactggaatggatcggccacatctactacagcggcgtgacctactacaaccccagcctgaagtccagagtgaccatcagcgtggacaccagccggaaccagttctccctgaagctgtctagcgtgacagccgccgataccgccgtgtactactgcaccagagaggacagcagcaactggcggagtagaggccagggaacactggtcacagttagctctggatccggcggaggcggaagtggaggcggaggatctggcggcggaggctctttcgaagaagtgcagcttgttgaatctggcggcggactggctaagcctggcggatctctgagactgtcttgtgccgccagcggcttccggttcaccttcaacaactactacatggactgggtccgacaggcccctggacaaggacttgaatgggtgtccagaatcagcagcagcggcgaccctacttggtacgccgattctgtgaagggcagattcaccatcagcagagagaacgccaagaacaccctgttcctccagatgaactccctgagagccgaggacaccgccgtgtactattgtgcctctctgaccaccggcagcgattcttggggacagggcgtgctggttaccgtgtcatctacgcgtatccagaaccctgatcctgccgtgtaccagctgcgggatagcaagagcagcgacaagagcgtgtgtctgttcaccgacttcgacagccagaccaacgtgtcccagagcaaggactccgacgtgtacatcaccgataagtgcgtgctggacatgcggagcatggacttcaagagcaactccgccgtggcctggtccaacaagtccgatttcgcctgcgccaacgccttcaacaacagcattatccccgaggacacattcttcccaagccccgagagcagcgactccaccgaccacgtgaagcccaaagagacagagaacaccaagcagcccagcaagagctgccacaagcccaaggccatcgtgcacaccgagaaagtgaacatgatgagcctgaccgtgctgggcctgcggatgctgttcgccaaaaccgtggccgtgaacttcctgctgaccgccaagctgttcttcctcctcaccgcc

SEQ ID NO: 6770 - DNA, 2985 bp, synthetic construct
  source 1..2985: mol_type = other DNA
atggccttaccagtgaccgccttgctcctgccgctggccttgctgctccacgccgccaggccggaagtgcagctggttgaatctggcggaggactggttcagcctggcggatctctgagactgtcttgtgccgccagcggcttcagcttcagcgacttttggatgagctgggtccgacaggcccctggcaaaggacttgaatgggtcgccacaatcagccaggccggcagcgagaaggactacgtggactctgtgaagggcagattcaccatcagccgggacaacgccaagaagtccctgtacctccagatgaacagcctgagagccgaggacaccgccgtgtactattgtgcctctggcgtgtacagcttcgactacagaggccagggcaccctggtcacagtctcttctggtaccggcggaggcggatctggcggcggaggtagcggtggcggaggatctgaattcgagatcgtgatgacacagagccccgccacactgagtgtgtctccaggcgaaagagccacactgtcctgtagagccagccagagcgtgtccagaaacctggcctggtatcagcagaagcctggacaggctccccggctgttgatctacggcgcttctacaagagccaccggcattcccgccagattttctggctctggcagcggcaccgagttcaccctgacaatcggaagcctccagagcgaggacttcgccgtgtactactgccagcagtacaagacctggcctcggacctttggacagggcaccaacgtggaaatcaaactcgaggacctgaagaacgtgttcccacctgaggtggccgtgttcgagcctagcgaggccgagatcagccacacccagaaagccaccctcgtgtgcctggctaccggcttctaccccgaccatgtggaactgtcttggtgggtcaacggcaaagaggtgcacagcggcgtgtgtaccgacccccagccactgaaagaacagcccgccctgaacgacagccggtactgcctgagcagcagactgagagtgtccgccaccttctggcagaacccccggaaccacttcagatgccaggtgcagttctacggcctgagcgagaacgacgagtggacccaggacagagccaagcccgtgacccagatcgtgtctgccgaagcctggggcagagccgatgatgtgattaagatccactggcaggaaaagaagtccaacaccatcctgggcagccaggaaggcaacaccatgaagaccaacgacacctacatgaagttcagctggctgaccgtgcccgagaagtccctggacaaagaacacagatgcatcgtgcggcacgaaaacaacaagaacggcgtggaccaggaaatcatcttcccacccatcaagaccgatgtgattacaatggaccccaaggacaactgctccaaggacgccaacgataccctgctgctccagctgaccaacaccagcgcctactacatgtacttgttgctgctgctgaagtccgtggtgtacttcgccatcatcacatgctgcctgctgatggctatggtcaagcggaaggacagccggggaagggccaagcgatctggatctggagcaacaaacttctcactactcaaacaagcaggtgacgtggaggagaatcccgggcctactagtatggactggatttggcgcatccttttccttgtcggcgctgctaccggcgcgcattccgggccccagctccagctgcaagagtctggacctggcctggtcaagcctagcgagacactgagcctgacctgtaccgtgtccggcgatagcatcagcagcggcgattactactggggctggatcagacagcctcctggcaaaggactggaatggatcggccacatctactacagcggcgtgacctactacaaccccagcctgaagtccagagtgaccatcagcgtggacaccagccggaaccagttctccctgaagctgtctagcgtgacagccgccgataccgccgtgtactactgcaccagagaggacagcagcaactggcggagtagaggccagggaacactggtcacagttagctctggatccggcggaggcggaagtggaggcggaggatctggcggcggaggctctttcgaacaagttcagctgcaacaatggggagccggcctgctgaagcctagcgaaacactgtctctgacctgcgccgtgttcggcggctctttcagcggctactactggtcctggatcagacagcctcctggcaaaggactggaatggatcggcgagatcaaccaccggggcaacaccaacgacaaccccagcctgaaaagcagagtgaccatcagcgtggacaccagcaagaaccagttcgccctgaagctgagcagcgtgacagccgctgataccgccgtgtattattgcgccagagagcggggctacacctacggcaatttcgatcactggggccagggcaccctggtcacagtttcttctacgcgtatccagaaccctgatcctgccgtgtaccagctgcgggatagcaagagcagcgacaagagcgtgtgtctgttcaccgacttcgacagccagaccaacgtgtcccagagcaaggactccgacgtgtacatcaccgataagtgcgtgctggacatgcggagcatggacttcaagagcaactccgccgtggcctggtccaacaagtccgatttcgcctgcgccaacgccttcaacaacagcattatccccgaggacacattcttcccaagccccgagagcagcgactccaccgaccacgtgaagcccaaagagacagagaacaccaagcagcccagcaagagctgccacaagcccaaggccatcgtgcacaccgagaaagtgaacatgatgagcctgaccgtgctgggcctgcggatgctgttcgccaaaaccgtggccgtgaacttcctgctgaccgccaagctgttcttcctcctcaccgcc

SEQ ID NO: 6771 - DNA, 2988 bp, synthetic construct
  source 1..2988: mol_type = other DNA
atggccttaccagtgaccgccttgctcctgccgctggccttgctgctccacgccgccaggccggaagtgcagctggttgaatctggcggaggactggttcagcctggcggatctctgagactgtcttgtgccgccagcggcttcagcttcagcgacttttggatgagctgggtccgacaggcccctggcaaaggacttgaatgggtcgccacaatcagccaggccggcagcgagaaggactacgtggactctgtgaagggcagattcaccatcagccgggacaacgccaagaagtccctgtacctccagatgaacagcctgagagccgaggacaccgccgtgtactattgtgcctctggcgtgtacagcttcgactacagaggccagggcaccctggtcacagtctcttctggtaccggcggaggcggatctggcggcggaggtagcggtggcggaggatctgaattcgagatcgtgatgacccctagcagcgccacactgagtgtgtctccaggcgaaagagccacactgtcctgtagagccagccagagcgtgtccagaaacctggcctggtatcagcagaagcctggacaggctccccggctgttgatctacggcgcttctacaagagccaccggcattcccgccagattttctggctctggcagcggcaccgagttcaccctgacaatctctagcctccagagcgaggacttcgccgtgtactactgccaccagtacagcaactggatgtgcagcttcggccagggcaccaagctggaaatcaaactcgaggacctgaagaacgtgttcccacctgaggtggccgtgttcgagcctagcgaggccgagatcagccacacccagaaagccaccctcgtgtgcctggctaccggcttctaccccgaccatgtggaactgtcttggtgggtcaacggcaaagaggtgcacagcggcgtgtgtaccgacccccagccactgaaagaacagcccgccctgaacgacagccggtactgcctgagcagcagactgagagtgtccgccaccttctggcagaacccccggaaccacttcagatgccaggtgcagttctacggcctgagcgagaacgacgagtggacccaggacagagccaagcccgtgacccagatcgtgtctgccgaagcctggggcagagccgatgatgtgattaagatccactggcaggaaaagaagtccaacaccatcctgggcagccaggaaggcaacaccatgaagaccaacgacacctacatgaagttcagctggctgaccgtgcccgagaagtccctggacaaagaacacagatgcatcgtgcggcacgaaaacaacaagaacggcgtggaccaggaaatcatcttcccacccatcaagaccgatgtgattacaatggaccccaaggacaactgctccaaggacgccaacgataccctgctgctccagctgaccaacaccagcgcctactacatgtacttgttgctgctgctgaagtccgtggtgtacttcgccatcatcacatgctgcctgctgatggctatggtcaagcggaaggacagccggggaagggccaagcgatctggatctggagcaacaaacttctcactactcaaacaagcaggtgacgtggaggagaatcccgggcctactagtatggactggatttggcgcatccttttccttgtcggcgctgctaccggcgcgcattccgggccccagctccagctgcaagagtctggacctggcctggtcaagcctagcgagacactgagcctgacctgtaccgtgtccggcgatagcatcagcagcggcgattactactggggctggatcagacagcctcctggcaaaggactggaatggatcggccacatctactacagcggcgtgacctactacaaccccagcctgaagtccagagtgaccatcagcgtggacaccagccggaaccagttctccctgaagctgtctagcgtgacagccgccgataccgccgtgtactactgcaccagagaggacagcagcaactggcggagtagaggccagggaacactggtcacagttagctctggatccggcggaggcggaagtggaggcggaggatctggcggcggaggctctttcgaagaagttcagctccttgagtcaggtggcggcctggttcaacctggcggatctctgagactgagctgtgccgccagcggcttcacctttagcagatacgccatgaactgggtccgacaggcccctggcaaaggactggaatgggtgtccggcatctctggaagcggcggcagaacctactacgccgattctgtgaagggcagattcaccatcagccgggacaacagcaagaacaccctgtacctccagatgaacagcctgagagccgaggacacagccgtgtattattgcgccaaggaccgggacttttggagcggcccttttgactattggggccagggaaccctggtcaccgttagctctacgcgtatccagaaccctgatcctgccgtgtaccagctgcgggatagcaagagcagcgacaagagcgtgtgtctgttcaccgacttcgacagccagaccaacgtgtcccagagcaaggactccgacgtgtacatcaccgataagtgcgtgctggacatgcggagcatggacttcaagagcaactccgccgtggcctggtccaacaagtccgatttcgcctgcgccaacgccttcaacaacagcattatccccgaggacacattcttcccaagccccgagagcagcgactccaccgaccacgtgaagcccaaagagacagagaacaccaagcagcccagcaagagctgccacaagcccaaggccatcgtgcacaccgagaaagtgaacatgatgagcctgaccgtgctgggcctgcggatgctgttcgccaaaaccgtggccgtgaacttcctgctgaccgccaagctgttcttcctcctcaccgcc

SEQ ID NO: 6772 - DNA, 3003 bp, synthetic construct
  source 1..3003: mol_type = other DNA
atggccttaccagtgaccgccttgctcctgccgctggccttgctgctccacgccgccaggccggaagtgcagctggttgaatctggcggaggactggttcagcctggcggatctctgagactgtcttgtgccgccagcggcttcagcttcagcgacttttggatgagctgggtccgacaggcccctggcaaaggacttgaatgggtcgccacaatcagccaggccggcagcgagaaggactacgtggactctgtgaagggcagattcaccatcagccgggacaacgccaagaagtccctgtacctccagatgaacagcctgagagccgaggacaccgccgtgtactattgtgcctctggcgtgtacagcttcgactacagaggccagggcaccctggtcacagtctcttctggtaccggcggaggcggatctggcggcggaggtagcggtggcggaggatctgaattcgacatccagatgacccagagccccagcagcctgtctgccagcgtgggcgacagagtgaccatcacatgcaaggccagcaagaacatcagaagctacctggcctggtatcagcagaagcccggcaaggcccccaagctgctgatctacagcggcagcacactgcacagcggcgtgcccagcagattttccggctctggcagcggcaccgacttcaccctgaccatctctagcctccagcccgaggacttcgccacctactactgccagcagcaccacgagtaccccctgacattcggccagggcaccaaggtggaaatcaagagactcgaggacctgaagaacgtgttcccacctgaggtggccgtgttcgagcctagcgaggccgagatcagccacacccagaaagccaccctcgtgtgcctggctaccggcttctaccccgaccatgtggaactgtcttggtgggtcaacggcaaagaggtgcacagcggcgtgtgtaccgacccccagccactgaaagaacagcccgccctgaacgacagccggtactgcctgagcagcagactgagagtgtccgccaccttctggcagaacccccggaaccacttcagatgccaggtgcagttctacggcctgagcgagaacgacgagtggacccaggacagagccaagcccgtgacccagatcgtgtctgccgaagcctggggcagagccgatgatgtgattaagatccactggcaggaaaagaagtccaacaccatcctgggcagccaggaaggcaacaccatgaagaccaacgacacctacatgaagttcagctggctgaccgtgcccgagaagtccctggacaaagaacacagatgcatcgtgcggcacgaaaacaacaagaacggcgtggaccaggaaatcatcttcccacccatcaagaccgatgtgattacaatggaccccaaggacaactgctccaaggacgccaacgataccctgctgctccagctgaccaacaccagcgcctactacatgtacttgttgctgctgctgaagtccgtggtgtacttcgccatcatcacatgctgcctgctgatggctatggtcaagcggaaggacagccggggaagggccaagcgatctggatctggagcaacaaacttctcactactcaaacaagcaggtgacgtggaggagaatcccgggcctactagtatggactggatttggcgcatccttttccttgtcggcgctgctaccggcgcgcattccgggccccagctccagctgcaagagtctggacctggcctggtcaagcctagcgagacactgagcctgacctgtaccgtgtccggcgatagcatcagcagcggcgattactactggggctggatcagacagcctcctggcaaaggactggaatggatcggccacatctactacagcggcgtgacctactacaaccccagcctgaagtccagagtgaccatcagcgtggacaccagccggaaccagttctccctgaagctgtctagcgtgacagccgccgataccgccgtgtactactgcaccagagaggacagcagcaactggcggagtagaggccagggaacactggtcacagttagctctggatccggcggaggcggaagtggaggcggaggatctggcggcggaggctctttcgaacaggtgcaactccaggaatctggccccggactcgtgaagcccagcgagacactgagcctgacctgtaccgtgtccggctacaccatcaccagcggctacgactggtcctggatcagacagcctcctggcaagggcctggaatggatcggctacatcaactacggcggctccaccaactacaagcccagcctgggaagccgcgtgacaatcagcgtggacacctccaagaaccagttcagcctgaagctgagcagcgtgacagccgccgataccgccgtgtactactgcgcccggtacaacgagtacaagagctacatctacgattggtacttcgacttctggggccagggaaccctcgtgaccgtgtctagtacgcgtatccagaaccctgatcctgccgtgtaccagctgcgggatagcaagagcagcgacaagagcgtgtgtctgttcaccgacttcgacagccagaccaacgtgtcccagagcaaggactccgacgtgtacatcaccgataagtgcgtgctggacatgcggagcatggacttcaagagcaactccgccgtggcctggtccaacaagtccgatttcgcctgcgccaacgccttcaacaacagcattatccccgaggacacattcttcccaagccccgagagcagcgactccaccgaccacgtgaagcccaaagagacagagaacaccaagcagcccagcaagagctgccacaagcccaaggccatcgtgcacaccgagaaagtgaacatgatgagcctgaccgtgctgggcctgcggatgctgttcgccaaaaccgtggccgtgaacttcctgctgaccgccaagctgttcttcctcctcaccgcc

SEQ ID NO: 6773 - DNA, 3009 bp, synthetic construct
  source 1..3009: mol_type = other DNA
atggccttaccagtgaccgccttgctcctgccgctggccttgctgctccacgccgccaggccggaagtgcagctggttgaatctggcggaggactggttcagcctggcggatctctgagactgtcttgtgccgccagcggcttcagcttcagcgacttttggatgagctgggtccgacaggcccctggcaaaggacttgaatgggtcgccacaatcagccaggccggcagcgagaaggactacgtggactctgtgaagggcagattcaccatcagccgggacaacgccaagaagtccctgtacctccagatgaacagcctgagagccgaggacaccgccgtgtactattgtgcctctggcgtgtacagcttcgactacagaggccagggcaccctggtcacagtctcttctggtaccggcggaggcggatctggcggcggaggtagcggtggcggaggatctgaattccagtctgtggtcacacagcctccatccgtgtctgctgcccctggacagaaagtgaccatctcctgtagcggcagcagcagcaacatcggcaacaactacgtgtcctggtatcagcagctccccggcacagctcccaaactgctgatctacgacaacaacaagcggcccagcggcatccccgatagattttctggcagcaagagcggcaccagcgccacactgggaattaccggacttcagacaggcgacgaggccgactactactgtggcacatgggatggcagcctgtacaccatgcttttcggcggaggcaccaagctgacagtgcttctcgaggacctgaagaacgtgttcccacctgaggtggccgtgttcgagcctagcgaggccgagatcagccacacccagaaagccaccctcgtgtgcctggctaccggcttctaccccgaccatgtggaactgtcttggtgggtcaacggcaaagaggtgcacagcggcgtgtgtaccgacccccagccactgaaagaacagcccgccctgaacgacagccggtactgcctgagcagcagactgagagtgtccgccaccttctggcagaacccccggaaccacttcagatgccaggtgcagttctacggcctgagcgagaacgacgagtggacccaggacagagccaagcccgtgacccagatcgtgtctgccgaagcctggggcagagccgatgatgtgattaagatccactggcaggaaaagaagtccaacaccatcctgggcagccaggaaggcaacaccatgaagaccaacgacacctacatgaagttcagctggctgaccgtgcccgagaagtccctggacaaagaacacagatgcatcgtgcggcacgaaaacaacaagaacggcgtggaccaggaaatcatcttcccacccatcaagaccgatgtgattacaatggaccccaaggacaactgctccaaggacgccaacgataccctgctgctccagctgaccaacaccagcgcctactacatgtacttgttgctgctgctgaagtccgtggtgtacttcgccatcatcacatgctgcctgctgatggctatggtcaagcggaaggacagccggggaagggccaagcgatctggatctggagcaacaaacttctcactactcaaacaagcaggtgacgtggaggagaatcccgggcctactagtatggactggatttggcgcatccttttccttgtcggcgctgctaccggcgcgcattccgggccccagctccagctgcaagagtctggacctggcctggtcaagcctagcgagacactgagcctgacctgtaccgtgtccggcgatagcatcagcagcggcgattactactggggctggatcagacagcctcctggcaaaggactggaatggatcggccacatctactacagcggcgtgacctactacaaccccagcctgaagtccagagtgaccatcagcgtggacaccagccggaaccagttctccctgaagctgtctagcgtgacagccgccgataccgccgtgtactactgcaccagagaggacagcagcaactggcggagtagaggccagggaacactggtcacagttagctctggatccggcggaggcggaagtggaggcggaggatctggcggcggaggctctttcgaagaagtgcaactggtggaatctggcggcggactggttaagcctggcggatctctgagactgtcttgtgccgccagcggcttcaccttcagcaatgcctggatgagctgggttcgacaggcccctggaaaaggactggaatgggtcggattcatccggtccaaagcctacggcggcaccacagaatatgccgcctctgtgaagggcagattcaccatcagccgggacgacagcaagtctatcgcctacctccagatgaacaacctgaaaaccgaggacaccgccgtgtactactgcgccagagatggcctgtacagcagctcttggtacgacagcgattactggggccagggcacactggtcacagtgtcatctacgcgtatccagaaccctgatcctgccgtgtaccagctgcgggatagcaagagcagcgacaagagcgtgtgtctgttcaccgacttcgacagccagaccaacgtgtcccagagcaaggactccgacgtgtacatcaccgataagtgcgtgctggacatgcggagcatggacttcaagagcaactccgccgtggcctggtccaacaagtccgatttcgcctgcgccaacgccttcaacaacagcattatccccgaggacacattcttcccaagccccgagagcagcgactccaccgaccacgtgaagcccaaagagacagagaacaccaagcagcccagcaagagctgccacaagcccaaggccatcgtgcacaccgagaaagtgaacatgatgagcctgaccgtgctgggcctgcggatgctgttcgccaaaaccgtggccgtgaacttcctgctgaccgccaagctgttcttcctcctcaccgcc

SEQ ID NO: 6774 - DNA, 3024 bp, synthetic construct
  source 1..3024: mol_type = other DNA
atggccttaccagtgaccgccttgctcctgccgctggccttgctgctccacgccgccaggccggaagtgcagctggttgaatctggcggaggactggttcagcctggcggatctctgagactgtcttgtgccgccagcggcttcagcttcagcgacttttggatgagctgggtccgacaggcccctggcaaaggacttgaatgggtcgccacaatcagccaggccggcagcgagaaggactacgtggactctgtgaagggcagattcaccatcagccgggacaacgccaagaagtccctgtacctccagatgaacagcctgagagccgaggacaccgccgtgtactattgtgcctctggcgtgtacagcttcgactacagaggccagggcaccctggtcacagtctcttctggtaccggcggaggcggatctggcggcggaggtagcggtggcggaggatctgaattccagtctgtgctgacacagcctcctagtgtgtctggcgctcctggacagagagtgaccatctcttgtaccggcagcagcagcaatatcggagccggctatgacgtgcactggtatcagcagctccctggcacagcccctaaactgctgatcttcggcaacagcaacagacccagcggcgtgcccgatagattcagcggctttaagagcggcacaagcgccagcctggctatcactggactgcaagccgaggacgaggccgactacttctgccagagctacgatagcagcctgagcggcagcggagtgtttggcacaggcaccaaagtgacagtgcttggcctcgaggacctgaagaacgtgttcccacctgaggtggccgtgttcgagcctagcgaggccgagatcagccacacccagaaagccaccctcgtgtgcctggctaccggcttctaccccgaccatgtggaactgtcttggtgggtcaacggcaaagaggtgcacagcggcgtgtgtaccgacccccagccactgaaagaacagcccgccctgaacgacagccggtactgcctgagcagcagactgagagtgtccgccaccttctggcagaacccccggaaccacttcagatgccaggtgcagttctacggcctgagcgagaacgacgagtggacccaggacagagccaagcccgtgacccagatcgtgtctgccgaagcctggggcagagccgatgatgtgattaagatccactggcaggaaaagaagtccaacaccatcctgggcagccaggaaggcaacaccatgaagaccaacgacacctacatgaagttcagctggctgaccgtgcccgagaagtccctggacaaagaacacagatgcatcgtgcggcacgaaaacaacaagaacggcgtggaccaggaaatcatcttcccacccatcaagaccgatgtgattacaatggaccccaaggacaactgctccaaggacgccaacgataccctgctgctccagctgaccaacaccagcgcctactacatgtacttgttgctgctgctgaagtccgtggtgtacttcgccatcatcacatgctgcctgctgatggctatggtcaagcggaaggacagccggggaagggccaagcgatctggatctggagcaacaaacttctcactactcaaacaagcaggtgacgtggaggagaatcccgggcctactagtatggactggatttggcgcatccttttccttgtcggcgctgctaccggcgcgcattccgggccccagctccagctgcaagagtctggacctggcctggtcaagcctagcgagacactgagcctgacctgtaccgtgtccggcgatagcatcagcagcggcgattactactggggctggatcagacagcctcctggcaaaggactggaatggatcggccacatctactacagcggcgtgacctactacaaccccagcctgaagtccagagtgaccatcagcgtggacaccagccggaaccagttctccctgaagctgtctagcgtgacagccgccgataccgccgtgtactactgcaccagagaggacagcagcaactggcggagtagaggccagggaacactggtcacagttagctctggatccggcggaggcggaagtggaggcggaggatctggcggcggaggctctttcgaacaaatgcaactggttcaaagcggcggtggcctggtgcaacctggaagaagtctgagactgagctgtgccgccagcggcttcaccttcgatgattacgccatgcactgggtccgacaggcccctggaaaaggactggaatgggtgtccggcatctcctggaatagcggctctatcggctacgccgacagcgtgaagggcagattcaccatcagccgggacaacgccaagaacagcctgtacctccagatgaactccctgagagccgaggatacagccctgtactactgcgccaaggacatccacagcggcagctactacggcctgctgtactacgctatggacgtgtggggccagggcacaaccgtgacagtttcttctacgcgtatccagaaccctgatcctgccgtgtaccagctgcgggatagcaagagcagcgacaagagcgtgtgtctgttcaccgacttcgacagccagaccaacgtgtcccagagcaaggactccgacgtgtacatcaccgataagtgcgtgctggacatgcggagcatggacttcaagagcaactccgccgtggcctggtccaacaagtccgatttcgcctgcgccaacgccttcaacaacagcattatccccgaggacacattcttcccaagccccgagagcagcgactccaccgaccacgtgaagcccaaagagacagagaacaccaagcagcccagcaagagctgccacaagcccaaggccatcgtgcacaccgagaaagtgaacatgatgagcctgaccgtgctgggcctgcggatgctgttcgccaaaaccgtggccgtgaacttcctgctgaccgccaagctgttcttcctcctcaccgcc

SEQ ID NO: 6775 - DNA, 3024 bp, synthetic construct
  source 1..3024: mol_type = other DNA
atggccttaccagtgaccgccttgctcctgccgctggccttgctgctccacgccgccaggccggaagtgcagctggttgaatctggcggaggactggttcagcctggcggatctctgagactgtcttgtgccgccagcggcttcagcttcagcgacttttggatgagctgggtccgacaggcccctggcaaaggacttgaatgggtcgccacaatcagccaggccggcagcgagaaggactacgtggactctgtgaagggcagattcaccatcagccgggacaacgccaagaagtccctgtacctccagatgaacagcctgagagccgaggacaccgccgtgtactattgtgcctctggcgtgtacagcttcgactacagaggccagggcaccctggtcacagtctcttctggtaccggcggaggcggatctggcggcggaggtagcggtggcggaggatctgaattcctgcctgttctgacacagcctccatctgcctctggcacacctggacagagagtgaccatcagctgtagcggcagaagcagcaacatcggcagcaacagcgtgaactggtacagacagcttcctggcgctgcccctaagctgctgatctacagcaacaaccagcggcctcctggcgtgccagtcagattttctggcagcaagagcggcacaagcgccagcctggctatttctggactccagtctgaggacgaggccacctactactgtgccacctgggacgacaacctgaacgtgcactacgtgttcggcaccggcaccaaagtgacagtgcttggaagtagactcgaggacctgaagaacgtgttcccacctgaggtggccgtgttcgagcctagcgaggccgagatcagccacacccagaaagccaccctcgtgtgcctggctaccggcttctaccccgaccatgtggaactgtcttggtgggtcaacggcaaagaggtgcacagcggcgtgtgtaccgacccccagccactgaaagaacagcccgccctgaacgacagccggtactgcctgagcagcagactgagagtgtccgccaccttctggcagaacccccggaaccacttcagatgccaggtgcagttctacggcctgagcgagaacgacgagtggacccaggacagagccaagcccgtgacccagatcgtgtctgccgaagcctggggcagagccgatgatgtgattaagatccactggcaggaaaagaagtccaacaccatcctgggcagccaggaaggcaacaccatgaagaccaacgacacctacatgaagttcagctggctgaccgtgcccgagaagtccctggacaaagaacacagatgcatcgtgcggcacgaaaacaacaagaacggcgtggaccaggaaatcatcttcccacccatcaagaccgatgtgattacaatggaccccaaggacaactgctccaaggacgccaacgataccctgctgctccagctgaccaacaccagcgcctactacatgtacttgttgctgctgctgaagtccgtggtgtacttcgccatcatcacatgctgcctgctgatggctatggtcaagcggaaggacagccggggaagggccaagcgatctggatctggagcaacaaacttctcactactcaaacaagcaggtgacgtggaggagaatcccgggcctactagtatggactggatttggcgcatccttttccttgtcggcgctgctaccggcgcgcattccgggccccagctccagctgcaagagtctggacctggcctggtcaagcctagcgagacactgagcctgacctgtaccgtgtccggcgatagcatcagcagcggcgattactactggggctggatcagacagcctcctggcaaaggactggaatggatcggccacatctactacagcggcgtgacctactacaaccccagcctgaagtccagagtgaccatcagcgtggacaccagccggaaccagttctccctgaagctgtctagcgtgacagccgccgataccgccgtgtactactgcaccagagaggacagcagcaactggcggagtagaggccagggaacactggtcacagttagctctggatccggcggaggcggaagtggaggcggaggatctggcggcggaggctctttcgaacttgaaatggctcaggtgcagctggtgcagagcggagccgaagtgaagaaacctggcagcagcgtgaaggtgtcctgcaaagcttctggcggcaccttcagcagctacgccatctcttgggttcgacaggcccctggacaaggactggaatggatgggcagaatcatccccatcctgggaatcgccaactacgcccagaaattccagggcagagtgacaatcaccgccgacaagagcaccagcaccgcctacatggaactgagcagcctgagaagcgaggacaccgccgtgtactattgtgcaagaggcggctactacagccacgacatgtggagcgaagattggggccagggcacactggtcacagtgtcatctacgcgtatccagaaccctgatcctgccgtgtaccagctgcgggatagcaagagcagcgacaagagcgtgtgtctgttcaccgacttcgacagccagaccaacgtgtcccagagcaaggactccgacgtgtacatcaccgataagtgcgtgctggacatgcggagcatggacttcaagagcaactccgccgtggcctggtccaacaagtccgatttcgcctgcgccaacgccttcaacaacagcattatccccgaggacacattcttcccaagccccgagagcagcgactccaccgaccacgtgaagcccaaagagacagagaacaccaagcagcccagcaagagctgccacaagcccaaggccatcgtgcacaccgagaaagtgaacatgatgagcctgaccgtgctgggcctgcggatgctgttcgccaaaaccgtggccgtgaacttcctgctgaccgccaagctgttcttcctcctcaccgcc

SEQ ID NO: 6776 - DNA, 3006 bp, synthetic construct
  source 1..3006: mol_type = other DNA
atggccttaccagtgaccgccttgctcctgccgctggccttgctgctccacgccgccaggccggaagtgcagctggttgaatctggcggaggactggttcagcctggcggatctctgagactgtcttgtgccgccagcggcttcagcttcagcgacttttggatgagctgggtccgacaggcccctggcaaaggacttgaatgggtcgccacaatcagccaggccggcagcgagaaggactacgtggactctgtgaagggcagattcaccatcagccgggacaacgccaagaagtccctgtacctccagatgaacagcctgagagccgaggacaccgccgtgtactattgtgcctctggcgtgtacagcttcgactacagaggccagggcaccctggtcacagtctcttctggtaccggcggaggcggatctggcggcggaggtagcggtggcggaggatctgaattcgacttcgtgatgacacagagccctgatagcctggccgtgtctctcggcgagcgagtgaccatgagctgcaagtctagccagagcctgctgaacagcggcaaccagaagaactacctgacctggtatcagcagaagcccggccagcctcctaagctgctgatctactgggccagcaccagagaaagcggcgtgcccgatagattttctggctctggcagcggcaccgacttcaccctgacaatttctagcctgcaagccgaggacgtggccgtgtactactgccagaacgactacagctacccctacaccttcggccagggcaccaagctggaaatcaaactcgaggacctgaagaacgtgttcccacctgaggtggccgtgttcgagcctagcgaggccgagatcagccacacccagaaagccaccctcgtgtgcctggctaccggcttctaccccgaccatgtggaactgtcttggtgggtcaacggcaaagaggtgcacagcggcgtgtgtaccgacccccagccactgaaagaacagcccgccctgaacgacagccggtactgcctgagcagcagactgagagtgtccgccaccttctggcagaacccccggaaccacttcagatgccaggtgcagttctacggcctgagcgagaacgacgagtggacccaggacagagccaagcccgtgacccagatcgtgtctgccgaagcctggggcagagccgatgatgtgattaagatccactggcaggaaaagaagtccaacaccatcctgggcagccaggaaggcaacaccatgaagaccaacgacacctacatgaagttcagctggctgaccgtgcccgagaagtccctggacaaagaacacagatgcatcgtgcggcacgaaaacaacaagaacggcgtggaccaggaaatcatcttcccacccatcaagaccgatgtgattacaatggaccccaaggacaactgctccaaggacgccaacgataccctgctgctccagctgaccaacaccagcgcctactacatgtacttgttgctgctgctgaagtccgtggtgtacttcgccatcatcacatgctgcctgctgatggctatggtcaagcggaaggacagccggggaagggccaagcgatctggatctggagcaacaaacttctcactactcaaacaagcaggtgacgtggaggagaatcccgggcctactagtatggactggatttggcgcatccttttccttgtcggcgctgctaccggcgcgcattccgggccccagctccagctgcaagagtctggacctggcctggtcaagcctagcgagacactgagcctgacctgtaccgtgtccggcgatagcatcagcagcggcgattactactggggctggatcagacagcctcctggcaaaggactggaatggatcggccacatctactacagcggcgtgacctactacaaccccagcctgaagtccagagtgaccatcagcgtggacaccagccggaaccagttctccctgaagctgtctagcgtgacagccgccgataccgccgtgtactactgcaccagagaggacagcagcaactggcggagtagaggccagggaacactggtcacagttagctctggatccggcggaggcggaagtggaggcggaggatctggcggcggaggctctttcgaagaagtgcaactggttcagagcggagccgagctgaagaaacctggggccagcgtgaaggtgtcctgtaaagccagcggctacacctttaccgactactacatgaaatgggtccgacaggccccaggccagggactcgaatggatcggcgatattatccccagcaacggggccaccttctacaaccagaaattcaagggccgcgtgaccatcaccgtggacaagagcacaagcaccgcctacatggaactgagcagcctgagaagcgaggacaccgccgtgtattattgcgccagaagccatctgctgcgggccagttggttcgcctattggggacagggaaccctggtcaccgttagctctacgcgtatccagaaccctgatcctgccgtgtaccagctgcgggatagcaagagcagcgacaagagcgtgtgtctgttcaccgacttcgacagccagaccaacgtgtcccagagcaaggactccgacgtgtacatcaccgataagtgcgtgctggacatgcggagcatggacttcaagagcaactccgccgtggcctggtccaacaagtccgatttcgcctgcgccaacgccttcaacaacagcattatccccgaggacacattcttcccaagccccgagagcagcgactccaccgaccacgtgaagcccaaagagacagagaacaccaagcagcccagcaagagctgccacaagcccaaggccatcgtgcacaccgagaaagtgaacatgatgagcctgaccgtgctgggcctgcggatgctgttcgccaaaaccgtggccgtgaacttcctgctgaccgccaagctgttcttcctcctcaccgcc

SEQ ID NO: 6777 - DNA, 3006 bp, synthetic construct
  source 1..3006: mol_type = other DNA
atggccttaccagtgaccgccttgctcctgccgctggccttgctgctccacgccgccaggccggaagtgcagctggttgaatctggcggaggactggttcagcctggcggatctctgagactgtcttgtgccgccagcggcttcagcttcagcgacttttggatgagctgggtccgacaggcccctggcaaaggacttgaatgggtcgccacaatcagccaggccggcagcgagaaggactacgtggactctgtgaagggcagattcaccatcagccgggacaacgccaagaagtccctgtacctccagatgaacagcctgagagccgaggacaccgccgtgtactattgtgcctctggcgtgtacagcttcgactacagaggccagggcaccctggtcacagtctcttctggtaccggcggaggcggatctggcggcggaggtagcggtggcggaggatctgaattcgacttcgtgatgacacagagccctgatagcctggccgtgtctctcggcgagcgagtgaccatgagctgcaagtctagccagagcctgctgaacagcggcaaccagaagaactacctgacctggtatcagcagaagcccggccagcctcctaagctgctgatctactgggccagcaccagagaaagcggcgtgcccgatagattttctggctctggcagcggcaccgacttcaccctgacaatttctagcctgcaagccgaggacgtggccgtgtactactgccagaacgactacagctacccctacaccttcggccagggcaccaagctggaaatcaaactcgaggacctgaagaacgtgttcccacctgaggtggccgtgttcgagcctagcgaggccgagatcagccacacccagaaagccaccctcgtgtgcctggctaccggcttctaccccgaccatgtggaactgtcttggtgggtcaacggcaaagaggtgcacagcggcgtgtgtaccgacccccagccactgaaagaacagcccgccctgaacgacagccggtactgcctgagcagcagactgagagtgtccgccaccttctggcagaacccccggaaccacttcagatgccaggtgcagttctacggcctgagcgagaacgacgagtggacccaggacagagccaagcccgtgacccagatcgtgtctgccgaagcctggggcagagccgatgatgtgattaagatccactggcaggaaaagaagtccaacaccatcctgggcagccaggaaggcaacaccatgaagaccaacgacacctacatgaagttcagctggctgaccgtgcccgagaagtccctggacaaagaacacagatgcatcgtgcggcacgaaaacaacaagaacggcgtggaccaggaaatcatcttcccacccatcaagaccgatgtgattacaatggaccccaaggacaactgctccaaggacgccaacgataccctgctgctccagctgaccaacaccagcgcctactacatgtacttgttgctgctgctgaagtccgtggtgtacttcgccatcatcacatgctgcctgctgatggctatggtcaagcggaaggacagccggggaagggccaagcgatctggatctggagcaacaaacttctcactactcaaacaagcaggtgacgtggaggagaatcccgggcctactagtatggactggatttggcgcatccttttccttgtcggcgctgctaccggcgcgcattccgggccccagctccagctgcaagagtctggacctggcctggtcaagcctagcgagacactgagcctgacctgtaccgtgtccggcgatagcatcagcagcggcgattactactggggctggatcagacagcctcctggcaaaggactggaatggatcggccacatctactacagcggcgtgacctactacaaccccagcctgaagtccagagtgaccatcagcgtggacaccagccggaaccagttctccctgaagctgtctagcgtgacagccgccgataccgccgtgtactactgcaccagagaggacagcagcaactggcggagtagaggccagggaacactggtcacagttagctctggatccggcggaggcggaagtggaggcggaggatctggcggcggaggctctttcgaacaagtgcaactggttcagagcggagccgagctgaagaaacctggggccagcgtgaaggtgtcctgtaaagccagcggctacacctttaccgactactacatgaaatgggtccgacaggccccaggccagggactcgaatggatcggcgatattatccccagcaacggggccaccttctacaaccagaaattcaagggccgcgtgaccatcaccgtggacaagagcacaagcaccgcctacatggaactgagcagcctgagaagcgaggacaccgccgtgtattattgcgccagaagccatctgctgcgggccagttggttcgcctattggggacagggaaccctggtcaccgttagctctacgcgtatccagaaccctgatcctgccgtgtaccagctgcgggatagcaagagcagcgacaagagcgtgtgtctgttcaccgacttcgacagccagaccaacgtgtcccagagcaaggactccgacgtgtacatcaccgataagtgcgtgctggacatgcggagcatggacttcaagagcaactccgccgtggcctggtccaacaagtccgatttcgcctgcgccaacgccttcaacaacagcattatccccgaggacacattcttcccaagccccgagagcagcgactccaccgaccacgtgaagcccaaagagacagagaacaccaagcagcccagcaagagctgccacaagcccaaggccatcgtgcacaccgagaaagtgaacatgatgagcctgaccgtgctgggcctgcggatgctgttcgccaaaaccgtggccgtgaacttcctgctgaccgccaagctgttcttcctcctcaccgcc

SEQ ID NO: 6778 - DNA, 2976 bp, synthetic construct
  source 1..2976: mol_type = other DNA
atggccttaccagtgaccgccttgctcctgccgctggccttgctgctccacgccgccaggccggaagtgcagctggttgaatctggcggaggactggttcagcctggcggatctctgagactgtcttgtgccgccagcggcttcagcttcagcgacttttggatgagctgggtccgacaggcccctggcaaaggacttgaatgggtcgccacaatcagccaggccggcagcgagaaggactacgtggactctgtgaagggcagattcaccatcagccgggacaacgccaagaagtccctgtacctccagatgaacagcctgagagccgaggacaccgccgtgtactattgtgcctctggcgtgtacagcttcgactacagaggccagggcaccctggtcacagtctcttctggtaccggcggaggcggatctggcggcggaggtagcggtggcggaggatctgaattcgacgtgcagatcacacagagccctagctacctggctgcctctcctggcgagacaatcaccatcaactgtcgggccagcaagagcatcagcaaggacctggcctggtatcaagagaagcccggcaagaccaacaagctgctgatctacagcggcagcacactccagtctggcatccccagcagattttccggctctggcagcggcaccgatttcaccctgaccataagcagcctggaacctgaggacttcgccatgtactactgccagcagcacaacaagtacccctacacctttggcggaggcaccaagctggaaatcaagagactcgaggacctgaagaacgtgttcccacctgaggtggccgtgttcgagcctagcgaggccgagatcagccacacccagaaagccaccctcgtgtgcctggctaccggcttctaccccgaccatgtggaactgtcttggtgggtcaacggcaaagaggtgcacagcggcgtgtgtaccgacccccagccactgaaagaacagcccgccctgaacgacagccggtactgcctgagcagcagactgagagtgtccgccaccttctggcagaacccccggaaccacttcagatgccaggtgcagttctacggcctgagcgagaacgacgagtggacccaggacagagccaagcccgtgacccagatcgtgtctgccgaagcctggggcagagccgatgatgtgattaagatccactggcaggaaaagaagtccaacaccatcctgggcagccaggaaggcaacaccatgaagaccaacgacacctacatgaagttcagctggctgaccgtgcccgagaagtccctggacaaagaacacagatgcatcgtgcggcacgaaaacaacaagaacggcgtggaccaggaaatcatcttcccacccatcaagaccgatgtgattacaatggaccccaaggacaactgctccaaggacgccaacgataccctgctgctccagctgaccaacaccagcgcctactacatgtacttgttgctgctgctgaagtccgtggtgtacttcgccatcatcacatgctgcctgctgatggctatggtcaagcggaaggacagccggggaagggccaagcgatctggatctggagcaacaaacttctcactactcaaacaagcaggtgacgtggaggagaatcccgggcctactagtatggactggatttggcgcatccttttccttgtcggcgctgctaccggcgcgcattccgggccccagctccagctgcaagagtctggacctggcctggtcaagcctagcgagacactgagcctgacctgtaccgtgtccggcgatagcatcagcagcggcgattactactggggctggatcagacagcctcctggcaaaggactggaatggatcggccacatctactacagcggcgtgacctactacaaccccagcctgaagtccagagtgaccatcagcgtggacaccagccggaaccagttctccctgaagctgtctagcgtgacagccgccgataccgccgtgtactactgcaccagagaggacagcagcaactggcggagtagaggccagggaacactggtcacagttagctctggatccggcggaggcggaagtggaggcggaggatctggcggcggaggctctttcgaacaagttcaactgcaacagcctggggccgagcttgttagacctggcgcttctgtgaagctgagctgcaaggccagcggctacaccttcaccagctactggatgaactgggtcaagcagcggcctgaccagggcctcgaatggatcggcagaatcgacccctacgacagcgagacacactacaaccagaagttcaaggacaaggccatcctgaccgtggacaagagcagctccaccgcctacatgcaactgagcagcctgacctctgaggatagcgccgtgtactattgcgccagaggcaactgggacgactattggggccagggcacaaccctgacagtgtctagtacgcgtatccagaaccctgatcctgccgtgtaccagctgcgggatagcaagagcagcgacaagagcgtgtgtctgttcaccgacttcgacagccagaccaacgtgtcccagagcaaggactccgacgtgtacatcaccgataagtgcgtgctggacatgcggagcatggacttcaagagcaactccgccgtggcctggtccaacaagtccgatttcgcctgcgccaacgccttcaacaacagcattatccccgaggacacattcttcccaagccccgagagcagcgactccaccgaccacgtgaagcccaaagagacagagaacaccaagcagcccagcaagagctgccacaagcccaaggccatcgtgcacaccgagaaagtgaacatgatgagcctgaccgtgctgggcctgcggatgctgttcgccaaaaccgtggccgtgaacttcctgctgaccgccaagctgttcttcctcctcaccgcc

SEQ ID NO: 6779 - DNA, 2982 bp, synthetic construct
  source 1..2982: mol_type = other DNA
atggccttaccagtgaccgccttgctcctgccgctggccttgctgctccacgccgccaggccggaagtgcagctggttgaatctggcggaggactggttcagcctggcggatctctgagactgtcttgtgccgccagcggcttcagcttcagcgacttttggatgagctgggtccgacaggcccctggcaaaggacttgaatgggtcgccacaatcagccaggccggcagcgagaaggactacgtggactctgtgaagggcagattcaccatcagccgggacaacgccaagaagtccctgtacctccagatgaacagcctgagagccgaggacaccgccgtgtactattgtgcctctggcgtgtacagcttcgactacagaggccagggcaccctggtcacagtctcttctggtaccggcggaggcggatctggcggcggaggtagcggtggcggaggatctgaattcgagatcgtgctgacacagagccctaccagcatgacagcctctccaggcgagcaagtgaccatcacctgtagagccagcagcagcatcaactacatgcactggtatcagcagaagcctggcgcaagccccagaccttggatctacgagacaagcaagctggcctccggcgtgcccgatagattttctggatctgccagcggcaccagctacagcctgaccatcaacaacatggaagccgaggacgccgccacctactactgccagcagtggaattacccctcctggacctttggcggaggcaccaagctggaacttaaactcgaggacctgaagaacgtgttcccacctgaggtggccgtgttcgagcctagcgaggccgagatcagccacacccagaaagccaccctcgtgtgcctggctaccggcttctaccccgaccatgtggaactgtcttggtgggtcaacggcaaagaggtgcacagcggcgtgtgtaccgacccccagccactgaaagaacagcccgccctgaacgacagccggtactgcctgagcagcagactgagagtgtccgccaccttctggcagaacccccggaaccacttcagatgccaggtgcagttctacggcctgagcgagaacgacgagtggacccaggacagagccaagcccgtgacccagatcgtgtctgccgaagcctggggcagagccgatgatgtgattaagatccactggcaggaaaagaagtccaacaccatcctgggcagccaggaaggcaacaccatgaagaccaacgacacctacatgaagttcagctggctgaccgtgcccgagaagtccctggacaaagaacacagatgcatcgtgcggcacgaaaacaacaagaacggcgtggaccaggaaatcatcttcccacccatcaagaccgatgtgattacaatggaccccaaggacaactgctccaaggacgccaacgataccctgctgctccagctgaccaacaccagcgcctactacatgtacttgttgctgctgctgaagtccgtggtgtacttcgccatcatcacatgctgcctgctgatggctatggtcaagcggaaggacagccggggaagggccaagcgatctggatctggagcaacaaacttctcactactcaaacaagcaggtgacgtggaggagaatcccgggcctactagtatggactggatttggcgcatccttttccttgtcggcgctgctaccggcgcgcattccgggccccagctccagctgcaagagtctggacctggcctggtcaagcctagcgagacactgagcctgacctgtaccgtgtccggcgatagcatcagcagcggcgattactactggggctggatcagacagcctcctggcaaaggactggaatggatcggccacatctactacagcggcgtgacctactacaaccccagcctgaagtccagagtgaccatcagcgtggacaccagccggaaccagttctccctgaagctgtctagcgtgacagccgccgataccgccgtgtactactgcaccagagaggacagcagcaactggcggagtagaggccagggaacactggtcacagttagctctggatccggcggaggcggaagtggaggcggaggatctggcggcggaggctctttcgaagaagtgcagctcgttgagtctggtggcggactggttcagcctggaagaagcctgaagctgagctgtgccgccagcggcttcaccttcagcgactacaatatggcctgggtccgacaggcccctaagaaaggactggaatgggtcgccaccatcctgtacgatggcggcagaacctactaccggggcagcgtgaagggcagattcaccatcagcagagacaacgccaagagcaccctgtacctgcggatggactctctgagaagcgaggataccgccacatattactgtgccacacacagccggggcaccgactactttgattattggggccagggcgtgatggttaccgtgtctagtacgcgtatccagaaccctgatcctgccgtgtaccagctgcgggatagcaagagcagcgacaagagcgtgtgtctgttcaccgacttcgacagccagaccaacgtgtcccagagcaaggactccgacgtgtacatcaccgataagtgcgtgctggacatgcggagcatggacttcaagagcaactccgccgtggcctggtccaacaagtccgatttcgcctgcgccaacgccttcaacaacagcattatccccgaggacacattcttcccaagccccgagagcagcgactccaccgaccacgtgaagcccaaagagacagagaacaccaagcagcccagcaagagctgccacaagcccaaggccatcgtgcacaccgagaaagtgaacatgatgagcctgaccgtgctgggcctgcggatgctgttcgccaaaaccgtggccgtgaacttcctgctgaccgccaagctgttcttcctcctcaccgcc

SEQ ID NO: 6780 - DNA, 3009 bp, synthetic construct
  source 1..3009: mol_type = other DNA
atggccttaccagtgaccgccttgctcctgccgctggccttgctgctccacgccgccaggccggaagtgcagctggttgaatctggcggaggactggttcagcctggcggatctctgagactgtcttgtgccgccagcggcttcagcttcagcgacttttggatgagctgggtccgacaggcccctggcaaaggacttgaatgggtcgccacaatcagccaggccggcagcgagaaggactacgtggactctgtgaagggcagattcaccatcagccgggacaacgccaagaagtccctgtacctccagatgaacagcctgagagccgaggacaccgccgtgtactattgtgcctctggcgtgtacagcttcgactacagaggccagggcaccctggtcacagtctcttctggtaccggcggaggcggatctggcggcggaggtagcggtggcggaggatctgaattcgacatcgtgatgacacagagcccttctagcctggccgtgtctgagggcgagacagtgaccatcaactgcaagagcagccagagcttcctgtctagcggcgacggcaagaattacgtggcctggtatcagtacaagcccggacagagccccaagctgctgatctactgggccagcacaagacagagcggcgtgcccgatagattcatcggctctggcagcggcaccgacttcaccctgacaatctctacagtgcaggccgaggacctggctatctactactgccagcagtattacgacacccctctgacctttggctccggcaccaagctggaaatcaaactcgaggacctgaagaacgtgttcccacctgaggtggccgtgttcgagcctagcgaggccgagatcagccacacccagaaagccaccctcgtgtgcctggctaccggcttctaccccgaccatgtggaactgtcttggtgggtcaacggcaaagaggtgcacagcggcgtgtgtaccgacccccagccactgaaagaacagcccgccctgaacgacagccggtactgcctgagcagcagactgagagtgtccgccaccttctggcagaacccccggaaccacttcagatgccaggtgcagttctacggcctgagcgagaacgacgagtggacccaggacagagccaagcccgtgacccagatcgtgtctgccgaagcctggggcagagccgatgatgtgattaagatccactggcaggaaaagaagtccaacaccatcctgggcagccaggaaggcaacaccatgaagaccaacgacacctacatgaagttcagctggctgaccgtgcccgagaagtccctggacaaagaacacagatgcatcgtgcggcacgaaaacaacaagaacggcgtggaccaggaaatcatcttcccacccatcaagaccgatgtgattacaatggaccccaaggacaactgctccaaggacgccaacgataccctgctgctccagctgaccaacaccagcgcctactacatgtacttgttgctgctgctgaagtccgtggtgtacttcgccatcatcacatgctgcctgctgatggctatggtcaagcggaaggacagccggggaagggccaagcgatctggatctggagcaacaaacttctcactactcaaacaagcaggtgacgtggaggagaatcccgggcctactagtatggactggatttggcgcatccttttccttgtcggcgctgctaccggcgcgcattccgggccccagctccagctgcaagagtctggacctggcctggtcaagcctagcgagacactgagcctgacctgtaccgtgtccggcgatagcatcagcagcggcgattactactggggctggatcagacagcctcctggcaaaggactggaatggatcggccacatctactacagcggcgtgacctactacaaccccagcctgaagtccagagtgaccatcagcgtggacaccagccggaaccagttctccctgaagctgtctagcgtgacagccgccgataccgccgtgtactactgcaccagagaggacagcagcaactggcggagtagaggccagggaacactggtcacagttagctctggatccggcggaggcggaagtggaggcggaggatctggcggcggaggctctttcgaagaagtgaagctgcaagagtctggccccagcctggtgcagagtagccaaacactgagcctgacctgtaccgtgtccggctttagcctgaccagctaccacatccactgggtccgacagacccctggcaaaggactggaatggatgggcgtgatgtggagcgacggcgacaccagctataacagcgccctgaagtcccggctgagcatcagcagagatacaagccagagccaggtgttcctgaagatgaacagcctccagaccgaggacaccgccacctactattgtgccagaggctactacagcagctacctgtacctttggttcgcctattggggccagggcaccctggttacagtcagctctacgcgtatccagaaccctgatcctgccgtgtaccagctgcgggatagcaagagcagcgacaagagcgtgtgtctgttcaccgacttcgacagccagaccaacgtgtcccagagcaaggactccgacgtgtacatcaccgataagtgcgtgctggacatgcggagcatggacttcaagagcaactccgccgtggcctggtccaacaagtccgatttcgcctgcgccaacgccttcaacaacagcattatccccgaggacacattcttcccaagccccgagagcagcgactccaccgaccacgtgaagcccaaagagacagagaacaccaagcagcccagcaagagctgccacaagcccaaggccatcgtgcacaccgagaaagtgaacatgatgagcctgaccgtgctgggcctgcggatgctgttcgccaaaaccgtggccgtgaacttcctgctgaccgccaagctgttcttcctcctcaccgcc

SEQ ID NO: 6781 - DNA, 3021 bp, synthetic construct
  source 1..3021: mol_type = other DNA
atggccttaccagtgaccgccttgctcctgccgctggccttgctgctccacgccgccaggccggaagtgcagctggttgaatctggcggaggactggttcagcctggcggatctctgagactgtcttgtgccgccagcggcttcagcttcagcgacttttggatgagctgggtccgacaggcccctggcaaaggacttgaatgggtcgccacaatcagccaggccggcagcgagaaggactacgtggactctgtgaagggcagattcaccatcagccgggacaacgccaagaagtccctgtacctccagatgaacagcctgagagccgaggacaccgccgtgtactattgtgcctctggcgtgtacagcttcgactacagaggccagggcaccctggtcacagtctcttctggtaccggcggaggcggatctggcggcggaggtagcggtggcggaggatctgaattcgacgtgctgatgacccagacacctgtgtctctgccagtgtctctcggaggccaggtgtccatctcctgtagaagcagccagagcctggtgcactccgacggcgatacctacctgcactggtatctccagaagcctggacagagccctcagctcctgatctaccgggtgtccaacagattcagcggcgtgcccgatagattttccggcagcggctctggcaccgacttcaccctgaagatcagcagagtggaacccgaggacctgggcctgtactactgtctccagaccacacacttcccaccttggacctttggcggaggcaccaagctggaaatgaaactcgaggacctgaagaacgtgttcccacctgaggtggccgtgttcgagcctagcgaggccgagatcagccacacccagaaagccaccctcgtgtgcctggctaccggcttctaccccgaccatgtggaactgtcttggtgggtcaacggcaaagaggtgcacagcggcgtgtgtaccgacccccagccactgaaagaacagcccgccctgaacgacagccggtactgcctgagcagcagactgagagtgtccgccaccttctggcagaacccccggaaccacttcagatgccaggtgcagttctacggcctgagcgagaacgacgagtggacccaggacagagccaagcccgtgacccagatcgtgtctgccgaagcctggggcagagccgatgatgtgattaagatccactggcaggaaaagaagtccaacaccatcctgggcagccaggaaggcaacaccatgaagaccaacgacacctacatgaagttcagctggctgaccgtgcccgagaagtccctggacaaagaacacagatgcatcgtgcggcacgaaaacaacaagaacggcgtggaccaggaaatcatcttcccacccatcaagaccgatgtgattacaatggaccccaaggacaactgctccaaggacgccaacgataccctgctgctccagctgaccaacaccagcgcctactacatgtacttgttgctgctgctgaagtccgtggtgtacttcgccatcatcacatgctgcctgctgatggctatggtcaagcggaaggacagccggggaagggccaagcgatctggatctggagcaacaaacttctcactactcaaacaagcaggtgacgtggaggagaatcccgggcctactagtatggactggatttggcgcatccttttccttgtcggcgctgctaccggcgcgcattccgggccccagctccagctgcaagagtctggacctggcctggtcaagcctagcgagacactgagcctgacctgtaccgtgtccggcgatagcatcagcagcggcgattactactggggctggatcagacagcctcctggcaaaggactggaatggatcggccacatctactacagcggcgtgacctactacaaccccagcctgaagtccagagtgaccatcagcgtggacaccagccggaaccagttctccctgaagctgtctagcgtgacagccgccgataccgccgtgtactactgcaccagagaggacagcagcaactggcggagtagaggccagggaacactggtcacagttagctctggatccggcggaggcggaagtggaggcggaggatctggcggcggaggctctttcgaacaggttcagctccagcagtctggacccgagcttagaaggccaggatctagcgtcagactgagctgcaaggccagcggctaccggatcaaggacttcctgatccactggattaagaacagacccgagcacggcctggaatggatcggatggattgaccctgaggacggcgagactaagtacgcccagaagttccagaccaaggccacactgaccgccgacacctctagcaacaccgcctacatgcaactgagcagcctgaccagcgaggacaccgccacctacttttgtgctagatggggcgacgtgtactacggcctgatgagaggccatgtgatggatgcctggggccagggaacaagcgtgacagtctcttctacgcgtatccagaaccctgatcctgccgtgtaccagctgcgggatagcaagagcagcgacaagagcgtgtgtctgttcaccgacttcgacagccagaccaacgtgtcccagagcaaggactccgacgtgtacatcaccgataagtgcgtgctggacatgcggagcatggacttcaagagcaactccgccgtggcctggtccaacaagtccgatttcgcctgcgccaacgccttcaacaacagcattatccccgaggacacattcttcccaagccccgagagcagcgactccaccgaccacgtgaagcccaaagagacagagaacaccaagcagcccagcaagagctgccacaagcccaaggccatcgtgcacaccgagaaagtgaacatgatgagcctgaccgtgctgggcctgcggatgctgttcgccaaaaccgtggccgtgaacttcctgctgaccgccaagctgttcttcctcctcaccgcc

SEQ ID NO: 6782 - DNA, 3006 bp, synthetic construct
  source 1..3006: mol_type = other DNA
atggccttaccagtgaccgccttgctcctgccgctggccttgctgctccacgccgccaggccggaagtgcagctggttgaatctggcggaggactggttcagcctggcggatctctgagactgtcttgtgccgccagcggcttcagcttcagcgacttttggatgagctgggtccgacaggcccctggcaaaggacttgaatgggtcgccacaatcagccaggccggcagcgagaaggactacgtggactctgtgaagggcagattcaccatcagccgggacaacgccaagaagtccctgtacctccagatgaacagcctgagagccgaggacaccgccgtgtactattgtgcctctggcgtgtacagcttcgactacagaggccagggcaccctggtcacagtctcttctggtaccggcggaggcggatctggcggcggaggtagcggtggcggaggatctgaattcgacatcgtgatgacacagagccccgccacactgtcactgtctccaggcgaaagagccacactgagctgtcggagcagcaagagcctccagaacgtgaacggcaacacctacctgtactggttccagcagaagcccggccagtctcctcagctcctgatctacagaatgagcaacctgaacagcggcgtgcccgacagattttctggcagcggaagcggcaccgagttcaccctgaccataagcagcctggaacctgaggacttcgccgtgtactactgtatgcagcacctggaataccccatcaccttcggagccggcaccaagctggaaatcaaactcgaggacctgaagaacgtgttcccacctgaggtggccgtgttcgagcctagcgaggccgagatcagccacacccagaaagccaccctcgtgtgcctggctaccggcttctaccccgaccatgtggaactgtcttggtgggtcaacggcaaagaggtgcacagcggcgtgtgtaccgacccccagccactgaaagaacagcccgccctgaacgacagccggtactgcctgagcagcagactgagagtgtccgccaccttctggcagaacccccggaaccacttcagatgccaggtgcagttctacggcctgagcgagaacgacgagtggacccaggacagagccaagcccgtgacccagatcgtgtctgccgaagcctggggcagagccgatgatgtgattaagatccactggcaggaaaagaagtccaacaccatcctgggcagccaggaaggcaacaccatgaagaccaacgacacctacatgaagttcagctggctgaccgtgcccgagaagtccctggacaaagaacacagatgcatcgtgcggcacgaaaacaacaagaacggcgtggaccaggaaatcatcttcccacccatcaagaccgatgtgattacaatggaccccaaggacaactgctccaaggacgccaacgataccctgctgctccagctgaccaacaccagcgcctactacatgtacttgttgctgctgctgaagtccgtggtgtacttcgccatcatcacatgctgcctgctgatggctatggtcaagcggaaggacagccggggaagggccaagcgatctggatctggagcaacaaacttctcactactcaaacaagcaggtgacgtggaggagaatcccgggcctactagtatggactggatttggcgcatccttttccttgtcggcgctgctaccggcgcgcattccgggccccagctccagctgcaagagtctggacctggcctggtcaagcctagcgagacactgagcctgacctgtaccgtgtccggcgatagcatcagcagcggcgattactactggggctggatcagacagcctcctggcaaaggactggaatggatcggccacatctactacagcggcgtgacctactacaaccccagcctgaagtccagagtgaccatcagcgtggacaccagccggaaccagttctccctgaagctgtctagcgtgacagccgccgataccgccgtgtactactgcaccagagaggacagcagcaactggcggagtagaggccagggaacactggtcacagttagctctggatccggcggaggcggaagtggaggcggaggatctggcggcggaggctctttcgaagaagtgcaactggttgaatctggcggcggactggttaagcctggcggatctctgaagctgagctgtgccgccagcggctacacctttaccagctacgtgatgcactgggtccgacaggcccctggcaaaggacttgagtggatcggctacatcaacccctacaacgatggcaccaagtacaacgagaagttccagggcagagtgaccatcagctccgacaagagcatcagcaccgcctacatggaactgagcagcctgagaagcgaggataccgccatgtactattgcgccagaggcacctactactacggcaccagagtgttcgactactggggccagggaaccctggtcacagtctcttctacgcgtatccagaaccctgatcctgccgtgtaccagctgcgggatagcaagagcagcgacaagagcgtgtgtctgttcaccgacttcgacagccagaccaacgtgtcccagagcaaggactccgacgtgtacatcaccgataagtgcgtgctggacatgcggagcatggacttcaagagcaactccgccgtggcctggtccaacaagtccgatttcgcctgcgccaacgccttcaacaacagcattatccccgaggacacattcttcccaagccccgagagcagcgactccaccgaccacgtgaagcccaaagagacagagaacaccaagcagcccagcaagagctgccacaagcccaaggccatcgtgcacaccgagaaagtgaacatgatgagcctgaccgtgctgggcctgcggatgctgttcgccaaaaccgtggccgtgaacttcctgctgaccgccaagctgttcttcctcctcaccgcc

SEQ ID NO: 6783 - DNA, 2994 bp, synthetic construct
  source 1..2994: mol_type = other DNA
atggccttaccagtgaccgccttgctcctgccgctggccttgctgctccacgccgccaggccggaagtgcagctggttgaatctggcggaggactggttcagcctggcggatctctgagactgtcttgtgccgccagcggcttcagcttcagcgacttttggatgagctgggtccgacaggcccctggcaaaggacttgaatgggtcgccacaatcagccaggccggcagcgagaaggactacgtggactctgtgaagggcagattcaccatcagccgggacaacgccaagaagtccctgtacctccagatgaacagcctgagagccgaggacaccgccgtgtactattgtgcctctggcgtgtacagcttcgactacagaggccagggcaccctggtcacagtctcttctggtaccggcggaggcggatctggcggcggaggtagcggtggcggaggatctgaattcgacatccagatgacacagagccctagcagcctgtctgccagcgtgggagacagagtgaccatcacatgcaaggccagcgaccacatcaacaactggctggcctggtatcagcagaagcctggacaggcccctaagctgctgatctacggcgctaccacactggaaacaggcgtgcccagcagattttctggcagcggctctggcaccgactacaccctgacaatatccagcctccagcctgaggacttcgccacctactactgtcagcagagctggaacaccccttggacattcggccagggcaccaagctggaaatcaagagactcgaggacctgaagaacgtgttcccacctgaggtggccgtgttcgagcctagcgaggccgagatcagccacacccagaaagccaccctcgtgtgcctggctaccggcttctaccccgaccatgtggaactgtcttggtgggtcaacggcaaagaggtgcacagcggcgtgtgtaccgacccccagccactgaaagaacagcccgccctgaacgacagccggtactgcctgagcagcagactgagagtgtccgccaccttctggcagaacccccggaaccacttcagatgccaggtgcagttctacggcctgagcgagaacgacgagtggacccaggacagagccaagcccgtgacccagatcgtgtctgccgaagcctggggcagagccgatgatgtgattaagatccactggcaggaaaagaagtccaacaccatcctgggcagccaggaaggcaacaccatgaagaccaacgacacctacatgaagttcagctggctgaccgtgcccgagaagtccctggacaaagaacacagatgcatcgtgcggcacgaaaacaacaagaacggcgtggaccaggaaatcatcttcccacccatcaagaccgatgtgattacaatggaccccaaggacaactgctccaaggacgccaacgataccctgctgctccagctgaccaacaccagcgcctactacatgtacttgttgctgctgctgaagtccgtggtgtacttcgccatcatcacatgctgcctgctgatggctatggtcaagcggaaggacagccggggaagggccaagcgatctggatctggagcaacaaacttctcactactcaaacaagcaggtgacgtggaggagaatcccgggcctactagtatggactggatttggcgcatccttttccttgtcggcgctgctaccggcgcgcattccgggccccagctccagctgcaagagtctggacctggcctggtcaagcctagcgagacactgagcctgacctgtaccgtgtccggcgatagcatcagcagcggcgattactactggggctggatcagacagcctcctggcaaaggactggaatggatcggccacatctactacagcggcgtgacctactacaaccccagcctgaagtccagagtgaccatcagcgtggacaccagccggaaccagttctccctgaagctgtctagcgtgacagccgccgataccgccgtgtactactgcaccagagaggacagcagcaactggcggagtagaggccagggaacactggtcacagttagctctggatccggcggaggcggaagtggaggcggaggatctggcggcggaggctctttcgaacaagttcagcttcaacagcctggcgctgagctggtcaaacctggcgcttctgtgaagatgagctgcaaagccagcggctacgccttcagcagctactggatcaactggatgaagcagaaacccggccagggactcgaatggatcggccaaatctatcccggcgacggcgacaccaactacaacggcaagttcaagggcagagccacactgaccgccgatacctctagcagcacagcctacatgcagctgagcagcctgaccagcgaagatagcgccgtgtacttctgtgcccggtccatcacaacagtcgtgggctgcgctatggactattggggccagggaacaagcgtgaccgtgtctagtacgcgtatccagaaccctgatcctgccgtgtaccagctgcgggatagcaagagcagcgacaagagcgtgtgtctgttcaccgacttcgacagccagaccaacgtgtcccagagcaaggactccgacgtgtacatcaccgataagtgcgtgctggacatgcggagcatggacttcaagagcaactccgccgtggcctggtccaacaagtccgatttcgcctgcgccaacgccttcaacaacagcattatccccgaggacacattcttcccaagccccgagagcagcgactccaccgaccacgtgaagcccaaagagacagagaacaccaagcagcccagcaagagctgccacaagcccaaggccatcgtgcacaccgagaaagtgaacatgatgagcctgaccgtgctgggcctgcggatgctgttcgccaaaaccgtggccgtgaacttcctgctgaccgccaagctgttcttcctcctcaccgcc

SEQ ID NO: 6784 - DNA, 3000 bp, synthetic construct
  source 1..3000: mol_type = other DNA
atggccttaccagtgaccgccttgctcctgccgctggccttgctgctccacgccgccaggccggaagtgcagctggttgaatctggcggaggactggttcagcctggcggatctctgagactgtcttgtgccgccagcggcttcagcttcagcgacttttggatgagctgggtccgacaggcccctggcaaaggacttgaatgggtcgccacaatcagccaggccggcagcgagaaggactacgtggactctgtgaagggcagattcaccatcagccgggacaacgccaagaagtccctgtacctccagatgaacagcctgagagccgaggacaccgccgtgtactattgtgcctctggcgtgtacagcttcgactacagaggccagggcaccctggtcacagtctcttctggtaccggcggaggcggatctggcggcggaggtagcggtggcggaggatctgaattccagatcgtgctgtctcagtctcctgccatcctgagcgcttccccaggcgagaaagtgaccatgacctgtagagccagcagcagcgtgtcctacatgcactggtatcagcagaagcccggcagcagccctaagccttggatctacgccaccagcaatctggcctctggcgtgccagccagattttctggctctggcagcggcaccagctacagcttcacaatcagcagagtggaagccgaggacgccgccacctactattgtcagcagtggaccttcaatcctcctaccttcggcggaggcacccggctggaaatcaaaagaacagtggctgctctcgaggacctgaagaacgtgttcccacctgaggtggccgtgttcgagcctagcgaggccgagatcagccacacccagaaagccaccctcgtgtgcctggctaccggcttctaccccgaccatgtggaactgtcttggtgggtcaacggcaaagaggtgcacagcggcgtgtgtaccgacccccagccactgaaagaacagcccgccctgaacgacagccggtactgcctgagcagcagactgagagtgtccgccaccttctggcagaacccccggaaccacttcagatgccaggtgcagttctacggcctgagcgagaacgacgagtggacccaggacagagccaagcccgtgacccagatcgtgtctgccgaagcctggggcagagccgatgatgtgattaagatccactggcaggaaaagaagtccaacaccatcctgggcagccaggaaggcaacaccatgaagaccaacgacacctacatgaagttcagctggctgaccgtgcccgagaagtccctggacaaagaacacagatgcatcgtgcggcacgaaaacaacaagaacggcgtggaccaggaaatcatcttcccacccatcaagaccgatgtgattacaatggaccccaaggacaactgctccaaggacgccaacgataccctgctgctccagctgaccaacaccagcgcctactacatgtacttgttgctgctgctgaagtccgtggtgtacttcgccatcatcacatgctgcctgctgatggctatggtcaagcggaaggacagccggggaagggccaagcgatctggatctggagcaacaaacttctcactactcaaacaagcaggtgacgtggaggagaatcccgggcctactagtatggactggatttggcgcatccttttccttgtcggcgctgctaccggcgcgcattccgggccccagctccagctgcaagagtctggacctggcctggtcaagcctagcgagacactgagcctgacctgtaccgtgtccggcgatagcatcagcagcggcgattactactggggctggatcagacagcctcctggcaaaggactggaatggatcggccacatctactacagcggcgtgacctactacaaccccagcctgaagtccagagtgaccatcagcgtggacaccagccggaaccagttctccctgaagctgtctagcgtgacagccgccgataccgccgtgtactactgcaccagagaggacagcagcaactggcggagtagaggccagggaacactggtcacagttagctctggatccggcggaggcggaagtggaggcggaggatctggcggcggaggctctttcgaacaggcttatctgcaacagagcggagccgaactcgtcagacctggcgcttctgtgaagatgagctgcaaggccagcggctacaccttcaccagctataatatgcactgggtcaagcagacccctcggcagggactcgaatggatcggcggaatctatcccggcaacggcgacacctcctacaaccagaagttcaagggcaaagccacactgaccgtgggcaagagcagcagcaccgcctatatgcagctcagcagcctgaccagcgaggacagcgccgtgtacttctgcgccagatacgactacaactacgctatggactactggggccagggcaccagcgtgacagttagctctgccagcacgcgtatccagaaccctgatcctgccgtgtaccagctgcgggatagcaagagcagcgacaagagcgtgtgtctgttcaccgacttcgacagccagaccaacgtgtcccagagcaaggactccgacgtgtacatcaccgataagtgcgtgctggacatgcggagcatggacttcaagagcaactccgccgtggcctggtccaacaagtccgatttcgcctgcgccaacgccttcaacaacagcattatccccgaggacacattcttcccaagccccgagagcagcgactccaccgaccacgtgaagcccaaagagacagagaacaccaagcagcccagcaagagctgccacaagcccaaggccatcgtgcacaccgagaaagtgaacatgatgagcctgaccgtgctgggcctgcggatgctgttcgccaaaaccgtggccgtgaacttcctgctgaccgccaagctgttcttcctcctcaccgcc

SEQ ID NO: 6785 - DNA, 2994 bp, synthetic construct
  source 1..2994: mol_type = other DNA
atggccttaccagtgaccgccttgctcctgccgctggccttgctgctccacgccgccaggccggaagtgcagctggttgaatctggcggaggactggttcagcctggcggatctctgagactgtcttgtgccgccagcggcttcagcttcagcgacttttggatgagctgggtccgacaggcccctggcaaaggacttgaatgggtcgccacaatcagccaggccggcagcgagaaggactacgtggactctgtgaagggcagattcaccatcagccgggacaacgccaagaagtccctgtacctccagatgaacagcctgagagccgaggacaccgccgtgtactattgtgcctctggcgtgtacagcttcgactacagaggccagggcaccctggtcacagtctcttctggtaccggcggaggcggatctggcggcggaggtagcggtggcggaggatctgaattcgagatcgtgctgacacagagccctgccaccctgtctctgagccctggcgaaagagccaccctgagctgtagagccagccagagcgtgtccagctacctggcctggtatcagcagaagcccggccaggctccccggctgctgatctacgatgccagcaatagagccaccggcatccccgccagattttccggctctggcagcggcaccgacttcaccctgaccatcagctccctggaacccgaggacttcgccgtgtactactgccagcagcggagcaactggcccatcacattcggccagggcacccggctggaaatcaaactcgaggacctgaagaacgtgttcccacctgaggtggccgtgttcgagcctagcgaggccgagatcagccacacccagaaagccaccctcgtgtgcctggctaccggcttctaccccgaccatgtggaactgtcttggtgggtcaacggcaaagaggtgcacagcggcgtgtgtaccgacccccagccactgaaagaacagcccgccctgaacgacagccggtactgcctgagcagcagactgagagtgtccgccaccttctggcagaacccccggaaccacttcagatgccaggtgcagttctacggcctgagcgagaacgacgagtggacccaggacagagccaagcccgtgacccagatcgtgtctgccgaagcctggggcagagccgatgatgtgattaagatccactggcaggaaaagaagtccaacaccatcctgggcagccaggaaggcaacaccatgaagaccaacgacacctacatgaagttcagctggctgaccgtgcccgagaagtccctggacaaagaacacagatgcatcgtgcggcacgaaaacaacaagaacggcgtggaccaggaaatcatcttcccacccatcaagaccgatgtgattacaatggaccccaaggacaactgctccaaggacgccaacgataccctgctgctccagctgaccaacaccagcgcctactacatgtacttgttgctgctgctgaagtccgtggtgtacttcgccatcatcacatgctgcctgctgatggctatggtcaagcggaaggacagccggggaagggccaagcgatctggatctggagcaacaaacttctcactactcaaacaagcaggtgacgtggaggagaatcccgggcctactagtatggactggatttggcgcatccttttccttgtcggcgctgctaccggcgcgcattccgggccccagctccagctgcaagagtctggacctggcctggtcaagcctagcgagacactgagcctgacctgtaccgtgtccggcgatagcatcagcagcggcgattactactggggctggatcagacagcctcctggcaaaggactggaatggatcggccacatctactacagcggcgtgacctactacaaccccagcctgaagtccagagtgaccatcagcgtggacaccagccggaaccagttctccctgaagctgtctagcgtgacagccgccgataccgccgtgtactactgcaccagagaggacagcagcaactggcggagtagaggccagggaacactggtcacagttagctctggatccggcggaggcggaagtggaggcggaggatctggcggcggaggctctttcgaagaggtgcagcttgttgagtctggcggaggactggtgcagcccgatagaagcctgagactgtcttgtgccgccagcggcttcaccttccacgattatgccatgcactgggtccgacaggcccctggcaaaggacttgaatgggtgtccaccatctcttggaacagcggcacaatcggctacgccgactctgtgaagggcagattcaccatcagccgggacaacgccaagaacagcctgtacctccagatgaactccctgagagccgaggacacagccctgtactactgcgccaaggacatccagtacggcaactactactacggcatggacgtgtggggccagggcacaacagtgacagtctcttctacgcgtatccagaaccctgatcctgccgtgtaccagctgcgggatagcaagagcagcgacaagagcgtgtgtctgttcaccgacttcgacagccagaccaacgtgtcccagagcaaggactccgacgtgtacatcaccgataagtgcgtgctggacatgcggagcatggacttcaagagcaactccgccgtggcctggtccaacaagtccgatttcgcctgcgccaacgccttcaacaacagcattatccccgaggacacattcttcccaagccccgagagcagcgactccaccgaccacgtgaagcccaaagagacagagaacaccaagcagcccagcaagagctgccacaagcccaaggccatcgtgcacaccgagaaagtgaacatgatgagcctgaccgtgctgggcctgcggatgctgttcgccaaaaccgtggccgtgaacttcctgctgaccgccaagctgttcttcctcctcaccgcc

SEQ ID NO: 6786 - DNA, 2979 bp, synthetic construct
  source 1..2979: mol_type = other DNA
atggccttaccagtgaccgccttgctcctgccgctggccttgctgctccacgccgccaggccggaagtgcagctggttgaatctggcggaggactggttcagcctggcggatctctgagactgtcttgtgccgccagcggcttcagcttcagcgacttttggatgagctgggtccgacaggcccctggcaaaggacttgaatgggtcgccacaatcagccaggccggcagcgagaaggactacgtggactctgtgaagggcagattcaccatcagccgggacaacgccaagaagtccctgtacctccagatgaacagcctgagagccgaggacaccgccgtgtactattgtgcctctggcgtgtacagcttcgactacagaggccagggcaccctggtcacagtctcttctggtaccggcggaggcggatctggcggcggaggtagcggtggcggaggatctgaattcgacatccagatgacacagagccctagcagcctgtctgccagcgtgggagatagagtgaccatcaactgcaaggccagccaggacatcaacagctacctgagctggttccagcagaagcctggcaaggcccctaagacactgatctaccgggccaacagactggtggatggcgtgccaagcagattttctggcagcggcagcggccaggattacaccctgacaatatccagcctccagcctgaggacttcgccacctactactgcctccagtacgacgagttccctctgacctttggcggaggcaccaaggtggaaatcaaactcgaggacctgaagaacgtgttcccacctgaggtggccgtgttcgagcctagcgaggccgagatcagccacacccagaaagccaccctcgtgtgcctggctaccggcttctaccccgaccatgtggaactgtcttggtgggtcaacggcaaagaggtgcacagcggcgtgtgtaccgacccccagccactgaaagaacagcccgccctgaacgacagccggtactgcctgagcagcagactgagagtgtccgccaccttctggcagaacccccggaaccacttcagatgccaggtgcagttctacggcctgagcgagaacgacgagtggacccaggacagagccaagcccgtgacccagatcgtgtctgccgaagcctggggcagagccgatgatgtgattaagatccactggcaggaaaagaagtccaacaccatcctgggcagccaggaaggcaacaccatgaagaccaacgacacctacatgaagttcagctggctgaccgtgcccgagaagtccctggacaaagaacacagatgcatcgtgcggcacgaaaacaacaagaacggcgtggaccaggaaatcatcttcccacccatcaagaccgatgtgattacaatggaccccaaggacaactgctccaaggacgccaacgataccctgctgctccagctgaccaacaccagcgcctactacatgtacttgttgctgctgctgaagtccgtggtgtacttcgccatcatcacatgctgcctgctgatggctatggtcaagcggaaggacagccggggaagggccaagcgatctggatctggagcaacaaacttctcactactcaaacaagcaggtgacgtggaggagaatcccgggcctactagtatggactggatttggcgcatccttttccttgtcggcgctgctaccggcgcgcattccgggccccagctccagctgcaagagtctggacctggcctggtcaagcctagcgagacactgagcctgacctgtaccgtgtccggcgatagcatcagcagcggcgattactactggggctggatcagacagcctcctggcaaaggactggaatggatcggccacatctactacagcggcgtgacctactacaaccccagcctgaagtccagagtgaccatcagcgtggacaccagccggaaccagttctccctgaagctgtctagcgtgacagccgccgataccgccgtgtactactgcaccagagaggacagcagcaactggcggagtagaggccagggaacactggtcacagttagctctggatccggcggaggcggaagtggaggcggaggatctggcggcggaggctctttcgaacaggtgcaactggtgcagtctggggccgaagtgaagaaacctggggcctctgtgaaggtgtcctgcaaagccagcggctacacctttaccaactacgacatcaactgggtccgacaggctccaggccaaggactggaatggatcggctggatctatcctggcgacggcagcaccaagtacaacgagaagttcaaggccaaggccacactgaccgccgataccagcacaagcaccgcctacatggaactgcggagcctgagaagcgacgacaccgccgtgtactattgtgcctccggctacgaggacgctatggactattggggccagggcaccaccgtgacagtgtctagtacgcgtatccagaaccctgatcctgccgtgtaccagctgcgggatagcaagagcagcgacaagagcgtgtgtctgttcaccgacttcgacagccagaccaacgtgtcccagagcaaggactccgacgtgtacatcaccgataagtgcgtgctggacatgcggagcatggacttcaagagcaactccgccgtggcctggtccaacaagtccgatttcgcctgcgccaacgccttcaacaacagcattatccccgaggacacattcttcccaagccccgagagcagcgactccaccgaccacgtgaagcccaaagagacagagaacaccaagcagcccagcaagagctgccacaagcccaaggccatcgtgcacaccgagaaagtgaacatgatgagcctgaccgtgctgggcctgcggatgctgttcgccaaaaccgtggccgtgaacttcctgctgaccgccaagctgttcttcctcctcaccgcc

SEQ ID NO: 6787 - DNA, 2985 bp, synthetic construct
  source 1..2985: mol_type = other DNA
atggccttaccagtgaccgccttgctcctgccgctggccttgctgctccacgccgccaggccggaagtgcagctggttgaatctggcggaggactggttcagcctggcggatctctgagactgtcttgtgccgccagcggcttcagcttcagcgacttttggatgagctgggtccgacaggcccctggcaaaggacttgaatgggtcgccacaatcagccaggccggcagcgagaaggactacgtggactctgtgaagggcagattcaccatcagccgggacaacgccaagaagtccctgtacctccagatgaacagcctgagagccgaggacaccgccgtgtactattgtgcctctggcgtgtacagcttcgactacagaggccagggcaccctggtcacagtctcttctggtaccggcggaggcggatctggcggcggaggtagcggtggcggaggatctgaattcgacatcgtgatgacccagacacctctgagcctgagcgtgacacctggacagcctgccagcattagctgcaagagcagccagtctctgctggacggcgacggcaagacctacctgaattggctgctccagaagcctggacagagccctcagcggctgatctacctggtgtccaagctggatagcggcgtgcccgatagattttctggcagcggctctggcaccgacttcaccctgaagatcagcagagtggaagccgaggacgtgggcgtgtactactgttggcagggcacacacttccccagaacattcggccagggcacaaagctggaaatcaaactcgaggacctgaagaacgtgttcccacctgaggtggccgtgttcgagcctagcgaggccgagatcagccacacccagaaagccaccctcgtgtgcctggctaccggcttctaccccgaccatgtggaactgtcttggtgggtcaacggcaaagaggtgcacagcggcgtgtgtaccgacccccagccactgaaagaacagcccgccctgaacgacagccggtactgcctgagcagcagactgagagtgtccgccaccttctggcagaacccccggaaccacttcagatgccaggtgcagttctacggcctgagcgagaacgacgagtggacccaggacagagccaagcccgtgacccagatcgtgtctgccgaagcctggggcagagccgatgatgtgattaagatccactggcaggaaaagaagtccaacaccatcctgggcagccaggaaggcaacaccatgaagaccaacgacacctacatgaagttcagctggctgaccgtgcccgagaagtccctggacaaagaacacagatgcatcgtgcggcacgaaaacaacaagaacggcgtggaccaggaaatcatcttcccacccatcaagaccgatgtgattacaatggaccccaaggacaactgctccaaggacgccaacgataccctgctgctccagctgaccaacaccagcgcctactacatgtacttgttgctgctgctgaagtccgtggtgtacttcgccatcatcacatgctgcctgctgatggctatggtcaagcggaaggacagccggggaagggccaagcgatctggatctggagcaacaaacttctcactactcaaacaagcaggtgacgtggaggagaatcccgggcctactagtatggactggatttggcgcatccttttccttgtcggcgctgctaccggcgcgcattccgggccccagctccagctgcaagagtctggacctggcctggtcaagcctagcgagacactgagcctgacctgtaccgtgtccggcgatagcatcagcagcggcgattactactggggctggatcagacagcctcctggcaaaggactggaatggatcggccacatctactacagcggcgtgacctactacaaccccagcctgaagtccagagtgaccatcagcgtggacaccagccggaaccagttctccctgaagctgtctagcgtgacagccgccgataccgccgtgtactactgcaccagagaggacagcagcaactggcggagtagaggccagggaacactggtcacagttagctctggatccggcggaggcggaagtggaggcggaggatctggcggcggaggctctttcgaacaagtgcaactggttcagagcggagccgaagtgaagaaacctggggcctctgtgaaggtgtcctgcaaggccagcggctacaccttcaaggacacctacatccactgggtccgacaggcccctggacaaggacttgagtggatgggcagaatcgaccccgccaacggcaacaccaaatacgaccccaagttccagggcagagtgaccatgaccagagacaccagcatcagcaccgcctacatggaactgagccggctgagatccgatgacaccgccgtgtactattgcgctagaagaggcggagtggattggggccagggaacactggttaccgtgtctagtacgcgtatccagaaccctgatcctgccgtgtaccagctgcgggatagcaagagcagcgacaagagcgtgtgtctgttcaccgacttcgacagccagaccaacgtgtcccagagcaaggactccgacgtgtacatcaccgataagtgcgtgctggacatgcggagcatggacttcaagagcaactccgccgtggcctggtccaacaagtccgatttcgcctgcgccaacgccttcaacaacagcattatccccgaggacacattcttcccaagccccgagagcagcgactccaccgaccacgtgaagcccaaagagacagagaacaccaagcagcccagcaagagctgccacaagcccaaggccatcgtgcacaccgagaaagtgaacatgatgagcctgaccgtgctgggcctgcggatgctgttcgccaaaaccgtggccgtgaacttcctgctgaccgccaagctgttcttcctcctcaccgcc

SEQ ID NO: 6788 - DNA, 2988 bp, synthetic construct
  source 1..2988: mol_type = other DNA
atggccttaccagtgaccgccttgctcctgccgctggccttgctgctccacgccgccaggccggaagtgcagctggttgaatctggcggaggactggttcagcctggcggatctctgagactgtcttgtgccgccagcggcttcagcttcagcgacttttggatgagctgggtccgacaggcccctggcaaaggacttgaatgggtcgccacaatcagccaggccggcagcgagaaggactacgtggactctgtgaagggcagattcaccatcagccgggacaacgccaagaagtccctgtacctccagatgaacagcctgagagccgaggacaccgccgtgtactattgtgcctctggcgtgtacagcttcgactacagaggccagggcaccctggtcacagtctcttctggtaccggcggaggcggatctggcggcggaggtagcggtggcggaggatctgaattcgacatccagatgacacagagccctagcagcctgtctgccagcgtgggagacagagtgaccatcacatgcaaggccagccaggatgtgtctacagccgtggcctggttccagcagaagcctggaaaagcccctaagctgctgatctacagccccagctacagatacaccggcgtgcccagcagattttctggcagcggctctggcaccgacttcaccctgacaatatccagcctccagcctgaggacttcacctactactgccagcagctctacagcaccccttacacattcggccagggcaccaaggtggaaatcaaactcgaggacctgaagaacgtgttcccacctgaggtggccgtgttcgagcctagcgaggccgagatcagccacacccagaaagccaccctcgtgtgcctggctaccggcttctaccccgaccatgtggaactgtcttggtgggtcaacggcaaagaggtgcacagcggcgtgtgtaccgacccccagccactgaaagaacagcccgccctgaacgacagccggtactgcctgagcagcagactgagagtgtccgccaccttctggcagaacccccggaaccacttcagatgccaggtgcagttctacggcctgagcgagaacgacgagtggacccaggacagagccaagcccgtgacccagatcgtgtctgccgaagcctggggcagagccgatgatgtgattaagatccactggcaggaaaagaagtccaacaccatcctgggcagccaggaaggcaacaccatgaagaccaacgacacctacatgaagttcagctggctgaccgtgcccgagaagtccctggacaaagaacacagatgcatcgtgcggcacgaaaacaacaagaacggcgtggaccaggaaatcatcttcccacccatcaagaccgatgtgattacaatggaccccaaggacaactgctccaaggacgccaacgataccctgctgctccagctgaccaacaccagcgcctactacatgtacttgttgctgctgctgaagtccgtggtgtacttcgccatcatcacatgctgcctgctgatggctatggtcaagcggaaggacagccggggaagggccaagcgatctggatctggagcaacaaacttctcactactcaaacaagcaggtgacgtggaggagaatcccgggcctactagtatggactggatttggcgcatccttttccttgtcggcgctgctaccggcgcgcattccgggccccagctccagctgcaagagtctggacctggcctggtcaagcctagcgagacactgagcctgacctgtaccgtgtccggcgatagcatcagcagcggcgattactactggggctggatcagacagcctcctggcaaaggactggaatggatcggccacatctactacagcggcgtgacctactacaaccccagcctgaagtccagagtgaccatcagcgtggacaccagccggaaccagttctccctgaagctgtctagcgtgacagccgccgataccgccgtgtactactgcaccagagaggacagcagcaactggcggagtagaggccagggaacactggtcacagttagctctggatccggcggaggcggaagtggaggcggaggatctggcggcggaggctctttcgaagaagtgcaactggttcagagcggagccgaagtgaagaaacctggggcctctgtgaaggtgtcctgcaaagccagcggctacacctttaccgactactacctggacgtggtcgtgcggcaagctcctggacaaggactggaatggatcggcagagtgaacccctacaacggcggcaccatctacaaccagaaattcaagggaagagtgaccctgaccagagacaccagcacctccacagcctacctggaactgagcagcctgagaagcgaagataccgccgtgtactactgcgccagggaccactacagatatgaccctctgctggactactggggccagggaaccctggttacagtgtctagtacgcgtatccagaaccctgatcctgccgtgtaccagctgcgggatagcaagagcagcgacaagagcgtgtgtctgttcaccgacttcgacagccagaccaacgtgtcccagagcaaggactccgacgtgtacatcaccgataagtgcgtgctggacatgcggagcatggacttcaagagcaactccgccgtggcctggtccaacaagtccgatttcgcctgcgccaacgccttcaacaacagcattatccccgaggacacattcttcccaagccccgagagcagcgactccaccgaccacgtgaagcccaaagagacagagaacaccaagcagcccagcaagagctgccacaagcccaaggccatcgtgcacaccgagaaagtgaacatgatgagcctgaccgtgctgggcctgcggatgctgttcgccaaaaccgtggccgtgaacttcctgctgaccgccaagctgttcttcctcctcaccgcc

SEQ ID NO: 6789 - DNA, 3006 bp, synthetic construct
  source 1..3006: mol_type = other DNA
atggccttaccagtgaccgccttgctcctgccgctggccttgctgctccacgccgccaggccggaagtgcagctggttgaatctggcggaggactggttcagcctggcggatctctgagactgtcttgtgccgccagcggcttcagcttcagcgacttttggatgagctgggtccgacaggcccctggcaaaggacttgaatgggtcgccacaatcagccaggccggcagcgagaaggactacgtggactctgtgaagggcagattcaccatcagccgggacaacgccaagaagtccctgtacctccagatgaacagcctgagagccgaggacaccgccgtgtactattgtgcctctggcgtgtacagcttcgactacagaggccagggcaccctggtcacagtctcttctggtaccggcggaggcggatctggcggcggaggtagcggtggcggaggatctgaattcgacatccagatgacacagagccctagcagcctgtctgccagcgtgggagacagagtgaccatcacctgtagagccagccagagcgtgtccaccagcagctacaactacatgcactggtatcagcagaagcccggcaagcctcctaagctgctgattaagtacgccagcaacctggaaagcggcgtgcccagcagattttctggcagcggctctggcaccgacttcaccctgacaatatccagcctccagcctgaggacttcgccacctactactgtcagcactcctgggagatccctctgacattcggccagggcaccaaggtggaaatcaaactcgaggacctgaagaacgtgttcccacctgaggtggccgtgttcgagcctagcgaggccgagatcagccacacccagaaagccaccctcgtgtgcctggctaccggcttctaccccgaccatgtggaactgtcttggtgggtcaacggcaaagaggtgcacagcggcgtgtgtaccgacccccagccactgaaagaacagcccgccctgaacgacagccggtactgcctgagcagcagactgagagtgtccgccaccttctggcagaacccccggaaccacttcagatgccaggtgcagttctacggcctgagcgagaacgacgagtggacccaggacagagccaagcccgtgacccagatcgtgtctgccgaagcctggggcagagccgatgatgtgattaagatccactggcaggaaaagaagtccaacaccatcctgggcagccaggaaggcaacaccatgaagaccaacgacacctacatgaagttcagctggctgaccgtgcccgagaagtccctggacaaagaacacagatgcatcgtgcggcacgaaaacaacaagaacggcgtggaccaggaaatcatcttcccacccatcaagaccgatgtgattacaatggaccccaaggacaactgctccaaggacgccaacgataccctgctgctccagctgaccaacaccagcgcctactacatgtacttgttgctgctgctgaagtccgtggtgtacttcgccatcatcacatgctgcctgctgatggctatggtcaagcggaaggacagccggggaagggccaagcgatctggatctggagcaacaaacttctcactactcaaacaagcaggtgacgtggaggagaatcccgggcctactagtatggactggatttggcgcatccttttccttgtcggcgctgctaccggcgcgcattccgggccccagctccagctgcaagagtctggacctggcctggtcaagcctagcgagacactgagcctgacctgtaccgtgtccggcgatagcatcagcagcggcgattactactggggctggatcagacagcctcctggcaaaggactggaatggatcggccacatctactacagcggcgtgacctactacaaccccagcctgaagtccagagtgaccatcagcgtggacaccagccggaaccagttctccctgaagctgtctagcgtgacagccgccgataccgccgtgtactactgcaccagagaggacagcagcaactggcggagtagaggccagggaacactggtcacagttagctctggatccggcggaggcggaagtggaggcggaggatctggcggcggaggctctttcgaagaagtgcaactggttcagagcggagccgaagtgaagaaacctggggcctctgtgaaggtgtcctgcaaggccagcggctacagcttcaccgactattatatgcactgggtccgacaggctccaggccagggacttgagtggatcggcagaatcaacccctacaacggcgctgccttctacagccagaacttcaaggatagagtgaccctgaccgtggacaccagcaccagcacagcctacctggaactgagcagcctgagaagcgaggacaccgccgtgtactactgcgccattgagagaggcgctgacctggaaggctacgctatggattattggggccagggaaccctggtcaccgtgtcatctacgcgtatccagaaccctgatcctgccgtgtaccagctgcgggatagcaagagcagcgacaagagcgtgtgtctgttcaccgacttcgacagccagaccaacgtgtcccagagcaaggactccgacgtgtacatcaccgataagtgcgtgctggacatgcggagcatggacttcaagagcaactccgccgtggcctggtccaacaagtccgatttcgcctgcgccaacgccttcaacaacagcattatccccgaggacacattcttcccaagccccgagagcagcgactccaccgaccacgtgaagcccaaagagacagagaacaccaagcagcccagcaagagctgccacaagcccaaggccatcgtgcacaccgagaaagtgaacatgatgagcctgaccgtgctgggcctgcggatgctgttcgccaaaaccgtggccgtgaacttcctgctgaccgccaagctgttcttcctcctcaccgcc

SEQ ID NO: 6790 - DNA, 3000 bp, synthetic construct
  source 1..3000: mol_type = other DNA
atggccttaccagtgaccgccttgctcctgccgctggccttgctgctccacgccgccaggccggaagtgcagctggttgaatctggcggaggactggttcagcctggcggatctctgagactgtcttgtgccgccagcggcttcagcttcagcgacttttggatgagctgggtccgacaggcccctggcaaaggacttgaatgggtcgccacaatcagccaggccggcagcgagaaggactacgtggactctgtgaagggcagattcaccatcagccgggacaacgccaagaagtccctgtacctccagatgaacagcctgagagccgaggacaccgccgtgtactattgtgcctctggcgtgtacagcttcgactacagaggccagggcaccctggtcacagtctcttctggtaccggcggaggcggatctggcggcggaggtagcggtggcggaggatctgaattcgagatcgtgctgacacagtctccagccacactgagcgcttctccaggcgagagagtgaccctgacctgtagagccagcagcaacgtgatctccagctacgtgcactggtatcagcagaagcctggcagcagccccagactgtttctgtacagcaccagcaatctggcctccggcgtgccaagcagattttctggctctggcagcggcaccgacttcacctttaccatctctagcctggaagccgaggacgccgccacctactactgtcagcagtacagcggctaccctctgaccttcggccagggcacaagactggaaatcaaactcgaggacctgaagaacgtgttcccacctgaggtggccgtgttcgagcctagcgaggccgagatcagccacacccagaaagccaccctcgtgtgcctggctaccggcttctaccccgaccatgtggaactgtcttggtgggtcaacggcaaagaggtgcacagcggcgtgtgtaccgacccccagccactgaaagaacagcccgccctgaacgacagccggtactgcctgagcagcagactgagagtgtccgccaccttctggcagaacccccggaaccacttcagatgccaggtgcagttctacggcctgagcgagaacgacgagtggacccaggacagagccaagcccgtgacccagatcgtgtctgccgaagcctggggcagagccgatgatgtgattaagatccactggcaggaaaagaagtccaacaccatcctgggcagccaggaaggcaacaccatgaagaccaacgacacctacatgaagttcagctggctgaccgtgcccgagaagtccctggacaaagaacacagatgcatcgtgcggcacgaaaacaacaagaacggcgtggaccaggaaatcatcttcccacccatcaagaccgatgtgattacaatggaccccaaggacaactgctccaaggacgccaacgataccctgctgctccagctgaccaacaccagcgcctactacatgtacttgttgctgctgctgaagtccgtggtgtacttcgccatcatcacatgctgcctgctgatggctatggtcaagcggaaggacagccggggaagggccaagcgatctggatctggagcaacaaacttctcactactcaaacaagcaggtgacgtggaggagaatcccgggcctactagtatggactggatttggcgcatccttttccttgtcggcgctgctaccggcgcgcattccgggccccagctccagctgcaagagtctggacctggcctggtcaagcctagcgagacactgagcctgacctgtaccgtgtccggcgatagcatcagcagcggcgattactactggggctggatcagacagcctcctggcaaaggactggaatggatcggccacatctactacagcggcgtgacctactacaaccccagcctgaagtccagagtgaccatcagcgtggacaccagccggaaccagttctccctgaagctgtctagcgtgacagccgccgataccgccgtgtactactgcaccagagaggacagcagcaactggcggagtagaggccagggaacactggtcacagttagctctggatccggcggaggcggaagtggaggcggaggatctggcggcggaggctctttcgaacaagttcagctgcaagagtctggccctggcctggtcaagcctagcgaaacactgagcctgacctgcgccgtgtctggctactctatcaccagcgcctactattggaactggatcagacagcctcctggcaaaggactggaatggatcggctacatcagctacgacggcagaaacaactacaaccccagcctgaagaaccggatcaccatcaatcccgacaccagcaagaaccagttcagcctccagctgaacagcgtgacccctgaggataccgccgtgtactactgtgccagagaaggcgactacgacgtgggcaactactacgctatggactactggggccagggaaccctggtcacagtctcttctacgcgtatccagaaccctgatcctgccgtgtaccagctgcgggatagcaagagcagcgacaagagcgtgtgtctgttcaccgacttcgacagccagaccaacgtgtcccagagcaaggactccgacgtgtacatcaccgataagtgcgtgctggacatgcggagcatggacttcaagagcaactccgccgtggcctggtccaacaagtccgatttcgcctgcgccaacgccttcaacaacagcattatccccgaggacacattcttcccaagccccgagagcagcgactccaccgaccacgtgaagcccaaagagacagagaacaccaagcagcccagcaagagctgccacaagcccaaggccatcgtgcacaccgagaaagtgaacatgatgagcctgaccgtgctgggcctgcggatgctgttcgccaaaaccgtggccgtgaacttcctgctgaccgccaagctgttcttcctcctcaccgcc

SEQ ID NO: 6791 - DNA, 3000 bp, synthetic construct
  source 1..3000: mol_type = other DNA
atggccttaccagtgaccgccttgctcctgccgctggccttgctgctccacgccgccaggccggaagtgcagctggttgaatctggcggaggactggttcagcctggcggatctctgagactgtcttgtgccgccagcggcttcagcttcagcgacttttggatgagctgggtccgacaggcccctggcaaaggacttgaatgggtcgccacaatcagccaggccggcagcgagaaggactacgtggactctgtgaagggcagattcaccatcagccgggacaacgccaagaagtccctgtacctccagatgaacagcctgagagccgaggacaccgccgtgtactattgtgcctctggcgtgtacagcttcgactacagaggccagggcaccctggtcacagtctcttctggtaccggcggaggcggatctggcggcggaggtagcggtggcggaggatctgaattcgagatcgtgctgacacagtctcccgccacactgtcactgtctccaggcgaaagagccacactgagctgtagagccagcagcaacgtgatctccagctacgtgcactggtatcagcagaagcctggacaggcccctcggctgctgatctacagcacaagcaatctggcctctggcatccccgccagattttctggctctggaagcggcaccgacttcaccctgaccataagcagcctggaacctgaggacttcgccgtgtactactgccagcagtatagcggctaccctctgaccttcggccagggcacaagactggaaatcaaactcgaggacctgaagaacgtgttcccacctgaggtggccgtgttcgagcctagcgaggccgagatcagccacacccagaaagccaccctcgtgtgcctggctaccggcttctaccccgaccatgtggaactgtcttggtgggtcaacggcaaagaggtgcacagcggcgtgtgtaccgacccccagccactgaaagaacagcccgccctgaacgacagccggtactgcctgagcagcagactgagagtgtccgccaccttctggcagaacccccggaaccacttcagatgccaggtgcagttctacggcctgagcgagaacgacgagtggacccaggacagagccaagcccgtgacccagatcgtgtctgccgaagcctggggcagagccgatgatgtgattaagatccactggcaggaaaagaagtccaacaccatcctgggcagccaggaaggcaacaccatgaagaccaacgacacctacatgaagttcagctggctgaccgtgcccgagaagtccctggacaaagaacacagatgcatcgtgcggcacgaaaacaacaagaacggcgtggaccaggaaatcatcttcccacccatcaagaccgatgtgattacaatggaccccaaggacaactgctccaaggacgccaacgataccctgctgctccagctgaccaacaccagcgcctactacatgtacttgttgctgctgctgaagtccgtggtgtacttcgccatcatcacatgctgcctgctgatggctatggtcaagcggaaggacagccggggaagggccaagcgatctggatctggagcaacaaacttctcactactcaaacaagcaggtgacgtggaggagaatcccgggcctactagtatggactggatttggcgcatccttttccttgtcggcgctgctaccggcgcgcattccgggccccagctccagctgcaagagtctggacctggcctggtcaagcctagcgagacactgagcctgacctgtaccgtgtccggcgatagcatcagcagcggcgattactactggggctggatcagacagcctcctggcaaaggactggaatggatcggccacatctactacagcggcgtgacctactacaaccccagcctgaagtccagagtgaccatcagcgtggacaccagccggaaccagttctccctgaagctgtctagcgtgacagccgccgataccgccgtgtactactgcaccagagaggacagcagcaactggcggagtagaggccagggaacactggtcacagttagctctggatccggcggaggcggaagtggaggcggaggatctggcggcggaggctctttcgaagaagtgcaactggtggaaagtggcggcggactggtgcaacctggaagaagcctgagactgtcctgtgccgccagcggctactctatcacaagcgcctactactggaactgggtccgacaggctcctggcaaaggactggaatgggtgtcctacatcagctacgacggcagaaacaactacaaccccagcctgaagaaccgcttcaccatcagccgggacaacgccaagaagtccctgtacctccagatgaacagcctgagagccgaggacacagccctgtactattgcgccaaagagggcgactacgacgtcggcaactactacgctatggactactggggccagggaaccaccgtgactgtctcttctacgcgtatccagaaccctgatcctgccgtgtaccagctgcgggatagcaagagcagcgacaagagcgtgtgtctgttcaccgacttcgacagccagaccaacgtgtcccagagcaaggactccgacgtgtacatcaccgataagtgcgtgctggacatgcggagcatggacttcaagagcaactccgccgtggcctggtccaacaagtccgatttcgcctgcgccaacgccttcaacaacagcattatccccgaggacacattcttcccaagccccgagagcagcgactccaccgaccacgtgaagcccaaagagacagagaacaccaagcagcccagcaagagctgccacaagcccaaggccatcgtgcacaccgagaaagtgaacatgatgagcctgaccgtgctgggcctgcggatgctgttcgccaaaaccgtggccgtgaacttcctgctgaccgccaagctgttcttcctcctcaccgcc

SEQ ID NO: 6792 - DNA, 2997 bp, synthetic construct
  source 1..2997: mol_type = other DNA
atggccttaccagtgaccgccttgctcctgccgctggccttgctgctccacgccgccaggccggaagtgcagctggttgaatctggcggaggactggttcagcctggcggatctctgagactgtcttgtgccgccagcggcttcagcttcagcgacttttggatgagctgggtccgacaggcccctggcaaaggacttgaatgggtcgccacaatcagccaggccggcagcgagaaggactacgtggactctgtgaagggcagattcaccatcagccgggacaacgccaagaagtccctgtacctccagatgaacagcctgagagccgaggacaccgccgtgtactattgtgcctctggcgtgtacagcttcgactacagaggccagggcaccctggtcacagtctcttctggtaccggcggaggcggatctggcggcggaggtagcggtggcggaggatctgaattcgacgtggtcatgacacagaccccactgagcctgcctgtgtctctgggagatcaggccagcatctcctgtagaagcagccagagcctggtgcacagcaacggcaacacctacctgcggtggtatctccagaagcctggacagagccccaaggtgctgatctacaaggtgtccaacagagtgtccggcgtgcccgatagattttctggcagcggctctggcaccgacttcaccctgaagatcaatagagtggaagccgaggacctgggcgtgtacttctgtagccagagcacccatgtgccttggacctttggcggaggcaccaagctggaaatcaagctcgaggacctgaagaacgtgttcccacctgaggtggccgtgttcgagcctagcgaggccgagatcagccacacccagaaagccaccctcgtgtgcctggctaccggcttctaccccgaccatgtggaactgtcttggtgggtcaacggcaaagaggtgcacagcggcgtgtgtaccgacccccagccactgaaagaacagcccgccctgaacgacagccggtactgcctgagcagcagactgagagtgtccgccaccttctggcagaacccccggaaccacttcagatgccaggtgcagttctacggcctgagcgagaacgacgagtggacccaggacagagccaagcccgtgacccagatcgtgtctgccgaagcctggggcagagccgatgatgtgattaagatccactggcaggaaaagaagtccaacaccatcctgggcagccaggaaggcaacaccatgaagaccaacgacacctacatgaagttcagctggctgaccgtgcccgagaagtccctggacaaagaacacagatgcatcgtgcggcacgaaaacaacaagaacggcgtggaccaggaaatcatcttcccacccatcaagaccgatgtgattacaatggaccccaaggacaactgctccaaggacgccaacgataccctgctgctccagctgaccaacaccagcgcctactacatgtacttgttgctgctgctgaagtccgtggtgtacttcgccatcatcacatgctgcctgctgatggctatggtcaagcggaaggacagccggggaagggccaagcgatctggatctggagcaacaaacttctcactactcaaacaagcaggtgacgtggaggagaatcccgggcctactagtatggactggatttggcgcatccttttccttgtcggcgctgctaccggcgcgcattccgggccccagctccagctgcaagagtctggacctggcctggtcaagcctagcgagacactgagcctgacctgtaccgtgtccggcgatagcatcagcagcggcgattactactggggctggatcagacagcctcctggcaaaggactggaatggatcggccacatctactacagcggcgtgacctactacaaccccagcctgaagtccagagtgaccatcagcgtggacaccagccggaaccagttctccctgaagctgtctagcgtgacagccgccgataccgccgtgtactactgcaccagagaggacagcagcaactggcggagtagaggccagggaacactggtcacagttagctctggatccggcggaggcggaagtggaggcggaggatctggcggcggaggctctttcgaaggcgtgaagctggacgagacaggcggaggacttgttcaacctggcggagccatgaagctgagctgtgtgaccagcggctttaccttcggccactactggatgaactgggtccgacagtcccctgagaaaggactggaatgggtcgcccagttcagaaacaagccctacaactacgaaacctactacagcgacagcgtgaagggcagattcaccatcagccgggacgacagcaagtccagcgtgtacctccagatgaacaacctgcgcgtggaagataccggcatctactactgtaccggggccagctacggcatggaatatctcggccagggcaccagcgtgaccgtgtctacaacgcgtatccagaaccctgatcctgccgtgtaccagctgcgggatagcaagagcagcgacaagagcgtgtgtctgttcaccgacttcgacagccagaccaacgtgtcccagagcaaggactccgacgtgtacatcaccgataagtgcgtgctggacatgcggagcatggacttcaagagcaactccgccgtggcctggtccaacaagtccgatttcgcctgcgccaacgccttcaacaacagcattatccccgaggacacattcttcccaagccccgagagcagcgactccaccgaccacgtgaagcccaaagagacagagaacaccaagcagcccagcaagagctgccacaagcccaaggccatcgtgcacaccgagaaagtgaacatgatgagcctgaccgtgctgggcctgcggatgctgttcgccaaaaccgtggccgtgaacttcctgctgaccgccaagctgttcttcctcctcaccgcc

SEQ ID NO: 6793 - DNA, 3015 bp, synthetic construct
  source 1..3015: mol_type = other DNA
atggccttaccagtgaccgccttgctcctgccgctggccttgctgctccacgccgccaggccggaagtgcagctggttgaatctggcggaggactggttcagcctggcggatctctgagactgtcttgtgccgccagcggcttcagcttcagcgacttttggatgagctgggtccgacaggcccctggcaaaggacttgaatgggtcgccacaatcagccaggccggcagcgagaaggactacgtggactctgtgaagggcagattcaccatcagccgggacaacgccaagaagtccctgtacctccagatgaacagcctgagagccgaggacaccgccgtgtactattgtgcctctggcgtgtacagcttcgactacagaggccagggcaccctggtcacagtctcttctggtaccggcggaggcggatctggcggcggaggtagcggtggcggaggatctgaattccaggtgcaactggtggaatctggcggcaatctggttcagcctggcggctctctgagactgtcttgtgccgccagcggcttcaccttcggcagcttttctatgagctgggtccgacaagctcctggcggaggacttgaatgggtggcaggactgtctgccagaagcagcctgacacactacgccgactctgtgaagggcagattcaccatcagccgggacaacgccaagaacagcgtgtacctccagatgaacagcctgagagtggaagataccgccgtgtactactgcgccagaagaagctacgacagcagcggctactggggccacttctacagctacatggatgtgtggggccagggcaccctggttacagtttctctcgaggacctgaagaacgtgttcccacctgaggtggccgtgttcgagcctagcgaggccgagatcagccacacccagaaagccaccctcgtgtgcctggctaccggcttctaccccgaccatgtggaactgtcttggtgggtcaacggcaaagaggtgcacagcggcgtgtgtaccgacccccagccactgaaagaacagcccgccctgaacgacagccggtactgcctgagcagcagactgagagtgtccgccaccttctggcagaacccccggaaccacttcagatgccaggtgcagttctacggcctgagcgagaacgacgagtggacccaggacagagccaagcccgtgacccagatcgtgtctgccgaagcctggggcagagccgatgatgtgattaagatccactggcaggaaaagaagtccaacaccatcctgggcagccaggaaggcaacaccatgaagaccaacgacacctacatgaagttcagctggctgaccgtgcccgagaagtccctggacaaagaacacagatgcatcgtgcggcacgaaaacaacaagaacggcgtggaccaggaaatcatcttcccacccatcaagaccgatgtgattacaatggaccccaaggacaactgctccaaggacgccaacgataccctgctgctccagctgaccaacaccagcgcctactacatgtacttgttgctgctgctgaagtccgtggtgtacttcgccatcatcacatgctgcctgctgatggctatggtcaagcggaaggacagccggggaagggccaagcgatctggatctggagcaacaaacttctcactactcaaacaagcaggtgacgtggaggagaatcccgggcctactagtatggactggatttggcgcatccttttccttgtcggcgctgctaccggcgcgcattccgggccccagctccagctgcaagagtctggacctggcctggtcaagcctagcgagacactgagcctgacctgtaccgtgtccggcgatagcatcagcagcggcgattactactggggctggatcagacagcctcctggcaaaggactggaatggatcggccacatctactacagcggcgtgacctactacaaccccagcctgaagtccagagtgaccatcagcgtggacaccagccggaaccagttctccctgaagctgtctagcgtgacagccgccgataccgccgtgtactactgcaccagagaggacagcagcaactggcggagtagaggccagggaacactggtcacagttagctctggatccggcggaggcggaagtggaggcggaggatctggcggcggaggctctttcgaatctgtgctgacccagcctagctccgtgtctgctgctcctggacagaaagtgaccatctcctgtagcggcagcaccagcaacatcggcaacaactacgtgtcctggtatcagcagcaccccggcaaggcccctaagctgatgatctacgacgtgtccaagaggcccagcggcgtgccagatagattttccggcagcaagagcggcaacagcgccagcctggatattagcggactccagtctgaggacgaggccgactactattgcgccgcctgggatgatagcctgagcgagtttctgtttggcaccggcaccaagctgacagtgcttggaacgcgtatccagaaccctgatcctgccgtgtaccagctgcgggatagcaagagcagcgacaagagcgtgtgtctgttcaccgacttcgacagccagaccaacgtgtcccagagcaaggactccgacgtgtacatcaccgataagtgcgtgctggacatgcggagcatggacttcaagagcaactccgccgtggcctggtccaacaagtccgatttcgcctgcgccaacgccttcaacaacagcattatccccgaggacacattcttcccaagccccgagagcagcgactccaccgaccacgtgaagcccaaagagacagagaacaccaagcagcccagcaagagctgccacaagcccaaggccatcgtgcacaccgagaaagtgaacatgatgagcctgaccgtgctgggcctgcggatgctgttcgccaaaaccgtggccgtgaacttcctgctgaccgccaagctgttcttcctcctcaccgcc

SEQ ID NO: 6794 - DNA, 3000 bp, synthetic construct
  source 1..3000: mol_type = other DNA
atggccttaccagtgaccgccttgctcctgccgctggccttgctgctccacgccgccaggccggaagtgcagctggttgaatctggcggaggactggttcagcctggcggatctctgagactgtcttgtgccgccagcggcttcagcttcagcgacttttggatgagctgggtccgacaggcccctggcaaaggacttgaatgggtcgccacaatcagccaggccggcagcgagaaggactacgtggactctgtgaagggcagattcaccatcagccgggacaacgccaagaagtccctgtacctccagatgaacagcctgagagccgaggacaccgccgtgtactattgtgcctctggcgtgtacagcttcgactacagaggccagggcaccctggtcacagtctcttctggtaccggcggaggcggatctggcggcggaggtagcggtggcggaggatctgaattcgacgtggtcatgacacagagcccttctagcctgtctgccagcgtgggcgacagagtgacaatcacctgtcagagcagcctggacatcagccactacctgaactggtatcagcagaagcccggcaaggcccctaagctgctgatctacgacgccagcaatctggaaaccggcgtgcccagcagattttctggcagcggaagcggcacccacttcaccttcacaatatccagcctccagcctgaggacttcgccacctactactgccagcagtacgacaacctgcctctgacctttggcggaggcaccaagctggaaatcaagagactcgaggacctgaagaacgtgttcccacctgaggtggccgtgttcgagcctagcgaggccgagatcagccacacccagaaagccaccctcgtgtgcctggctaccggcttctaccccgaccatgtggaactgtcttggtgggtcaacggcaaagaggtgcacagcggcgtgtgtaccgacccccagccactgaaagaacagcccgccctgaacgacagccggtactgcctgagcagcagactgagagtgtccgccaccttctggcagaacccccggaaccacttcagatgccaggtgcagttctacggcctgagcgagaacgacgagtggacccaggacagagccaagcccgtgacccagatcgtgtctgccgaagcctggggcagagccgatgatgtgattaagatccactggcaggaaaagaagtccaacaccatcctgggcagccaggaaggcaacaccatgaagaccaacgacacctacatgaagttcagctggctgaccgtgcccgagaagtccctggacaaagaacacagatgcatcgtgcggcacgaaaacaacaagaacggcgtggaccaggaaatcatcttcccacccatcaagaccgatgtgattacaatggaccccaaggacaactgctccaaggacgccaacgataccctgctgctccagctgaccaacaccagcgcctactacatgtacttgttgctgctgctgaagtccgtggtgtacttcgccatcatcacatgctgcctgctgatggctatggtcaagcggaaggacagccggggaagggccaagcgatctggatctggagcaacaaacttctcactactcaaacaagcaggtgacgtggaggagaatcccgggcctactagtatggactggatttggcgcatccttttccttgtcggcgctgctaccggcgcgcattccgggccccagctccagctgcaagagtctggacctggcctggtcaagcctagcgagacactgagcctgacctgtaccgtgtccggcgatagcatcagcagcggcgattactactggggctggatcagacagcctcctggcaaaggactggaatggatcggccacatctactacagcggcgtgacctactacaaccccagcctgaagtccagagtgaccatcagcgtggacaccagccggaaccagttctccctgaagctgtctagcgtgacagccgccgataccgccgtgtactactgcaccagagaggacagcagcaactggcggagtagaggccagggaacactggtcacagttagctctggatccggcggaggcggaagtggaggcggaggatctggcggcggaggctctttcgaacaagttcaactggttcaatcaggcggaggcgtggtgcaacctggtggctctctgagagtgtcttgtgctgcctctggcgtgaccctgagcgactatggaatgcactgggtccgacaggcccctggcaaaggacttgagtgggtcgccttcatcagaaacgacggcagcgacaagtattacgccgacagcgtgaagggcagattcaccatcagccgggacaacagcgagaaaaccgtgtctctccagatgtctagcctgagagccgaggacaccgccgtgtactactgtgccaagaatggcgagagcggccctctggactactggtatctggatctgtggggcagaggcaccctggtcacagtctcttctacgcgtatccagaaccctgatcctgccgtgtaccagctgcgggatagcaagagcagcgacaagagcgtgtgtctgttcaccgacttcgacagccagaccaacgtgtcccagagcaaggactccgacgtgtacatcaccgataagtgcgtgctggacatgcggagcatggacttcaagagcaactccgccgtggcctggtccaacaagtccgatttcgcctgcgccaacgccttcaacaacagcattatccccgaggacacattcttcccaagccccgagagcagcgactccaccgaccacgtgaagcccaaagagacagagaacaccaagcagcccagcaagagctgccacaagcccaaggccatcgtgcacaccgagaaagtgaacatgatgagcctgaccgtgctgggcctgcggatgctgttcgccaaaaccgtggccgtgaacttcctgctgaccgccaagctgttcttcctcctcaccgcc

SEQ ID NO: 6795 - DNA, 3012 bp, synthetic construct
  source 1..3012: mol_type = other DNA
atggccttaccagtgaccgccttgctcctgccgctggccttgctgctccacgccgccaggccggaagtgcagctggttgaatctggcggaggactggttcagcctggcggatctctgagactgtcttgtgccgccagcggcttcagcttcagcgacttttggatgagctgggtccgacaggcccctggcaaaggacttgaatgggtcgccacaatcagccaggccggcagcgagaaggactacgtggactctgtgaagggcagattcaccatcagccgggacaacgccaagaagtccctgtacctccagatgaacagcctgagagccgaggacaccgccgtgtactattgtgcctctggcgtgtacagcttcgactacagaggccagggcaccctggtcacagtctcttctggtaccggcggaggcggatctggcggcggaggtagcggtggcggaggatctgaattcagctacgagctgacacagcctccatccgtgtctggcacacctggacagagagtggctatctcctgtagcggcagcagcagcaacatcggcaccagaatggtcacctggtatcagcacgtgccaggcacagcccctaagctgctgatcttcaacaacaaccagcggcctagcggcgtgcccgatagattttctgccagcaagagcggcacaagcgccagcctggctatcatcggactccagtctgacgacgaggccgactactactgtgccacctgggacgacaacgtgaagtcctacgtgttcggcaccggcaccaaagtgacagtgcttggaagtagactcgaggacctgaagaacgtgttcccacctgaggtggccgtgttcgagcctagcgaggccgagatcagccacacccagaaagccaccctcgtgtgcctggctaccggcttctaccccgaccatgtggaactgtcttggtgggtcaacggcaaagaggtgcacagcggcgtgtgtaccgacccccagccactgaaagaacagcccgccctgaacgacagccggtactgcctgagcagcagactgagagtgtccgccaccttctggcagaacccccggaaccacttcagatgccaggtgcagttctacggcctgagcgagaacgacgagtggacccaggacagagccaagcccgtgacccagatcgtgtctgccgaagcctggggcagagccgatgatgtgattaagatccactggcaggaaaagaagtccaacaccatcctgggcagccaggaaggcaacaccatgaagaccaacgacacctacatgaagttcagctggctgaccgtgcccgagaagtccctggacaaagaacacagatgcatcgtgcggcacgaaaacaacaagaacggcgtggaccaggaaatcatcttcccacccatcaagaccgatgtgattacaatggaccccaaggacaactgctccaaggacgccaacgataccctgctgctccagctgaccaacaccagcgcctactacatgtacttgttgctgctgctgaagtccgtggtgtacttcgccatcatcacatgctgcctgctgatggctatggtcaagcggaaggacagccggggaagggccaagcgatctggatctggagcaacaaacttctcactactcaaacaagcaggtgacgtggaggagaatcccgggcctactagtatggactggatttggcgcatccttttccttgtcggcgctgctaccggcgcgcattccgggccccagctccagctgcaagagtctggacctggcctggtcaagcctagcgagacactgagcctgacctgtaccgtgtccggcgatagcatcagcagcggcgattactactggggctggatcagacagcctcctggcaaaggactggaatggatcggccacatctactacagcggcgtgacctactacaaccccagcctgaagtccagagtgaccatcagcgtggacaccagccggaaccagttctccctgaagctgtctagcgtgacagccgccgataccgccgtgtactactgcaccagagaggacagcagcaactggcggagtagaggccagggaacactggtcacagttagctctggatccggcggaggcggaagtggaggcggaggatctggcggcggaggctctttcgaacttgaaatggcccaggttcagctccagcagtggggagctggactgctgaagcctagcgagacactgagcctgacctgtgctgtgtacggcggcagcttcagcggctactactggtcctggatcagacagcctcctggcaaaggactggaatggatcggcgagatcaaccacagcggctccaccaactacaaccccagcctgaagtccagagtgaccatcagcgtggacaccagcaagaaccagttctccctgaagctgagcagcgtgacagccgctgataccgccgtgtactattgcgctagagcccctcagtcttggtacgtgggagatgtgtggggccagggcacactggttacagtgtcatctacgcgtatccagaaccctgatcctgccgtgtaccagctgcgggatagcaagagcagcgacaagagcgtgtgtctgttcaccgacttcgacagccagaccaacgtgtcccagagcaaggactccgacgtgtacatcaccgataagtgcgtgctggacatgcggagcatggacttcaagagcaactccgccgtggcctggtccaacaagtccgatttcgcctgcgccaacgccttcaacaacagcattatccccgaggacacattcttcccaagccccgagagcagcgactccaccgaccacgtgaagcccaaagagacagagaacaccaagcagcccagcaagagctgccacaagcccaaggccatcgtgcacaccgagaaagtgaacatgatgagcctgaccgtgctgggcctgcggatgctgttcgccaaaaccgtggccgtgaacttcctgctgaccgccaagctgttcttcctcctcaccgcc

SEQ ID NO: 6796 - DNA, 3003 bp, synthetic construct
  source 1..3003: mol_type = other DNA
atggccttaccagtgaccgccttgctcctgccgctggccttgctgctccacgccgccaggccggaagtgcagctggttgaatctggcggaggactggttcagcctggcggatctctgagactgtcttgtgccgccagcggcttcagcttcagcgacttttggatgagctgggtccgacaggcccctggcaaaggacttgaatgggtcgccacaatcagccaggccggcagcgagaaggactacgtggactctgtgaagggcagattcaccatcagccgggacaacgccaagaagtccctgtacctccagatgaacagcctgagagccgaggacaccgccgtgtactattgtgcctctggcgtgtacagcttcgactacagaggccagggcaccctggtcacagtctcttctggtaccggcggaggcggatctggcggcggaggtagcggtggcggaggatctgaattccagtctgtgctgacacagcctcctagcctgtctgtggcccctggaaagacagccagcatcacatgcggcggcaacaacatcggcatgaagtccgtgcactggtatcagcagaggccaggacaggctcctgtgctggtcatctactacgacagcgacagaccctctggcatccccggcagattttccggcagcaactctggcaataccgccacactgaccatctccagagtggaagctggcgacgaggccgactactactgccaagtgtgggataccaccggcgatcaccctggctatgtgtttggcaccggcaccaaagtgacagtgcttctcgaggacctgaagaacgtgttcccacctgaggtggccgtgttcgagcctagcgaggccgagatcagccacacccagaaagccaccctcgtgtgcctggctaccggcttctaccccgaccatgtggaactgtcttggtgggtcaacggcaaagaggtgcacagcggcgtgtgtaccgacccccagccactgaaagaacagcccgccctgaacgacagccggtactgcctgagcagcagactgagagtgtccgccaccttctggcagaacccccggaaccacttcagatgccaggtgcagttctacggcctgagcgagaacgacgagtggacccaggacagagccaagcccgtgacccagatcgtgtctgccgaagcctggggcagagccgatgatgtgattaagatccactggcaggaaaagaagtccaacaccatcctgggcagccaggaaggcaacaccatgaagaccaacgacacctacatgaagttcagctggctgaccgtgcccgagaagtccctggacaaagaacacagatgcatcgtgcggcacgaaaacaacaagaacggcgtggaccaggaaatcatcttcccacccatcaagaccgatgtgattacaatggaccccaaggacaactgctccaaggacgccaacgataccctgctgctccagctgaccaacaccagcgcctactacatgtacttgttgctgctgctgaagtccgtggtgtacttcgccatcatcacatgctgcctgctgatggctatggtcaagcggaaggacagccggggaagggccaagcgatctggatctggagcaacaaacttctcactactcaaacaagcaggtgacgtggaggagaatcccgggcctactagtatggactggatttggcgcatccttttccttgtcggcgctgctaccggcgcgcattccgggccccagctccagctgcaagagtctggacctggcctggtcaagcctagcgagacactgagcctgacctgtaccgtgtccggcgatagcatcagcagcggcgattactactggggctggatcagacagcctcctggcaaaggactggaatggatcggccacatctactacagcggcgtgacctactacaaccccagcctgaagtccagagtgaccatcagcgtggacaccagccggaaccagttctccctgaagctgtctagcgtgacagccgccgataccgccgtgtactactgcaccagagaggacagcagcaactggcggagtagaggccagggaacactggtcacagttagctctggatccggcggaggcggaagtggaggcggaggatctggcggcggaggctctttcgaacaagttcaactggttcagagcggagccgaagtgaagaaacctggcagcagcgtgaaggtgtcctgcaaagcaagcggcggcacctttagcagctacgccatctcttgggtccgacaggcacctggacaaggactggaatggatgggcggcatcatccccatcttcggcacagccaattacgcccagaaattccagggcagagtgaccatcaccgccgacgagtctacaagcaccgcctacatggaactgagcagcctgagaagcgaggacaccgccgtgtactattgtgccagaggcgtgtacggctacagcggctctgccccttatgatgagtggggccagggaaccctggtcaccgtttcttctacgcgtatccagaaccctgatcctgccgtgtaccagctgcgggatagcaagagcagcgacaagagcgtgtgtctgttcaccgacttcgacagccagaccaacgtgtcccagagcaaggactccgacgtgtacatcaccgataagtgcgtgctggacatgcggagcatggacttcaagagcaactccgccgtggcctggtccaacaagtccgatttcgcctgcgccaacgccttcaacaacagcattatccccgaggacacattcttcccaagccccgagagcagcgactccaccgaccacgtgaagcccaaagagacagagaacaccaagcagcccagcaagagctgccacaagcccaaggccatcgtgcacaccgagaaagtgaacatgatgagcctgaccgtgctgggcctgcggatgctgttcgccaaaaccgtggccgtgaacttcctgctgaccgccaagctgttcttcctcctcaccgcc

SEQ ID NO: 6797 - DNA, 2997 bp, synthetic construct
  source 1..2997: mol_type = other DNA
atggccttaccagtgaccgccttgctcctgccgctggccttgctgctccacgccgccaggccggaagtgcagctggttgaatctggcggaggactggttcagcctggcggatctctgagactgtcttgtgccgccagcggcttcagcttcagcgacttttggatgagctgggtccgacaggcccctggcaaaggacttgaatgggtcgccacaatcagccaggccggcagcgagaaggactacgtggactctgtgaagggcagattcaccatcagccgggacaacgccaagaagtccctgtacctccagatgaacagcctgagagccgaggacaccgccgtgtactattgtgcctctggcgtgtacagcttcgactacagaggccagggcaccctggtcacagtctcttctggtaccggcggaggcggatctggcggcggaggtagcggtggcggaggatctgaattcgaggtgcaactggttgagtctggcggaggactggtgcagcctggaagaagcctgagactgtcttgtgccgccagcggcttcaccttcgacgattatgccatgcactgggtccgacaggcccctggcaaaggacttgaatgggtgtccggcatctcctggaacagcggctctatcggctacgccgattccgtgaagggcagattcaccatcagccgggacaacgccaagaacagcctgtacctccagatgaactccctgagagccgaggacacagccctgtactactgcgccaaagacaaaggcggaggctactacgacttttggagcggcagcgattattggggccagggcacactggtcacagtgtctagcctcgaggacctgaagaacgtgttcccacctgaggtggccgtgttcgagcctagcgaggccgagatcagccacacccagaaagccaccctcgtgtgcctggctaccggcttctaccccgaccatgtggaactgtcttggtgggtcaacggcaaagaggtgcacagcggcgtgtgtaccgacccccagccactgaaagaacagcccgccctgaacgacagccggtactgcctgagcagcagactgagagtgtccgccaccttctggcagaacccccggaaccacttcagatgccaggtgcagttctacggcctgagcgagaacgacgagtggacccaggacagagccaagcccgtgacccagatcgtgtctgccgaagcctggggcagagccgatgatgtgattaagatccactggcaggaaaagaagtccaacaccatcctgggcagccaggaaggcaacaccatgaagaccaacgacacctacatgaagttcagctggctgaccgtgcccgagaagtccctggacaaagaacacagatgcatcgtgcggcacgaaaacaacaagaacggcgtggaccaggaaatcatcttcccacccatcaagaccgatgtgattacaatggaccccaaggacaactgctccaaggacgccaacgataccctgctgctccagctgaccaacaccagcgcctactacatgtacttgttgctgctgctgaagtccgtggtgtacttcgccatcatcacatgctgcctgctgatggctatggtcaagcggaaggacagccggggaagggccaagcgatctggatctggagcaacaaacttctcactactcaaacaagcaggtgacgtggaggagaatcccgggcctactagtatggactggatttggcgcatccttttccttgtcggcgctgctaccggcgcgcattccgggccccagctccagctgcaagagtctggacctggcctggtcaagcctagcgagacactgagcctgacctgtaccgtgtccggcgatagcatcagcagcggcgattactactggggctggatcagacagcctcctggcaaaggactggaatggatcggccacatctactacagcggcgtgacctactacaaccccagcctgaagtccagagtgaccatcagcgtggacaccagccggaaccagttctccctgaagctgtctagcgtgacagccgccgataccgccgtgtactactgcaccagagaggacagcagcaactggcggagtagaggccagggaacactggtcacagttagctctggatccggcggaggcggaagtggaggcggaggatctggcggcggaggctctttcgaatcttctgagctgacacaggaccctgccgtgtctgttgctctgggccagacagtgcggattacctgtcagggcgatagcctgagaagctactacgcctcctggtatcagcagaagccaggccaggctcctgtgctggtcatctacggcaagaacaacagacccagcggcatccccgatagattcagcggaagcagctctggcaataccgccagcctgacaattactggcgctcaggccgaggacgaggccgactactactgcaacagcagagatagcagcggctgggttttcggcggaggcacaaaactgacagtgctgacgcgtatccagaaccctgatcctgccgtgtaccagctgcgggatagcaagagcagcgacaagagcgtgtgtctgttcaccgacttcgacagccagaccaacgtgtcccagagcaaggactccgacgtgtacatcaccgataagtgcgtgctggacatgcggagcatggacttcaagagcaactccgccgtggcctggtccaacaagtccgatttcgcctgcgccaacgccttcaacaacagcattatccccgaggacacattcttcccaagccccgagagcagcgactccaccgaccacgtgaagcccaaagagacagagaacaccaagcagcccagcaagagctgccacaagcccaaggccatcgtgcacaccgagaaagtgaacatgatgagcctgaccgtgctgggcctgcggatgctgttcgccaaaaccgtggccgtgaacttcctgctgaccgccaagctgttcttcctcctcaccgcc

SEQ ID NO: 6798 - DNA, 3024 bp, synthetic construct
  source 1..3024: mol_type = other DNA
atggccttaccagtgaccgccttgctcctgccgctggccttgctgctccacgccgccaggccggaagtgcagctggttgaatctggcggaggactggttcagcctggcggatctctgagactgtcttgtgccgccagcggcttcagcttcagcgacttttggatgagctgggtccgacaggcccctggcaaaggacttgaatgggtcgccacaatcagccaggccggcagcgagaaggactacgtggactctgtgaagggcagattcaccatcagccgggacaacgccaagaagtccctgtacctccagatgaacagcctgagagccgaggacaccgccgtgtactattgtgcctctggcgtgtacagcttcgactacagaggccagggcaccctggtcacagtctcttctggtaccggcggaggcggatctggcggcggaggtagcggtggcggaggatctgaattcgaagtgcagctccagcagtctggacctggcctggttaagcctagccagacactgagcctgacctgtgccatcagcggcgatagcgtgctgagcaacagcgacacctggaactggatcagacagagccctagcagaggactggaatggctgggcagaacctaccacagaagcacttggtacgacgactacgccagctctgtgcggggcagagtgtccatcaatgtggacaccagcaagaaccagtacagcctgcaactgaacgccgtgacacctgaggataccggcgtgtactactgcgccagagacagactccaggacggcaactcttggagcgacgcctttgatgtgtggggccagggcacaatggtcaccgtttctagcctcgaggacctgaagaacgtgttcccacctgaggtggccgtgttcgagcctagcgaggccgagatcagccacacccagaaagccaccctcgtgtgcctggctaccggcttctaccccgaccatgtggaactgtcttggtgggtcaacggcaaagaggtgcacagcggcgtgtgtaccgacccccagccactgaaagaacagcccgccctgaacgacagccggtactgcctgagcagcagactgagagtgtccgccaccttctggcagaacccccggaaccacttcagatgccaggtgcagttctacggcctgagcgagaacgacgagtggacccaggacagagccaagcccgtgacccagatcgtgtctgccgaagcctggggcagagccgatgatgtgattaagatccactggcaggaaaagaagtccaacaccatcctgggcagccaggaaggcaacaccatgaagaccaacgacacctacatgaagttcagctggctgaccgtgcccgagaagtccctggacaaagaacacagatgcatcgtgcggcacgaaaacaacaagaacggcgtggaccaggaaatcatcttcccacccatcaagaccgatgtgattacaatggaccccaaggacaactgctccaaggacgccaacgataccctgctgctccagctgaccaacaccagcgcctactacatgtacttgttgctgctgctgaagtccgtggtgtacttcgccatcatcacatgctgcctgctgatggctatggtcaagcggaaggacagccggggaagggccaagcgatctggatctggagcaacaaacttctcactactcaaacaagcaggtgacgtggaggagaatcccgggcctactagtatggactggatttggcgcatccttttccttgtcggcgctgctaccggcgcgcattccgggccccagctccagctgcaagagtctggacctggcctggtcaagcctagcgagacactgagcctgacctgtaccgtgtccggcgatagcatcagcagcggcgattactactggggctggatcagacagcctcctggcaaaggactggaatggatcggccacatctactacagcggcgtgacctactacaaccccagcctgaagtccagagtgaccatcagcgtggacaccagccggaaccagttctccctgaagctgtctagcgtgacagccgccgataccgccgtgtactactgcaccagagaggacagcagcaactggcggagtagaggccagggaacactggtcacagttagctctggatccggcggaggcggaagtggaggcggaggatctggcggcggaggctctttcgaacaatctgctctgacacagcctgccagcgtgtcaggatctcctggacagagcatcaccatctcttgcaccggcaccagctctgatgtcggcggctacaattacgtgtcctggtatcagcagcaccccggcaaggcccctaagctgatgatctacgacgtgtccaacagacccagcggcgtgtccaatagattctccggcagcaagagcggcaacaccgccagcctgacaatttctggactgcaagccgaggacgaggccgactactactgtagcagctacaccagcagcagcacactggtgtacgtgttcggcacaggcaccaaagtgaccgtgcttacgcgtatccagaaccctgatcctgccgtgtaccagctgcgggatagcaagagcagcgacaagagcgtgtgtctgttcaccgacttcgacagccagaccaacgtgtcccagagcaaggactccgacgtgtacatcaccgataagtgcgtgctggacatgcggagcatggacttcaagagcaactccgccgtggcctggtccaacaagtccgatttcgcctgcgccaacgccttcaacaacagcattatccccgaggacacattcttcccaagccccgagagcagcgactccaccgaccacgtgaagcccaaagagacagagaacaccaagcagcccagcaagagctgccacaagcccaaggccatcgtgcacaccgagaaagtgaacatgatgagcctgaccgtgctgggcctgcggatgctgttcgccaaaaccgtggccgtgaacttcctgctgaccgccaagctgttcttcctcctcaccgcc

SEQ ID NO: 6799 - DNA, 2958 bp, synthetic construct
  source 1..2958: mol_type = other DNA
atggccttaccagtgaccgccttgctcctgccgctggccttgctgctccacgccgccaggccggaagtgcagctggttgaatctggcggaggactggttcagcctggcggatctctgagactgtcttgtgccgccagcggcttcagcttcagcgacttttggatgagctgggtccgacaggcccctggcaaaggacttgaatgggtcgccacaatcagccaggccggcagcgagaaggactacgtggactctgtgaagggcagattcaccatcagccgggacaacgccaagaagtccctgtacctccagatgaacagcctgagagccgaggacaccgccgtgtactattgtgcctctggcgtgtacagcttcgactacagaggccagggcaccctggtcacagtctcttctggtaccggcggaggcggatctggcggcggaggtagcggtggcggaggatctgaattccaggtgcaactggttcagtctggggccgaagtgaagaaacctggggcctctgtgaaggtgtcctgcaaggcttccggctacacctttaccagctacgacatcaactgggtccgacaggccacaggccaaggactggaatggatgggctggatgaaccccaacagcggcaataccggctacgcccagaaattccagggcagagtgaccatgaccagaaacaccagcatcagcaccgcctacatggaactgagcagcctgagaagcgaggacaccgccgtgtactattgcgccagaggcgacagcaccaaggtggaaatcaaactcgaggacctgaagaacgtgttcccacctgaggtggccgtgttcgagcctagcgaggccgagatcagccacacccagaaagccaccctcgtgtgcctggctaccggcttctaccccgaccatgtggaactgtcttggtgggtcaacggcaaagaggtgcacagcggcgtgtgtaccgacccccagccactgaaagaacagcccgccctgaacgacagccggtactgcctgagcagcagactgagagtgtccgccaccttctggcagaacccccggaaccacttcagatgccaggtgcagttctacggcctgagcgagaacgacgagtggacccaggacagagccaagcccgtgacccagatcgtgtctgccgaagcctggggcagagccgatgatgtgattaagatccactggcaggaaaagaagtccaacaccatcctgggcagccaggaaggcaacaccatgaagaccaacgacacctacatgaagttcagctggctgaccgtgcccgagaagtccctggacaaagaacacagatgcatcgtgcggcacgaaaacaacaagaacggcgtggaccaggaaatcatcttcccacccatcaagaccgatgtgattacaatggaccccaaggacaactgctccaaggacgccaacgataccctgctgctccagctgaccaacaccagcgcctactacatgtacttgttgctgctgctgaagtccgtggtgtacttcgccatcatcacatgctgcctgctgatggctatggtcaagcggaaggacagccggggaagggccaagcgatctggatctggagcaacaaacttctcactactcaaacaagcaggtgacgtggaggagaatcccgggcctactagtatggactggatttggcgcatccttttccttgtcggcgctgctaccggcgcgcattccgggccccagctccagctgcaagagtctggacctggcctggtcaagcctagcgagacactgagcctgacctgtaccgtgtccggcgatagcatcagcagcggcgattactactggggctggatcagacagcctcctggcaaaggactggaatggatcggccacatctactacagcggcgtgacctactacaaccccagcctgaagtccagagtgaccatcagcgtggacaccagccggaaccagttctccctgaagctgtctagcgtgacagccgccgataccgccgtgtactactgcaccagagaggacagcagcaactggcggagtagaggccagggaacactggtcacagttagctctggatccggcggaggcggaagtggaggcggaggatctggcggcggaggctctttcgaacaatctgtgctgacccagcctagatccgtgtctggctctcctggacagagcgtgaccatctcttgtaccggcaccagctctgatgtcggcggctacaattacgtgtcctggtatcagcagcaccccggcgaagcccctaagctgattatctacgacgccgacaagcggcccagcggcatcagcaatagattcagctctggcaagagcggcaacaccgccagcctgacaatcagcggactccaggtggaagatgaggccgactactactgctgctcctatgccggcggaagcacctgggttttcggaggcggtacaaaagtgaccgtgctgacgcgtatccagaaccctgatcctgccgtgtaccagctgcgggatagcaagagcagcgacaagagcgtgtgtctgttcaccgacttcgacagccagaccaacgtgtcccagagcaaggactccgacgtgtacatcaccgataagtgcgtgctggacatgcggagcatggacttcaagagcaactccgccgtggcctggtccaacaagtccgatttcgcctgcgccaacgccttcaacaacagcattatccccgaggacacattcttcccaagccccgagagcagcgactccaccgaccacgtgaagcccaaagagacagagaacaccaagcagcccagcaagagctgccacaagcccaaggccatcgtgcacaccgagaaagtgaacatgatgagcctgaccgtgctgggcctgcggatgctgttcgccaaaaccgtggccgtgaacttcctgctgaccgccaagctgttcttcctcctcaccgcc

SEQ ID NO: 6800 - DNA, 3024 bp, synthetic construct
  source 1..3024: mol_type = other DNA
atggccttaccagtgaccgccttgctcctgccgctggccttgctgctccacgccgccaggccggaagtgcagctggttgaatctggcggaggactggttcagcctggcggatctctgagactgtcttgtgccgccagcggcttcagcttcagcgacttttggatgagctgggtccgacaggcccctggcaaaggacttgaatgggtcgccacaatcagccaggccggcagcgagaaggactacgtggactctgtgaagggcagattcaccatcagccgggacaacgccaagaagtccctgtacctccagatgaacagcctgagagccgaggacaccgccgtgtactattgtgcctctggcgtgtacagcttcgactacagaggccagggcaccctggtcacagtctcttctggtaccggcggaggcggatctggcggcggaggtagcggtggcggaggatctgaattcgaagtgcagctccagcagtctggacctggcctggttaagcctagccagacactgagcctgacctgtgccatcagcggcgatagcgtgtcctctaatagcgccgcctggaactggatcagacagagccctagcagaggactggaatggctgggcagaacctactaccgcagcaagtggtacagcgactacgccgtgtccgtgaagtcccggatcaccatcaatcccgacaccagcaagaaccagttcagcctgcaactgaacagcgtgacccctgaggataccgccgtgtactactgcgccagagatccctacgacttttggagcggctaccccgacgcctttgacatctggggacagggcacaatggtcaccgtttctagcctcgaggacctgaagaacgtgttcccacctgaggtggccgtgttcgagcctagcgaggccgagatcagccacacccagaaagccaccctcgtgtgcctggctaccggcttctaccccgaccatgtggaactgtcttggtgggtcaacggcaaagaggtgcacagcggcgtgtgtaccgacccccagccactgaaagaacagcccgccctgaacgacagccggtactgcctgagcagcagactgagagtgtccgccaccttctggcagaacccccggaaccacttcagatgccaggtgcagttctacggcctgagcgagaacgacgagtggacccaggacagagccaagcccgtgacccagatcgtgtctgccgaagcctggggcagagccgatgatgtgattaagatccactggcaggaaaagaagtccaacaccatcctgggcagccaggaaggcaacaccatgaagaccaacgacacctacatgaagttcagctggctgaccgtgcccgagaagtccctggacaaagaacacagatgcatcgtgcggcacgaaaacaacaagaacggcgtggaccaggaaatcatcttcccacccatcaagaccgatgtgattacaatggaccccaaggacaactgctccaaggacgccaacgataccctgctgctccagctgaccaacaccagcgcctactacatgtacttgttgctgctgctgaagtccgtggtgtacttcgccatcatcacatgctgcctgctgatggctatggtcaagcggaaggacagccggggaagggccaagcgatctggatctggagcaacaaacttctcactactcaaacaagcaggtgacgtggaggagaatcccgggcctactagtatggactggatttggcgcatccttttccttgtcggcgctgctaccggcgcgcattccgggccccagctccagctgcaagagtctggacctggcctggtcaagcctagcgagacactgagcctgacctgtaccgtgtccggcgatagcatcagcagcggcgattactactggggctggatcagacagcctcctggcaaaggactggaatggatcggccacatctactacagcggcgtgacctactacaaccccagcctgaagtccagagtgaccatcagcgtggacaccagccggaaccagttctccctgaagctgtctagcgtgacagccgccgataccgccgtgtactactgcaccagagaggacagcagcaactggcggagtagaggccagggaacactggtcacagttagctctggatccggcggaggcggaagtggaggcggaggatctggcggcggaggctctttcgaacaatctgctctgacacagcctgccagcgtgtcaggatctcctggacagagcatcaccatctcttgcaccggcaccagctctgatgtcggcggctacaattacgtgtcctggtatcagcagcaccccggcaaggcccctaaagtgattatcagcgaagtgaacaacagacccagcggcgtgtcccacagattcagcggctctaagtctggcaacaccgccagcctgacaatctctggactgcaagccgaggacgaggccgactacttctgtagcagctacaccagcggcagaaccctgtacgtgttcggcacaggcagcaaagtgacagtgctgggaacgcgtatccagaaccctgatcctgccgtgtaccagctgcgggatagcaagagcagcgacaagagcgtgtgtctgttcaccgacttcgacagccagaccaacgtgtcccagagcaaggactccgacgtgtacatcaccgataagtgcgtgctggacatgcggagcatggacttcaagagcaactccgccgtggcctggtccaacaagtccgatttcgcctgcgccaacgccttcaacaacagcattatccccgaggacacattcttcccaagccccgagagcagcgactccaccgaccacgtgaagcccaaagagacagagaacaccaagcagcccagcaagagctgccacaagcccaaggccatcgtgcacaccgagaaagtgaacatgatgagcctgaccgtgctgggcctgcggatgctgttcgccaaaaccgtggccgtgaacttcctgctgaccgccaagctgttcttcctcctcaccgcc

SEQ ID NO: 6801 - DNA, 3021 bp, synthetic construct
  source 1..3021: mol_type = other DNA
atggccttaccagtgaccgccttgctcctgccgctggccttgctgctccacgccgccaggccggaagtgcagctggttgaatctggcggaggactggttcagcctggcggatctctgagactgtcttgtgccgccagcggcttcagcttcagcgacttttggatgagctgggtccgacaggcccctggcaaaggacttgaatgggtcgccacaatcagccaggccggcagcgagaaggactacgtggactctgtgaagggcagattcaccatcagccgggacaacgccaagaagtccctgtacctccagatgaacagcctgagagccgaggacaccgccgtgtactattgtgcctctggcgtgtacagcttcgactacagaggccagggcaccctggtcacagtctcttctggtaccggcggaggcggatctggcggcggaggtagcggtggcggaggatctgaattccaatctgctctgacacagcctgccagcgcctctggatctcctggacagagcgtgaccatctcctgtaccggcacctcttctgatgtcggcggctacaactacgtgtcctggtatcagcagcaccccggcaaggcccctaagctgatgatctacgacgtgtccaacagacccagcggcgtgtccaatagattctccggcagcaagagcggcaacaccgccagcctgacaatttctggactgcaagccgaggacgaggccgactactactgtagcagctacaccagcagcagcacactgtacgtgttcggcacaggcacccagctcacagttcttctcgaggacctgaagaacgtgttcccacctgaggtggccgtgttcgagcctagcgaggccgagatcagccacacccagaaagccaccctcgtgtgcctggctaccggcttctaccccgaccatgtggaactgtcttggtgggtcaacggcaaagaggtgcacagcggcgtgtgtaccgacccccagccactgaaagaacagcccgccctgaacgacagccggtactgcctgagcagcagactgagagtgtccgccaccttctggcagaacccccggaaccacttcagatgccaggtgcagttctacggcctgagcgagaacgacgagtggacccaggacagagccaagcccgtgacccagatcgtgtctgccgaagcctggggcagagccgatgatgtgattaagatccactggcaggaaaagaagtccaacaccatcctgggcagccaggaaggcaacaccatgaagaccaacgacacctacatgaagttcagctggctgaccgtgcccgagaagtccctggacaaagaacacagatgcatcgtgcggcacgaaaacaacaagaacggcgtggaccaggaaatcatcttcccacccatcaagaccgatgtgattacaatggaccccaaggacaactgctccaaggacgccaacgataccctgctgctccagctgaccaacaccagcgcctactacatgtacttgttgctgctgctgaagtccgtggtgtacttcgccatcatcacatgctgcctgctgatggctatggtcaagcggaaggacagccggggaagggccaagcgatctggatctggagcaacaaacttctcactactcaaacaagcaggtgacgtggaggagaatcccgggcctactagtatggactggatttggcgcatccttttccttgtcggcgctgctaccggcgcgcattccgggccccagctccagctgcaagagtctggacctggcctggtcaagcctagcgagacactgagcctgacctgtaccgtgtccggcgatagcatcagcagcggcgattactactggggctggatcagacagcctcctggcaaaggactggaatggatcggccacatctactacagcggcgtgacctactacaaccccagcctgaagtccagagtgaccatcagcgtggacaccagccggaaccagttctccctgaagctgtctagcgtgacagccgccgataccgccgtgtactactgcaccagagaggacagcagcaactggcggagtagaggccagggaacactggtcacagttagctctggatccggcggaggcggaagtggaggcggaggatctggcggcggaggctctttcgaagaagtgcagctccagcagtctggacctggcctggttaagcctagccagacactgagcctgacctgtgccatcagcggcgattccatgctgagcaacagcgacacctggaactggatcagacagagccccagcagaggcctggaatggctgggcagaacataccacagaagcacttggtacgacgactacgccagctctgtgcggggcagagtgtccatcaatgtggacaccagcaagaaccagtacagcctgcaactgaacgccgtgacacctgaggataccggcgtgtactactgtgccagagtgcggctccaggacggcaattcttggagcgacgcctttgatgtgtggggccagggcacaatggtcaccgtttctagcacgcgtatccagaaccctgatcctgccgtgtaccagctgcgggatagcaagagcagcgacaagagcgtgtgtctgttcaccgacttcgacagccagaccaacgtgtcccagagcaaggactccgacgtgtacatcaccgataagtgcgtgctggacatgcggagcatggacttcaagagcaactccgccgtggcctggtccaacaagtccgatttcgcctgcgccaacgccttcaacaacagcattatccccgaggacacattcttcccaagccccgagagcagcgactccaccgaccacgtgaagcccaaagagacagagaacaccaagcagcccagcaagagctgccacaagcccaaggccatcgtgcacaccgagaaagtgaacatgatgagcctgaccgtgctgggcctgcggatgctgttcgccaaaaccgtggccgtgaacttcctgctgaccgccaagctgttcttcctcctcaccgcc

SEQ ID NO: 6802 - DNA, 3021 bp, synthetic construct
  source 1..3021: mol_type = other DNA
atggccttaccagtgaccgccttgctcctgccgctggccttgctgctccacgccgccaggccggaagtgcagctggttgaatctggcggaggactggttcagcctggcggatctctgagactgtcttgtgccgccagcggcttcagcttcagcgacttttggatgagctgggtccgacaggcccctggcaaaggacttgaatgggtcgccacaatcagccaggccggcagcgagaaggactacgtggactctgtgaagggcagattcaccatcagccgggacaacgccaagaagtccctgtacctccagatgaacagcctgagagccgaggacaccgccgtgtactattgtgcctctggcgtgtacagcttcgactacagaggccagggcaccctggtcacagtctcttctggtaccggcggaggcggatctggcggcggaggtagcggtggcggaggatctgaattcgacgtgatgctgacccagacaccactgagcctgcctgtgtctctgggcgatcaggccagcatctcctgtagaagcagccagagcatcctgcacagcaccggcgatacctacctggaatggtatctccagaagcctggacagagccccaagctgctgattaacaaggtgtccaaccggctgagcggcgtgcccgatagattttctggcagcggctctggcaccgacttcaccctgaagatcagcagagtggaagccgaggacctgggcgtgtactactgcttccaaggcagccatgttccttggacctttggcggaggcaccaagctggaaatcaagagagctgacgccgctcctaccgtgtccatctttcctctcgaggacctgaagaacgtgttcccacctgaggtggccgtgttcgagcctagcgaggccgagatcagccacacccagaaagccaccctcgtgtgcctggctaccggcttctaccccgaccatgtggaactgtcttggtgggtcaacggcaaagaggtgcacagcggcgtgtgtaccgacccccagccactgaaagaacagcccgccctgaacgacagccggtactgcctgagcagcagactgagagtgtccgccaccttctggcagaacccccggaaccacttcagatgccaggtgcagttctacggcctgagcgagaacgacgagtggacccaggacagagccaagcccgtgacccagatcgtgtctgccgaagcctggggcagagccgatgatgtgattaagatccactggcaggaaaagaagtccaacaccatcctgggcagccaggaaggcaacaccatgaagaccaacgacacctacatgaagttcagctggctgaccgtgcccgagaagtccctggacaaagaacacagatgcatcgtgcggcacgaaaacaacaagaacggcgtggaccaggaaatcatcttcccacccatcaagaccgatgtgattacaatggaccccaaggacaactgctccaaggacgccaacgataccctgctgctccagctgaccaacaccagcgcctactacatgtacttgttgctgctgctgaagtccgtggtgtacttcgccatcatcacatgctgcctgctgatggctatggtcaagcggaaggacagccggggaagggccaagcgatctggatctggagcaacaaacttctcactactcaaacaagcaggtgacgtggaggagaatcccgggcctactagtatggactggatttggcgcatccttttccttgtcggcgctgctaccggcgcgcattccgggccccagctccagctgcaagagtctggacctggcctggtcaagcctagcgagacactgagcctgacctgtaccgtgtccggcgatagcatcagcagcggcgattactactggggctggatcagacagcctcctggcaaaggactggaatggatcggccacatctactacagcggcgtgacctactacaaccccagcctgaagtccagagtgaccatcagcgtggacaccagccggaaccagttctccctgaagctgtctagcgtgacagccgccgataccgccgtgtactactgcaccagagaggacagcagcaactggcggagtagaggccagggaacactggtcacagttagctctggatccggcggaggcggaagtggaggcggaggatctggcggcggaggctctttcgaacaagtgaagctccagcagagcggccctagccttgtgaaacctggcgcttccgtgaagatgagctgcaaggccagcggctacaccttcaccgatttctacatgaaatgggtcaagcagagccacggcaagtctctggaatggatcggcgacatcaaccccaacatcggagacaccttctacaaccagaagttcaagggcaaagccacactgaccgtggacaagagcagcagcaccgcctacatgcagctcaacagcctgaccagcgaggacagcgccgtgtacttttgttccgtgggctacttcgacgtgtggggagccggaacaaccgtgacagtctcttctacgcgtatccagaaccctgatcctgccgtgtaccagctgcgggatagcaagagcagcgacaagagcgtgtgtctgttcaccgacttcgacagccagaccaacgtgtcccagagcaaggactccgacgtgtacatcaccgataagtgcgtgctggacatgcggagcatggacttcaagagcaactccgccgtggcctggtccaacaagtccgatttcgcctgcgccaacgccttcaacaacagcattatccccgaggacacattcttcccaagccccgagagcagcgactccaccgaccacgtgaagcccaaagagacagagaacaccaagcagcccagcaagagctgccacaagcccaaggccatcgtgcacaccgagaaagtgaacatgatgagcctgaccgtgctgggcctgcggatgctgttcgccaaaaccgtggccgtgaacttcctgctgaccgccaagctgttcttcctcctcaccgcc

SEQ ID NO: 6803 - DNA, 3009 bp, synthetic construct
  source 1..3009: mol_type = other DNA
atggccttaccagtgaccgccttgctcctgccgctggccttgctgctccacgccgccaggccggaagtgcagctggttgaatctggcggaggactggttcagcctggcggatctctgagactgtcttgtgccgccagcggcttcagcttcagcgacttttggatgagctgggtccgacaggcccctggcaaaggacttgaatgggtcgccacaatcagccaggccggcagcgagaaggactacgtggactctgtgaagggcagattcaccatcagccgggacaacgccaagaagtccctgtacctccagatgaacagcctgagagccgaggacaccgccgtgtactattgtgcctctggcgtgtacagcttcgactacagaggccagggcaccctggtcacagtctcttctggtaccggcggaggcggatctggcggcggaggtagcggtggcggaggatctgaattcgagatcgtgctgacacagtctcccgccacactgtcactgtctccaggcgaaagagccacactgagctgtagagccagccagagcgtgtccatctacctggcctggtatcagcagaagcctggacaggctccccggctgctgatctacgatgccagcaatagagccacaggcatccccgccagattttctggctctggcagcggcaccgatttcaccctgaccataagcagcctggaacctgaggacttcgccgtgtactactgccagcagagaagcaactggcctcctttcacattcggccctggcaccaaggtggacatcaaactcgaggacctgaagaacgtgttcccacctgaggtggccgtgttcgagcctagcgaggccgagatcagccacacccagaaagccaccctcgtgtgcctggctaccggcttctaccccgaccatgtggaactgtcttggtgggtcaacggcaaagaggtgcacagcggcgtgtgtaccgacccccagccactgaaagaacagcccgccctgaacgacagccggtactgcctgagcagcagactgagagtgtccgccaccttctggcagaacccccggaaccacttcagatgccaggtgcagttctacggcctgagcgagaacgacgagtggacccaggacagagccaagcccgtgacccagatcgtgtctgccgaagcctggggcagagccgatgatgtgattaagatccactggcaggaaaagaagtccaacaccatcctgggcagccaggaaggcaacaccatgaagaccaacgacacctacatgaagttcagctggctgaccgtgcccgagaagtccctggacaaagaacacagatgcatcgtgcggcacgaaaacaacaagaacggcgtggaccaggaaatcatcttcccacccatcaagaccgatgtgattacaatggaccccaaggacaactgctccaaggacgccaacgataccctgctgctccagctgaccaacaccagcgcctactacatgtacttgttgctgctgctgaagtccgtggtgtacttcgccatcatcacatgctgcctgctgatggctatggtcaagcggaaggacagccggggaagggccaagcgatctggatctggagcaacaaacttctcactactcaaacaagcaggtgacgtggaggagaatcccgggcctactagtatggactggatttggcgcatccttttccttgtcggcgctgctaccggcgcgcattccgggccccagctccagctgcaagagtctggacctggcctggtcaagcctagcgagacactgagcctgacctgtaccgtgtccggcgatagcatcagcagcggcgattactactggggctggatcagacagcctcctggcaaaggactggaatggatcggccacatctactacagcggcgtgacctactacaaccccagcctgaagtccagagtgaccatcagcgtggacaccagccggaaccagttctccctgaagctgtctagcgtgacagccgccgataccgccgtgtactactgcaccagagaggacagcagcaactggcggagtagaggccagggaacactggtcacagttagctctggatccggcggaggcggaagtggaggcggaggatctggcggcggaggctctttcgaacaggtgcagcttgttgaaagcggaggcggagttgtgcagcctggcagaagtctgagactgtcttgtgccgccagcggcttcaccttcagcagctatggaatgcactgggtccgacaggcccctggcaaaggacttgaatgggttgccgtgatctgggacgacggcagcaacaagtattacgtggacagcgtgaagggcagattcaccatcagccgggacaacagcaagaacaccctgtacctccagatgaacagcctgagagccgaggacacagccgtgtattattgcgccagagatgactactacggcagcggctccttcaacagctactatggcacagacgtgtggggccagggcacaacagttaccgttagctctacgcgtatccagaaccctgatcctgccgtgtaccagctgcgggatagcaagagcagcgacaagagcgtgtgtctgttcaccgacttcgacagccagaccaacgtgtcccagagcaaggactccgacgtgtacatcaccgataagtgcgtgctggacatgcggagcatggacttcaagagcaactccgccgtggcctggtccaacaagtccgatttcgcctgcgccaacgccttcaacaacagcattatccccgaggacacattcttcccaagccccgagagcagcgactccaccgaccacgtgaagcccaaagagacagagaacaccaagcagcccagcaagagctgccacaagcccaaggccatcgtgcacaccgagaaagtgaacatgatgagcctgaccgtgctgggcctgcggatgctgttcgccaaaaccgtggccgtgaacttcctgctgaccgccaagctgttcttcctcctcaccgcc

SEQ ID NO: 6804 - DNA, 2964 bp, synthetic construct
  source 1..2964: mol_type = other DNA
atggccttaccagtgaccgccttgctcctgccgctggccttgctgctccacgccgccaggccggaagtgcagctggttgaatctggcggaggactggttcagcctggcggatctctgagactgtcttgtgccgccagcggcttcagcttcagcgacttttggatgagctgggtccgacaggcccctggcaaaggacttgaatgggtcgccacaatcagccaggccggcagcgagaaggactacgtggactctgtgaagggcagattcaccatcagccgggacaacgccaagaagtccctgtacctccagatgaacagcctgagagccgaggacaccgccgtgtactattgtgcctctggcgtgtacagcttcgactacagaggccagggcaccctggtcacagtctcttctggtaccggcggaggcggatctggcggcggaggtagcggtggcggaggatctgaattcgacatccagatgacacagagccctagcagcctgtctgccagcgtgggagacagagtgaccatcacctgtagagccagccagggcatctcttcttggctggcctggtatcagcagaagcccgagaaggcccctaagagcctgatctatgccgccagctctctccagagcggagtgcctagcagattttctggcagcggctccggcaccgatttcaccctgacaatatccagcctccagcctgaggacttcgccacctactactgccagcagtacaacagctacccctacaccttcggccagggcaccaagctggaaatcaaactcgaggacctgaagaacgtgttcccacctgaggtggccgtgttcgagcctagcgaggccgagatcagccacacccagaaagccaccctcgtgtgcctggctaccggcttctaccccgaccatgtggaactgtcttggtgggtcaacggcaaagaggtgcacagcggcgtgtgtaccgacccccagccactgaaagaacagcccgccctgaacgacagccggtactgcctgagcagcagactgagagtgtccgccaccttctggcagaacccccggaaccacttcagatgccaggtgcagttctacggcctgagcgagaacgacgagtggacccaggacagagccaagcccgtgacccagatcgtgtctgccgaagcctggggcagagccgatgatgtgattaagatccactggcaggaaaagaagtccaacaccatcctgggcagccaggaaggcaacaccatgaagaccaacgacacctacatgaagttcagctggctgaccgtgcccgagaagtccctggacaaagaacacagatgcatcgtgcggcacgaaaacaacaagaacggcgtggaccaggaaatcatcttcccacccatcaagaccgatgtgattacaatggaccccaaggacaactgctccaaggacgccaacgataccctgctgctccagctgaccaacaccagcgcctactacatgtacttgttgctgctgctgaagtccgtggtgtacttcgccatcatcacatgctgcctgctgatggctatggtcaagcggaaggacagccggggaagggccaagcgatctggatctggagcaacaaacttctcactactcaaacaagcaggtgacgtggaggagaatcccgggcctactagtatggactggatttggcgcatccttttccttgtcggcgctgctaccggcgcgcattccgggccccagctccagctgcaagagtctggacctggcctggtcaagcctagcgagacactgagcctgacctgtaccgtgtccggcgatagcatcagcagcggcgattactactggggctggatcagacagcctcctggcaaaggactggaatggatcggccacatctactacagcggcgtgacctactacaaccccagcctgaagtccagagtgaccatcagcgtggacaccagccggaaccagttctccctgaagctgtctagcgtgacagccgccgataccgccgtgtactactgcaccagagaggacagcagcaactggcggagtagaggccagggaacactggtcacagttagctctggatccggcggaggcggaagtggaggcggaggatctggcggcggaggctctttcgaagaagtgcaactggttcaatctggcggcggactggttcatccaggcggttctctgagactgagctgtgccggctctggcttcaccttcagcacctacctgatgtactgggtccgacaggcccctggcaagacactggaatgggtgtccgctattggcagcggaggcgatacctactacgccgactctgtgaagggcagattcaccatcagccgggacaacgccaagaacagcctgtacctccagatgaactccctgagagccgaggacatggccgtgtactactgtgccagaggactcggctattggggccagggaacactggtcacagtgtcctctacgcgtatccagaaccctgatcctgccgtgtaccagctgcgggatagcaagagcagcgacaagagcgtgtgtctgttcaccgacttcgacagccagaccaacgtgtcccagagcaaggactccgacgtgtacatcaccgataagtgcgtgctggacatgcggagcatggacttcaagagcaactccgccgtggcctggtccaacaagtccgatttcgcctgcgccaacgccttcaacaacagcattatccccgaggacacattcttcccaagccccgagagcagcgactccaccgaccacgtgaagcccaaagagacagagaacaccaagcagcccagcaagagctgccacaagcccaaggccatcgtgcacaccgagaaagtgaacatgatgagcctgaccgtgctgggcctgcggatgctgttcgccaaaaccgtggccgtgaacttcctgctgaccgccaagctgttcttcctcctcaccgcc

SEQ ID NO: 6805 - DNA, 3021 bp, synthetic construct
  source 1..3021: mol_type = other DNA
atggccttaccagtgaccgccttgctcctgccgctggccttgctgctccacgccgccaggccggaagtgcagctggttgaatctggcggaggactggttcagcctggcggatctctgagactgtcttgtgccgccagcggcttcagcttcagcgacttttggatgagctgggtccgacaggcccctggcaaaggacttgaatgggtcgccacaatcagccaggccggcagcgagaaggactacgtggactctgtgaagggcagattcaccatcagccgggacaacgccaagaagtccctgtacctccagatgaacagcctgagagccgaggacaccgccgtgtactattgtgcctctggcgtgtacagcttcgactacagaggccagggcaccctggtcacagtctcttctggtaccggcggaggcggatctggcggcggaggtagcggtggcggaggatctgaattcctgcctgttctgacacagcctccatccgtgtctgtggcccctggaaagaccgccagaatcacatgcggcggcaacaacatcggcagcaagagcgtgcactggtatcagcagaagcctggacaggctcctgtgctggtggtgtacgacgacagcgatagacctagcggcatccccgagagattcagcggcagcaattccggcaataccgccacactgaccatcagcagagtggaagctggcgacgaggccgactactactgccaagtgtgggacagcagcagcgactacgtggtgtttggcggcggaacaaagctgacagtgcttctcgaggacctgaagaacgtgttcccacctgaggtggccgtgttcgagcctagcgaggccgagatcagccacacccagaaagccaccctcgtgtgcctggctaccggcttctaccccgaccatgtggaactgtcttggtgggtcaacggcaaagaggtgcacagcggcgtgtgtaccgacccccagccactgaaagaacagcccgccctgaacgacagccggtactgcctgagcagcagactgagagtgtccgccaccttctggcagaacccccggaaccacttcagatgccaggtgcagttctacggcctgagcgagaacgacgagtggacccaggacagagccaagcccgtgacccagatcgtgtctgccgaagcctggggcagagccgatgatgtgattaagatccactggcaggaaaagaagtccaacaccatcctgggcagccaggaaggcaacaccatgaagaccaacgacacctacatgaagttcagctggctgaccgtgcccgagaagtccctggacaaagaacacagatgcatcgtgcggcacgaaaacaacaagaacggcgtggaccaggaaatcatcttcccacccatcaagaccgatgtgattacaatggaccccaaggacaactgctccaaggacgccaacgataccctgctgctccagctgaccaacaccagcgcctactacatgtacttgttgctgctgctgaagtccgtggtgtacttcgccatcatcacatgctgcctgctgatggctatggtcaagcggaaggacagccggggaagggccaagcgatctggatctggagcaacaaacttctcactactcaaacaagcaggtgacgtggaggagaatcccgggcctactagtatggactggatttggcgcatccttttccttgtcggcgctgctaccggcgcgcattccgggccccagctccagctgcaagagtctggacctggcctggtcaagcctagcgagacactgagcctgacctgtaccgtgtccggcgatagcatcagcagcggcgattactactggggctggatcagacagcctcctggcaaaggactggaatggatcggccacatctactacagcggcgtgacctactacaaccccagcctgaagtccagagtgaccatcagcgtggacaccagccggaaccagttctccctgaagctgtctagcgtgacagccgccgataccgccgtgtactactgcaccagagaggacagcagcaactggcggagtagaggccagggaacactggtcacagttagctctggatccggcggaggcggaagtggaggcggaggatctggcggcggaggctctttcgaagaagttcaactggtgcagagcggagccgaagtgaagaagccaggcgagagcctgaagattagctgcaaaggcagcggctacagcttcaccagctactggatcggctgggtccgacagatgcctggcaaaggactggaatggatgggcatcatctaccccggcgacagcgacaccagatacagccctagctttcagggccaagtgaccatctccgccgacaagagcatcagcacagcctacctccagtggtcctctctgaaggccagcgataccgccatgtactactgcgccagacaagtctggggatggcaaggcggcatgtaccccaggtctaactggtggtacaacctggactcttggggccagggcacactggtcacagtctcttctacgcgtatccagaaccctgatcctgccgtgtaccagctgcgggatagcaagagcagcgacaagagcgtgtgtctgttcaccgacttcgacagccagaccaacgtgtcccagagcaaggactccgacgtgtacatcaccgataagtgcgtgctggacatgcggagcatggacttcaagagcaactccgccgtggcctggtccaacaagtccgatttcgcctgcgccaacgccttcaacaacagcattatccccgaggacacattcttcccaagccccgagagcagcgactccaccgaccacgtgaagcccaaagagacagagaacaccaagcagcccagcaagagctgccacaagcccaaggccatcgtgcacaccgagaaagtgaacatgatgagcctgaccgtgctgggcctgcggatgctgttcgccaaaaccgtggccgtgaacttcctgctgaccgccaagctgttcttcctcctcaccgcc

SEQ ID NO: 6806 - DNA, 3000 bp, synthetic construct
  source 1..3000: mol_type = other DNA
atggccttaccagtgaccgccttgctcctgccgctggccttgctgctccacgccgccaggccggaagtgcagctggttgaatctggcggaggactggttcagcctggcggatctctgagactgtcttgtgccgccagcggcttcagcttcagcgacttttggatgagctgggtccgacaggcccctggcaaaggacttgaatgggtcgccacaatcagccaggccggcagcgagaaggactacgtggactctgtgaagggcagattcaccatcagccgggacaacgccaagaagtccctgtacctccagatgaacagcctgagagccgaggacaccgccgtgtactattgtgcctctggcgtgtacagcttcgactacagaggccagggcaccctggtcacagtctcttctggtaccggcggaggcggatctggcggcggaggtagcggtggcggaggatctgaattcgagctggtcatgacacagagccctgcttctctggccgtgtcactgggacagagagccaccatctcttgcagagccagcgagagcgtggacagctacggcaagagcttcatgcactggtatcagctcaagcccggccagcctcctaagctgctgatctacagagcctccaacctggaaagcggcgtgccagccagattttctggcagcggcagcagaaccgacttcaccctgaccattgatcccgtggaagccgatgatgccgccacctactactgccagcagaacaacgaggacccctggacatttggcggaggcaccaagctggaaatcaaactcgaggacctgaagaacgtgttcccacctgaggtggccgtgttcgagcctagcgaggccgagatcagccacacccagaaagccaccctcgtgtgcctggctaccggcttctaccccgaccatgtggaactgtcttggtgggtcaacggcaaagaggtgcacagcggcgtgtgtaccgacccccagccactgaaagaacagcccgccctgaacgacagccggtactgcctgagcagcagactgagagtgtccgccaccttctggcagaacccccggaaccacttcagatgccaggtgcagttctacggcctgagcgagaacgacgagtggacccaggacagagccaagcccgtgacccagatcgtgtctgccgaagcctggggcagagccgatgatgtgattaagatccactggcaggaaaagaagtccaacaccatcctgggcagccaggaaggcaacaccatgaagaccaacgacacctacatgaagttcagctggctgaccgtgcccgagaagtccctggacaaagaacacagatgcatcgtgcggcacgaaaacaacaagaacggcgtggaccaggaaatcatcttcccacccatcaagaccgatgtgattacaatggaccccaaggacaactgctccaaggacgccaacgataccctgctgctccagctgaccaacaccagcgcctactacatgtacttgttgctgctgctgaagtccgtggtgtacttcgccatcatcacatgctgcctgctgatggctatggtcaagcggaaggacagccggggaagggccaagcgatctggatctggagcaacaaacttctcactactcaaacaagcaggtgacgtggaggagaatcccgggcctactagtatggactggatttggcgcatccttttccttgtcggcgctgctaccggcgcgcattccgggccccagctccagctgcaagagtctggacctggcctggtcaagcctagcgagacactgagcctgacctgtaccgtgtccggcgatagcatcagcagcggcgattactactggggctggatcagacagcctcctggcaaaggactggaatggatcggccacatctactacagcggcgtgacctactacaaccccagcctgaagtccagagtgaccatcagcgtggacaccagccggaaccagttctccctgaagctgtctagcgtgacagccgccgataccgccgtgtactactgcaccagagaggacagcagcaactggcggagtagaggccagggaacactggtcacagttagctctggatccggcggaggcggaagtggaggcggaggatctggcggcggaggctctttcgaagaagtgcagctcgaacagtctggccccgagcttgtgaaacctggcgcttccgtgaagatgagctgcaaggccagcggctacaccttcaccaactactacatgaaatgggtcaagcagagccacggcaagtccctggaatggatcggcgatctgaaccccaacaacggcgacaccttctacaaccagaagttcaagggcaaagccacactgaccgtggacaagagcagcaacaccgcctacatgcagctcaactccctgaccagcgaggacagcgccgtgtactactgtgccagaaccggcagatacgaagagaacgctatggactactggggccagggcacaagcgtgacagtctcttctacgcgtatccagaaccctgatcctgccgtgtaccagctgcgggatagcaagagcagcgacaagagcgtgtgtctgttcaccgacttcgacagccagaccaacgtgtcccagagcaaggactccgacgtgtacatcaccgataagtgcgtgctggacatgcggagcatggacttcaagagcaactccgccgtggcctggtccaacaagtccgatttcgcctgcgccaacgccttcaacaacagcattatccccgaggacacattcttcccaagccccgagagcagcgactccaccgaccacgtgaagcccaaagagacagagaacaccaagcagcccagcaagagctgccacaagcccaaggccatcgtgcacaccgagaaagtgaacatgatgagcctgaccgtgctgggcctgcggatgctgttcgccaaaaccgtggccgtgaacttcctgctgaccgccaagctgttcttcctcctcaccgcc

SEQ ID NO: 6807 - DNA, 2982 bp, synthetic construct
  source 1..2982: mol_type = other DNA
atggccttaccagtgaccgccttgctcctgccgctggccttgctgctccacgccgccaggccggaagtgcagctggttgaatctggcggaggactggttcagcctggcggatctctgagactgtcttgtgccgccagcggcttcagcttcagcgacttttggatgagctgggtccgacaggcccctggcaaaggacttgaatgggtcgccacaatcagccaggccggcagcgagaaggactacgtggactctgtgaagggcagattcaccatcagccgggacaacgccaagaagtccctgtacctccagatgaacagcctgagagccgaggacaccgccgtgtactattgtgcctctggcgtgtacagcttcgactacagaggccagggcaccctggtcacagtctcttctggtaccggcggaggcggatctggcggcggaggtagcggtggcggaggatctgaattcgacgtggtcatgacacagagcccttctagcctgtctgccagcgtgggcgacagagtgaccatcacctgtatggcctccgaggacatctacatccggctggcctggtatcagcagaagcctggaaacgcccctaagctgctgatctacgccgccacctctctggaaacaggcgtgccaagcagattttccggcagcggctctggcaccgatttcaccctgacaatatccagcctccagcctgaggacttcgccacctactactgccagcagtattggagcagcccctggacatttggcggaggcaccaaggtggaaatcaaactcgaggacctgaagaacgtgttcccacctgaggtggccgtgttcgagcctagcgaggccgagatcagccacacccagaaagccaccctcgtgtgcctggctaccggcttctaccccgaccatgtggaactgtcttggtgggtcaacggcaaagaggtgcacagcggcgtgtgtaccgacccccagccactgaaagaacagcccgccctgaacgacagccggtactgcctgagcagcagactgagagtgtccgccaccttctggcagaacccccggaaccacttcagatgccaggtgcagttctacggcctgagcgagaacgacgagtggacccaggacagagccaagcccgtgacccagatcgtgtctgccgaagcctggggcagagccgatgatgtgattaagatccactggcaggaaaagaagtccaacaccatcctgggcagccaggaaggcaacaccatgaagaccaacgacacctacatgaagttcagctggctgaccgtgcccgagaagtccctggacaaagaacacagatgcatcgtgcggcacgaaaacaacaagaacggcgtggaccaggaaatcatcttcccacccatcaagaccgatgtgattacaatggaccccaaggacaactgctccaaggacgccaacgataccctgctgctccagctgaccaacaccagcgcctactacatgtacttgttgctgctgctgaagtccgtggtgtacttcgccatcatcacatgctgcctgctgatggctatggtcaagcggaaggacagccggggaagggccaagcgatctggatctggagcaacaaacttctcactactcaaacaagcaggtgacgtggaggagaatcccgggcctactagtatggactggatttggcgcatccttttccttgtcggcgctgctaccggcgcgcattccgggccccagctccagctgcaagagtctggacctggcctggtcaagcctagcgagacactgagcctgacctgtaccgtgtccggcgatagcatcagcagcggcgattactactggggctggatcagacagcctcctggcaaaggactggaatggatcggccacatctactacagcggcgtgacctactacaaccccagcctgaagtccagagtgaccatcagcgtggacaccagccggaaccagttctccctgaagctgtctagcgtgacagccgccgataccgccgtgtactactgcaccagagaggacagcagcaactggcggagtagaggccagggaacactggtcacagttagctctggatccggcggaggcggaagtggaggcggaggatctggcggcggaggctctttcgaacaggttcagctgcaagagtctggccccggactggtcaagcctagccaaacactgagcctgacctgtaccgtgtccggctacagcatcaccagcgactacacctggaactggatcagacagcctcctggcaacggactggaatggatcggctacatcacctacagcggcagcaccagctacaaccccagcctgaaaagccgggtgctgatctccgtggacaccagcaagaatcaggtgtccctgaagctgagcagcgtgacagccgctgataccgccgtgtactactgtgccagactggggagaagatacacaatggactactggggccagggcaccaccgtgacagtttcttctacgcgtatccagaaccctgatcctgccgtgtaccagctgcgggatagcaagagcagcgacaagagcgtgtgtctgttcaccgacttcgacagccagaccaacgtgtcccagagcaaggactccgacgtgtacatcaccgataagtgcgtgctggacatgcggagcatggacttcaagagcaactccgccgtggcctggtccaacaagtccgatttcgcctgcgccaacgccttcaacaacagcattatccccgaggacacattcttcccaagccccgagagcagcgactccaccgaccacgtgaagcccaaagagacagagaacaccaagcagcccagcaagagctgccacaagcccaaggccatcgtgcacaccgagaaagtgaacatgatgagcctgaccgtgctgggcctgcggatgctgttcgccaaaaccgtggccgtgaacttcctgctgaccgccaagctgttcttcctcctcaccgcc

SEQ ID NO: 6808 - DNA, 2994 bp, synthetic construct
  source 1..2994: mol_type = other DNA
atggccttaccagtgaccgccttgctcctgccgctggccttgctgctccacgccgccaggccggaagtgcagctggttgaatctggcggaggactggttcagcctggcggatctctgagactgtcttgtgccgccagcggcttcagcttcagcgacttttggatgagctgggtccgacaggcccctggcaaaggacttgaatgggtcgccacaatcagccaggccggcagcgagaaggactacgtggactctgtgaagggcagattcaccatcagccgggacaacgccaagaagtccctgtacctccagatgaacagcctgagagccgaggacaccgccgtgtactattgtgcctctggcgtgtacagcttcgactacagaggccagggcaccctggtcacagtctcttctggtaccggcggaggcggatctggcggcggaggtagcggtggcggaggatctgaattcgatattgtgctgactcagagccctgccactctgagccttagtccaggcgacagagctaccatctcctgtagggcctctgaatccgtgaccattctgggctctcatctcatatattggtatcaacaaaagccgggccagcctccacggctgctcattcaactggcctctaacgtgcagaccggcgtgccagctagattttctggctctggctcccggaccgactttacactgacaatcagctccgtggaacccgaagattttgccgtctattattgcctccagtccaggaccattcctcggacattcggccagggaacaaaactcgaaatcaagcggctcgaggacctgaagaacgtgttcccacctgaggtggccgtgttcgagcctagcgaggccgagatcagccacacccagaaagccaccctcgtgtgcctggctaccggcttctaccccgaccatgtggaactgtcttggtgggtcaacggcaaagaggtgcacagcggcgtgtgtaccgacccccagccactgaaagaacagcccgccctgaacgacagccggtactgcctgagcagcagactgagagtgtccgccaccttctggcagaacccccggaaccacttcagatgccaggtgcagttctacggcctgagcgagaacgacgagtggacccaggacagagccaagcccgtgacccagatcgtgtctgccgaagcctggggcagagccgatgatgtgattaagatccactggcaggaaaagaagtccaacaccatcctgggcagccaggaaggcaacaccatgaagaccaacgacacctacatgaagttcagctggctgaccgtgcccgagaagtccctggacaaagaacacagatgcatcgtgcggcacgaaaacaacaagaacggcgtggaccaggaaatcatcttcccacccatcaagaccgatgtgattacaatggaccccaaggacaactgctccaaggacgccaacgataccctgctgctccagctgaccaacaccagcgcctactacatgtacttgttgctgctgctgaagtccgtggtgtacttcgccatcatcacatgctgcctgctgatggctatggtcaagcggaaggacagccggggaagggccaagcgatctggatctggagcaacaaacttctcactactcaaacaagcaggtgacgtggaggagaatcccgggcctactagtatggactggatttggcgcatccttttccttgtcggcgctgctaccggcgcgcattccgggccccagctccagctgcaagagtctggacctggcctggtcaagcctagcgagacactgagcctgacctgtaccgtgtccggcgatagcatcagcagcggcgattactactggggctggatcagacagcctcctggcaaaggactggaatggatcggccacatctactacagcggcgtgacctactacaaccccagcctgaagtccagagtgaccatcagcgtggacaccagccggaaccagttctccctgaagctgtctagcgtgacagccgccgataccgccgtgtactactgcaccagagaggacagcagcaactggcggagtagaggccagggaacactggtcacagttagctctggatccggcggaggcggaagtggaggcggaggatctggcggcggaggctctttcgaacaggtgcagctcgttcagagtggccccgaagtgaaaaagccaggcgagtccgtgaagatttcctgcaaagcctccggctacacattccggcactactctatgaattgggtcaagcaggccccaggccagggccttaagtggatgggacgcatcaataccgagtccggcgtgccaatctacgccgatgacttcaaaggccggttcagcttcaccgtggatacctctgcctccaccgcctacctggaaatcagcagcctgaccagcgaggatacagctgtgtacttctgtagcaacgattacctctacagcctggatttctggggacagggaaccacactgaccgtgtctagcacgcgtatccagaaccctgatcctgccgtgtaccagctgcgggatagcaagagcagcgacaagagcgtgtgtctgttcaccgacttcgacagccagaccaacgtgtcccagagcaaggactccgacgtgtacatcaccgataagtgcgtgctggacatgcggagcatggacttcaagagcaactccgccgtggcctggtccaacaagtccgatttcgcctgcgccaacgccttcaacaacagcattatccccgaggacacattcttcccaagccccgagagcagcgactccaccgaccacgtgaagcccaaagagacagagaacaccaagcagcccagcaagagctgccacaagcccaaggccatcgtgcacaccgagaaagtgaacatgatgagcctgaccgtgctgggcctgcggatgctgttcgccaaaaccgtggccgtgaacttcctgctgaccgccaagctgttcttcctcctcaccgcc

SEQ ID NO: 6809 - DNA, 2994 bp, synthetic construct
  source 1..2994: mol_type = other DNA
atggccttaccagtgaccgccttgctcctgccgctggccttgctgctccacgccgccaggccggaagtgcagctggttgaatctggcggaggactggttcagcctggcggatctctgagactgtcttgtgccgccagcggcttcagcttcagcgacttttggatgagctgggtccgacaggcccctggcaaaggacttgaatgggtcgccacaatcagccaggccggcagcgagaaggactacgtggactctgtgaagggcagattcaccatcagccgggacaacgccaagaagtccctgtacctccagatgaacagcctgagagccgaggacaccgccgtgtactattgtgcctctggcgtgtacagcttcgactacagaggccagggcaccctggtcacagtctcttctggtaccggcggaggcggatctggcggcggaggtagcggtggcggaggatctgaattcgacatcgtgctgacacagtctcccgccacactgtcactgagccctggcgatagagccacactgagctgtagagccagcgagagcgtgacaatcctgggcagccacctgatctactggtatcagcagaagcccggacaggcccctagactgctgattcagctcgccagcaatgtgcagacaggcatccctgccagattttccggcagcggcagcagaaccgatttcaccctgaccataagcagcctggaacctgaggacttcgccgtgtactactgcctccagagccggacaatccccagaacctttggacagggcaccaagctggaaatcaagagactcgaggacctgaagaacgtgttcccacctgaggtggccgtgttcgagcctagcgaggccgagatcagccacacccagaaagccaccctcgtgtgcctggctaccggcttctaccccgaccatgtggaactgtcttggtgggtcaacggcaaagaggtgcacagcggcgtgtgtaccgacccccagccactgaaagaacagcccgccctgaacgacagccggtactgcctgagcagcagactgagagtgtccgccaccttctggcagaacccccggaaccacttcagatgccaggtgcagttctacggcctgagcgagaacgacgagtggacccaggacagagccaagcccgtgacccagatcgtgtctgccgaagcctggggcagagccgatgatgtgattaagatccactggcaggaaaagaagtccaacaccatcctgggcagccaggaaggcaacaccatgaagaccaacgacacctacatgaagttcagctggctgaccgtgcccgagaagtccctggacaaagaacacagatgcatcgtgcggcacgaaaacaacaagaacggcgtggaccaggaaatcatcttcccacccatcaagaccgatgtgattacaatggaccccaaggacaactgctccaaggacgccaacgataccctgctgctccagctgaccaacaccagcgcctactacatgtacttgttgctgctgctgaagtccgtggtgtacttcgccatcatcacatgctgcctgctgatggctatggtcaagcggaaggacagccggggaagggccaagcgatctggatctggagcaacaaacttctcactactcaaacaagcaggtgacgtggaggagaatcccgggcctactagtatggactggatttggcgcatccttttccttgtcggcgctgctaccggcgcgcattccgggccccagctccagctgcaagagtctggacctggcctggtcaagcctagcgagacactgagcctgacctgtaccgtgtccggcgatagcatcagcagcggcgattactactggggctggatcagacagcctcctggcaaaggactggaatggatcggccacatctactacagcggcgtgacctactacaaccccagcctgaagtccagagtgaccatcagcgtggacaccagccggaaccagttctccctgaagctgtctagcgtgacagccgccgataccgccgtgtactactgcaccagagaggacagcagcaactggcggagtagaggccagggaacactggtcacagttagctctggatccggcggaggcggaagtggaggcggaggatctggcggcggaggctctttcgaacaggttcagctggtgcagtctggcagcgagctgaagaaacctggcgagagcgtgaagatcagctgcaaggccagcggctacaccttcacacactacagcatgaactgggtccgacaggcccctggacaaggactggaatggatgggcagaatcaacaccgagacaggcgagcccctgtacgccgacgatttcaagggcagattcgtgttcagcctggacaccagcgccagcacagcctatctccagatcagctctctgaaggccgaggacaccgccgtgtactactgctccaacgactacctgtactccctggactattggggccagggcacactggtcacagtgtctagtacgcgtatccagaaccctgatcctgccgtgtaccagctgcgggatagcaagagcagcgacaagagcgtgtgtctgttcaccgacttcgacagccagaccaacgtgtcccagagcaaggactccgacgtgtacatcaccgataagtgcgtgctggacatgcggagcatggacttcaagagcaactccgccgtggcctggtccaacaagtccgatttcgcctgcgccaacgccttcaacaacagcattatccccgaggacacattcttcccaagccccgagagcagcgactccaccgaccacgtgaagcccaaagagacagagaacaccaagcagcccagcaagagctgccacaagcccaaggccatcgtgcacaccgagaaagtgaacatgatgagcctgaccgtgctgggcctgcggatgctgttcgccaaaaccgtggccgtgaacttcctgctgaccgccaagctgttcttcctcctcaccgcc

SEQ ID NO: 6810 - DNA, 2997 bp, synthetic construct
  source 1..2997: mol_type = other DNA
atggccttaccagtgaccgccttgctcctgccgctggccttgctgctccacgccgccaggccggaagtgcagctggttgaatctggcggaggactggttcagcctggcggatctctgagactgtcttgtgccgccagcggcttcagcttcagcgacttttggatgagctgggtccgacaggcccctggcaaaggacttgaatgggtcgccacaatcagccaggccggcagcgagaaggactacgtggactctgtgaagggcagattcaccatcagccgggacaacgccaagaagtccctgtacctccagatgaacagcctgagagccgaggacaccgccgtgtactattgtgcctctggcgtgtacagcttcgactacagaggccagggcaccctggtcacagtctcttctggtaccggcggaggcggatctggcggcggaggtagcggtggcggaggatctgaattcgacatccagctgactcagagccctagctttctgagcgccagcgtgggcgacagagtgaccattacatgtagagccagccagggcatcagcaccgacctgaactggtatcagcagaagcctggcaaggcccctaagctgctgatctacgccgccagcaatctggaaagcggcgtgccaagcagattttccggctctggcagcggcaccgagttcaccctgacaatatctagcctccagcctgaggacttcgccacctactactgccagcagagctacaactggccctacacctttggcggaggcaccaaggtggaaatcaagagactcgaggacctgaagaacgtgttcccacctgaggtggccgtgttcgagcctagcgaggccgagatcagccacacccagaaagccaccctcgtgtgcctggctaccggcttctaccccgaccatgtggaactgtcttggtgggtcaacggcaaagaggtgcacagcggcgtgtgtaccgacccccagccactgaaagaacagcccgccctgaacgacagccggtactgcctgagcagcagactgagagtgtccgccaccttctggcagaacccccggaaccacttcagatgccaggtgcagttctacggcctgagcgagaacgacgagtggacccaggacagagccaagcccgtgacccagatcgtgtctgccgaagcctggggcagagccgatgatgtgattaagatccactggcaggaaaagaagtccaacaccatcctgggcagccaggaaggcaacaccatgaagaccaacgacacctacatgaagttcagctggctgaccgtgcccgagaagtccctggacaaagaacacagatgcatcgtgcggcacgaaaacaacaagaacggcgtggaccaggaaatcatcttcccacccatcaagaccgatgtgattacaatggaccccaaggacaactgctccaaggacgccaacgataccctgctgctccagctgaccaacaccagcgcctactacatgtacttgttgctgctgctgaagtccgtggtgtacttcgccatcatcacatgctgcctgctgatggctatggtcaagcggaaggacagccggggaagggccaagcgatctggatctggagcaacaaacttctcactactcaaacaagcaggtgacgtggaggagaatcccgggcctactagtatggactggatttggcgcatccttttccttgtcggcgctgctaccggcgcgcattccgggccccagctccagctgcaagagtctggacctggcctggtcaagcctagcgagacactgagcctgacctgtaccgtgtccggcgatagcatcagcagcggcgattactactggggctggatcagacagcctcctggcaaaggactggaatggatcggccacatctactacagcggcgtgacctactacaaccccagcctgaagtccagagtgaccatcagcgtggacaccagccggaaccagttctccctgaagctgtctagcgtgacagccgccgataccgccgtgtactactgcaccagagaggacagcagcaactggcggagtagaggccagggaacactggtcacagttagctctggatccggcggaggcggaagtggaggcggaggatctggcggcggaggctctttcgaagaagttcagctggttgaatcaggcggaggactcgtgaaacctggcggctctctgagactgtcttgtgccgccagcggcttcaccttcagcaacttcgagatgaactgggtccgacaggccccaggcaaaggactggaatgggtgtccggcatcagctccaatggccggtacatcaactacgccgacagcgtgaagggcagattcaccatcagccgggacaacgccaagaacagcctgtacctccagatgaactccctgagagccgaggacaccgccgtgtactattgtgccagagtggtggacttcgaccaggactacaacggcttcgactattggggccagggcaccctggttaccgttagctctacgcgtatccagaaccctgatcctgccgtgtaccagctgcgggatagcaagagcagcgacaagagcgtgtgtctgttcaccgacttcgacagccagaccaacgtgtcccagagcaaggactccgacgtgtacatcaccgataagtgcgtgctggacatgcggagcatggacttcaagagcaactccgccgtggcctggtccaacaagtccgatttcgcctgcgccaacgccttcaacaacagcattatccccgaggacacattcttcccaagccccgagagcagcgactccaccgaccacgtgaagcccaaagagacagagaacaccaagcagcccagcaagagctgccacaagcccaaggccatcgtgcacaccgagaaagtgaacatgatgagcctgaccgtgctgggcctgcggatgctgttcgccaaaaccgtggccgtgaacttcctgctgaccgccaagctgttcttcctcctcaccgcc

SEQ ID NO: 6811 - DNA, 2991 bp, synthetic construct
  source 1..2991: mol_type = other DNA
atggccttaccagtgaccgccttgctcctgccgctggccttgctgctccacgccgccaggccggaagtgcagctggttgaatctggcggaggactggttcagcctggcggatctctgagactgtcttgtgccgccagcggcttcagcttcagcgacttttggatgagctgggtccgacaggcccctggcaaaggacttgaatgggtcgccacaatcagccaggccggcagcgagaaggactacgtggactctgtgaagggcagattcaccatcagccgggacaacgccaagaagtccctgtacctccagatgaacagcctgagagccgaggacaccgccgtgtactattgtgcctctggcgtgtacagcttcgactacagaggccagggcaccctggtcacagtctcttctggtaccggcggaggcggatctggcggcggaggtagcggtggcggaggatctgaattcgacatccaactgactcagagccccagctttctgagcgcctctgtgggcgacagagtgaccatcacatgtagtctcagcctgggcatcagcacatggcgggattggtttccgccgaggcttggcaggggccttgagccgctgacctacgccgccagcacactgcaaagcggagtgcctagcagattttccggcagcggctctggcaccgagttcaccctgacaatatccagcctccagcctgaggacttcgccacctactactgccagcagctcaacagctaccctctgacctttggcggaggcaccaaggtggaaatcaagagactcgaggacctgaagaacgtgttcccacctgaggtggccgtgttcgagcctagcgaggccgagatcagccacacccagaaagccaccctcgtgtgcctggctaccggcttctaccccgaccatgtggaactgtcttggtgggtcaacggcaaagaggtgcacagcggcgtgtgtaccgacccccagccactgaaagaacagcccgccctgaacgacagccggtactgcctgagcagcagactgagagtgtccgccaccttctggcagaacccccggaaccacttcagatgccaggtgcagttctacggcctgagcgagaacgacgagtggacccaggacagagccaagcccgtgacccagatcgtgtctgccgaagcctggggcagagccgatgatgtgattaagatccactggcaggaaaagaagtccaacaccatcctgggcagccaggaaggcaacaccatgaagaccaacgacacctacatgaagttcagctggctgaccgtgcccgagaagtccctggacaaagaacacagatgcatcgtgcggcacgaaaacaacaagaacggcgtggaccaggaaatcatcttcccacccatcaagaccgatgtgattacaatggaccccaaggacaactgctccaaggacgccaacgataccctgctgctccagctgaccaacaccagcgcctactacatgtacttgttgctgctgctgaagtccgtggtgtacttcgccatcatcacatgctgcctgctgatggctatggtcaagcggaaggacagccggggaagggccaagcgatctggatctggagcaacaaacttctcactactcaaacaagcaggtgacgtggaggagaatcccgggcctactagtatggactggatttggcgcatccttttccttgtcggcgctgctaccggcgcgcattccgggccccagctccagctgcaagagtctggacctggcctggtcaagcctagcgagacactgagcctgacctgtaccgtgtccggcgatagcatcagcagcggcgattactactggggctggatcagacagcctcctggcaaaggactggaatggatcggccacatctactacagcggcgtgacctactacaaccccagcctgaagtccagagtgaccatcagcgtggacaccagccggaaccagttctccctgaagctgtctagcgtgacagccgccgataccgccgtgtactactgcaccagagaggacagcagcaactggcggagtagaggccagggaacactggtcacagttagctctggatccggcggaggcggaagtggaggcggaggatctggcggcggaggctctttcgaagaagttcaactggttgagtctggtggcggcctggttaagcctggcggatctctgagactgagctgtgccgccagcggcttcacctttagcacatacggcatgagctgggtccgacaggcccctggaaaaggacttgagtgggtcgcctacatcaacaacggctccggctacatctactacgccgacagcgtgaagggcagattcaccatcagccgggacaacgccaagaacagcctgtacctccagatgaactccctgagagccgaggacaccgccgtgtactattgtgccagaggacagtggtggagcggcggagactttgattattggggccagggcaccctggtcaccgtttcttctacgcgtatccagaaccctgatcctgccgtgtaccagctgcgggatagcaagagcagcgacaagagcgtgtgtctgttcaccgacttcgacagccagaccaacgtgtcccagagcaaggactccgacgtgtacatcaccgataagtgcgtgctggacatgcggagcatggacttcaagagcaactccgccgtggcctggtccaacaagtccgatttcgcctgcgccaacgccttcaacaacagcattatccccgaggacacattcttcccaagccccgagagcagcgactccaccgaccacgtgaagcccaaagagacagagaacaccaagcagcccagcaagagctgccacaagcccaaggccatcgtgcacaccgagaaagtgaacatgatgagcctgaccgtgctgggcctgcggatgctgttcgccaaaaccgtggccgtgaacttcctgctgaccgccaagctgttcttcctcctcaccgcc

SEQ ID NO: 6812 - DNA, 2994 bp, synthetic construct
  source 1..2994: mol_type = other DNA
atggccttaccagtgaccgccttgctcctgccgctggccttgctgctccacgccgccaggccggaagtgcagctggttgaatctggcggaggactggttcagcctggcggatctctgagactgtcttgtgccgccagcggcttcagcttcagcgacttttggatgagctgggtccgacaggcccctggcaaaggacttgaatgggtcgccacaatcagccaggccggcagcgagaaggactacgtggactctgtgaagggcagattcaccatcagccgggacaacgccaagaagtccctgtacctccagatgaacagcctgagagccgaggacaccgccgtgtactattgtgcctctggcgtgtacagcttcgactacagaggccagggcaccctggtcacagtctcttctggtaccggcggaggcggatctggcggcggaggtagcggtggcggaggatctgaattcgagatcgtgctgacacagtctcccgccacactgtcactgtctccaggcgaaagagccacactgagctgtagcgccagcagcagcgtgtcctacatgtactggtatcagcagaagcccggacaggcccctagactgctgatctacagaaccagcaacctggcctctggcatccccgccagattttctggctctggcagcggcaccgatttcaccctgaccataagcagcctggaacctgaggacttcgccgtgtactactgccagcagtaccacagctaccccaccacctttggacagggcaccaaggtggaaatcaagcggacagttctcgaggacctgaagaacgtgttcccacctgaggtggccgtgttcgagcctagcgaggccgagatcagccacacccagaaagccaccctcgtgtgcctggctaccggcttctaccccgaccatgtggaactgtcttggtgggtcaacggcaaagaggtgcacagcggcgtgtgtaccgacccccagccactgaaagaacagcccgccctgaacgacagccggtactgcctgagcagcagactgagagtgtccgccaccttctggcagaacccccggaaccacttcagatgccaggtgcagttctacggcctgagcgagaacgacgagtggacccaggacagagccaagcccgtgacccagatcgtgtctgccgaagcctggggcagagccgatgatgtgattaagatccactggcaggaaaagaagtccaacaccatcctgggcagccaggaaggcaacaccatgaagaccaacgacacctacatgaagttcagctggctgaccgtgcccgagaagtccctggacaaagaacacagatgcatcgtgcggcacgaaaacaacaagaacggcgtggaccaggaaatcatcttcccacccatcaagaccgatgtgattacaatggaccccaaggacaactgctccaaggacgccaacgataccctgctgctccagctgaccaacaccagcgcctactacatgtacttgttgctgctgctgaagtccgtggtgtacttcgccatcatcacatgctgcctgctgatggctatggtcaagcggaaggacagccggggaagggccaagcgatctggatctggagcaacaaacttctcactactcaaacaagcaggtgacgtggaggagaatcccgggcctactagtatggactggatttggcgcatccttttccttgtcggcgctgctaccggcgcgcattccgggccccagctccagctgcaagagtctggacctggcctggtcaagcctagcgagacactgagcctgacctgtaccgtgtccggcgatagcatcagcagcggcgattactactggggctggatcagacagcctcctggcaaaggactggaatggatcggccacatctactacagcggcgtgacctactacaaccccagcctgaagtccagagtgaccatcagcgtggacaccagccggaaccagttctccctgaagctgtctagcgtgacagccgccgataccgccgtgtactactgcaccagagaggacagcagcaactggcggagtagaggccagggaacactggtcacagttagctctggatccggcggaggcggaagtggaggcggaggatctggcggcggaggctctttcgaagaagtgcagctggttgaatcaggtggcggcctggttcaacctggcggatctctgagactgtcttgtgccgccagcggcttcagcttcaacacctacgccatgaactgggtccgacaggctcctggcaaaggactggaatgggtgtcccacatcagaagcaagagcaacaacttcgccacctactacgccgacagcgtgaaggacagattcaccatcagccgggacaacgccaagaacagcctgtacctccagatgaactccctgagagccgaggacaccgccgtgtattattgcgccagacaaggcggcgacttccctatggattattggggccagggcaccctggtcaccgtttcttctacgcgtatccagaaccctgatcctgccgtgtaccagctgcgggatagcaagagcagcgacaagagcgtgtgtctgttcaccgacttcgacagccagaccaacgtgtcccagagcaaggactccgacgtgtacatcaccgataagtgcgtgctggacatgcggagcatggacttcaagagcaactccgccgtggcctggtccaacaagtccgatttcgcctgcgccaacgccttcaacaacagcattatccccgaggacacattcttcccaagccccgagagcagcgactccaccgaccacgtgaagcccaaagagacagagaacaccaagcagcccagcaagagctgccacaagcccaaggccatcgtgcacaccgagaaagtgaacatgatgagcctgaccgtgctgggcctgcggatgctgttcgccaaaaccgtggccgtgaacttcctgctgaccgccaagctgttcttcctcctcaccgcc

SEQ ID NO: 6813 - DNA, 2982 bp, synthetic construct
  source 1..2982: mol_type = other DNA
atggccttaccagtgaccgccttgctcctgccgctggccttgctgctccacgccgccaggccggaagtgcagctggttgaatctggcggaggactggttcagcctggcggatctctgagactgtcttgtgccgccagcggcttcagcttcagcgacttttggatgagctgggtccgacaggcccctggcaaaggacttgaatgggtcgccacaatcagccaggccggcagcgagaaggactacgtggactctgtgaagggcagattcaccatcagccgggacaacgccaagaagtccctgtacctccagatgaacagcctgagagccgaggacaccgccgtgtactattgtgcctctggcgtgtacagcttcgactacagaggccagggcaccctggtcacagtctcttctggtaccggcggaggcggatctggcggcggaggtagcggtggcggaggatctgaattcgacgtggtcatgacacagagcccttctagcctgtctgccagcgtgggcgacagagtgaccatcacctgtaaagccagcgaggacatctacatccggctggcctggtatcagcagaagcctggaaaggcccctaagctgctgatctacgccgccacctctctggaaacaggcgtgccaagcagattttccggcagcggctctggcaccgatttcaccctgacaatatccagcctccagcctgaggacttcgccacctactactgccagcagtattggaccacaccttggacctttggcggaggcaccaaggtggaaatcaaactcgaggacctgaagaacgtgttcccacctgaggtggccgtgttcgagcctagcgaggccgagatcagccacacccagaaagccaccctcgtgtgcctggctaccggcttctaccccgaccatgtggaactgtcttggtgggtcaacggcaaagaggtgcacagcggcgtgtgtaccgacccccagccactgaaagaacagcccgccctgaacgacagccggtactgcctgagcagcagactgagagtgtccgccaccttctggcagaacccccggaaccacttcagatgccaggtgcagttctacggcctgagcgagaacgacgagtggacccaggacagagccaagcccgtgacccagatcgtgtctgccgaagcctggggcagagccgatgatgtgattaagatccactggcaggaaaagaagtccaacaccatcctgggcagccaggaaggcaacaccatgaagaccaacgacacctacatgaagttcagctggctgaccgtgcccgagaagtccctggacaaagaacacagatgcatcgtgcggcacgaaaacaacaagaacggcgtggaccaggaaatcatcttcccacccatcaagaccgatgtgattacaatggaccccaaggacaactgctccaaggacgccaacgataccctgctgctccagctgaccaacaccagcgcctactacatgtacttgttgctgctgctgaagtccgtggtgtacttcgccatcatcacatgctgcctgctgatggctatggtcaagcggaaggacagccggggaagggccaagcgatctggatctggagcaacaaacttctcactactcaaacaagcaggtgacgtggaggagaatcccgggcctactagtatggactggatttggcgcatccttttccttgtcggcgctgctaccggcgcgcattccgggccccagctccagctgcaagagtctggacctggcctggtcaagcctagcgagacactgagcctgacctgtaccgtgtccggcgatagcatcagcagcggcgattactactggggctggatcagacagcctcctggcaaaggactggaatggatcggccacatctactacagcggcgtgacctactacaaccccagcctgaagtccagagtgaccatcagcgtggacaccagccggaaccagttctccctgaagctgtctagcgtgacagccgccgataccgccgtgtactactgcaccagagaggacagcagcaactggcggagtagaggccagggaacactggtcacagttagctctggatccggcggaggcggaagtggaggcggaggatctggcggcggaggctctttcgaacaggtgcagctccaagagtctggccctggactggtcaagcctagccagacactgagcctgacctgtaccgtgtccggctacagcatcaccatcgactacacctggaactggatcagacagcctcctggcaaaggactggaatggatcggctacatcacctacagcggcagcaccgactacaaccccagcctgaaaagccgggtgctgatctccgtggacaccagcaagaatcaggtgtccctgaagctgagcagcgtgacagccgctgataccgccgtgtactactgtgccagactgggcagaagatacgccctggattattggggccagggcaccaccgtgacagtgtcatctacgcgtatccagaaccctgatcctgccgtgtaccagctgcgggatagcaagagcagcgacaagagcgtgtgtctgttcaccgacttcgacagccagaccaacgtgtcccagagcaaggactccgacgtgtacatcaccgataagtgcgtgctggacatgcggagcatggacttcaagagcaactccgccgtggcctggtccaacaagtccgatttcgcctgcgccaacgccttcaacaacagcattatccccgaggacacattcttcccaagccccgagagcagcgactccaccgaccacgtgaagcccaaagagacagagaacaccaagcagcccagcaagagctgccacaagcccaaggccatcgtgcacaccgagaaagtgaacatgatgagcctgaccgtgctgggcctgcggatgctgttcgccaaaaccgtggccgtgaacttcctgctgaccgccaagctgttcttcctcctcaccgcc

SEQ ID NO: 6814 - DNA, 2997 bp, synthetic construct
  source 1..2997: mol_type = other DNA
atggccttaccagtgaccgccttgctcctgccgctggccttgctgctccacgccgccaggccggaagtgcagctggttgaatctggcggaggactggttcagcctggcggatctctgagactgtcttgtgccgccagcggcttcagcttcagcgacttttggatgagctgggtccgacaggcccctggcaaaggacttgaatgggtcgccacaatcagccaggccggcagcgagaaggactacgtggactctgtgaagggcagattcaccatcagccgggacaacgccaagaagtccctgtacctccagatgaacagcctgagagccgaggacaccgccgtgtactattgtgcctctggcgtgtacagcttcgactacagaggccagggcaccctggtcacagtctcttctggtaccggcggaggcggatctggcggcggaggtagcggtggcggaggatctgaattcgacatccagatgacccagaccacaagcagcctgtctgccagcctgggcgacagagtgaccatctcttgtagagccagccaggacatcagcaactacctgaactggtatcagcagaaacccgacggcaccgtgaagctgctgatctactacaccagcatcctgcacagcggcgtgcccagcagattttctggctctggcagcggcaccgactacagcctgaccatcagcaatctggaacaagaggacttcgctacctacttctgccagcaaggcaacaccctgccttggacatttggcggaggcaccaagctggaaatcaaagctctcgaggacctgaagaacgtgttcccacctgaggtggccgtgttcgagcctagcgaggccgagatcagccacacccagaaagccaccctcgtgtgcctggctaccggcttctaccccgaccatgtggaactgtcttggtgggtcaacggcaaagaggtgcacagcggcgtgtgtaccgacccccagccactgaaagaacagcccgccctgaacgacagccggtactgcctgagcagcagactgagagtgtccgccaccttctggcagaacccccggaaccacttcagatgccaggtgcagttctacggcctgagcgagaacgacgagtggacccaggacagagccaagcccgtgacccagatcgtgtctgccgaagcctggggcagagccgatgatgtgattaagatccactggcaggaaaagaagtccaacaccatcctgggcagccaggaaggcaacaccatgaagaccaacgacacctacatgaagttcagctggctgaccgtgcccgagaagtccctggacaaagaacacagatgcatcgtgcggcacgaaaacaacaagaacggcgtggaccaggaaatcatcttcccacccatcaagaccgatgtgattacaatggaccccaaggacaactgctccaaggacgccaacgataccctgctgctccagctgaccaacaccagcgcctactacatgtacttgttgctgctgctgaagtccgtggtgtacttcgccatcatcacatgctgcctgctgatggctatggtcaagcggaaggacagccggggaagggccaagcgatctggatctggagcaacaaacttctcactactcaaacaagcaggtgacgtggaggagaatcccgggcctactagtatggactggatttggcgcatccttttccttgtcggcgctgctaccggcgcgcattccgggccccagctccagctgcaagagtctggacctggcctggtcaagcctagcgagacactgagcctgacctgtaccgtgtccggcgatagcatcagcagcggcgattactactggggctggatcagacagcctcctggcaaaggactggaatggatcggccacatctactacagcggcgtgacctactacaaccccagcctgaagtccagagtgaccatcagcgtggacaccagccggaaccagttctccctgaagctgtctagcgtgacagccgccgataccgccgtgtactactgcaccagagaggacagcagcaactggcggagtagaggccagggaacactggtcacagttagctctggatccggcggaggcggaagtggaggcggaggatctggcggcggaggctctttcgaagaagtgcaactggttgaatctggcggcggactggttaagcctggcggatctctgaagctgagctgtgccgcctctggcttcgccttcagcatctacgatatgagctgggtccgacagacccctgagaagagactggaatgggtcgcctacatctctagcggcggagggacctactatcccgacacagtgaagggcagattcaccatctccagagacaacgccaagaacaccctgtacctccagatgagcagcctgaagtccgaggacaccgccatgtactactgcgccagacacagcggctatggcacacattggggagtgctgtttgcctactggggccagggaacactggtcacagtttctgctacgcgtatccagaaccctgatcctgccgtgtaccagctgcgggatagcaagagcagcgacaagagcgtgtgtctgttcaccgacttcgacagccagaccaacgtgtcccagagcaaggactccgacgtgtacatcaccgataagtgcgtgctggacatgcggagcatggacttcaagagcaactccgccgtggcctggtccaacaagtccgatttcgcctgcgccaacgccttcaacaacagcattatccccgaggacacattcttcccaagccccgagagcagcgactccaccgaccacgtgaagcccaaagagacagagaacaccaagcagcccagcaagagctgccacaagcccaaggccatcgtgcacaccgagaaagtgaacatgatgagcctgaccgtgctgggcctgcggatgctgttcgccaaaaccgtggccgtgaacttcctgctgaccgccaagctgttcttcctcctcaccgcc

SEQ ID NO: 6815 - DNA, 3027 bp, synthetic construct
  source 1..3027: mol_type = other DNA
atggccttaccagtgaccgccttgctcctgccgctggccttgctgctccacgccgccaggccggaagtgcagctggttgaatctggcggaggactggttcagcctggcggatctctgagactgtcttgtgccgccagcggcttcagcttcagcgacttttggatgagctgggtccgacaggcccctggcaaaggacttgaatgggtcgccacaatcagccaggccggcagcgagaaggactacgtggactctgtgaagggcagattcaccatcagccgggacaacgccaagaagtccctgtacctccagatgaacagcctgagagccgaggacaccgccgtgtactattgtgcctctggcgtgtacagcttcgactacagaggccagggcaccctggtcacagtctcttctggtaccggcggaggcggatctggcggcggaggtagcggtggcggaggatctgaattcgacatcgtgatgacacagagccctgatagcctggccgtgtctctgggagagagagccaccatcaactgcaagagcagccagagcctgctgtacagaagcaaccagaagaactacctggcctggtatcagcagaagcccggccagcctcctaagctgctgatctactgggccagcaccagagaaagcggcgtgcccgatagattttctggctctggcagcggcaccgacttcaccctgacaatttctagcctgcaagccgaggacgtggccgtgtactactgccagcagtattacaactaccccagaaccttcggccagggcaccaaggtggaaatcaagagaacagttctcgaggacctgaagaacgtgttcccacctgaggtggccgtgttcgagcctagcgaggccgagatcagccacacccagaaagccaccctcgtgtgcctggctaccggcttctaccccgaccatgtggaactgtcttggtgggtcaacggcaaagaggtgcacagcggcgtgtgtaccgacccccagccactgaaagaacagcccgccctgaacgacagccggtactgcctgagcagcagactgagagtgtccgccaccttctggcagaacccccggaaccacttcagatgccaggtgcagttctacggcctgagcgagaacgacgagtggacccaggacagagccaagcccgtgacccagatcgtgtctgccgaagcctggggcagagccgatgatgtgattaagatccactggcaggaaaagaagtccaacaccatcctgggcagccaggaaggcaacaccatgaagaccaacgacacctacatgaagttcagctggctgaccgtgcccgagaagtccctggacaaagaacacagatgcatcgtgcggcacgaaaacaacaagaacggcgtggaccaggaaatcatcttcccacccatcaagaccgatgtgattacaatggaccccaaggacaactgctccaaggacgccaacgataccctgctgctccagctgaccaacaccagcgcctactacatgtacttgttgctgctgctgaagtccgtggtgtacttcgccatcatcacatgctgcctgctgatggctatggtcaagcggaaggacagccggggaagggccaagcgatctggatctggagcaacaaacttctcactactcaaacaagcaggtgacgtggaggagaatcccgggcctactagtatggactggatttggcgcatccttttccttgtcggcgctgctaccggcgcgcattccgggccccagctccagctgcaagagtctggacctggcctggtcaagcctagcgagacactgagcctgacctgtaccgtgtccggcgatagcatcagcagcggcgattactactggggctggatcagacagcctcctggcaaaggactggaatggatcggccacatctactacagcggcgtgacctactacaaccccagcctgaagtccagagtgaccatcagcgtggacaccagccggaaccagttctccctgaagctgtctagcgtgacagccgccgataccgccgtgtactactgcaccagagaggacagcagcaactggcggagtagaggccagggaacactggtcacagttagctctggatccggcggaggcggaagtggaggcggaggatctggcggcggaggctctttcgaagaagttcagctgcttgaatcaggcggcggactggttcaacctggcggatctctgagactgagctgtgccgccagcggctacagcatcacaagcgactatgcctggaactgggtccgacaggcccctggcaaaggactggaatgggtgtcctacatcagcaacagcggcagcaccagctacaaccccagcctgaagtcccggttcaccatcagcagagacaacagcaagaacaccctgtacctccagatgaacagcctgagagctgaggacaccgccgtgtattattgcgccaaagagcggaactacgactacgacgattactactacgctatggactactggggccagggaaccctggtcacagtctcttctacgcgtatccagaaccctgatcctgccgtgtaccagctgcgggatagcaagagcagcgacaagagcgtgtgtctgttcaccgacttcgacagccagaccaacgtgtcccagagcaaggactccgacgtgtacatcaccgataagtgcgtgctggacatgcggagcatggacttcaagagcaactccgccgtggcctggtccaacaagtccgatttcgcctgcgccaacgccttcaacaacagcattatccccgaggacacattcttcccaagccccgagagcagcgactccaccgaccacgtgaagcccaaagagacagagaacaccaagcagcccagcaagagctgccacaagcccaaggccatcgtgcacaccgagaaagtgaacatgatgagcctgaccgtgctgggcctgcggatgctgttcgccaaaaccgtggccgtgaacttcctgctgaccgccaagctgttcttcctcctcaccgcc

SEQ ID NO: 6816 - DNA, 3006 bp, synthetic construct
  source 1..3006: mol_type = other DNA
atggccttaccagtgaccgccttgctcctgccgctggccttgctgctccacgccgccaggccggaagtgcagctggttgaatctggcggaggactggttcagcctggcggatctctgagactgtcttgtgccgccagcggcttcagcttcagcgacttttggatgagctgggtccgacaggcccctggcaaaggacttgaatgggtcgccacaatcagccaggccggcagcgagaaggactacgtggactctgtgaagggcagattcaccatcagccgggacaacgccaagaagtccctgtacctccagatgaacagcctgagagccgaggacaccgccgtgtactattgtgcctctggcgtgtacagcttcgactacagaggccagggcaccctggtcacagtctcttctggtaccggcggaggcggatctggcggcggaggtagcggtggcggaggatctgaattcgacgtggtcatgacacagagccctctgagcctgcctgtgacacttggacagcctgccagcatcagctgtagaagcagccagagcctgctgcacagcagcggcaatacctacctggaatggtatcagcagaggcccggacagagccccagacctctgatctacaagatcagcacccggttcagcggcgtgcccgatagattttctggctctggcagcggcaccgacttcaccctgaagattagcagagtggaagccgaggacgtgggcgtgtactactgcttccaaggcagccacgtgccatacacctttggcggcggaacaaaggtggaaatcaagagactcgaggacctgaagaacgtgttcccacctgaggtggccgtgttcgagcctagcgaggccgagatcagccacacccagaaagccaccctcgtgtgcctggctaccggcttctaccccgaccatgtggaactgtcttggtgggtcaacggcaaagaggtgcacagcggcgtgtgtaccgacccccagccactgaaagaacagcccgccctgaacgacagccggtactgcctgagcagcagactgagagtgtccgccaccttctggcagaacccccggaaccacttcagatgccaggtgcagttctacggcctgagcgagaacgacgagtggacccaggacagagccaagcccgtgacccagatcgtgtctgccgaagcctggggcagagccgatgatgtgattaagatccactggcaggaaaagaagtccaacaccatcctgggcagccaggaaggcaacaccatgaagaccaacgacacctacatgaagttcagctggctgaccgtgcccgagaagtccctggacaaagaacacagatgcatcgtgcggcacgaaaacaacaagaacggcgtggaccaggaaatcatcttcccacccatcaagaccgatgtgattacaatggaccccaaggacaactgctccaaggacgccaacgataccctgctgctccagctgaccaacaccagcgcctactacatgtacttgttgctgctgctgaagtccgtggtgtacttcgccatcatcacatgctgcctgctgatggctatggtcaagcggaaggacagccggggaagggccaagcgatctggatctggagcaacaaacttctcactactcaaacaagcaggtgacgtggaggagaatcccgggcctactagtatggactggatttggcgcatccttttccttgtcggcgctgctaccggcgcgcattccgggccccagctccagctgcaagagtctggacctggcctggtcaagcctagcgagacactgagcctgacctgtaccgtgtccggcgatagcatcagcagcggcgattactactggggctggatcagacagcctcctggcaaaggactggaatggatcggccacatctactacagcggcgtgacctactacaaccccagcctgaagtccagagtgaccatcagcgtggacaccagccggaaccagttctccctgaagctgtctagcgtgacagccgccgataccgccgtgtactactgcaccagagaggacagcagcaactggcggagtagaggccagggaacactggtcacagttagctctggatccggcggaggcggaagtggaggcggaggatctggcggcggaggctctttcgaacaagttcagctggttcagagcggagccgaagtgaagaaacctggggcctctgtgaaggtgtcctgcaaagcctctggcctgaccatcgaggactactacatgcactgggtccgacaggcccctggacaaggacttgaatggatgggctggatcgaccccgagaacggcgatacagagtacggccctaagttccagggcagagtgaccatgaccagagacaccagcatcaacaccgcctacatggaactgagccggctgagatccgatgacaccgccgtgtactattgcgccgtgcacaatgcccactacggcacttggtttgcctattggggccagggcacactggtcaccgttagctctacgcgtatccagaaccctgatcctgccgtgtaccagctgcgggatagcaagagcagcgacaagagcgtgtgtctgttcaccgacttcgacagccagaccaacgtgtcccagagcaaggactccgacgtgtacatcaccgataagtgcgtgctggacatgcggagcatggacttcaagagcaactccgccgtggcctggtccaacaagtccgatttcgcctgcgccaacgccttcaacaacagcattatccccgaggacacattcttcccaagccccgagagcagcgactccaccgaccacgtgaagcccaaagagacagagaacaccaagcagcccagcaagagctgccacaagcccaaggccatcgtgcacaccgagaaagtgaacatgatgagcctgaccgtgctgggcctgcggatgctgttcgccaaaaccgtggccgtgaacttcctgctgaccgccaagctgttcttcctcctcaccgcc

SEQ ID NO: 6817 - DNA, 2982 bp, synthetic construct
  source 1..2982: mol_type = other DNA
atggccttaccagtgaccgccttgctcctgccgctggccttgctgctccacgccgccaggccggaagtgcagctggttgaatctggcggaggactggttcagcctggcggatctctgagactgtcttgtgccgccagcggcttcagcttcagcgacttttggatgagctgggtccgacaggcccctggcaaaggacttgaatgggtcgccacaatcagccaggccggcagcgagaaggactacgtggactctgtgaagggcagattcaccatcagccgggacaacgccaagaagtccctgtacctccagatgaacagcctgagagccgaggacaccgccgtgtactattgtgcctctggcgtgtacagcttcgactacagaggccagggcaccctggtcacagtctcttctggtaccggcggaggcggatctggcggcggaggtagcggtggcggaggatctgaattcgacatccagatgacacagagccctagcagcctgtctgccagcgtgggagacagagtgaccatcacctgtagagccagcgagaacatctacagcaacctggcctggtatcagcagaagcctggcaaggcccctaagctgctgatctacgccgccaccaatctggctgatggcgtgccaagcagattttccggctctggcagcggcaccgatttcaccctgacaatatccagcctccagcctgaggacttcgccacctactactgccagcacttttggggcacccctacattcggccagggcaccaaggtggaaatcaagagaacagttctcgaggacctgaagaacgtgttcccacctgaggtggccgtgttcgagcctagcgaggccgagatcagccacacccagaaagccaccctcgtgtgcctggctaccggcttctaccccgaccatgtggaactgtcttggtgggtcaacggcaaagaggtgcacagcggcgtgtgtaccgacccccagccactgaaagaacagcccgccctgaacgacagccggtactgcctgagcagcagactgagagtgtccgccaccttctggcagaacccccggaaccacttcagatgccaggtgcagttctacggcctgagcgagaacgacgagtggacccaggacagagccaagcccgtgacccagatcgtgtctgccgaagcctggggcagagccgatgatgtgattaagatccactggcaggaaaagaagtccaacaccatcctgggcagccaggaaggcaacaccatgaagaccaacgacacctacatgaagttcagctggctgaccgtgcccgagaagtccctggacaaagaacacagatgcatcgtgcggcacgaaaacaacaagaacggcgtggaccaggaaatcatcttcccacccatcaagaccgatgtgattacaatggaccccaaggacaactgctccaaggacgccaacgataccctgctgctccagctgaccaacaccagcgcctactacatgtacttgttgctgctgctgaagtccgtggtgtacttcgccatcatcacatgctgcctgctgatggctatggtcaagcggaaggacagccggggaagggccaagcgatctggatctggagcaacaaacttctcactactcaaacaagcaggtgacgtggaggagaatcccgggcctactagtatggactggatttggcgcatccttttccttgtcggcgctgctaccggcgcgcattccgggccccagctccagctgcaagagtctggacctggcctggtcaagcctagcgagacactgagcctgacctgtaccgtgtccggcgatagcatcagcagcggcgattactactggggctggatcagacagcctcctggcaaaggactggaatggatcggccacatctactacagcggcgtgacctactacaaccccagcctgaagtccagagtgaccatcagcgtggacaccagccggaaccagttctccctgaagctgtctagcgtgacagccgccgataccgccgtgtactactgcaccagagaggacagcagcaactggcggagtagaggccagggaacactggtcacagttagctctggatccggcggaggcggaagtggaggcggaggatctggcggcggaggctctttcgaagaagtgcagctggttgaatcaggtggcggcctggttcaacctggcggatctctgagactgagctgtgccgcctctggcttcagcctgacaaattacggcgtgcactgggtccgacaggcccctggaaaaggactggaatgggtgtccgtgatttggagcggcggcagcaccgattacaacgccgccttcatcagccggttcaccatcagcgccgacaccagcaagaataccgcctacctccagatgaactccctgagagccgaggacaccgccgtgtactattgcgccagagaactgatccacgctatggacaactggggccagggaaccctggtcacagtctcttctacgcgtatccagaaccctgatcctgccgtgtaccagctgcgggatagcaagagcagcgacaagagcgtgtgtctgttcaccgacttcgacagccagaccaacgtgtcccagagcaaggactccgacgtgtacatcaccgataagtgcgtgctggacatgcggagcatggacttcaagagcaactccgccgtggcctggtccaacaagtccgatttcgcctgcgccaacgccttcaacaacagcattatccccgaggacacattcttcccaagccccgagagcagcgactccaccgaccacgtgaagcccaaagagacagagaacaccaagcagcccagcaagagctgccacaagcccaaggccatcgtgcacaccgagaaagtgaacatgatgagcctgaccgtgctgggcctgcggatgctgttcgccaaaaccgtggccgtgaacttcctgctgaccgccaagctgttcttcctcctcaccgcc

SEQ ID NO: 6818 - DNA, 3003 bp, synthetic construct
  source 1..3003: mol_type = other DNA
atggccttaccagtgaccgccttgctcctgccgctggccttgctgctccacgccgccaggccggaagtgcagctggttgaatctggcggaggactggttcagcctggcggatctctgagactgtcttgtgccgccagcggcttcagcttcagcgacttttggatgagctgggtccgacaggcccctggcaaaggacttgaatgggtcgccacaatcagccaggccggcagcgagaaggactacgtggactctgtgaagggcagattcaccatcagccgggacaacgccaagaagtccctgtacctccagatgaacagcctgagagccgaggacaccgccgtgtactattgtgcctctggcgtgtacagcttcgactacagaggccagggcaccctggtcacagtctcttctggtaccggcggaggcggatctggcggcggaggtagcggtggcggaggatctgaattcgacttcgtgatgacacagagccctctgagcctgcctgtgacacctggcgaacctgccagcatcagctgtagaagcagccagagcatcgtgcacagcaacggcaacacctacctggaatggtatctccagaagcctggacagagcccacagctgctgatctacaaggtgtccaacagattcagcggcgtgcccgacagattttctggcagcggctctggcaccgacttcaccctgaagattagcagagtggaagccgaggacgtgggcgtgtactactgcttccaaggctctcacgtgcccctgacctttggacagggcaccaagctggaaatcaagagactcgaggacctgaagaacgtgttcccacctgaggtggccgtgttcgagcctagcgaggccgagatcagccacacccagaaagccaccctcgtgtgcctggctaccggcttctaccccgaccatgtggaactgtcttggtgggtcaacggcaaagaggtgcacagcggcgtgtgtaccgacccccagccactgaaagaacagcccgccctgaacgacagccggtactgcctgagcagcagactgagagtgtccgccaccttctggcagaacccccggaaccacttcagatgccaggtgcagttctacggcctgagcgagaacgacgagtggacccaggacagagccaagcccgtgacccagatcgtgtctgccgaagcctggggcagagccgatgatgtgattaagatccactggcaggaaaagaagtccaacaccatcctgggcagccaggaaggcaacaccatgaagaccaacgacacctacatgaagttcagctggctgaccgtgcccgagaagtccctggacaaagaacacagatgcatcgtgcggcacgaaaacaacaagaacggcgtggaccaggaaatcatcttcccacccatcaagaccgatgtgattacaatggaccccaaggacaactgctccaaggacgccaacgataccctgctgctccagctgaccaacaccagcgcctactacatgtacttgttgctgctgctgaagtccgtggtgtacttcgccatcatcacatgctgcctgctgatggctatggtcaagcggaaggacagccggggaagggccaagcgatctggatctggagcaacaaacttctcactactcaaacaagcaggtgacgtggaggagaatcccgggcctactagtatggactggatttggcgcatccttttccttgtcggcgctgctaccggcgcgcattccgggccccagctccagctgcaagagtctggacctggcctggtcaagcctagcgagacactgagcctgacctgtaccgtgtccggcgatagcatcagcagcggcgattactactggggctggatcagacagcctcctggcaaaggactggaatggatcggccacatctactacagcggcgtgacctactacaaccccagcctgaagtccagagtgaccatcagcgtggacaccagccggaaccagttctccctgaagctgtctagcgtgacagccgccgataccgccgtgtactactgcaccagagaggacagcagcaactggcggagtagaggccagggaacactggtcacagttagctctggatccggcggaggcggaagtggaggcggaggatctggcggcggaggctctttcgaagaagtgcagctggttgaaagcggagccgaagtgaagaaacctggggcctctgtgaaggtgtcctgcaaggccagcggctacacctttaccagctactggattcactgggtccgacaggcccctggacaaggacttgagtggatgggcgagaacgacccctccaacggcaggaccaactacaacgagaagttcaagaaccgcgtgaccctgaccgtggacaccagcatctctaccgcctacatggaactgagccggctgagatccgatgacaccgccgtgtactattgcgccagaggacccaactacttttacagcatggactactggggccagggcacaatggtcaccgttagctctacgcgtatccagaaccctgatcctgccgtgtaccagctgcgggatagcaagagcagcgacaagagcgtgtgtctgttcaccgacttcgacagccagaccaacgtgtcccagagcaaggactccgacgtgtacatcaccgataagtgcgtgctggacatgcggagcatggacttcaagagcaactccgccgtggcctggtccaacaagtccgatttcgcctgcgccaacgccttcaacaacagcattatccccgaggacacattcttcccaagccccgagagcagcgactccaccgaccacgtgaagcccaaagagacagagaacaccaagcagcccagcaagagctgccacaagcccaaggccatcgtgcacaccgagaaagtgaacatgatgagcctgaccgtgctgggcctgcggatgctgttcgccaaaaccgtggccgtgaacttcctgctgaccgccaagctgttcttcctcctcaccgcc

SEQ ID NO: 6819 - DNA, 2982 bp, synthetic construct
  source 1..2982: mol_type = other DNA
atggccttaccagtgaccgccttgctcctgccgctggccttgctgctccacgccgccaggccggaagtgcagctggttgaatctggcggaggactggttcagcctggcggatctctgagactgtcttgtgccgccagcggcttcagcttcagcgacttttggatgagctgggtccgacaggcccctggcaaaggacttgaatgggtcgccacaatcagccaggccggcagcgagaaggactacgtggactctgtgaagggcagattcaccatcagccgggacaacgccaagaagtccctgtacctccagatgaacagcctgagagccgaggacaccgccgtgtactattgtgcctctggcgtgtacagcttcgactacagaggccagggcaccctggtcacagtctcttctggtaccggcggaggcggatctggcggcggaggtagcggtggcggaggatctgaattcgacatccagctgactcagagccctagctttctgagcgccagcgtgggcgacagagtgaccatcacatgtagcgccagatccagcatcagcttcatgtactggtatcagcagaagcccggcaaggcccctaagctgctgatctacgacaccagcaatctggcctctggcgtgcccagcagattttctggaagcggcagcggcaccgagttcaccctgacaatctctagcctggaagccgaggatgccgccacctactattgccagcagtggtccagctatcccctgacatttggacagggcaccaagctggaaatcaaactcgaggacctgaagaacgtgttcccacctgaggtggccgtgttcgagcctagcgaggccgagatcagccacacccagaaagccaccctcgtgtgcctggctaccggcttctaccccgaccatgtggaactgtcttggtgggtcaacggcaaagaggtgcacagcggcgtgtgtaccgacccccagccactgaaagaacagcccgccctgaacgacagccggtactgcctgagcagcagactgagagtgtccgccaccttctggcagaacccccggaaccacttcagatgccaggtgcagttctacggcctgagcgagaacgacgagtggacccaggacagagccaagcccgtgacccagatcgtgtctgccgaagcctggggcagagccgatgatgtgattaagatccactggcaggaaaagaagtccaacaccatcctgggcagccaggaaggcaacaccatgaagaccaacgacacctacatgaagttcagctggctgaccgtgcccgagaagtccctggacaaagaacacagatgcatcgtgcggcacgaaaacaacaagaacggcgtggaccaggaaatcatcttcccacccatcaagaccgatgtgattacaatggaccccaaggacaactgctccaaggacgccaacgataccctgctgctccagctgaccaacaccagcgcctactacatgtacttgttgctgctgctgaagtccgtggtgtacttcgccatcatcacatgctgcctgctgatggctatggtcaagcggaaggacagccggggaagggccaagcgatctggatctggagcaacaaacttctcactactcaaacaagcaggtgacgtggaggagaatcccgggcctactagtatggactggatttggcgcatccttttccttgtcggcgctgctaccggcgcgcattccgggccccagctccagctgcaagagtctggacctggcctggtcaagcctagcgagacactgagcctgacctgtaccgtgtccggcgatagcatcagcagcggcgattactactggggctggatcagacagcctcctggcaaaggactggaatggatcggccacatctactacagcggcgtgacctactacaaccccagcctgaagtccagagtgaccatcagcgtggacaccagccggaaccagttctccctgaagctgtctagcgtgacagccgccgataccgccgtgtactactgcaccagagaggacagcagcaactggcggagtagaggccagggaacactggtcacagttagctctggatccggcggaggcggaagtggaggcggaggatctggcggcggaggctctttcgaacaggttcagctggttcagtctggggccgaagtgaagaaacctggggcctctgtgaaggtgtcctgcaaggcttccggctacacctttaccggctcttggatgaactgggtccgacaggctcctggacagggactcgaatggatcggcagaatctatcctggcgacggcgagacaaactacaacggcaagttcaaggaccgcgtgacaatcaccgccgacaagagcacaagcaccgcctacatggaactgagcagcctgcggagcgaagataccgccgtgtactactgcgcccggatctacggcaacaacgtgtacttcgatgtgtggggccagggcacaaccgtgacagtctcttctacgcgtatccagaaccctgatcctgccgtgtaccagctgcgggatagcaagagcagcgacaagagcgtgtgtctgttcaccgacttcgacagccagaccaacgtgtcccagagcaaggactccgacgtgtacatcaccgataagtgcgtgctggacatgcggagcatggacttcaagagcaactccgccgtggcctggtccaacaagtccgatttcgcctgcgccaacgccttcaacaacagcattatccccgaggacacattcttcccaagccccgagagcagcgactccaccgaccacgtgaagcccaaagagacagagaacaccaagcagcccagcaagagctgccacaagcccaaggccatcgtgcacaccgagaaagtgaacatgatgagcctgaccgtgctgggcctgcggatgctgttcgccaaaaccgtggccgtgaacttcctgctgaccgccaagctgttcttcctcctcaccgcc

SEQ ID NO: 6820 - DNA, 3006 bp, synthetic construct
  source 1..3006: mol_type = other DNA
atggccttaccagtgaccgccttgctcctgccgctggccttgctgctccacgccgccaggccggaagtgcagctggttgaatctggcggaggactggttcagcctggcggatctctgagactgtcttgtgccgccagcggcttcagcttcagcgacttttggatgagctgggtccgacaggcccctggcaaaggacttgaatgggtcgccacaatcagccaggccggcagcgagaaggactacgtggactctgtgaagggcagattcaccatcagccgggacaacgccaagaagtccctgtacctccagatgaacagcctgagagccgaggacaccgccgtgtactattgtgcctctggcgtgtacagcttcgactacagaggccagggcaccctggtcacagtctcttctggtaccggcggaggcggatctggcggcggaggtagcggtggcggaggatctgaattccagctggtgctgacacagtctccaagcgcctctgccagcctgggatctagcgtgaagctgacctgtacactgagcagcggccacaagaccgacaccatcgactggtatcagcagcagcctggcaaggcccctagatacctgatgaagctggaaggcagcggcagctacaacaaaggctctggcgtgcccgatagattcagcggcagttcttctggcgctgattggtatctgaccatcagcagcctccagagcgaggacgaggccgattactactgcggcacagactaccccggcaactacctgtttggcggcggaacacagctgacagtgcttggcctcgaggacctgaagaacgtgttcccacctgaggtggccgtgttcgagcctagcgaggccgagatcagccacacccagaaagccaccctcgtgtgcctggctaccggcttctaccccgaccatgtggaactgtcttggtgggtcaacggcaaagaggtgcacagcggcgtgtgtaccgacccccagccactgaaagaacagcccgccctgaacgacagccggtactgcctgagcagcagactgagagtgtccgccaccttctggcagaacccccggaaccacttcagatgccaggtgcagttctacggcctgagcgagaacgacgagtggacccaggacagagccaagcccgtgacccagatcgtgtctgccgaagcctggggcagagccgatgatgtgattaagatccactggcaggaaaagaagtccaacaccatcctgggcagccaggaaggcaacaccatgaagaccaacgacacctacatgaagttcagctggctgaccgtgcccgagaagtccctggacaaagaacacagatgcatcgtgcggcacgaaaacaacaagaacggcgtggaccaggaaatcatcttcccacccatcaagaccgatgtgattacaatggaccccaaggacaactgctccaaggacgccaacgataccctgctgctccagctgaccaacaccagcgcctactacatgtacttgttgctgctgctgaagtccgtggtgtacttcgccatcatcacatgctgcctgctgatggctatggtcaagcggaaggacagccggggaagggccaagcgatctggatctggagcaacaaacttctcactactcaaacaagcaggtgacgtggaggagaatcccgggcctactagtatggactggatttggcgcatccttttccttgtcggcgctgctaccggcgcgcattccgggccccagctccagctgcaagagtctggacctggcctggtcaagcctagcgagacactgagcctgacctgtaccgtgtccggcgatagcatcagcagcggcgattactactggggctggatcagacagcctcctggcaaaggactggaatggatcggccacatctactacagcggcgtgacctactacaaccccagcctgaagtccagagtgaccatcagcgtggacaccagccggaaccagttctccctgaagctgtctagcgtgacagccgccgataccgccgtgtactactgcaccagagaggacagcagcaactggcggagtagaggccagggaacactggtcacagttagctctggatccggcggaggcggaagtggaggcggaggatctggcggcggaggctctttcgaacaagaacagctggttgaaagcggcggaggactggttcaacctggcggttctctgagactgagctgtgccgccagcggcttcaccttcagcgactactacatgagctggatcagacaggccccaggcaaaggactggaatgggtcgccacaatctaccccagcagcggcaagacctactacgccgattctgccaagggcagactgaccatctccagcgacaacgccaaggacagcctgtacctccagatgaacagcctgagagccgaggacaccgccgtgtactactgcaccagagatagctacgccgacgacgccgctctgtttgacatttggggccagggcaccaccgtgaccgtttcttctacgcgtatccagaaccctgatcctgccgtgtaccagctgcgggatagcaagagcagcgacaagagcgtgtgtctgttcaccgacttcgacagccagaccaacgtgtcccagagcaaggactccgacgtgtacatcaccgataagtgcgtgctggacatgcggagcatggacttcaagagcaactccgccgtggcctggtccaacaagtccgatttcgcctgcgccaacgccttcaacaacagcattatccccgaggacacattcttcccaagccccgagagcagcgactccaccgaccacgtgaagcccaaagagacagagaacaccaagcagcccagcaagagctgccacaagcccaaggccatcgtgcacaccgagaaagtgaacatgatgagcctgaccgtgctgggcctgcggatgctgttcgccaaaaccgtggccgtgaacttcctgctgaccgccaagctgttcttcctcctcaccgcc

SEQ ID NO: 6821 - DNA, 2982 bp, synthetic construct; identical to SEQ ID NO: 6817
  source 1..2982: mol_type = other DNA

SEQ ID NO: 6822 - DNA, 3003 bp, synthetic construct; identical to SEQ ID NO: 6818
  source 1..3003: mol_type = other DNA

SEQ ID NO: 6823 - DNA, 2982 bp, synthetic construct; identical to SEQ ID NO: 6819
  source 1..2982: mol_type = other DNA

SEQ ID NO: 6824 - DNA, 3006 bp, synthetic construct; identical to SEQ ID NO: 6820
  source 1..3006: mol_type = other DNA

SEQ ID NO: 6825 - DNA, 3003 bp, synthetic construct
  source 1..3003: mol_type = other DNA
atggccttaccagtgaccgccttgctcctgccgctggccttgctgctccacgccgccaggccggaagtgcagctggttgaatctggcggaggactggttcagcctggcggatctctgagactgtcttgtgccgccagcggcttcagcttcagcgacttttggatgagctgggtccgacaggcccctggcaaaggacttgaatgggtcgccacaatcagccaggccggcagcgagaaggactacgtggactctgtgaagggcagattcaccatcagccgggacaacgccaagaagtccctgtacctccagatgaacagcctgagagccgaggacaccgccgtgtactattgtgcctctggcgtgtacagcttcgactacagaggccagggcaccctggtcacagtctcttctggtaccggcggaggcggatctggcggcggaggtagcggtggcggaggatctgaattcgatatccagctcactcaaagcccctctagtctctctgcctcagtgggggatcgggtcagttttacttgtcaagcttcacaggatatcaacaacttccttaattggtatcagcagaagccaggaaaagcacccaagctgctcatctatgatgcctcaaatttggagacgggtgttcccagtcgattctctgggtcagggtccgggaccgactttacgtttacgatctcctctctgcagcccgaagacatcgccacatactattgtcaacagtacggcaacttgcctttcacatttgggggcgggactaaggttgaaatcaagaggctcgaggacctgaagaacgtgttcccacctgaggtggccgtgttcgagcctagcgaggccgagatcagccacacccagaaagccaccctcgtgtgcctggctaccggcttctaccccgaccatgtggaactgtcttggtgggtcaacggcaaagaggtgcacagcggcgtgtgtaccgacccccagccactgaaagaacagcccgccctgaacgacagccggtactgcctgagcagcagactgagagtgtccgccaccttctggcagaacccccggaaccacttcagatgccaggtgcagttctacggcctgagcgagaacgacgagtggacccaggacagagccaagcccgtgacccagatcgtgtctgccgaagcctggggcagagccgatgatgtgattaagatccactggcaggaaaagaagtccaacaccatcctgggcagccaggaaggcaacaccatgaagaccaacgacacctacatgaagttcagctggctgaccgtgcccgagaagtccctggacaaagaacacagatgcatcgtgcggcacgaaaacaacaagaacggcgtggaccaggaaatcatcttcccacccatcaagaccgatgtgattacaatggaccccaaggacaactgctccaaggacgccaacgataccctgctgctccagctgaccaacaccagcgcctactacatgtacttgttgctgctgctgaagtccgtggtgtacttcgccatcatcacatgctgcctgctgatggctatggtcaagcggaaggacagccggggaagggccaagcgatctggatctggagcaacaaacttctcactactcaaacaagcaggtgacgtggaggagaatcccgggcctactagtatggactggatttggcgcatccttttccttgtcggcgctgctaccggcgcgcattccgggccccagctccagctgcaagagtctggacctggcctggtcaagcctagcgagacactgagcctgacctgtaccgtgtccggcgatagcatcagcagcggcgattactactggggctggatcagacagcctcctggcaaaggactggaatggatcggccacatctactacagcggcgtgacctactacaaccccagcctgaagtccagagtgaccatcagcgtggacaccagccggaaccagttctccctgaagctgtctagcgtgacagccgccgataccgccgtgtactactgcaccagagaggacagcagcaactggcggagtagaggccagggaacactggtcacagttagctctggatccggcggaggcggaagtggaggcggaggatctggcggcggaggctctttcgaacaggtacagctgcaggaatctgggcccggacttgtcaagccaagtcagacactttctcttacatgtaccgtgagcggcggaagtataagcagtggaggcttttactggtcttggatacggcagcacccaggcaaaggcttggagtggattggatacattcatcattcaggatctacacactataatccatcccttaagtcccgggtcaccattagcattgatacgtctaagaatctgttcagtctcaggctgtcctccgtcactgctgccgacacagccgtgtactactgcgcctccttggtttactgcggaggcgactgttatagcggctttgattattgggggcaggggaccctcgtaaccgtgagctctacgcgtatccagaaccctgatcctgccgtgtaccagctgcgggatagcaagagcagcgacaagagcgtgtgtctgttcaccgacttcgacagccagaccaacgtgtcccagagcaaggactccgacgtgtacatcaccgataagtgcgtgctggacatgcggagcatggacttcaagagcaactccgccgtggcctggtccaacaagtccgatttcgcctgcgccaacgccttcaacaacagcattatccccgaggacacattcttcccaagccccgagagcagcgactccaccgaccacgtgaagcccaaagagacagagaacaccaagcagcccagcaagagctgccacaagcccaaggccatcgtgcacaccgagaaagtgaacatgatgagcctgaccgtgctgggcctgcggatgctgttcgccaaaaccgtggccgtgaacttcctgctgaccgccaagctgttcttcctcctcaccgcc

SEQ ID NO: 6826 - DNA, 2991 bp, synthetic construct
  source 1..2991: mol_type = other DNA
atggccttaccagtgaccgccttgctcctgccgctggccttgctgctccacgccgccaggccggaagtgcagctggttgaatctggcggaggactggttcagcctggcggatctctgagactgtcttgtgccgccagcggcttcagcttcagcgacttttggatgagctgggtccgacaggcccctggcaaaggacttgaatgggtcgccacaatcagccaggccggcagcgagaaggactacgtggactctgtgaagggcagattcaccatcagccgggacaacgccaagaagtccctgtacctccagatgaacagcctgagagccgaggacaccgccgtgtactattgtgcctctggcgtgtacagcttcgactacagaggccagggcaccctggtcacagtctcttctggtaccggcggaggcggatctggcggcggaggtagcggtggcggaggatctgaattcgacattcagatgacacagagccctagcagcctgagcgcctctgtgggagacagagtgaccatcacatgcaagagcagccagagcgtgctgtactccagcaatcagaagaactacctggcctggttccagcagaagcctggcaaggctcctaagctgctgatctactgggccagcaccagagaaagcggcgtgccaagcagattttctggcagcggctctggcaccgacttcaccctgacaatatccagcctccagcctgaggacttcgccacctacttttgccaccagtacctgagcagctacacattcggacagggcaccaaggtggaaatcaagcggctcgaggacctgaagaacgtgttcccacctgaggtggccgtgttcgagcctagcgaggccgagatcagccacacccagaaagccaccctcgtgtgcctggctaccggcttctaccccgaccatgtggaactgtcttggtgggtcaacggcaaagaggtgcacagcggcgtgtgtaccgacccccagccactgaaagaacagcccgccctgaacgacagccggtactgcctgagcagcagactgagagtgtccgccaccttctggcagaacccccggaaccacttcagatgccaggtgcagttctacggcctgagcgagaacgacgagtggacccaggacagagccaagcccgtgacccagatcgtgtctgccgaagcctggggcagagccgatgatgtgattaagatccactggcaggaaaagaagtccaacaccatcctgggcagccaggaaggcaacaccatgaagaccaacgacacctacatgaagttcagctggctgaccgtgcccgagaagtccctggacaaagaacacagatgcatcgtgcggcacgaaaacaacaagaacggcgtggaccaggaaatcatcttcccacccatcaagaccgatgtgattacaatggaccccaaggacaactgctccaaggacgccaacgataccctgctgctccagctgaccaacaccagcgcctactacatgtacttgttgctgctgctgaagtccgtggtgtacttcgccatcatcacatgctgcctgctgatggctatggtcaagcggaaggacagccggggaagggccaagcgatctggatctggagcaacaaacttctcactactcaaacaagcaggtgacgtggaggagaatcccgggcctactagtatggactggatttggcgcatccttttccttgtcggcgctgctaccggcgcgcattccgggccccagctccagctgcaagagtctggacctggcctggtcaagcctagcgagacactgagcctgacctgtaccgtgtccggcgatagcatcagcagcggcgattactactggggctggatcagacagcctcctggcaaaggactggaatggatcggccacatctactacagcggcgtgacctactacaaccccagcctgaagtccagagtgaccatcagcgtggacaccagccggaaccagttctccctgaagctgtctagcgtgacagccgccgataccgccgtgtactactgcaccagagaggacagcagcaactggcggagtagaggccagggaacactggtcacagttagctctggatccggcggaggcggaagtggaggcggaggatctggcggcggaggctctttcgaagaggtgcagctggttgaatctggcggaggactggttcagcctggcggatctctgagactgtcttgtgccgccagcggctacaccttcaccacctattggatgcactgggtccgacaggcccctggcaaaggacttgagtgggtcggatatatcaggcccagcaccggctacacagagtacaaccagaagttcaaggaccgcttcaccatcagcgccgacaccagcaagaataccgcctacctccagatgaacagcctgagagccgaggacaccgccgtgtactactgtgccagatccagatggctgctggactattggggccagggcacactggttacagtttctacgcgtatccagaaccctgatcctgccgtgtaccagctgcgggatagcaagagcagcgacaagagcgtgtgtctgttcaccgacttcgacagccagaccaacgtgtcccagagcaaggactccgacgtgtacatcaccgataagtgcgtgctggacatgcggagcatggacttcaagagcaactccgccgtggcctggtccaacaagtccgatttcgcctgcgccaacgccttcaacaacagcattatccccgaggacacattcttcccaagccccgagagcagcgactccaccgaccacgtgaagcccaaagagacagagaacaccaagcagcccagcaagagctgccacaagcccaaggccatcgtgcacaccgagaaagtgaacatgatgagcctgaccgtgctgggcctgcggatgctgttcgccaaaaccgtggccgtgaacttcctgctgaccgccaagctgttcttcctcctcaccgcc

SEQ ID NO: 6827 - DNA, 2982 bp, synthetic construct
  source 1..2982: mol_type = other DNA
atggccttaccagtgaccgccttgctcctgccgctggccttgctgctccacgccgccaggccggaagtgcagctggttgaatctggcggaggactggttcagcctggcggatctctgagactgtcttgtgccgccagcggcttcagcttcagcgacttttggatgagctgggtccgacaggcccctggcaaaggacttgaatgggtcgccacaatcagccaggccggcagcgagaaggactacgtggactctgtgaagggcagattcaccatcagccgggacaacgccaagaagtccctgtacctccagatgaacagcctgagagccgaggacaccgccgtgtactattgtgcctctggcgtgtacagcttcgactacagaggccagggcaccctggtcacagtctcttctggtaccggcggaggcggatctggcggcggaggtagcggtggcggaggatctgaattcgacatccagatgacacagagccctagcagcctgtctgccagcgtgggagacagagtgaccatcacctgtagagccagccaggacatcagcaactacctgaactggtatcagcagaagcccggcaaggcccctaagctgctgatctactacaccagcagactgcacagcggcgtgcccagcagattttctggctctggcagcggcaccgacttcaccctgacaatatctagcctccagcctgaggacttcgccacctactattgccagcagggcaacaccctgccttacacatttggacagggcaccaaggtggaaatcaagagactcgaggacctgaagaacgtgttcccacctgaggtggccgtgttcgagcctagcgaggccgagatcagccacacccagaaagccaccctcgtgtgcctggctaccggcttctaccccgaccatgtggaactgtcttggtgggtcaacggcaaagaggtgcacagcggcgtgtgtaccgacccccagccactgaaagaacagcccgccctgaacgacagccggtactgcctgagcagcagactgagagtgtccgccaccttctggcagaacccccggaaccacttcagatgccaggtgcagttctacggcctgagcgagaacgacgagtggacccaggacagagccaagcccgtgacccagatcgtgtctgccgaagcctggggcagagccgatgatgtgattaagatccactggcaggaaaagaagtccaacaccatcctgggcagccaggaaggcaacaccatgaagaccaacgacacctacatgaagttcagctggctgaccgtgcccgagaagtccctggacaaagaacacagatgcatcgtgcggcacgaaaacaacaagaacggcgtggaccaggaaatcatcttcccacccatcaagaccgatgtgattacaatggaccccaaggacaactgctccaaggacgccaacgataccctgctgctccagctgaccaacaccagcgcctactacatgtacttgttgctgctgctgaagtccgtggtgtacttcgccatcatcacatgctgcctgctgatggctatggtcaagcggaaggacagccggggaagggccaagcgatctggatctggagcaacaaacttctcactactcaaacaagcaggtgacgtggaggagaatcccgggcctactagtatggactggatttggcgcatccttttccttgtcggcgctgctaccggcgcgcattccgggccccagctccagctgcaagagtctggacctggcctggtcaagcctagcgagacactgagcctgacctgtaccgtgtccggcgatagcatcagcagcggcgattactactggggctggatcagacagcctcctggcaaaggactggaatggatcggccacatctactacagcggcgtgacctactacaaccccagcctgaagtccagagtgaccatcagcgtggacaccagccggaaccagttctccctgaagctgtctagcgtgacagccgccgataccgccgtgtactactgcaccagagaggacagcagcaactggcggagtagaggccagggaacactggtcacagttagctctggatccggcggaggcggaagtggaggcggaggatctggcggcggaggctctttcgaagaagtgcagctggttgaatcaggtggcggcctggttcaacctggcggatctctgagactgagctgtgccgccagcggcttcaccttcagcgactactttatgagctgggtccgacaggcccctggcaaaggacttgaatgggtcgccaccatcagcaatggcggcacctacacttactaccccgacagcgtgaagggcagattcaccatctccagagacaacagcaagaacaccctgtacctccagatgaactccctgagagccgaggacaccgccgtgtactactgcgccagattcgacggctacatcttcgactattggggccagggcaccctggtcacagtctcttctacgcgtatccagaaccctgatcctgccgtgtaccagctgcgggatagcaagagcagcgacaagagcgtgtgtctgttcaccgacttcgacagccagaccaacgtgtcccagagcaaggactccgacgtgtacatcaccgataagtgcgtgctggacatgcggagcatggacttcaagagcaactccgccgtggcctggtccaacaagtccgatttcgcctgcgccaacgccttcaacaacagcattatccccgaggacacattcttcccaagccccgagagcagcgactccaccgaccacgtgaagcccaaagagacagagaacaccaagcagcccagcaagagctgccacaagcccaaggccatcgtgcacaccgagaaagtgaacatgatgagcctgaccgtgctgggcctgcggatgctgttcgccaaaaccgtggccgtgaacttcctgctgaccgccaagctgttcttcctcctcaccgcc

SEQ ID NO: 6828 - DNA, 2997 bp, synthetic construct
  source 1..2997: mol_type = other DNA
atggccttaccagtgaccgccttgctcctgccgctggccttgctgctccacgccgccaggccggaagtgcagctggttgaatctggcggaggactggttcagcctggcggatctctgagactgtcttgtgccgccagcggcttcagcttcagcgacttttggatgagctgggtccgacaggcccctggcaaaggacttgaatgggtcgccacaatcagccaggccggcagcgagaaggactacgtggactctgtgaagggcagattcaccatcagccgggacaacgccaagaagtccctgtacctccagatgaacagcctgagagccgaggacaccgccgtgtactattgtgcctctggcgtgtacagcttcgactacagaggccagggcaccctggtcacagtctcttctggtaccggcggaggcggatctggcggcggaggtagcggtggcggaggatctgaattcgacatccagatgacacagactacatcctccctgtctgcctctctgggagacagagtcaccatcagttgcagggcaagtcaggacattagtaagtacctgaactggtatcagcagaaaccagatggaactgttaaactcctgatctaccatacatcaagattacactcaggagtcccatcaaggttcagtggcagtgggtctggaacagattattctctcaccattagcaacctggagcaagaagatattgccacttacttttgccaacagggtaatacgcttccgtacacgttcggaggggggaccaagctggagatcacactcgagatccagaaccctgatcctgccgtgtaccagctgcgggatagcaagagcagcgacaagagcgtgtgtctgttcaccgacttcgacagccagaccaacgtgtcccagagcaaggactccgacgtgtacatcaccgataagtgcgtgctggacatgcggagcatggacttcaagagcaactccgccgtggcctggtccaacaagtccgatttcgcctgcgccaacgccttcaacaacagcattatccccgaggacacattcttcccaagccccgagagcagcgactccaccgaccacgtgaagcccaaagagacagagaacaccaagcagcccagcaagagctgccacaagcccaaggccatcgtgcacaccgagaaagtgaacatgatgagcctgaccgtgctgggcctgcggatgctgttcgccaaaaccgtggccgtgaacttcctgctgaccgccaagctgttcttcctcctcaccgcccgcgccaagagaagcggatctggcgtgaagcagaccctgaatttcgacctgctgaagctggctggcgacgtggaatccaacccaggccctactagtatggactggatttggcgcatccttttccttgtcggcgctgctaccggcgcgcattccgggccccagctccagctgcaagagtctggacctggcctggtcaagcctagcgagacactgagcctgacctgtaccgtgtccggcgatagcatcagcagcggcgattactactggggctggatcagacagcctcctggcaaaggactggaatggatcggccacatctactacagcggcgtgacctactacaaccccagcctgaagtccagagtgaccatcagcgtggacaccagccggaaccagttctccctgaagctgtctagcgtgacagccgccgataccgccgtgtactactgcaccagagaggacagcagcaactggcggagtagaggccagggaacactggtcacagttagctctggatccggcggaggcggaagtggaggcggaggatctggcggcggaggctctttcgaagtgaaactgcaggagtcaggacctggcctggtggcgccctcacagagcctgtccgtcacatgcactgtctcaggggtctcattacccgactatggtgtaagctggattcgccagcctccacgaaagggtctggagtggctgggagtaatatggggtagtgaaaccacatactataattcagctctcaaatccagactgaccatcatcaaggacaactccaagagccaagttttcttaaaaatgaacagtctgcaaactgatgacacagccatttactactgtgccaaacattattactacggtggtagctatgctatggactactggggccaaggaacctcagtcaccgtctcctcaacgcgtgaggacctgaagaacgtgttcccacctgaggtggccgtgttcgagcctagcgaggccgagatcagccacacccagaaagccaccctcgtgtgcctggctaccggcttctaccccgaccatgtggaactgtcttggtgggtcaacggcaaagaggtgcacagcggcgtgtgtaccgacccccagccactgaaagaacagcccgccctgaacgacagccggtactgcctgagcagcagactgagagtgtccgccaccttctggcagaacccccggaaccacttcagatgccaggtgcagttctacggcctgagcgagaacgacgagtggacccaggacagagccaagcccgtgacccagatcgtgtctgccgaagcctggggcagagccgatgatgtgattaagatccactggcaggaaaagaagtccaacaccatcctgggcagccaggaaggcaacaccatgaagaccaacgacacctacatgaagttcagctggctgaccgtgcccgagaagtccctggacaaagaacacagatgcatcgtgcggcacgaaaacaacaagaacggcgtggaccaggaaatcatcttcccacccatcaagaccgatgtgattacaatggaccccaaggacaactgctccaaggacgccaacgataccctgctgctccagctgaccaacaccagcgcctactacatgtacttgttgctgctgctgaagtccgtggtgtacttcgccatcatcacatgctgcctgctgatggctatggtcaagcggaaggacagccgggga

SEQ ID NO: 6829 - DNA, 3000 bp, synthetic construct
  source 1..3000: mol_type = other DNA
atggccttaccagtgaccgccttgctcctgccgctggccttgctgctccacgccgccaggccggaagtgcagctggttgaatctggcggaggactggttcagcctggcggatctctgagactgtcttgtgccgccagcggcttcagcttcagcgacttttggatgagctgggtccgacaggcccctggcaaaggacttgaatgggtcgccacaatcagccaggccggcagcgagaaggactacgtggactctgtgaagggcagattcaccatcagccgggacaacgccaagaagtccctgtacctccagatgaacagcctgagagccgaggacaccgccgtgtactattgtgcctctggcgtgtacagcttcgactacagaggccagggcaccctggtcacagtctcttctggtaccggcggaggcggatctggcggcggaggtagcggtggcggaggatctgaattcgagatcgtgatgacccagagccctgccaccctgtctctgagccctggcgaaagagccaccctgagctgtagagccagccaggacatcagcaagtacctgaactggtatcagcagaagcccggccaggcccccagactgctgatctaccacaccagcagactgcacagcggcatccccgccagattttctggctctggcagcggcaccgactacaccctgacaatcagcagcctccagcccgaggacttcgccgtgtacttctgtcagcaaggcaacaccctgccctacaccttcggccagggcaccaagctggaaatcaagctcgagatccagaaccctgatcctgccgtgtaccagctgcgggatagcaagagcagcgacaagagcgtgtgtctgttcaccgacttcgacagccagaccaacgtgtcccagagcaaggactccgacgtgtacatcaccgataagtgcgtgctggacatgcggagcatggacttcaagagcaactccgccgtggcctggtccaacaagtccgatttcgcctgcgccaacgccttcaacaacagcattatccccgaggacacattcttcccaagccccgagagcagcgactccaccgaccacgtgaagcccaaagagacagagaacaccaagcagcccagcaagagctgccacaagcccaaggccatcgtgcacaccgagaaagtgaacatgatgagcctgaccgtgctgggcctgcggatgctgttcgccaaaaccgtggccgtgaacttcctgctgaccgccaagctgttcttcctcctcaccgcccgcgccaagagaagcggatctggcgtgaagcagaccctgaatttcgacctgctgaagctggctggcgacgtggaatccaacccaggccctactagtatggactggatttggcgcatccttttccttgtcggcgctgctaccggcgcgcattccgggccccagctccagctgcaagagtctggacctggcctggtcaagcctagcgagacactgagcctgacctgtaccgtgtccggcgatagcatcagcagcggcgattactactggggctggatcagacagcctcctggcaaaggactggaatggatcggccacatctactacagcggcgtgacctactacaaccccagcctgaagtccagagtgaccatcagcgtggacaccagccggaaccagttctccctgaagctgtctagcgtgacagccgccgataccgccgtgtactactgcaccagagaggacagcagcaactggcggagtagaggccagggaacactggtcacagttagctctggatccggcggaggcggaagtggaggcggaggatctggcggcggaggctctttcgaacaggtgcaactccaggaatctggccctggcctcgtgaagcccagcgagacactgagcctgacctgtaccgtgtccggcgtgtccctgcctgactatggcgtgtcctggatcagacagccccctggcaagggcctggaatggatcggagtgatttggggcagcgaaaccacctactacaacagctccctgaagtccagagtgaccatctccaaggacaactccaagaaccaggtgtccctgaagctgagcagcgtgacagccgccgacaccgccgtgtattactgcgccaagcactactactacggcggcagctacgctatggactactggggccagggaaccctcgtgaccgtgtctagtacgcgtgaggacctgaagaacgtgttcccacctgaggtggccgtgttcgagcctagcgaggccgagatcagccacacccagaaagccaccctcgtgtgcctggctaccggcttctaccccgaccatgtggaactgtcttggtgggtcaacggcaaagaggtgcacagcggcgtgtgtaccgacccccagccactgaaagaacagcccgccctgaacgacagccggtactgcctgagcagcagactgagagtgtccgccaccttctggcagaacccccggaaccacttcagatgccaggtgcagttctacggcctgagcgagaacgacgagtggacccaggacagagccaagcccgtgacccagatcgtgtctgccgaagcctggggcagagccgatgatgtgattaagatccactggcaggaaaagaagtccaacaccatcctgggcagccaggaaggcaacaccatgaagaccaacgacacctacatgaagttcagctggctgaccgtgcccgagaagtccctggacaaagaacacagatgcatcgtgcggcacgaaaacaacaagaacggcgtggaccaggaaatcatcttcccacccatcaagaccgatgtgattacaatggaccccaaggacaactgctccaaggacgccaacgataccctgctgctccagctgaccaacaccagcgcctactacatgtacttgttgctgctgctgaagtccgtggtgtacttcgccatcatcacatgctgcctgctgatggctatggtcaagcggaaggacagccgggga

SEQ ID NO: 6830 - DNA, 3003 bp, synthetic construct
  source 1..3003: mol_type = other DNA
atggccttaccagtgaccgccttgctcctgccgctggccttgctgctccacgccgccaggccggaagtgcagctggttgaatctggcggaggactggttcagcctggcggatctctgagactgtcttgtgccgccagcggcttcagcttcagcgacttttggatgagctgggtccgacaggcccctggcaaaggacttgaatgggtcgccacaatcagccaggccggcagcgagaaggactacgtggactctgtgaagggcagattcaccatcagccgggacaacgccaagaagtccctgtacctccagatgaacagcctgagagccgaggacaccgccgtgtactattgtgcctctggcgtgtacagcttcgactacagaggccagggcaccctggtcacagtctcttctggtaccggcggaggcggatctggcggcggaggtagcggtggcggaggatctgaattcgacgagatcgtgctgacacagagccccgccaccctgtcactgtctccaggcgaaagagccaccctgagctgtagcgccagcagcagcgtgtcctacatgcactggtatcagcagaagcccggccaggcccccagactgctgatctacgataccagcaagctggcctccggcatccccgccagattttctggcagcggctccggcaccgacttcaccctgacaatcagcagcctggaacccgaggacgtggccgtgtactactgttttcaaggcagcgtgtaccccttcaccttcggccagggcaccaagctggaaatcaagagactcgagatccagaaccctgatcctgccgtgtaccagctgcgggatagcaagagcagcgacaagagcgtgtgtctgttcaccgacttcgacagccagaccaacgtgtcccagagcaaggactccgacgtgtacatcaccgataagtgcgtgctggacatgcggagcatggacttcaagagcaactccgccgtggcctggtccaacaagtccgatttcgcctgcgccaacgccttcaacaacagcattatccccgaggacacattcttcccaagccccgagagcagcgactccaccgaccacgtgaagcccaaagagacagagaacaccaagcagcccagcaagagctgccacaagcccaaggccatcgtgcacaccgagaaagtgaacatgatgagcctgaccgtgctgggcctgcggatgctgttcgccaaaaccgtggccgtgaacttcctgctgaccgccaagctgttcttcctcctcaccgcccgcgccaagagaagcggatctggcgtgaagcagaccctgaatttcgacctgctgaagctggctggcgacgtggaatccaacccaggccctactagtatggactggatttggcgcatccttttccttgtcggcgctgctaccggcgcgcattccgggccccagctccagctgcaagagtctggacctggcctggtcaagcctagcgagacactgagcctgacctgtaccgtgtccggcgatagcatcagcagcggcgattactactggggctggatcagacagcctcctggcaaaggactggaatggatcggccacatctactacagcggcgtgacctactacaaccccagcctgaagtccagagtgaccatcagcgtggacaccagccggaaccagttctccctgaagctgtctagcgtgacagccgccgataccgccgtgtactactgcaccagagaggacagcagcaactggcggagtagaggccagggaacactggtcacagttagctctggatccggcggaggcggaagtggaggcggaggatctggcggcggaggctctttcgaacaggtgcagctccaggaatctggccctggcctcgtgaagcctagccagaccctgagcctgacctgtaccgtgtctggcggcagcatcagcacaagcggcatgggcgtgggctggatcagacagcaccctggcaagggcctggaatggatcggccacatttggtgggacgacgacaagcggtacaaccccgccctgaagtccagagtgaccatcagcgtggacaccagcaagaaccagttcagcctgaagctgagcagcgtgacagccgccgataccgccgtgtattattgcgcccggatggaactgtggtcctactacttcgactactggggccagggaaccctcgtgaccgtgtctagtacgcgtgaggacctgaagaacgtgttcccacctgaggtggccgtgttcgagcctagcgaggccgagatcagccacacccagaaagccaccctcgtgtgcctggctaccggcttctaccccgaccatgtggaactgtcttggtgggtcaacggcaaagaggtgcacagcggcgtgtgtaccgacccccagccactgaaagaacagcccgccctgaacgacagccggtactgcctgagcagcagactgagagtgtccgccaccttctggcagaacccccggaaccacttcagatgccaggtgcagttctacggcctgagcgagaacgacgagtggacccaggacagagccaagcccgtgacccagatcgtgtctgccgaagcctggggcagagccgatgatgtgattaagatccactggcaggaaaagaagtccaacaccatcctgggcagccaggaaggcaacaccatgaagaccaacgacacctacatgaagttcagctggctgaccgtgcccgagaagtccctggacaaagaacacagatgcatcgtgcggcacgaaaacaacaagaacggcgtggaccaggaaatcatcttcccacccatcaagaccgatgtgattacaatggaccccaaggacaactgctccaaggacgccaacgataccctgctgctccagctgaccaacaccagcgcctactacatgtacttgttgctgctgctgaagtccgtggtgtacttcgccatcatcacatgctgcctgctgatggctatggtcaagcggaaggacagccgggga

SEQ ID NO: 6831 - DNA, 2997 bp, synthetic construct
  source 1..2997: mol_type = other DNA
atggccttaccagtgaccgccttgctcctgccgctggccttgctgctccacgccgccaggccggaagtgcagctggttgaatctggcggaggactggttcagcctggcggatctctgagactgtcttgtgccgccagcggcttcagcttcagcgacttttggatgagctgggtccgacaggcccctggcaaaggacttgaatgggtcgccacaatcagccaggccggcagcgagaaggactacgtggactctgtgaagggcagattcaccatcagccgggacaacgccaagaagtccctgtacctccagatgaacagcctgagagccgaggacaccgccgtgtactattgtgcctctggcgtgtacagcttcgactacagaggccagggcaccctggtcacagtctcttctggtaccggcggaggcggatctggcggcggaggtagcggtggcggaggatctgaattcgactacatccacgtgacacagagccctagcagcctgtccgtgtccatcggcgatagagtgaccatcaactgccagacctctcaaggcgtgggcagcgacctgcactggtatcagcacaaacctggcagagcccctaagctgctgatccaccatgccagctctgtggaagatggcgtgcccagcagattttccggcaccggatttcacaccagcttcaacctgacaatcaacgacctccaggccgacgacatcggcacctactactgtcaagtgctccagagcttcggcagaggcagcagactggatacaaaactcgagatccagaaccctgatcctgccgtgtaccagctgcgggatagcaagagcagcgacaagagcgtgtgtctgttcaccgacttcgacagccagaccaacgtgtcccagagcaaggactccgacgtgtacatcaccgataagtgcgtgctggacatgcggagcatggacttcaagagcaactccgccgtggcctggtccaacaagtccgatttcgcctgcgccaacgccttcaacaacagcattatccccgaggacacattcttcccaagccccgagagcagcgactccaccgaccacgtgaagcccaaagagacagagaacaccaagcagcccagcaagagctgccacaagcccaaggccatcgtgcacaccgagaaagtgaacatgatgagcctgaccgtgctgggcctgcggatgctgttcgccaaaaccgtggccgtgaacttcctgctgaccgccaagctgttcttcctcctcaccgcccgcgccaagagaagcggatctggcgtgaagcagaccctgaatttcgacctgctgaagctggctggcgacgtggaatccaacccaggccctactagtatggactggatttggcgcatccttttccttgtcggcgctgctaccggcgcgcattccgggccccagctccagctgcaagagtctggacctggcctggtcaagcctagcgagacactgagcctgacctgtaccgtgtccggcgatagcatcagcagcggcgattactactggggctggatcagacagcctcctggcaaaggactggaatggatcggccacatctactacagcggcgtgacctactacaaccccagcctgaagtccagagtgaccatcagcgtggacaccagccggaaccagttctccctgaagctgtctagcgtgacagccgccgataccgccgtgtactactgcaccagagaggacagcagcaactggcggagtagaggccagggaacactggtcacagttagctctggatccggcggaggcggaagtggaggcggaggatctggcggcggaggctctttcgaaagggcacacctggtgcagtctggcaccgccatgaagaaacctggcgcttccgtcagagtgtcctgtcagacaagcggctacaccttcacagcccacatcctgttctggttcagacaggccccaggcagaggactggaatgggtcggatggatcaagccccagtacggggccgtgaatttcggcggaggcttcagagacagagtgaccctgaccagggacgtgtaccgggaaatcgcctacatggacatccggggcctgaagcctgatgacaccgccgtgtactactgcgccagggatagaagctacggcgacagctcttgggctctcgatgcttggggacagggcacaacagtggtggtgtctgctacgcgtgaggacctgaagaacgtgttcccacctgaggtggccgtgttcgagcctagcgaggccgagatcagccacacccagaaagccaccctcgtgtgcctggctaccggcttctaccccgaccatgtggaactgtcttggtgggtcaacggcaaagaggtgcacagcggcgtgtgtaccgacccccagccactgaaagaacagcccgccctgaacgacagccggtactgcctgagcagcagactgagagtgtccgccaccttctggcagaacccccggaaccacttcagatgccaggtgcagttctacggcctgagcgagaacgacgagtggacccaggacagagccaagcccgtgacccagatcgtgtctgccgaagcctggggcagagccgatgatgtgattaagatccactggcaggaaaagaagtccaacaccatcctgggcagccaggaaggcaacaccatgaagaccaacgacacctacatgaagttcagctggctgaccgtgcccgagaagtccctggacaaagaacacagatgcatcgtgcggcacgaaaacaacaagaacggcgtggaccaggaaatcatcttcccacccatcaagaccgatgtgattacaatggaccccaaggacaactgctccaaggacgccaacgataccctgctgctccagctgaccaacaccagcgcctactacatgtacttgttgctgctgctgaagtccgtggtgtacttcgccatcatcacatgctgcctgctgatggctatggtcaagcggaaggacagccgggga

SEQ ID NO: 6832 - DNA, 3027 bp, synthetic construct
  source 1..3027: mol_type = other DNA
atggccttaccagtgaccgccttgctcctgccgctggccttgctgctccacgccgccaggccggaagtgcagctggttgaatctggcggaggactggttcagcctggcggatctctgagactgtcttgtgccgccagcggcttcagcttcagcgacttttggatgagctgggtccgacaggcccctggcaaaggacttgaatgggtcgccacaatcagccaggccggcagcgagaaggactacgtggactctgtgaagggcagattcaccatcagccgggacaacgccaagaagtccctgtacctccagatgaacagcctgagagccgaggacaccgccgtgtactattgtgcctctggcgtgtacagcttcgactacagaggccagggcaccctggtcacagtctcttctggtaccggcggaggcggatctggcggcggaggtagcggtggcggaggatctgaattcgacgtgcagatgatccagacccccgatagcctggccgtgtccctgggacagagagccaccatctcttgcagagccagcgagagcgtggacaactacggcatcagcttcatgcactggtatcagcagaagcccggccagagccccaagctgctgatctacagagcctccaacctggaaagcggcatccccgccagattttccggcagcggcagcagaaccgacttcaccctgaccatcaaccccgtggaaaccgacgacgtggcaacctactactgccagcagaacaacaaggacccccccacctttggcggaggcaccaagctggaaatcaagctcgagatccagaaccctgatcctgccgtgtaccagctgcgggatagcaagagcagcgacaagagcgtgtgtctgttcaccgacttcgacagccagaccaacgtgtcccagagcaaggactccgacgtgtacatcaccgataagtgcgtgctggacatgcggagcatggacttcaagagcaactccgccgtggcctggtccaacaagtccgatttcgcctgcgccaacgccttcaacaacagcattatccccgaggacacattcttcccaagccccgagagcagcgactccaccgaccacgtgaagcccaaagagacagagaacaccaagcagcccagcaagagctgccacaagcccaaggccatcgtgcacaccgagaaagtgaacatgatgagcctgaccgtgctgggcctgcggatgctgttcgccaaaaccgtggccgtgaacttcctgctgaccgccaagctgttcttcctcctcaccgcccgcgccaagagaagcggatctggcgtgaagcagaccctgaatttcgacctgctgaagctggctggcgacgtggaatccaacccaggccctactagtatggactggatttggcgcatccttttccttgtcggcgctgctaccggcgcgcattccgggccccagctccagctgcaagagtctggacctggcctggtcaagcctagcgagacactgagcctgacctgtaccgtgtccggcgatagcatcagcagcggcgattactactggggctggatcagacagcctcctggcaaaggactggaatggatcggccacatctactacagcggcgtgacctactacaaccccagcctgaagtccagagtgaccatcagcgtggacaccagccggaaccagttctccctgaagctgtctagcgtgacagccgccgataccgccgtgtactactgcaccagagaggacagcagcaactggcggagtagaggccagggaacactggtcacagttagctctggatccggcggaggcggaagtggaggcggaggatctggcggcggaggctctttcgaagggggaggcggctctcaggtgcaactccagcagtctggcgctgagcttgtgaagcctggggccagcgtgaagattagctgcaaggccagcggctacgccttcagcagctactggatgaactgggtcaagcagcggcctggcaagggcctggaatggatcggccaaatctaccccggcgacggcgacaccacctacaacggcaagttcaagggcaaggccaccctgacagccgacaagagcagcagcaccgtgtacatgcaactgaacagcctgaccagcgaggacagcgccgtgtacttctgcgtgcggtactactacggcagctccggctacttcgactattggggccagggcaccacactgaccgtgtcctctacgcgtgaggacctgaagaacgtgttcccacctgaggtggccgtgttcgagcctagcgaggccgagatcagccacacccagaaagccaccctcgtgtgcctggctaccggcttctaccccgaccatgtggaactgtcttggtgggtcaacggcaaagaggtgcacagcggcgtgtgtaccgacccccagccactgaaagaacagcccgccctgaacgacagccggtactgcctgagcagcagactgagagtgtccgccaccttctggcagaacccccggaaccacttcagatgccaggtgcagttctacggcctgagcgagaacgacgagtggacccaggacagagccaagcccgtgacccagatcgtgtctgccgaagcctggggcagagccgatgatgtgattaagatccactggcaggaaaagaagtccaacaccatcctgggcagccaggaaggcaacaccatgaagaccaacgacacctacatgaagttcagctggctgaccgtgcccgagaagtccctggacaaagaacacagatgcatcgtgcggcacgaaaacaacaagaacggcgtggaccaggaaatcatcttcccacccatcaagaccgatgtgattacaatggaccccaaggacaactgctccaaggacgccaacgataccctgctgctccagctgaccaacaccagcgcctactacatgtacttgttgctgctgctgaagtccgtggtgtacttcgccatcatcacatgctgcctgctgatggctatggtcaagcggaaggacagccgggga

SEQ ID NO: 6833 - DNA, 3000 bp, synthetic construct
  source 1..3000: mol_type = other DNA
atggccttaccagtgaccgccttgctcctgccgctggccttgctgctccacgccgccaggccggaagtgcagctggttgaatctggcggaggactggttcagcctggcggatctctgagactgtcttgtgccgccagcggcttcagcttcagcgacttttggatgagctgggtccgacaggcccctggcaaaggacttgaatgggtcgccacaatcagccaggccggcagcgagaaggactacgtggactctgtgaagggcagattcaccatcagccgggacaacgccaagaagtccctgtacctccagatgaacagcctgagagccgaggacaccgccgtgtactattgtgcctctggcgtgtacagcttcgactacagaggccagggcaccctggtcacagtctcttctggtaccggcggaggcggatctggcggcggaggtagcggtggcggaggatctgaattcgacgtgcagatgatccagacccccagcagcctgtctgccagcctgggcgatagagtgaccatcagctgtcgggccagccaggacatcggcaactacctgaactggtatcagcagaaacccgacggcaccgtgaagctgctgatctactacaccagcagactgcacagcggcgtgcccagcagattttctggcagcggctctggcaccgagtacagcctgaccatctccaacctggaacaggaagatattgctacctacttctgtcagcaaggcagcgccctgccccctacatttggcggcggaacaaagctggaaatcaacctcgagatccagaaccctgatcctgccgtgtaccagctgcgggatagcaagagcagcgacaagagcgtgtgtctgttcaccgacttcgacagccagaccaacgtgtcccagagcaaggactccgacgtgtacatcaccgataagtgcgtgctggacatgcggagcatggacttcaagagcaactccgccgtggcctggtccaacaagtccgatttcgcctgcgccaacgccttcaacaacagcattatccccgaggacacattcttcccaagccccgagagcagcgactccaccgaccacgtgaagcccaaagagacagagaacaccaagcagcccagcaagagctgccacaagcccaaggccatcgtgcacaccgagaaagtgaacatgatgagcctgaccgtgctgggcctgcggatgctgttcgccaaaaccgtggccgtgaacttcctgctgaccgccaagctgttcttcctcctcaccgcccgcgccaagagaagcggatctggcgtgaagcagaccctgaatttcgacctgctgaagctggctggcgacgtggaatccaacccaggccctactagtatggactggatttggcgcatccttttccttgtcggcgctgctaccggcgcgcattccgggccccagctccagctgcaagagtctggacctggcctggtcaagcctagcgagacactgagcctgacctgtaccgtgtccggcgatagcatcagcagcggcgattactactggggctggatcagacagcctcctggcaaaggactggaatggatcggccacatctactacagcggcgtgacctactacaaccccagcctgaagtccagagtgaccatcagcgtggacaccagccggaaccagttctccctgaagctgtctagcgtgacagccgccgataccgccgtgtactactgcaccagagaggacagcagcaactggcggagtagaggccagggaacactggtcacagttagctctggatccggcggaggcggaagtggaggcggaggatctggcggcggaggctctttcgaagctctccagctccagcagtctggcgcagaactcgtgcggcctggcgcttctgtgaccctgagctgtaaagccagcggctacaccttcaccgactacgagatgcactgggtcaagcagacccctgtgcacggcctggaatggatcggagccatcgaccctgagacaggcggcaccgcctacaaccagaagttcgagggcaaggccatcctgaccgccgacaagagcagcagcacagcctacatggaactgcggagcctgacctccgaggacagccccgtgtactactgtgccagacggcggtactacggcagcagctccttcgactattggggccagggcaccaccctgaccgtgtctagtacgcgtgaggacctgaagaacgtgttcccacctgaggtggccgtgttcgagcctagcgaggccgagatcagccacacccagaaagccaccctcgtgtgcctggctaccggcttctaccccgaccatgtggaactgtcttggtgggtcaacggcaaagaggtgcacagcggcgtgtgtaccgacccccagccactgaaagaacagcccgccctgaacgacagccggtactgcctgagcagcagactgagagtgtccgccaccttctggcagaacccccggaaccacttcagatgccaggtgcagttctacggcctgagcgagaacgacgagtggacccaggacagagccaagcccgtgacccagatcgtgtctgccgaagcctggggcagagccgatgatgtgattaagatccactggcaggaaaagaagtccaacaccatcctgggcagccaggaaggcaacaccatgaagaccaacgacacctacatgaagttcagctggctgaccgtgcccgagaagtccctggacaaagaacacagatgcatcgtgcggcacgaaaacaacaagaacggcgtggaccaggaaatcatcttcccacccatcaagaccgatgtgattacaatggaccccaaggacaactgctccaaggacgccaacgataccctgctgctccagctgaccaacaccagcgcctactacatgtacttgttgctgctgctgaagtccgtggtgtacttcgccatcatcacatgctgcctgctgatggctatggtcaagcggaaggacagccgggga

SEQ ID NO: 6834 - DNA, 3012 bp, synthetic construct
  source 1..3012: mol_type = other DNA
atggccttaccagtgaccgccttgctcctgccgctggccttgctgctccacgccgccaggccggaagtgcagctggttgaatctggcggaggactggttcagcctggcggatctctgagactgtcttgtgccgccagcggcttcagcttcagcgacttttggatgagctgggtccgacaggcccctggcaaaggacttgaatgggtcgccacaatcagccaggccggcagcgagaaggactacgtggactctgtgaagggcagattcaccatcagccgggacaacgccaagaagtccctgtacctccagatgaacagcctgagagccgaggacaccgccgtgtactattgtgcctctggcgtgtacagcttcgactacagaggccagggcaccctggtcacagtctcttctggtaccggcggaggcggatctggcggcggaggtagcggtggcggaggatctgaattcgacatcgtcctgacccagtccccagccagcctggcggtgtccctgggtcaacgagctaccatttcctgcagagcctctaagtccgtatccacttccggctatagttacctgcattggtaccaacagaaaccagggcagccacccaagctgctcatctatctggcctcaaacctggagtccggcgtgcccgccagattctccggaagtgggagcggcaccgactttacattgaacatccacccagtcgaagaggaagatgctgccacttattactgtcagcactccagggagctgccatttacatttggctctggcacaaaactggagatcaaactcgagatccagaaccctgatcctgccgtgtaccagctgcgggatagcaagagcagcgacaagagcgtgtgtctgttcaccgacttcgacagccagaccaacgtgtcccagagcaaggactccgacgtgtacatcaccgataagtgcgtgctggacatgcggagcatggacttcaagagcaactccgccgtggcctggtccaacaagtccgatttcgcctgcgccaacgccttcaacaacagcattatccccgaggacacattcttcccaagccccgagagcagcgactccaccgaccacgtgaagcccaaagagacagagaacaccaagcagcccagcaagagctgccacaagcccaaggccatcgtgcacaccgagaaagtgaacatgatgagcctgaccgtgctgggcctgcggatgctgttcgccaaaaccgtggccgtgaacttcctgctgaccgccaagctgttcttcctcctcaccgcccgcgccaagagaagcggatctggcgtgaagcagaccctgaatttcgacctgctgaagctggctggcgacgtggaatccaacccaggccctactagtatggactggatttggcgcatccttttccttgtcggcgctgctaccggcgcgcattccgggccccagctccagctgcaagagtctggacctggcctggtcaagcctagcgagacactgagcctgacctgtaccgtgtccggcgatagcatcagcagcggcgattactactggggctggatcagacagcctcctggcaaaggactggaatggatcggccacatctactacagcggcgtgacctactacaaccccagcctgaagtccagagtgaccatcagcgtggacaccagccggaaccagttctccctgaagctgtctagcgtgacagccgccgataccgccgtgtactactgcaccagagaggacagcagcaactggcggagtagaggccagggaacactggtcacagttagctctggatccggcggaggcggaagtggaggcggaggatctggcggcggaggctctttcgaacaggttcagctggtcgagtccgggggaggtctggtacagccgggtggcagcctcaagctgtcatgtgccgcatctggttttgactttagcaggtattggatgagctgggtccgccaggccccgggcaagggacttgagtggattggagaaataaaccctacttccagcacaatcaacttcacaccttctttgaaagataaggtttttatctctcgggataacgctaaaaacacactgtacttgcagatgtctaaggtgcgaagcgaagacaccgccctctattattgcgcccggggtaattactaccgctatggggatgcgatggactattgggggcaaggtacctccgtcacggtctcaacgcgtgaggacctgaagaacgtgttcccacctgaggtggccgtgttcgagcctagcgaggccgagatcagccacacccagaaagccaccctcgtgtgcctggctaccggcttctaccccgaccatgtggaactgtcttggtgggtcaacggcaaagaggtgcacagcggcgtgtgtaccgacccccagccactgaaagaacagcccgccctgaacgacagccggtactgcctgagcagcagactgagagtgtccgccaccttctggcagaacccccggaaccacttcagatgccaggtgcagttctacggcctgagcgagaacgacgagtggacccaggacagagccaagcccgtgacccagatcgtgtctgccgaagcctggggcagagccgatgatgtgattaagatccactggcaggaaaagaagtccaacaccatcctgggcagccaggaaggcaacaccatgaagaccaacgacacctacatgaagttcagctggctgaccgtgcccgagaagtccctggacaaagaacacagatgcatcgtgcggcacgaaaacaacaagaacggcgtggaccaggaaatcatcttcccacccatcaagaccgatgtgattacaatggaccccaaggacaactgctccaaggacgccaacgataccctgctgctccagctgaccaacaccagcgcctactacatgtacttgttgctgctgctgaagtccgtggtgtacttcgccatcatcacatgctgcctgctgatggctatggtcaagcggaaggacagccgggga

SEQ ID NO: 6835 - DNA, 3006 bp, synthetic construct
  source 1..3006: mol_type = other DNA
atggccttaccagtgaccgccttgctcctgccgctggccttgctgctccacgccgccaggccggaagtgcagctggttgaatctggcggaggactggttcagcctggcggatctctgagactgtcttgtgccgccagcggcttcagcttcagcgacttttggatgagctgggtccgacaggcccctggcaaaggacttgaatgggtcgccacaatcagccaggccggcagcgagaaggactacgtggactctgtgaagggcagattcaccatcagccgggacaacgccaagaagtccctgtacctccagatgaacagcctgagagccgaggacaccgccgtgtactattgtgcctctggcgtgtacagcttcgactacagaggccagggcaccctggtcacagtctcttctggtaccggcggaggcggatctggcggcggaggtagcggtggcggaggatctgaattcgacatccagatgacccagagccctagctcactgagcgccagcgtgggcgacagggtgaccattacctgctccgccagccaggacatcagcaactacctgaactggtaccagcagaagcccggcaaggcccccaagctgctgatctactacacctccaacctgcactccggcgtgcccagcaggttcagcggaagcggcagcggcaccgatttcaccctgaccatctccagcctgcagcccgaggacttcgccacctactactgccagcagtacaggaagctcccctggactttcggccagggcaccaaactggagatcaagcgtctcgagatccagaaccctgatcctgccgtgtaccagctgcgggatagcaagagcagcgacaagagcgtgtgtctgttcaccgacttcgacagccagaccaacgtgtcccagagcaaggactccgacgtgtacatcaccgataagtgcgtgctggacatgcggagcatggacttcaagagcaactccgccgtggcctggtccaacaagtccgatttcgcctgcgccaacgccttcaacaacagcattatccccgaggacacattcttcccaagccccgagagcagcgactccaccgaccacgtgaagcccaaagagacagagaacaccaagcagcccagcaagagctgccacaagcccaaggccatcgtgcacaccgagaaagtgaacatgatgagcctgaccgtgctgggcctgcggatgctgttcgccaaaaccgtggccgtgaacttcctgctgaccgccaagctgttcttcctcctcaccgcccgcgccaagagaagcggatctggcgtgaagcagaccctgaatttcgacctgctgaagctggctggcgacgtggaatccaacccaggccctactagtatggactggatttggcgcatccttttccttgtcggcgctgctaccggcgcgcattccgggccccagctccagctgcaagagtctggacctggcctggtcaagcctagcgagacactgagcctgacctgtaccgtgtccggcgatagcatcagcagcggcgattactactggggctggatcagacagcctcctggcaaaggactggaatggatcggccacatctactacagcggcgtgacctactacaaccccagcctgaagtccagagtgaccatcagcgtggacaccagccggaaccagttctccctgaagctgtctagcgtgacagccgccgataccgccgtgtactactgcaccagagaggacagcagcaactggcggagtagaggccagggaacactggtcacagttagctctggatccggcggaggcggaagtggaggcggaggatctggcggcggaggctctttcgaacaggtgcagctggtccagagcggcgccgaagtgaagaagcccggcagctccgtgaaagtgagctgcaaggccagcggcggcaccttcagcaactactggatgcactgggtgaggcaggcccccggacagggcctggagtggatgggcgccacctacaggggccacagcgacacctactacaaccagaagttcaagggccgggtgaccatcaccgccgacaagagcaccagcaccgcctacatggaactgagcagcctcaggagcgaggacaccgctgtgtattactgcgccaggggcgccatctacgacggctacgacgtgctggacaactggggccagggcacactggtgaccgtgtccagcacgcgtgaggacctgaagaacgtgttcccacctgaggtggccgtgttcgagcctagcgaggccgagatcagccacacccagaaagccaccctcgtgtgcctggctaccggcttctaccccgaccatgtggaactgtcttggtgggtcaacggcaaagaggtgcacagcggcgtgtgtaccgacccccagccactgaaagaacagcccgccctgaacgacagccggtactgcctgagcagcagactgagagtgtccgccaccttctggcagaacccccggaaccacttcagatgccaggtgcagttctacggcctgagcgagaacgacgagtggacccaggacagagccaagcccgtgacccagatcgtgtctgccgaagcctggggcagagccgatgatgtgattaagatccactggcaggaaaagaagtccaacaccatcctgggcagccaggaaggcaacaccatgaagaccaacgacacctacatgaagttcagctggctgaccgtgcccgagaagtccctggacaaagaacacagatgcatcgtgcggcacgaaaacaacaagaacggcgtggaccaggaaatcatcttcccacccatcaagaccgatgtgattacaatggaccccaaggacaactgctccaaggacgccaacgataccctgctgctccagctgaccaacaccagcgcctactacatgtacttgttgctgctgctgaagtccgtggtgtacttcgccatcatcacatgctgcctgctgatggctatggtcaagcggaaggacagccgggga

SEQ ID NO: 6836 - DNA, 3006 bp, synthetic construct
  source 1..3006: mol_type = other DNA
atggccttaccagtgaccgccttgctcctgccgctggccttgctgctccacgccgccaggccggaagtgcagctggttgaatctggcggaggactggttcagcctggcggatctctgagactgtcttgtgccgccagcggcttcagcttcagcgacttttggatgagctgggtccgacaggcccctggcaaaggacttgaatgggtcgccacaatcagccaggccggcagcgagaaggactacgtggactctgtgaagggcagattcaccatcagccgggacaacgccaagaagtccctgtacctccagatgaacagcctgagagccgaggacaccgccgtgtactattgtgcctctggcgtgtacagcttcgactacagaggccagggcaccctggtcacagtctcttctggtaccggcggaggcggatctggcggcggaggtagcggtggcggaggatctgaattcgacatcgtgctgacacagagccctgccaccctgtctctgagccctggcgatagagccaccatcagctgtagagccagcgagagcgtgaccatcctgggcagccacctgatctactggtatcagcagaagcccggccagccccccagactgctgattcagctggcctccaatgtgcagaccggcgtgccagccagattttccggcagcggcagcagaaccgacttcaccctgaccatcagcagcgtggaacccgaggacttcgccgtgtactactgcctccagagccggaccatccccagaacattcggccagggcaccaagctggaaatcaagagactcgagatccagaaccctgatcctgccgtgtaccagctgcgggatagcaagagcagcgacaagagcgtgtgtctgttcaccgacttcgacagccagaccaacgtgtcccagagcaaggactccgacgtgtacatcaccgataagtgcgtgctggacatgcggagcatggacttcaagagcaactccgccgtggcctggtccaacaagtccgatttcgcctgcgccaacgccttcaacaacagcattatccccgaggacacattcttcccaagccccgagagcagcgactccaccgaccacgtgaagcccaaagagacagagaacaccaagcagcccagcaagagctgccacaagcccaaggccatcgtgcacaccgagaaagtgaacatgatgagcctgaccgtgctgggcctgcggatgctgttcgccaaaaccgtggccgtgaacttcctgctgaccgccaagctgttcttcctcctcaccgcccgcgccaagagaagcggatctggcgtgaagcagaccctgaatttcgacctgctgaagctggctggcgacgtggaatccaacccaggccctactagtatggactggatttggcgcatccttttccttgtcggcgctgctaccggcgcgcattccgggccccagctccagctgcaagagtctggacctggcctggtcaagcctagcgagacactgagcctgacctgtaccgtgtccggcgatagcatcagcagcggcgattactactggggctggatcagacagcctcctggcaaaggactggaatggatcggccacatctactacagcggcgtgacctactacaaccccagcctgaagtccagagtgaccatcagcgtggacaccagccggaaccagttctccctgaagctgtctagcgtgacagccgccgataccgccgtgtactactgcaccagagaggacagcagcaactggcggagtagaggccagggaacactggtcacagttagctctggatccggcggaggcggaagtggaggcggaggatctggcggcggaggctctttcgaacaggtgcagctggtgcagtctggccccgaagtgaagaaacccggcgagtccgtgaagatcagctgcaaggccagcggctacaccttccggcactacagcatgaactgggtcaagcaggccccaggccagggcctgaagtggatgggcagaatcaacaccgagagcggcgtgcccatctacgccgacgacttcaagggccggttcagcttcaccgtggacaccagcgccagcaccgcctacctggaaatctccagcctgaccagcgaggataccgccgtgtatttctgctccaacgactacctgtacagcctggatttctggggccagggaaccaccctgacagtgtcctctacgcgtgaggacctgaagaacgtgttcccacctgaggtggccgtgttcgagcctagcgaggccgagatcagccacacccagaaagccaccctcgtgtgcctggctaccggcttctaccccgaccatgtggaactgtcttggtgggtcaacggcaaagaggtgcacagcggcgtgtgtaccgacccccagccactgaaagaacagcccgccctgaacgacagccggtactgcctgagcagcagactgagagtgtccgccaccttctggcagaacccccggaaccacttcagatgccaggtgcagttctacggcctgagcgagaacgacgagtggacccaggacagagccaagcccgtgacccagatcgtgtctgccgaagcctggggcagagccgatgatgtgattaagatccactggcaggaaaagaagtccaacaccatcctgggcagccaggaaggcaacaccatgaagaccaacgacacctacatgaagttcagctggctgaccgtgcccgagaagtccctggacaaagaacacagatgcatcgtgcggcacgaaaacaacaagaacggcgtggaccaggaaatcatcttcccacccatcaagaccgatgtgattacaatggaccccaaggacaactgctccaaggacgccaacgataccctgctgctccagctgaccaacaccagcgcctactacatgtacttgttgctgctgctgaagtccgtggtgtacttcgccatcatcacatgctgcctgctgatggctatggtcaagcggaaggacagccgggga

SEQ ID NO: 6837 - DNA, 3009 bp, synthetic construct
  source 1..3009: mol_type = other DNA
atggccttaccagtgaccgccttgctcctgccgctggccttgctgctccacgccgccaggccggaagtgcagctggttgaatctggcggaggactggttcagcctggcggatctctgagactgtcttgtgccgccagcggcttcagcttcagcgacttttggatgagctgggtccgacaggcccctggcaaaggacttgaatgggtcgccacaatcagccaggccggcagcgagaaggactacgtggactctgtgaagggcagattcaccatcagccgggacaacgccaagaagtccctgtacctccagatgaacagcctgagagccgaggacaccgccgtgtactattgtgcctctggcgtgtacagcttcgactacagaggccagggcaccctggtcacagtctcttctggtaccggcggaggcggatctggcggcggaggtagcggtggcggaggatctgaattccagtctgtgctgacacagcctcctagtgtgtctggcgctcctggacagagagtgaccatcagctgtacaggcagcagcagcaatatcggagccggctttgacgtgcactggtatcagcagctgcctggcacagcccctaaactgctgatctacggcaacagcaacagacccagcggcgtgcccgatagattttccggctctaagagcggcacaagcgccagcctggctattactggactccaggccgaggacgaggccgactactactgtcagagctacgacagcagcctgagcggctacgttttcggcaccggcaccaaagtgacagtgcttggtctcgagatccagaaccctgatcctgccgtgtaccagctgcgggatagcaagagcagcgacaagagcgtgtgtctgttcaccgacttcgacagccagaccaacgtgtcccagagcaaggactccgacgtgtacatcaccgataagtgcgtgctggacatgcggagcatggacttcaagagcaactccgccgtggcctggtccaacaagtccgatttcgcctgcgccaacgccttcaacaacagcattatccccgaggacacattcttcccaagccccgagagcagcgactccaccgaccacgtgaagcccaaagagacagagaacaccaagcagcccagcaagagctgccacaagcccaaggccatcgtgcacaccgagaaagtgaacatgatgagcctgaccgtgctgggcctgcggatgctgttcgccaaaaccgtggccgtgaacttcctgctgaccgccaagctgttcttcctcctcaccgcccgcgccaagagaagcggatctggcgtgaagcagaccctgaatttcgacctgctgaagctggctggcgacgtggaatccaacccaggccctactagtatggactggatttggcgcatccttttccttgtcggcgctgctaccggcgcgcattccgggccccagctccagctgcaagagtctggacctggcctggtcaagcctagcgagacactgagcctgacctgtaccgtgtccggcgatagcatcagcagcggcgattactactggggctggatcagacagcctcctggcaaaggactggaatggatcggccacatctactacagcggcgtgacctactacaaccccagcctgaagtccagagtgaccatcagcgtggacaccagccggaaccagttctccctgaagctgtctagcgtgacagccgccgataccgccgtgtactactgcaccagagaggacagcagcaactggcggagtagaggccagggaacactggtcacagttagctctggatccggcggaggcggaagtggaggcggaggatctggcggcggaggctctttcgaacaagttcagctggttcagagcggagccgaagtgaagaaacctggggcctctgtgaaggtgtcctgcaaggcttccggctacacctttaccgattactacatgcactgggtccgacaggctcccggccaaagacttgaatggatgggctggatcaaccccaacagcggcggcacaaattacgcccagaagttccaggaccggatcaccgtgaccagagacaccagctccaacaccggctacatggaactgacccggctgagatccgatgacaccgccgtgtactactgcgctagaagcccttactccggcgtgctggataagtggggacagggcacactggtcaccgtgtcatctacgcgtgaggacctgaagaacgtgttcccacctgaggtggccgtgttcgagcctagcgaggccgagatcagccacacccagaaagccaccctcgtgtgcctggctaccggcttctaccccgaccatgtggaactgtcttggtgggtcaacggcaaagaggtgcacagcggcgtgtgtaccgacccccagccactgaaagaacagcccgccctgaacgacagccggtactgcctgagcagcagactgagagtgtccgccaccttctggcagaacccccggaaccacttcagatgccaggtgcagttctacggcctgagcgagaacgacgagtggacccaggacagagccaagcccgtgacccagatcgtgtctgccgaagcctggggcagagccgatgatgtgattaagatccactggcaggaaaagaagtccaacaccatcctgggcagccaggaaggcaacaccatgaagaccaacgacacctacatgaagttcagctggctgaccgtgcccgagaagtccctggacaaagaacacagatgcatcgtgcggcacgaaaacaacaagaacggcgtggaccaggaaatcatcttcccacccatcaagaccgatgtgattacaatggaccccaaggacaactgctccaaggacgccaacgataccctgctgctccagctgaccaacaccagcgcctactacatgtacttgttgctgctgctgaagtccgtggtgtacttcgccatcatcacatgctgcctgctgatggctatggtcaagcggaaggacagccgggga

SEQ ID NO: 6838 - DNA, 3000 bp, synthetic construct
  source 1..3000: mol_type = other DNA
atggccttaccagtgaccgccttgctcctgccgctggccttgctgctccacgccgccaggccggaagtgcagctggttgaatctggcggaggactggttcagcctggcggatctctgagactgtcttgtgccgccagcggcttcagcttcagcgacttttggatgagctgggtccgacaggcccctggcaaaggacttgaatgggtcgccacaatcagccaggccggcagcgagaaggactacgtggactctgtgaagggcagattcaccatcagccgggacaacgccaagaagtccctgtacctccagatgaacagcctgagagccgaggacaccgccgtgtactattgtgcctctggcgtgtacagcttcgactacagaggccagggcaccctggtcacagtctcttctggtaccggcggaggcggatctggcggcggaggtagcggtggcggaggatctgaattccaggctgttctgacacagcctccatctgcctctggcacacctggacagagagtgaccatctcctgtagcggcagcagcagcaacatcggcagctacaccgtgtcctggtatcagcagctccctggaacagcccctaagttcctgatctacagcaacaaccagcggcctagcggcgtgcccgatagattttctggcagcaagagcggcacaagcgccagcctggctatttctggactccagtctgaggacgaggccgactactattgtgccgcctgggacgatagcctgaacggctatgtgtttggcaccggcaccaaagtgacagtgcttggtctcgagatccagaaccctgatcctgccgtgtaccagctgcgggatagcaagagcagcgacaagagcgtgtgtctgttcaccgacttcgacagccagaccaacgtgtcccagagcaaggactccgacgtgtacatcaccgataagtgcgtgctggacatgcggagcatggacttcaagagcaactccgccgtggcctggtccaacaagtccgatttcgcctgcgccaacgccttcaacaacagcattatccccgaggacacattcttcccaagccccgagagcagcgactccaccgaccacgtgaagcccaaagagacagagaacaccaagcagcccagcaagagctgccacaagcccaaggccatcgtgcacaccgagaaagtgaacatgatgagcctgaccgtgctgggcctgcggatgctgttcgccaaaaccgtggccgtgaacttcctgctgaccgccaagctgttcttcctcctcaccgcccgcgccaagagaagcggatctggcgtgaagcagaccctgaatttcgacctgctgaagctggctggcgacgtggaatccaacccaggccctactagtatggactggatttggcgcatccttttccttgtcggcgctgctaccggcgcgcattccgggccccagctccagctgcaagagtctggacctggcctggtcaagcctagcgagacactgagcctgacctgtaccgtgtccggcgatagcatcagcagcggcgattactactggggctggatcagacagcctcctggcaaaggactggaatggatcggccacatctactacagcggcgtgacctactacaaccccagcctgaagtccagagtgaccatcagcgtggacaccagccggaaccagttctccctgaagctgtctagcgtgacagccgccgataccgccgtgtactactgcaccagagaggacagcagcaactggcggagtagaggccagggaacactggtcacagttagctctggatccggcggaggcggaagtggaggcggaggatctggcggcggaggctctttcgaagttcaactggttcagagcggagccgaagtgaagaagcctggcgagagcctgaagattagctgcaaaggcagcggctacgacttcaccacctactggatcggctgggtccgacagatgcctggcaaaggactggaatggatgggcatcatctaccccggcgacagcgacaccagatacagccctagcgttagaggccgcgtgaccatcagcgccgacaagtctatcaacaccgcctacctccagtggtccagcctggaagcctctgacaccgccatgtactactgcgccagaatgtggaccttcagccaggatggatggggccagggaacactggtcacagtgtcatctacgcgtgaggacctgaagaacgtgttcccacctgaggtggccgtgttcgagcctagcgaggccgagatcagccacacccagaaagccaccctcgtgtgcctggctaccggcttctaccccgaccatgtggaactgtcttggtgggtcaacggcaaagaggtgcacagcggcgtgtgtaccgacccccagccactgaaagaacagcccgccctgaacgacagccggtactgcctgagcagcagactgagagtgtccgccaccttctggcagaacccccggaaccacttcagatgccaggtgcagttctacggcctgagcgagaacgacgagtggacccaggacagagccaagcccgtgacccagatcgtgtctgccgaagcctggggcagagccgatgatgtgattaagatccactggcaggaaaagaagtccaacaccatcctgggcagccaggaaggcaacaccatgaagaccaacgacacctacatgaagttcagctggctgaccgtgcccgagaagtccctggacaaagaacacagatgcatcgtgcggcacgaaaacaacaagaacggcgtggaccaggaaatcatcttcccacccatcaagaccgatgtgattacaatggaccccaaggacaactgctccaaggacgccaacgataccctgctgctccagctgaccaacaccagcgcctactacatgtacttgttgctgctgctgaagtccgtggtgtacttcgccatcatcacatgctgcctgctgatggctatggtcaagcggaaggacagccgggga

SEQ ID NO: 6839 - DNA, 3009 bp, synthetic construct
  source 1..3009: mol_type = other DNA
atggccttaccagtgaccgccttgctcctgccgctggccttgctgctccacgccgccaggccggaagtgcagctggttgaatctggcggaggactggttcagcctggcggatctctgagactgtcttgtgccgccagcggcttcagcttcagcgacttttggatgagctgggtccgacaggcccctggcaaaggacttgaatgggtcgccacaatcagccaggccggcagcgagaaggactacgtggactctgtgaagggcagattcaccatcagccgggacaacgccaagaagtccctgtacctccagatgaacagcctgagagccgaggacaccgccgtgtactattgtgcctctggcgtgtacagcttcgactacagaggccagggcaccctggtcacagtctcttctggtaccggcggaggcggatctggcggcggaggtagcggtggcggaggatctgaattcgacatcgtgatgacccagagccccgatagcctggccgtgtctctgggagagagagccaccatcaactgcaagagcagccagagcatcctgtacagcagcaaccagaagaactacctggcctggtatcagcagaagcccggccagagccctaagctgctgatctactgggccagcaccagagaaagcggcgtgcccgatagattcagcggcagcggctctggcaccgacttcaccctgaccatcagttctcttcaggccgaggacgtggccgtgtactactgccaccagtacatcagctcctacaccttcggccagggcaccaagctggaaatcaagctcgagatccagaaccctgatcctgccgtgtaccagctgcgggatagcaagagcagcgacaagagcgtgtgtctgttcaccgacttcgacagccagaccaacgtgtcccagagcaaggactccgacgtgtacatcaccgataagtgcgtgctggacatgcggagcatggacttcaagagcaactccgccgtggcctggtccaacaagtccgatttcgcctgcgccaacgccttcaacaacagcattatccccgaggacacattcttcccaagccccgagagcagcgactccaccgaccacgtgaagcccaaagagacagagaacaccaagcagcccagcaagagctgccacaagcccaaggccatcgtgcacaccgagaaagtgaacatgatgagcctgaccgtgctgggcctgcggatgctgttcgccaaaaccgtggccgtgaacttcctgctgaccgccaagctgttcttcctcctcaccgcccgcgccaagagaagcggatctggcgtgaagcagaccctgaatttcgacctgctgaagctggctggcgacgtggaatccaacccaggccctactagtatggactggatttggcgcatccttttccttgtcggcgctgctaccggcgcgcattccgggccccagctccagctgcaagagtctggacctggcctggtcaagcctagcgagacactgagcctgacctgtaccgtgtccggcgatagcatcagcagcggcgattactactggggctggatcagacagcctcctggcaaaggactggaatggatcggccacatctactacagcggcgtgacctactacaaccccagcctgaagtccagagtgaccatcagcgtggacaccagccggaaccagttctccctgaagctgtctagcgtgacagccgccgataccgccgtgtactactgcaccagagaggacagcagcaactggcggagtagaggccagggaacactggtcacagttagctctggatccggcggaggcggaagtggaggcggaggatctggcggcggaggctctttcgaacaggtgcagctggtgcagtctggcgctgaagtgaagaaacctggggccagcgtgaaggtgtcctgcaaggccagcggctacacctttgccagccagtggatgcactggatgagacaggcccctggacagggcctggaatggatcggctggatcaaccccggcaacgtgaacaccaagtacaacgagaagttcaagggcagagccaccctgacagtggacaccagcaccaacaccgcctacatggaactgagcagcctgcggagcgaggacaccgccgtgtattattgcgccagaagcacctggtacagacccctggattattggggccagggaacccttgtgaccgtgtcctctacgcgtgaggacctgaagaacgtgttcccacctgaggtggccgtgttcgagcctagcgaggccgagatcagccacacccagaaagccaccctcgtgtgcctggctaccggcttctaccccgaccatgtggaactgtcttggtgggtcaacggcaaagaggtgcacagcggcgtgtgtaccgacccccagccactgaaagaacagcccgccctgaacgacagccggtactgcctgagcagcagactgagagtgtccgccaccttctggcagaacccccggaaccacttcagatgccaggtgcagttctacggcctgagcgagaacgacgagtggacccaggacagagccaagcccgtgacccagatcgtgtctgccgaagcctggggcagagccgatgatgtgattaagatccactggcaggaaaagaagtccaacaccatcctgggcagccaggaaggcaacaccatgaagaccaacgacacctacatgaagttcagctggctgaccgtgcccgagaagtccctggacaaagaacacagatgcatcgtgcggcacgaaaacaacaagaacggcgtggaccaggaaatcatcttcccacccatcaagaccgatgtgattacaatggaccccaaggacaactgctccaaggacgccaacgataccctgctgctccagctgaccaacaccagcgcctactacatgtacttgttgctgctgctgaagtccgtggtgtacttcgccatcatcacatgctgcctgctgatggctatggtcaagcggaaggacagccgggga

SEQ ID NO: 6840 - DNA, 3009 bp, synthetic construct
  source 1..3009: mol_type = other DNA
atggccttaccagtgaccgccttgctcctgccgctggccttgctgctccacgccgccaggccggaagtgcagctggttgaatctggcggaggactggttcagcctggcggatctctgagactgtcttgtgccgccagcggcttcagcttcagcgacttttggatgagctgggtccgacaggcccctggcaaaggacttgaatgggtcgccacaatcagccaggccggcagcgagaaggactacgtggactctgtgaagggcagattcaccatcagccgggacaacgccaagaagtccctgtacctccagatgaacagcctgagagccgaggacaccgccgtgtactattgtgcctctggcgtgtacagcttcgactacagaggccagggcaccctggtcacagtctcttctggtaccggcggaggcggatctggcggcggaggtagcggtggcggaggatctgaattcgaccacatcgtgctgacccagagccctagcagcctgtctgccagcctgggcgacagagtgaccatcagctgtagagccagccaggacatcagcacctacctgaactggtatcagcagaaacccgacggcaccgtgaagctgctgatcttctacaccagcagactgcacgccggggtgcccagcagattttctggcagcggctctggcacccaccacagcctgaccatctccaacctggaacaggaagatattgctacctacttctgtcagcaaggcaacagcctgcccttcaccttcggcagcggcaccaagctggaaatcaagagactcgagatccagaaccctgatcctgccgtgtaccagctgcgggatagcaagagcagcgacaagagcgtgtgtctgttcaccgacttcgacagccagaccaacgtgtcccagagcaaggactccgacgtgtacatcaccgataagtgcgtgctggacatgcggagcatggacttcaagagcaactccgccgtggcctggtccaacaagtccgatttcgcctgcgccaacgccttcaacaacagcattatccccgaggacacattcttcccaagccccgagagcagcgactccaccgaccacgtgaagcccaaagagacagagaacaccaagcagcccagcaagagctgccacaagcccaaggccatcgtgcacaccgagaaagtgaacatgatgagcctgaccgtgctgggcctgcggatgctgttcgccaaaaccgtggccgtgaacttcctgctgaccgccaagctgttcttcctcctcaccgcccgcgccaagagaagcggatctggcgtgaagcagaccctgaatttcgacctgctgaagctggctggcgacgtggaatccaacccaggccctactagtatggactggatttggcgcatccttttccttgtcggcgctgctaccggcgcgcattccgggccccagctccagctgcaagagtctggacctggcctggtcaagcctagcgagacactgagcctgacctgtaccgtgtccggcgatagcatcagcagcggcgattactactggggctggatcagacagcctcctggcaaaggactggaatggatcggccacatctactacagcggcgtgacctactacaaccccagcctgaagtccagagtgaccatcagcgtggacaccagccggaaccagttctccctgaagctgtctagcgtgacagccgccgataccgccgtgtactactgcaccagagaggacagcagcaactggcggagtagaggccagggaacactggtcacagttagctctggatccggcggaggcggaagtggaggcggaggatctggcggcggaggctctttcgaacaggtgcagctgaaagagagcggccctgagctggaaaagcctggggccagcgtgaagattagctgcaaggccagcggctacagcttcaccgcctacagcatgaactgggtcaagcagaacaacggcatgagcctggaatggatcggcagcatcgacccctactacggcgacaccaaatacgcccagaagttcaagggcaaggccaccctgaccgtggataaggccagcagcaccgcctacctccagctgaagtctctgaccagcgaggacagcgccgtgtactactgcgccagacggatgattaccaccggcgactggtacttcgacgtgtggggagccggaaccaccgtgacagtgtctagcacgcgtgaggacctgaagaacgtgttcccacctgaggtggccgtgttcgagcctagcgaggccgagatcagccacacccagaaagccaccctcgtgtgcctggctaccggcttctaccccgaccatgtggaactgtcttggtgggtcaacggcaaagaggtgcacagcggcgtgtgtaccgacccccagccactgaaagaacagcccgccctgaacgacagccggtactgcctgagcagcagactgagagtgtccgccaccttctggcagaacccccggaaccacttcagatgccaggtgcagttctacggcctgagcgagaacgacgagtggacccaggacagagccaagcccgtgacccagatcgtgtctgccgaagcctggggcagagccgatgatgtgattaagatccactggcaggaaaagaagtccaacaccatcctgggcagccaggaaggcaacaccatgaagaccaacgacacctacatgaagttcagctggctgaccgtgcccgagaagtccctggacaaagaacacagatgcatcgtgcggcacgaaaacaacaagaacggcgtggaccaggaaatcatcttcccacccatcaagaccgatgtgattacaatggaccccaaggacaactgctccaaggacgccaacgataccctgctgctccagctgaccaacaccagcgcctactacatgtacttgttgctgctgctgaagtccgtggtgtacttcgccatcatcacatgctgcctgctgatggctatggtcaagcggaaggacagccgggga

SEQ ID NO: 6841 - DNA, 3009 bp, synthetic construct; identical to SEQ ID NO: 6840
  source 1..3009: mol_type = other DNA

SEQ ID NO: 6842 - DNA, 3009 bp, synthetic construct
  source 1..3009: mol_type = other DNA
atggccttaccagtgaccgccttgctcctgccgctggccttgctgctccacgccgccaggccggaagtgcagctggttgaatctggcggaggactggttcagcctggcggatctctgagactgtcttgtgccgccagcggcttcagcttcagcgacttttggatgagctgggtccgacaggcccctggcaaaggacttgaatgggtcgccacaatcagccaggccggcagcgagaaggactacgtggactctgtgaagggcagattcaccatcagccgggacaacgccaagaagtccctgtacctccagatgaacagcctgagagccgaggacaccgccgtgtactattgtgcctctggcgtgtacagcttcgactacagaggccagggcaccctggtcacagtctcttctggtaccggcggaggcggatctggcggcggaggtagcggtggcggaggatctgaattcgacgagatcgtgctgacacagagccctgccaccctgtctctgagccctggcgaaagagccaccctgagctgtagagccagccagagcgtgtccagctacctggcctggtatcagcagaagcccggccaggctccccggctgctgatctacgatgccagcaatagagccaccggcatccccgccagattttccggctctggcagcggcaccgacttcaccctgaccatcagctccctggaacccgaggacttcgccgtgtactactgccagcagcggagcaactggcccatcacattcggccagggcacccggctggaaatcaaactcgagatccagaaccctgatcctgccgtgtaccagctgcgggatagcaagagcagcgacaagagcgtgtgtctgttcaccgacttcgacagccagaccaacgtgtcccagagcaaggactccgacgtgtacatcaccgataagtgcgtgctggacatgcggagcatggacttcaagagcaactccgccgtggcctggtccaacaagtccgatttcgcctgcgccaacgccttcaacaacagcattatccccgaggacacattcttcccaagccccgagagcagcgactccaccgaccacgtgaagcccaaagagacagagaacaccaagcagcccagcaagagctgccacaagcccaaggccatcgtgcacaccgagaaagtgaacatgatgagcctgaccgtgctgggcctgcggatgctgttcgccaaaaccgtggccgtgaacttcctgctgaccgccaagctgttcttcctcctcaccgcccgcgccaagagaagcggatctggcgtgaagcagaccctgaatttcgacctgctgaagctggctggcgacgtggaatccaacccaggccctactagtatggactggatttggcgcatccttttccttgtcggcgctgctaccggcgcgcattccgggccccagctccagctgcaagagtctggacctggcctggtcaagcctagcgagacactgagcctgacctgtaccgtgtccggcgatagcatcagcagcggcgattactactggggctggatcagacagcctcctggcaaaggactggaatggatcggccacatctactacagcggcgtgacctactacaaccccagcctgaagtccagagtgaccatcagcgtggacaccagccggaaccagttctccctgaagctgtctagcgtgacagccgccgataccgccgtgtactactgcaccagagaggacagcagcaactggcggagtagaggccagggaacactggtcacagttagctctggatccggcggaggcggaagtggaggcggaggatctggcggcggaggctctttcgaagaagtgcagctggtggaatcaggcggcggactggtgcagcctggcagaagcctgagactgagctgtgccgccagcggcttcaccttcaacgactacgccatgcactgggtgcgccaggcccctggaaaaggactggaatgggtgtccacaatcagctggaacagcggcagcatcggctacgccgatagcgtgaagggccggttcaccatcagccgggacaacgccaagaagtccctgtacctccagatgaacagcctgcgggccgaggacacagccctgtactattgcgccaaggacatccagtacggcaactactactacggcatggacgtgtggggccagggaaccaccgtgaccgtgtcatctacgcgtgaggacctgaagaacgtgttcccacctgaggtggccgtgttcgagcctagcgaggccgagatcagccacacccagaaagccaccctcgtgtgcctggctaccggcttctaccccgaccatgtggaactgtcttggtgggtcaacggcaaagaggtgcacagcggcgtgtgtaccgacccccagccactgaaagaacagcccgccctgaacgacagccggtactgcctgagcagcagactgagagtgtccgccaccttctggcagaacccccggaaccacttcagatgccaggtgcagttctacggcctgagcgagaacgacgagtggacccaggacagagccaagcccgtgacccagatcgtgtctgccgaagcctggggcagagccgatgatgtgattaagatccactggcaggaaaagaagtccaacaccatcctgggcagccaggaaggcaacaccatgaagaccaacgacacctacatgaagttcagctggctgaccgtgcccgagaagtccctggacaaagaacacagatgcatcgtgcggcacgaaaacaacaagaacggcgtggaccaggaaatcatcttcccacccatcaagaccgatgtgattacaatggaccccaaggacaactgctccaaggacgccaacgataccctgctgctccagctgaccaacaccagcgcctactacatgtacttgttgctgctgctgaagtccgtggtgtacttcgccatcatcacatgctgcctgctgatggctatggtcaagcggaaggacagccgggga

SEQ ID NO: 6843 - DNA, 3015 bp, synthetic construct
  source 1..3015: mol_type = other DNA
atggccttaccagtgaccgccttgctcctgccgctggccttgctgctccacgccgccaggccggaagtgcagctggttgaatctggcggaggactggttcagcctggcggatctctgagactgtcttgtgccgccagcggcttcagcttcagcgacttttggatgagctgggtccgacaggcccctggcaaaggacttgaatgggtcgccacaatcagccaggccggcagcgagaaggactacgtggactctgtgaagggcagattcaccatcagccgggacaacgccaagaagtccctgtacctccagatgaacagcctgagagccgaggacaccgccgtgtactattgtgcctctggcgtgtacagcttcgactacagaggccagggcaccctggtcacagtctcttctggtaccggcggaggcggatctggcggcggaggtagcggtggcggaggatctgaattcgacatcgtgatgacccagacccccctgagcctgcctgtgacacctggcgagcctgccagcatctcctgcagaagcagcaagagcctgctgcacagcaacggcatcacctacctgtactggtatctgcagaaacccggccagagcccccaactgctgatctaccagatgagcaacctggtgtccggcgtgcccgacagattttctggcagcggctccggcaccgacttcaccctgaagatcagccgggtggaagccgaggacgtgggcgtgtactactgcgcccagaacctggaactgccctacacctttggcggcggaacaaaggtggaaatcaagcggctcgagatccagaaccctgatcctgccgtgtaccagctgcgggatagcaagagcagcgacaagagcgtgtgtctgttcaccgacttcgacagccagaccaacgtgtcccagagcaaggactccgacgtgtacatcaccgataagtgcgtgctggacatgcggagcatggacttcaagagcaactccgccgtggcctggtccaacaagtccgatttcgcctgcgccaacgccttcaacaacagcattatccccgaggacacattcttcccaagccccgagagcagcgactccaccgaccacgtgaagcccaaagagacagagaacaccaagcagcccagcaagagctgccacaagcccaaggccatcgtgcacaccgagaaagtgaacatgatgagcctgaccgtgctgggcctgcggatgctgttcgccaaaaccgtggccgtgaacttcctgctgaccgccaagctgttcttcctcctcaccgcccgcgccaagagaagcggatctggcgtgaagcagaccctgaatttcgacctgctgaagctggctggcgacgtggaatccaacccaggccctactagtatggactggatttggcgcatccttttccttgtcggcgctgctaccggcgcgcattccgggccccagctccagctgcaagagtctggacctggcctggtcaagcctagcgagacactgagcctgacctgtaccgtgtccggcgatagcatcagcagcggcgattactactggggctggatcagacagcctcctggcaaaggactggaatggatcggccacatctactacagcggcgtgacctactacaaccccagcctgaagtccagagtgaccatcagcgtggacaccagccggaaccagttctccctgaagctgtctagcgtgacagccgccgataccgccgtgtactactgcaccagagaggacagcagcaactggcggagtagaggccagggaacactggtcacagttagctctggatccggcggaggcggaagtggaggcggaggatctggcggcggaggctctttcgaacaggtgcaactggtgcagagcggagccgaagtgaaaaagcccggcagcagcgtgaaggtgtcctgcaaggccagcggctacgccttcagctactcctggatcaactgggtgcgccaggcccctggacagggcctggaatggatgggcagaatcttccccggcgacggcgacaccgactacaacggcaagttcaagggcagagtgaccatcaccgccgacaagagcaccagcaccgcctacatggaactgagcagcctgcggagcgaggataccgccgtgtactattgtgccagaaacgtgttcgacggctactggctggtgtactggggccagggaacacttgtgaccgtgtccagcacgcgtgaggacctgaagaacgtgttcccacctgaggtggccgtgttcgagcctagcgaggccgagatcagccacacccagaaagccaccctcgtgtgcctggctaccggcttctaccccgaccatgtggaactgtcttggtgggtcaacggcaaagaggtgcacagcggcgtgtgtaccgacccccagccactgaaagaacagcccgccctgaacgacagccggtactgcctgagcagcagactgagagtgtccgccaccttctggcagaacccccggaaccacttcagatgccaggtgcagttctacggcctgagcgagaacgacgagtggacccaggacagagccaagcccgtgacccagatcgtgtctgccgaagcctggggcagagccgatgatgtgattaagatccactggcaggaaaagaagtccaacaccatcctgggcagccaggaaggcaacaccatgaagaccaacgacacctacatgaagttcagctggctgaccgtgcccgagaagtccctggacaaagaacacagatgcatcgtgcggcacgaaaacaacaagaacggcgtggaccaggaaatcatcttcccacccatcaagaccgatgtgattacaatggaccccaaggacaactgctccaaggacgccaacgataccctgctgctccagctgaccaacaccagcgcctactacatgtacttgttgctgctgctgaagtccgtggtgtacttcgccatcatcacatgctgcctgctgatggctatggtcaagcggaaggacagccgggga

SEQ ID NO: 6844 - DNA, 3018 bp, synthetic construct
  source 1..3018: mol_type = other DNA
atggccttaccagtgaccgccttgctcctgccgctggccttgctgctccacgccgccaggccggaagtgcagctggttgaatctggcggaggactggttcagcctggcggatctctgagactgtcttgtgccgccagcggcttcagcttcagcgacttttggatgagctgggtccgacaggcccctggcaaaggacttgaatgggtcgccacaatcagccaggccggcagcgagaaggactacgtggactctgtgaagggcagattcaccatcagccgggacaacgccaagaagtccctgtacctccagatgaacagcctgagagccgaggacaccgccgtgtactattgtgcctctggcgtgtacagcttcgactacagaggccagggcaccctggtcacagtctcttctggtaccggcggaggcggatctggcggcggaggtagcggtggcggaggatctgaattcgacatccagatgacccagagccccagcagcctgtctgccagcgtgggcgacagagtgaccatcacctgtcggagcagccagagcatcgtgcactccgtgggcaacaccttcctggaatggtatcagcagaagcccggcaaggcccccaagctgctgatctacaaggtgtccaacagattcagcggcgtgcccagcaggtttagcggctctggcagcggcaccgacttcaccctgaccatctctagcctccagcccgaggacttcgccacctactactgttttcaaggcagccagttcccctacaccttcggccagggaacaaaggtggaaatcaagcggctcgagatccagaaccctgatcctgccgtgtaccagctgcgggatagcaagagcagcgacaagagcgtgtgtctgttcaccgacttcgacagccagaccaacgtgtcccagagcaaggactccgacgtgtacatcaccgataagtgcgtgctggacatgcggagcatggacttcaagagcaactccgccgtggcctggtccaacaagtccgatttcgcctgcgccaacgccttcaacaacagcattatccccgaggacacattcttcccaagccccgagagcagcgactccaccgaccacgtgaagcccaaagagacagagaacaccaagcagcccagcaagagctgccacaagcccaaggccatcgtgcacaccgagaaagtgaacatgatgagcctgaccgtgctgggcctgcggatgctgttcgccaaaaccgtggccgtgaacttcctgctgaccgccaagctgttcttcctcctcaccgcccgcgccaagagaagcggatctggcgtgaagcagaccctgaatttcgacctgctgaagctggctggcgacgtggaatccaacccaggccctactagtatggactggatttggcgcatccttttccttgtcggcgctgctaccggcgcgcattccgggccccagctccagctgcaagagtctggacctggcctggtcaagcctagcgagacactgagcctgacctgtaccgtgtccggcgatagcatcagcagcggcgattactactggggctggatcagacagcctcctggcaaaggactggaatggatcggccacatctactacagcggcgtgacctactacaaccccagcctgaagtccagagtgaccatcagcgtggacaccagccggaaccagttctccctgaagctgtctagcgtgacagccgccgataccgccgtgtactactgcaccagagaggacagcagcaactggcggagtagaggccagggaacactggtcacagttagctctggatccggcggaggcggaagtggaggcggaggatctggcggcggaggctctttcgaagaagtgcaactggtggaaagcggaggcggcctggtgcagcctggcggatctctgagactgagctgtgccgccagcggctacgagttcagccggtcctggatgaactgggtgcgccaggcccctggcaagggactggaatgggtgggaagaatctaccccggcgacggcgacaccaactacagcggcaagttcaagggccggttcaccatcagcgccgacaccagcaagaacaccgcctacctccagatgaacagcctgcgggccgaggataccgccgtgtactactgtgccagagatggcagctcctgggactggtacttcgacgtgtggggacagggaacccttgtgaccgtgtccagcacgcgtgaggacctgaagaacgtgttcccacctgaggtggccgtgttcgagcctagcgaggccgagatcagccacacccagaaagccaccctcgtgtgcctggctaccggcttctaccccgaccatgtggaactgtcttggtgggtcaacggcaaagaggtgcacagcggcgtgtgtaccgacccccagccactgaaagaacagcccgccctgaacgacagccggtactgcctgagcagcagactgagagtgtccgccaccttctggcagaacccccggaaccacttcagatgccaggtgcagttctacggcctgagcgagaacgacgagtggacccaggacagagccaagcccgtgacccagatcgtgtctgccgaagcctggggcagagccgatgatgtgattaagatccactggcaggaaaagaagtccaacaccatcctgggcagccaggaaggcaacaccatgaagaccaacgacacctacatgaagttcagctggctgaccgtgcccgagaagtccctggacaaagaacacagatgcatcgtgcggcacgaaaacaacaagaacggcgtggaccaggaaatcatcttcccacccatcaagaccgatgtgattacaatggaccccaaggacaactgctccaaggacgccaacgataccctgctgctccagctgaccaacaccagcgcctactacatgtacttgttgctgctgctgaagtccgtggtgtacttcgccatcatcacatgctgcctgctgatggctatggtcaagcggaaggacagccgggga

SEQ ID NO: 6845 - DNA, 3012 bp, synthetic construct
  source 1..3012: mol_type = other DNA
atggccttaccagtgaccgccttgctcctgccgctggccttgctgctccacgccgccaggccggaagtgcagctggttgaatctggcggaggactggttcagcctggcggatctctgagactgtcttgtgccgccagcggcttcagcttcagcgacttttggatgagctgggtccgacaggcccctggcaaaggacttgaatgggtcgccacaatcagccaggccggcagcgagaaggactacgtggactctgtgaagggcagattcaccatcagccgggacaacgccaagaagtccctgtacctccagatgaacagcctgagagccgaggacaccgccgtgtactattgtgcctctggcgtgtacagcttcgactacagaggccagggcaccctggtcacagtctcttctggtaccggcggaggcggatctggcggcggaggtagcggtggcggaggatctgaattcgacatccagatgacccagagccccagcagcctgtctgccagcgtgggcgacagagtgaccatcacctgtagagccagccagaccatctggtcctacctgaactggtatcagcagaggcccggcaaggcccccaacctgctgatctatgccgccagctctctccagagcggcgtgcccagcagattttccggcagaggcagcggcaccgacttcaccctgaccatcagttccttgcaggccgaggacttcgccacctactactgccagcagagctacagcatcccccagattttcggccagggcaccaagctggaaatcaagctcgagatccagaaccctgatcctgccgtgtaccagctgcgggatagcaagagcagcgacaagagcgtgtgtctgttcaccgacttcgacagccagaccaacgtgtcccagagcaaggactccgacgtgtacatcaccgataagtgcgtgctggacatgcggagcatggacttcaagagcaactccgccgtggcctggtccaacaagtccgatttcgcctgcgccaacgccttcaacaacagcattatccccgaggacacattcttcccaagccccgagagcagcgactccaccgaccacgtgaagcccaaagagacagagaacaccaagcagcccagcaagagctgccacaagcccaaggccatcgtgcacaccgagaaagtgaacatgatgagcctgaccgtgctgggcctgcggatgctgttcgccaaaaccgtggccgtgaacttcctgctgaccgccaagctgttcttcctcctcaccgcccgcgccaagagaagcggatctggcgtgaagcagaccctgaatttcgacctgctgaagctggctggcgacgtggaatccaacccaggccctactagtatggactggatttggcgcatccttttccttgtcggcgctgctaccggcgcgcattccgggccccagctccagctgcaagagtctggacctggcctggtcaagcctagcgagacactgagcctgacctgtaccgtgtccggcgatagcatcagcagcggcgattactactggggctggatcagacagcctcctggcaaaggactggaatggatcggccacatctactacagcggcgtgacctactacaaccccagcctgaagtccagagtgaccatcagcgtggacaccagccggaaccagttctccctgaagctgtctagcgtgacagccgccgataccgccgtgtactactgcaccagagaggacagcagcaactggcggagtagaggccagggaacactggtcacagttagctctggatccggcggaggcggaagtggaggcggaggatctggcggcggaggctctttcgaacaggtgcagctccagcagtctggacccggcctcgtgaagcctagccagacactgagcctgacctgcgccatcagcggcgatagcgtgtccagcaatagcgccgcctggaactggatcagacagtccccctctcggggcctggaatggctgggccggacctactaccgcagcaagtggtacaacgactacgccgtgtccgtgaagtcccggatcaccatcaaccccgacaccagcaagaaccagttctccttgcaactgaacagcgtgacccccgaggacaccgccgtgtactactgcgccagagaagtgaccggcgacctggaagatgccttcgacatctggggccagggaacaatggtcacagtgtccagcacgcgtgaggacctgaagaacgtgttcccacctgaggtggccgtgttcgagcctagcgaggccgagatcagccacacccagaaagccaccctcgtgtgcctggctaccggcttctaccccgaccatgtggaactgtcttggtgggtcaacggcaaagaggtgcacagcggcgtgtgtaccgacccccagccactgaaagaacagcccgccctgaacgacagccggtactgcctgagcagcagactgagagtgtccgccaccttctggcagaacccccggaaccacttcagatgccaggtgcagttctacggcctgagcgagaacgacgagtggacccaggacagagccaagcccgtgacccagatcgtgtctgccgaagcctggggcagagccgatgatgtgattaagatccactggcaggaaaagaagtccaacaccatcctgggcagccaggaaggcaacaccatgaagaccaacgacacctacatgaagttcagctggctgaccgtgcccgagaagtccctggacaaagaacacagatgcatcgtgcggcacgaaaacaacaagaacggcgtggaccaggaaatcatcttcccacccatcaagaccgatgtgattacaatggaccccaaggacaactgctccaaggacgccaacgataccctgctgctccagctgaccaacaccagcgcctactacatgtacttgttgctgctgctgaagtccgtggtgtacttcgccatcatcacatgctgcctgctgatggctatggtcaagcggaaggacagccgggga

SEQ ID NO: 6846 - DNA, 2991 bp, synthetic construct
  source 1..2991: mol_type = other DNA
atggccttaccagtgaccgccttgctcctgccgctggccttgctgctccacgccgccaggccggaagtgcagctggttgaatctggcggaggactggttcagcctggcggatctctgagactgtcttgtgccgccagcggcttcagcttcagcgacttttggatgagctgggtccgacaggcccctggcaaaggacttgaatgggtcgccacaatcagccaggccggcagcgagaaggactacgtggactctgtgaagggcagattcaccatcagccgggacaacgccaagaagtccctgtacctccagatgaacagcctgagagccgaggacaccgccgtgtactattgtgcctctggcgtgtacagcttcgactacagaggccagggcaccctggtcacagtctcttctggtaccggcggaggcggatctggcggcggaggtagcggtggcggaggatctgaattcgacatccagatgacccagagccccgccaccatcgagaacacaagcctgtctgccagcgtgggcgacagagtgaccatcacctgtagagccagccagggcatcagctcttggctgacctggtatcagcagaagcccgagaaggcccccaagagcctgatctacgccgccagctctctgcagtctggcgtgcccagcagattttccggcagcggctctggcaccgacttcaccctgacaatcagcagcctgcagcccgaggacttcgccacctactactgccagcagtacgacagctaccccatcaccttcggccagggcacccggctggaaatcaagctcgagatccagaaccctgatcctgccgtgtaccagctgcgggatagcaagagcagcgacaagagcgtgtgtctgttcaccgacttcgacagccagaccaacgtgtcccagagcaaggactccgacgtgtacatcaccgataagtgcgtgctggacatgcggagcatggacttcaagagcaactccgccgtggcctggtccaacaagtccgatttcgcctgcgccaacgccttcaacaacagcattatccccgaggacacattcttcccaagccccgagagcagcgactccaccgaccacgtgaagcccaaagagacagagaacaccaagcagcccagcaagagctgccacaagcccaaggccatcgtgcacaccgagaaagtgaacatgatgagcctgaccgtgctgggcctgcggatgctgttcgccaaaaccgtggccgtgaacttcctgctgaccgccaagctgttcttcctcctcaccgcccgcgccaagagaagcggatctggcgtgaagcagaccctgaatttcgacctgctgaagctggctggcgacgtggaatccaacccaggccctactagtatggactggatttggcgcatccttttccttgtcggcgctgctaccggcgcgcattccgggccccagctccagctgcaagagtctggacctggcctggtcaagcctagcgagacactgagcctgacctgtaccgtgtccggcgatagcatcagcagcggcgattactactggggctggatcagacagcctcctggcaaaggactggaatggatcggccacatctactacagcggcgtgacctactacaaccccagcctgaagtccagagtgaccatcagcgtggacaccagccggaaccagttctccctgaagctgtctagcgtgacagccgccgataccgccgtgtactactgcaccagagaggacagcagcaactggcggagtagaggccagggaacactggtcacagttagctctggatccggcggaggcggaagtggaggcggaggatctggcggcggaggctctttcgaacaggtgcaactgcagcagtggggagccggactgctgaagcctagcgagacactgagcctgacctgcgccgtgtacggcggcagcttcagcgcctactattggagctggatcagacagccccctggcaagggcctggaatggatcggcgacatcaatcacggcggaggcaccaactacaaccccagcctgaagtcccgcgtgaccatctccgtggacaccagcaagaaccagttctccctgaagctgaacagcgtgacagccgccgacacagccgtgtactactgtgccagcctgaccgcctattggggccagggatctcttgtgaccgtgtccagcacgcgtgaggacctgaagaacgtgttcccacctgaggtggccgtgttcgagcctagcgaggccgagatcagccacacccagaaagccaccctcgtgtgcctggctaccggcttctaccccgaccatgtggaactgtcttggtgggtcaacggcaaagaggtgcacagcggcgtgtgtaccgacccccagccactgaaagaacagcccgccctgaacgacagccggtactgcctgagcagcagactgagagtgtccgccaccttctggcagaacccccggaaccacttcagatgccaggtgcagttctacggcctgagcgagaacgacgagtggacccaggacagagccaagcccgtgacccagatcgtgtctgccgaagcctggggcagagccgatgatgtgattaagatccactggcaggaaaagaagtccaacaccatcctgggcagccaggaaggcaacaccatgaagaccaacgacacctacatgaagttcagctggctgaccgtgcccgagaagtccctggacaaagaacacagatgcatcgtgcggcacgaaaacaacaagaacggcgtggaccaggaaatcatcttcccacccatcaagaccgatgtgattacaatggaccccaaggacaactgctccaaggacgccaacgataccctgctgctccagctgaccaacaccagcgcctactacatgtacttgttgctgctgctgaagtccgtggtgtacttcgccatcatcacatgctgcctgctgatggctatggtcaagcggaaggacagccgggga

SEQ ID NO: 6847 - DNA, 3006 bp, synthetic construct
  source 1..3006: mol_type = other DNA
atggccttaccagtgaccgccttgctcctgccgctggccttgctgctccacgccgccaggccggaagtgcagctggttgaatctggcggaggactggttcagcctggcggatctctgagactgtcttgtgccgccagcggcttcagcttcagcgacttttggatgagctgggtccgacaggcccctggcaaaggacttgaatgggtcgccacaatcagccaggccggcagcgagaaggactacgtggactctgtgaagggcagattcaccatcagccgggacaacgccaagaagtccctgtacctccagatgaacagcctgagagccgaggacaccgccgtgtactattgtgcctctggcgtgtacagcttcgactacagaggccagggcaccctggtcacagtctcttctggtaccggcggaggcggatctggcggcggaggtagcggtggcggaggatctgaattcgacgagatcgtgctgacccagagccctgatagcctggccgtgtctctgggcgagagagccaccatcaactgcaaggccagccagagcgtggacttcgacggcgacagctacctgaactggtatcagcagaagcccggccagccccccaaggtgctgatctatgccgccagcacactgcagagcggcgtgcccagcagattttctggcagcggctccggcaccgacttcaccctgaccatcaacagcctggaagccgaggacgccgccacctactactgccagcagagcaacgaggacccctggacctttggcggcggaacaaaggtggaaatcaagctcgagatccagaaccctgatcctgccgtgtaccagctgcgggatagcaagagcagcgacaagagcgtgtgtctgttcaccgacttcgacagccagaccaacgtgtcccagagcaaggactccgacgtgtacatcaccgataagtgcgtgctggacatgcggagcatggacttcaagagcaactccgccgtggcctggtccaacaagtccgatttcgcctgcgccaacgccttcaacaacagcattatccccgaggacacattcttcccaagccccgagagcagcgactccaccgaccacgtgaagcccaaagagacagagaacaccaagcagcccagcaagagctgccacaagcccaaggccatcgtgcacaccgagaaagtgaacatgatgagcctgaccgtgctgggcctgcggatgctgttcgccaaaaccgtggccgtgaacttcctgctgaccgccaagctgttcttcctcctcaccgcccgcgccaagagaagcggatctggcgtgaagcagaccctgaatttcgacctgctgaagctggctggcgacgtggaatccaacccaggccctactagtatggactggatttggcgcatccttttccttgtcggcgctgctaccggcgcgcattccgggccccagctccagctgcaagagtctggacctggcctggtcaagcctagcgagacactgagcctgacctgtaccgtgtccggcgatagcatcagcagcggcgattactactggggctggatcagacagcctcctggcaaaggactggaatggatcggccacatctactacagcggcgtgacctactacaaccccagcctgaagtccagagtgaccatcagcgtggacaccagccggaaccagttctccctgaagctgtctagcgtgacagccgccgataccgccgtgtactactgcaccagagaggacagcagcaactggcggagtagaggccagggaacactggtcacagttagctctggatccggcggaggcggaagtggaggcggaggatctggcggcggaggctctttcgaacaggtgcaactggtgcagtccggcgctgaagtgaagaaacctggggccagcgtgaaggtgtcctgcaaggtgtccggctacacctttaccgactactacattacctgggtgcgccaggcccctggacaggccctggaatggatgggctggatctaccccggcagcggcaacaccaagtacagccagaagttccagggcagattcgtgttcagcgtggacaccagcgccagcaccgcctacctgcaactgtctagcctgaaggccgaagataccgccgtgtactactgcgccaactacggcaactattggttcgcctattggggccagggaacccttgtgaccgtgtcctctacgcgtgaggacctgaagaacgtgttcccacctgaggtggccgtgttcgagcctagcgaggccgagatcagccacacccagaaagccaccctcgtgtgcctggctaccggcttctaccccgaccatgtggaactgtcttggtgggtcaacggcaaagaggtgcacagcggcgtgtgtaccgacccccagccactgaaagaacagcccgccctgaacgacagccggtactgcctgagcagcagactgagagtgtccgccaccttctggcagaacccccggaaccacttcagatgccaggtgcagttctacggcctgagcgagaacgacgagtggacccaggacagagccaagcccgtgacccagatcgtgtctgccgaagcctggggcagagccgatgatgtgattaagatccactggcaggaaaagaagtccaacaccatcctgggcagccaggaaggcaacaccatgaagaccaacgacacctacatgaagttcagctggctgaccgtgcccgagaagtccctggacaaagaacacagatgcatcgtgcggcacgaaaacaacaagaacggcgtggaccaggaaatcatcttcccacccatcaagaccgatgtgattacaatggaccccaaggacaactgctccaaggacgccaacgataccctgctgctccagctgaccaacaccagcgcctactacatgtacttgttgctgctgctgaagtccgtggtgtacttcgccatcatcacatgctgcctgctgatggctatggtcaagcggaaggacagccgggga

SEQ ID NO: 6848 - DNA, 2997 bp, synthetic construct
  source 1..2997: mol_type = other DNA
atggccttaccagtgaccgccttgctcctgccgctggccttgctgctccacgccgccaggccggaagtgcagctggttgaatctggcggaggactggttcagcctggcggatctctgagactgtcttgtgccgccagcggcttcagcttcagcgacttttggatgagctgggtccgacaggcccctggcaaaggacttgaatgggtcgccacaatcagccaggccggcagcgagaaggactacgtggactctgtgaagggcagattcaccatcagccgggacaacgccaagaagtccctgtacctccagatgaacagcctgagagccgaggacaccgccgtgtactattgtgcctctggcgtgtacagcttcgactacagaggccagggcaccctggtcacagtctcttctggtaccggcggaggcggatctggcggcggaggtagcggtggcggaggatctgaattcgacatccagatgacccagagccccagcagcctgtctgccagcgtgggcgacagagtgaccatcacctgtagagccagccagggcatcagctcttggctggcctggtatcagcagaagcccgagaaggcccccaagagcctgatctacgccgcctctagtctccagagcggcgtgcccagcagattttctggcagcggctccggcaccgacttcaccctgacaatcagctccctccagcccgaggacttcgccacctactactgccagcagtacaacagctaccctcccacctttggcggaggcaccaaggtggaaatcaagctcgagatccagaaccctgatcctgccgtgtaccagctgcgggatagcaagagcagcgacaagagcgtgtgtctgttcaccgacttcgacagccagaccaacgtgtcccagagcaaggactccgacgtgtacatcaccgataagtgcgtgctggacatgcggagcatggacttcaagagcaactccgccgtggcctggtccaacaagtccgatttcgcctgcgccaacgccttcaacaacagcattatccccgaggacacattcttcccaagccccgagagcagcgactccaccgaccacgtgaagcccaaagagacagagaacaccaagcagcccagcaagagctgccacaagcccaaggccatcgtgcacaccgagaaagtgaacatgatgagcctgaccgtgctgggcctgcggatgctgttcgccaaaaccgtggccgtgaacttcctgctgaccgccaagctgttcttcctcctcaccgcccgcgccaagagaagcggatctggcgtgaagcagaccctgaatttcgacctgctgaagctggctggcgacgtggaatccaacccaggccctactagtatggactggatttggcgcatccttttccttgtcggcgctgctaccggcgcgcattccgggccccagctccagctgcaagagtctggacctggcctggtcaagcctagcgagacactgagcctgacctgtaccgtgtccggcgatagcatcagcagcggcgattactactggggctggatcagacagcctcctggcaaaggactggaatggatcggccacatctactacagcggcgtgacctactacaaccccagcctgaagtccagagtgaccatcagcgtggacaccagccggaaccagttctccctgaagctgtctagcgtgacagccgccgataccgccgtgtactactgcaccagagaggacagcagcaactggcggagtagaggccagggaacactggtcacagttagctctggatccggcggaggcggaagtggaggcggaggatctggcggcggaggctctttcgaagaagtgcaactggtgcagtctggcggagggctggtgcatcctgggggaagcctgagactgagctgtgccggctctggcttcgccttcagcagcagcaccatgcactggatcagacaggcccctggcaagggcctggaatggatcagcctgatcggaagcggagggggcatctactacggcgacagcgtgaagggccggttcaccatcagccgggacaacgccaagaacagcctgtacctccagatgaactccctgcgggccgaggacatggccgtgtactattgtgtgcggggctacttcgactgggtggactacttcgattactggggccagggcaccctcgtgaccgtgtcatctacgcgtgaggacctgaagaacgtgttcccacctgaggtggccgtgttcgagcctagcgaggccgagatcagccacacccagaaagccaccctcgtgtgcctggctaccggcttctaccccgaccatgtggaactgtcttggtgggtcaacggcaaagaggtgcacagcggcgtgtgtaccgacccccagccactgaaagaacagcccgccctgaacgacagccggtactgcctgagcagcagactgagagtgtccgccaccttctggcagaacccccggaaccacttcagatgccaggtgcagttctacggcctgagcgagaacgacgagtggacccaggacagagccaagcccgtgacccagatcgtgtctgccgaagcctggggcagagccgatgatgtgattaagatccactggcaggaaaagaagtccaacaccatcctgggcagccaggaaggcaacaccatgaagaccaacgacacctacatgaagttcagctggctgaccgtgcccgagaagtccctggacaaagaacacagatgcatcgtgcggcacgaaaacaacaagaacggcgtggaccaggaaatcatcttcccacccatcaagaccgatgtgattacaatggaccccaaggacaactgctccaaggacgccaacgataccctgctgctccagctgaccaacaccagcgcctactacatgtacttgttgctgctgctgaagtccgtggtgtacttcgccatcatcacatgctgcctgctgatggctatggtcaagcggaaggacagccgggga

SEQ ID NO: 6849 - DNA, 3027 bp, synthetic construct
  source 1..3027: mol_type = other DNA
atggccttaccagtgaccgccttgctcctgccgctggccttgctgctccacgccgccaggccggaagtgcagctggttgaatctggcggaggactggttcagcctggcggatctctgagactgtcttgtgccgccagcggcttcagcttcagcgacttttggatgagctgggtccgacaggcccctggcaaaggacttgaatgggtcgccacaatcagccaggccggcagcgagaaggactacgtggactctgtgaagggcagattcaccatcagccgggacaacgccaagaagtccctgtacctccagatgaacagcctgagagccgaggacaccgccgtgtactattgtgcctctggcgtgtacagcttcgactacagaggccagggcaccctggtcacagtctcttctggtaccggcggaggcggatctggcggcggaggtagcggtggcggaggatctgaattcgacgacatcgtgatgacacagtcaccagatagcctcaccgtctccctgggggagcggaccaccattaattgtaaatccagccaaagcgtgctggactcaagcaagaacaagaatagcctcgcctggtatcagcagaagcccggtcagcctccaaagctgctgctttcttgggcctccaccagagagtccgggattcctgataggtttagtggttcaggctccggcacagattttactctgaccattgattctctccagccagaggattctgcaacttattactgccagcaaagcgcccactttcctataacttttggccagggaacccgacttgaaatcaagctcgagatccagaaccctgatcctgccgtgtaccagctgcgggatagcaagagcagcgacaagagcgtgtgtctgttcaccgacttcgacagccagaccaacgtgtcccagagcaaggactccgacgtgtacatcaccgataagtgcgtgctggacatgcggagcatggacttcaagagcaactccgccgtggcctggtccaacaagtccgatttcgcctgcgccaacgccttcaacaacagcattatccccgaggacacattcttcccaagccccgagagcagcgactccaccgaccacgtgaagcccaaagagacagagaacaccaagcagcccagcaagagctgccacaagcccaaggccatcgtgcacaccgagaaagtgaacatgatgagcctgaccgtgctgggcctgcggatgctgttcgccaaaaccgtggccgtgaacttcctgctgaccgccaagctgttcttcctcctcaccgcccgcgccaagagaagcggatctggcgtgaagcagaccctgaatttcgacctgctgaagctggctggcgacgtggaatccaacccaggccctactagtatggactggatttggcgcatccttttccttgtcggcgctgctaccggcgcgcattccgggccccagctccagctgcaagagtctggacctggcctggtcaagcctagcgagacactgagcctgacctgtaccgtgtccggcgatagcatcagcagcggcgattactactggggctggatcagacagcctcctggcaaaggactggaatggatcggccacatctactacagcggcgtgacctactacaaccccagcctgaagtccagagtgaccatcagcgtggacaccagccggaaccagttctccctgaagctgtctagcgtgacagccgccgataccgccgtgtactactgcaccagagaggacagcagcaactggcggagtagaggccagggaacactggtcacagttagctctggatccggcggaggcggaagtggaggcggaggatctggcggcggaggctctttcgaacaggtgcagctggtgcagagcggtgccgaagtgaagaaaccaggtgcatccgttaaagtttcatgtaaggctagtggatataccttcaccaattacggaatgaactgggtgaaacaggcccctggccagggactgaagtggatggggtggattaacacctacaccggggagccgacttatgcagacgactttaaggggcgggtcacgatgacctccgacacctccaccagtaccgcctacctggagctgcacaaccttaggtcagacgataccgccgtgtattactgtgcccgatggtcttggtccgacggatactatgtctacttcgactattggggccaggggaccacagttaccgtgtcctctacgcgtgaggacctgaagaacgtgttcccacctgaggtggccgtgttcgagcctagcgaggccgagatcagccacacccagaaagccaccctcgtgtgcctggctaccggcttctaccccgaccatgtggaactgtcttggtgggtcaacggcaaagaggtgcacagcggcgtgtgtaccgacccccagccactgaaagaacagcccgccctgaacgacagccggtactgcctgagcagcagactgagagtgtccgccaccttctggcagaacccccggaaccacttcagatgccaggtgcagttctacggcctgagcgagaacgacgagtggacccaggacagagccaagcccgtgacccagatcgtgtctgccgaagcctggggcagagccgatgatgtgattaagatccactggcaggaaaagaagtccaacaccatcctgggcagccaggaaggcaacaccatgaagaccaacgacacctacatgaagttcagctggctgaccgtgcccgagaagtccctggacaaagaacacagatgcatcgtgcggcacgaaaacaacaagaacggcgtggaccaggaaatcatcttcccacccatcaagaccgatgtgattacaatggaccccaaggacaactgctccaaggacgccaacgataccctgctgctccagctgaccaacaccagcgcctactacatgtacttgttgctgctgctgaagtccgtggtgtacttcgccatcatcacatgctgcctgctgatggctatggtcaagcggaaggacagccgggga

SEQ ID NO: 6850 - DNA, 3015 bp, synthetic construct
  source 1..3015: mol_type = other DNA
atggccttaccagtgaccgccttgctcctgccgctggccttgctgctccacgccgccaggccggaagtgcagctggttgaatctggcggaggactggttcagcctggcggatctctgagactgtcttgtgccgccagcggcttcagcttcagcgacttttggatgagctgggtccgacaggcccctggcaaaggacttgaatgggtcgccacaatcagccaggccggcagcgagaaggactacgtggactctgtgaagggcagattcaccatcagccgggacaacgccaagaagtccctgtacctccagatgaacagcctgagagccgaggacaccgccgtgtactattgtgcctctggcgtgtacagcttcgactacagaggccagggcaccctggtcacagtctcttctggtaccggcggaggcggatctggcggcggaggtagcggtggcggaggatctgaattcgacgagatcgtgctgacacagagccctggaagcctggccgtgtctcctggcgagcgcgtgacaatgagctgcaagagcagccagagcgtgttcttcagcagctcccagaagaactacctggcctggtatcagcagatccccggccagagccccagactgctgatctactgggccagcaccagagaaagcggcgtgcccgatagattcaccggcagcggctctggcaccgacttcaccctgacaatcagcagcgtgcagcccgaggacctggctatctactactgccaccagtacctgagcagccggaccttcggccagggcaccaagctggaaatcaagagactcgagatccagaaccctgatcctgccgtgtaccagctgcgggatagcaagagcagcgacaagagcgtgtgtctgttcaccgacttcgacagccagaccaacgtgtcccagagcaaggactccgacgtgtacatcaccgataagtgcgtgctggacatgcggagcatggacttcaagagcaactccgccgtggcctggtccaacaagtccgatttcgcctgcgccaacgccttcaacaacagcattatccccgaggacacattcttcccaagccccgagagcagcgactccaccgaccacgtgaagcccaaagagacagagaacaccaagcagcccagcaagagctgccacaagcccaaggccatcgtgcacaccgagaaagtgaacatgatgagcctgaccgtgctgggcctgcggatgctgttcgccaaaaccgtggccgtgaacttcctgctgaccgccaagctgttcttcctcctcaccgcccgcgccaagagaagcggatctggcgtgaagcagaccctgaatttcgacctgctgaagctggctggcgacgtggaatccaacccaggccctactagtatggactggatttggcgcatccttttccttgtcggcgctgctaccggcgcgcattccgggccccagctccagctgcaagagtctggacctggcctggtcaagcctagcgagacactgagcctgacctgtaccgtgtccggcgatagcatcagcagcggcgattactactggggctggatcagacagcctcctggcaaaggactggaatggatcggccacatctactacagcggcgtgacctactacaaccccagcctgaagtccagagtgaccatcagcgtggacaccagccggaaccagttctccctgaagctgtctagcgtgacagccgccgataccgccgtgtactactgcaccagagaggacagcagcaactggcggagtagaggccagggaacactggtcacagttagctctggatccggcggaggcggaagtggaggcggaggatctggcggcggaggctctttcgaacaggtgcaactgcagcagcctggcgctgaggtcgtgaagccaggcgcttccgtgaagatgtcctgcaaggccagcggctacaccttcaccagctactacatccactggatcaagcagacccctggacagggcctggaatgggtgggagtgatctaccccggcaacgacgacatcagctacaaccagaagttccagggcaaggccaccctgaccgccgacaagtctagcaccaccgcctacatgcaactgtccagcctgaccagcgaggacagcgccgtgtactactgcgccagagaagtgcggctgcggtacttcgatgtgtggggccagggaaccaccgtgaccgtgtcatctacgcgtgaggacctgaagaacgtgttcccacctgaggtggccgtgttcgagcctagcgaggccgagatcagccacacccagaaagccaccctcgtgtgcctggctaccggcttctaccccgaccatgtggaactgtcttggtgggtcaacggcaaagaggtgcacagcggcgtgtgtaccgacccccagccactgaaagaacagcccgccctgaacgacagccggtactgcctgagcagcagactgagagtgtccgccaccttctggcagaacccccggaaccacttcagatgccaggtgcagttctacggcctgagcgagaacgacgagtggacccaggacagagccaagcccgtgacccagatcgtgtctgccgaagcctggggcagagccgatgatgtgattaagatccactggcaggaaaagaagtccaacaccatcctgggcagccaggaaggcaacaccatgaagaccaacgacacctacatgaagttcagctggctgaccgtgcccgagaagtccctggacaaagaacacagatgcatcgtgcggcacgaaaacaacaagaacggcgtggaccaggaaatcatcttcccacccatcaagaccgatgtgattacaatggaccccaaggacaactgctccaaggacgccaacgataccctgctgctccagctgaccaacaccagcgcctactacatgtacttgttgctgctgctgaagtccgtggtgtacttcgccatcatcacatgctgcctgctgatggctatggtcaagcggaaggacagccgggga

SEQ ID NO: 6851 - DNA, 3027 bp, synthetic construct
  source 1..3027: mol_type = other DNA
atggccttaccagtgaccgccttgctcctgccgctggccttgctgctccacgccgccaggccggaagtgcagctggttgaatctggcggaggactggttcagcctggcggatctctgagactgtcttgtgccgccagcggcttcagcttcagcgacttttggatgagctgggtccgacaggcccctggcaaaggacttgaatgggtcgccacaatcagccaggccggcagcgagaaggactacgtggactctgtgaagggcagattcaccatcagccgggacaacgccaagaagtccctgtacctccagatgaacagcctgagagccgaggacaccgccgtgtactattgtgcctctggcgtgtacagcttcgactacagaggccagggcaccctggtcacagtctcttctggtaccggcggaggcggatctggcggcggaggtagcggtggcggaggatctgaattcgatgtgctgctgacccagagccctctgagcctgcctgtgacactgggacagcctgccagcatctcctgtcggagcagccagaccatcgtgcacagcaacggcaacacctacctggaatggttccagcagcggccaggccagagccccagactgctgatctaccaggtgtccaacagattcagcggcgtgcccgacagattctccggcagcggctctggcaccgacttcaccctgaagatcagccgggtggaagccgaggacgtgggcgtgtactactgttttcaaggcagccacgtgccccggacctttggcggaggaacaaaggtggaaatcaagagagccctcgagatccagaaccctgatcctgccgtgtaccagctgcgggatagcaagagcagcgacaagagcgtgtgtctgttcaccgacttcgacagccagaccaacgtgtcccagagcaaggactccgacgtgtacatcaccgataagtgcgtgctggacatgcggagcatggacttcaagagcaactccgccgtggcctggtccaacaagtccgatttcgcctgcgccaacgccttcaacaacagcattatccccgaggacacattcttcccaagccccgagagcagcgactccaccgaccacgtgaagcccaaagagacagagaacaccaagcagcccagcaagagctgccacaagcccaaggccatcgtgcacaccgagaaagtgaacatgatgagcctgaccgtgctgggcctgcggatgctgttcgccaaaaccgtggccgtgaacttcctgctgaccgccaagctgttcttcctcctcaccgcccgcgccaagagaagcggatctggcgtgaagcagaccctgaatttcgacctgctgaagctggctggcgacgtggaatccaacccaggccctactagtatggactggatttggcgcatccttttccttgtcggcgctgctaccggcgcgcattccgggccccagctccagctgcaagagtctggacctggcctggtcaagcctagcgagacactgagcctgacctgtaccgtgtccggcgatagcatcagcagcggcgattactactggggctggatcagacagcctcctggcaaaggactggaatggatcggccacatctactacagcggcgtgacctactacaaccccagcctgaagtccagagtgaccatcagcgtggacaccagccggaaccagttctccctgaagctgtctagcgtgacagccgccgataccgccgtgtactactgcaccagagaggacagcagcaactggcggagtagaggccagggaacactggtcacagttagctctggatccggcggaggcggaagtggaggcggaggatctggcggcggaggctctttcgaacagatccaactggtgcagagcggcagcgagctgaagaaacctggggccagcgtgaaggtgtcctgcaaggccagcggctacacctttaccaactacggcatgaactgggtgcgccaggcccctggacagggcctgaaatggatgggctggatcaacaccaacaccggcgagcctaagtacgccgaagagttcaagggcagattcgccctgagcctggacaccagcgtgtccacagcctacctccagatcaacagcctgaaggccgaggataccgccgtgtacttctgcgccagaggctacggcaactacgccagaggggcttggctggcctattggggccagggaacactcgtgaccgtgtcctctacgcgtgaggacctgaagaacgtgttcccacctgaggtggccgtgttcgagcctagcgaggccgagatcagccacacccagaaagccaccctcgtgtgcctggctaccggcttctaccccgaccatgtggaactgtcttggtgggtcaacggcaaagaggtgcacagcggcgtgtgtaccgacccccagccactgaaagaacagcccgccctgaacgacagccggtactgcctgagcagcagactgagagtgtccgccaccttctggcagaacccccggaaccacttcagatgccaggtgcagttctacggcctgagcgagaacgacgagtggacccaggacagagccaagcccgtgacccagatcgtgtctgccgaagcctggggcagagccgatgatgtgattaagatccactggcaggaaaagaagtccaacaccatcctgggcagccaggaaggcaacaccatgaagaccaacgacacctacatgaagttcagctggctgaccgtgcccgagaagtccctggacaaagaacacagatgcatcgtgcggcacgaaaacaacaagaacggcgtggaccaggaaatcatcttcccacccatcaagaccgatgtgattacaatggaccccaaggacaactgctccaaggacgccaacgataccctgctgctccagctgaccaacaccagcgcctactacatgtacttgttgctgctgctgaagtccgtggtgtacttcgccatcatcacatgctgcctgctgatggctatggtcaagcggaaggacagccgggga

SEQ ID NO: 6852 - DNA, 2982 bp, synthetic construct
  source 1..2982: mol_type = other DNA
atggccttaccagtgaccgccttgctcctgccgctggccttgctgctccacgccgccaggccggaagtgcagctggttgaatctggcggaggactggttcagcctggcggatctctgagactgtcttgtgccgccagcggcttcagcttcagcgacttttggatgagctgggtccgacaggcccctggcaaaggacttgaatgggtcgccacaatcagccaggccggcagcgagaaggactacgtggactctgtgaagggcagattcaccatcagccgggacaacgccaagaagtccctgtacctccagatgaacagcctgagagccgaggacaccgccgtgtactattgtgcctctggcgtgtacagcttcgactacagaggccagggcaccctggtcacagtctcttctggtaccggcggaggcggatctggcggcggaggtagcggtggcggaggatctgaattcgacgagatcgtgctgacacagagccctgccacactctctctgagccctggcgaaagagccaccctgagctgtagcgccagcagcagcatcaactacatctactggctccagcagaagcccggccaggcccccagaatcctgatctacctgaccagcaacctggcctccggcgtgccagccagattttctggcagcggctccggcaccgacttcaccctgacaatcagcagcctggaacccgaggacttcgccgtgtactactgcctccagtggtccagcaaccccctgacctttggcggaggcaccaaggtggaaatcaagctcgagatccagaaccctgatcctgccgtgtaccagctgcgggatagcaagagcagcgacaagagcgtgtgtctgttcaccgacttcgacagccagaccaacgtgtcccagagcaaggactccgacgtgtacatcaccgataagtgcgtgctggacatgcggagcatggacttcaagagcaactccgccgtggcctggtccaacaagtccgatttcgcctgcgccaacgccttcaacaacagcattatccccgaggacacattcttcccaagccccgagagcagcgactccaccgaccacgtgaagcccaaagagacagagaacaccaagcagcccagcaagagctgccacaagcccaaggccatcgtgcacaccgagaaagtgaacatgatgagcctgaccgtgctgggcctgcggatgctgttcgccaaaaccgtggccgtgaacttcctgctgaccgccaagctgttcttcctcctcaccgcccgcgccaagagaagcggatctggcgtgaagcagaccctgaatttcgacctgctgaagctggctggcgacgtggaatccaacccaggccctactagtatggactggatttggcgcatccttttccttgtcggcgctgctaccggcgcgcattccgggccccagctccagctgcaagagtctggacctggcctggtcaagcctagcgagacactgagcctgacctgtaccgtgtccggcgatagcatcagcagcggcgattactactggggctggatcagacagcctcctggcaaaggactggaatggatcggccacatctactacagcggcgtgacctactacaaccccagcctgaagtccagagtgaccatcagcgtggacaccagccggaaccagttctccctgaagctgtctagcgtgacagccgccgataccgccgtgtactactgcaccagagaggacagcagcaactggcggagtagaggccagggaacactggtcacagttagctctggatccggcggaggcggaagtggaggcggaggatctggcggcggaggctctttcgaagaagtgcaactggtggaaagcgggggaggacttgtgaagcctggcggctctctgagactgagctgtgccgcctctggcttcaccttcagcagctacgacatgagctgggtgcgccaggctcctggcaagggactggaatgggtgtccaccatcagcagcggcggcagctacacctactacctggacagcatcaagggccggttcaccatctccagagacaacgccaagaacagcctgtacctccagatgaactccctgcgggccgaggacacagccgtgtattattgcgccagacagggcctggattactggggcagaggcacccttgtgaccgtgtcctctacgcgtgaggacctgaagaacgtgttcccacctgaggtggccgtgttcgagcctagcgaggccgagatcagccacacccagaaagccaccctcgtgtgcctggctaccggcttctaccccgaccatgtggaactgtcttggtgggtcaacggcaaagaggtgcacagcggcgtgtgtaccgacccccagccactgaaagaacagcccgccctgaacgacagccggtactgcctgagcagcagactgagagtgtccgccaccttctggcagaacccccggaaccacttcagatgccaggtgcagttctacggcctgagcgagaacgacgagtggacccaggacagagccaagcccgtgacccagatcgtgtctgccgaagcctggggcagagccgatgatgtgattaagatccactggcaggaaaagaagtccaacaccatcctgggcagccaggaaggcaacaccatgaagaccaacgacacctacatgaagttcagctggctgaccgtgcccgagaagtccctggacaaagaacacagatgcatcgtgcggcacgaaaacaacaagaacggcgtggaccaggaaatcatcttcccacccatcaagaccgatgtgattacaatggaccccaaggacaactgctccaaggacgccaacgataccctgctgctccagctgaccaacaccagcgcctactacatgtacttgttgctgctgctgaagtccgtggtgtacttcgccatcatcacatgctgcctgctgatggctatggtcaagcggaaggacagccgggga

SEQ ID NO: 6853 - DNA, 3009 bp, synthetic construct
  source 1..3009: mol_type = other DNA
atggccttaccagtgaccgccttgctcctgccgctggccttgctgctccacgccgccaggccggaagtgcagctggttgaatctggcggaggactggttcagcctggcggatctctgagactgtcttgtgccgccagcggcttcagcttcagcgacttttggatgagctgggtccgacaggcccctggcaaaggacttgaatgggtcgccacaatcagccaggccggcagcgagaaggactacgtggactctgtgaagggcagattcaccatcagccgggacaacgccaagaagtccctgtacctccagatgaacagcctgagagccgaggacaccgccgtgtactattgtgcctctggcgtgtacagcttcgactacagaggccagggcaccctggtcacagtctcttctggtaccggcggaggcggatctggcggcggaggtagcggtggcggaggatctgaattcgacatcgtgatgacccagagccccgatagcctggccgtgtctctgggagagagagccaccatcaactgccgggccagcaagagcgtgtccaccagcggctacagcttcatgcactggtatcagcagaagcccggccagccccccaagctgctgatctacctggcctccaacctggaaagcggcgtgcccgatagattcagcggcagcggctctggcaccgacttcaccctgaccatcagttctcttcaggccgaggacgtggccgtgtactactgccagcacagcagagaggtgccctggacattcggccagggcacaaaggtggaaatcaagcggctcgagatccagaaccctgatcctgccgtgtaccagctgcgggatagcaagagcagcgacaagagcgtgtgtctgttcaccgacttcgacagccagaccaacgtgtcccagagcaaggactccgacgtgtacatcaccgataagtgcgtgctggacatgcggagcatggacttcaagagcaactccgccgtggcctggtccaacaagtccgatttcgcctgcgccaacgccttcaacaacagcattatccccgaggacacattcttcccaagccccgagagcagcgactccaccgaccacgtgaagcccaaagagacagagaacaccaagcagcccagcaagagctgccacaagcccaaggccatcgtgcacaccgagaaagtgaacatgatgagcctgaccgtgctgggcctgcggatgctgttcgccaaaaccgtggccgtgaacttcctgctgaccgccaagctgttcttcctcctcaccgcccgcgccaagagaagcggatctggcgtgaagcagaccctgaatttcgacctgctgaagctggctggcgacgtggaatccaacccaggccctactagtatggactggatttggcgcatccttttccttgtcggcgctgctaccggcgcgcattccgggccccagctccagctgcaagagtctggacctggcctggtcaagcctagcgagacactgagcctgacctgtaccgtgtccggcgatagcatcagcagcggcgattactactggggctggatcagacagcctcctggcaaaggactggaatggatcggccacatctactacagcggcgtgacctactacaaccccagcctgaagtccagagtgaccatcagcgtggacaccagccggaaccagttctccctgaagctgtctagcgtgacagccgccgataccgccgtgtactactgcaccagagaggacagcagcaactggcggagtagaggccagggaacactggtcacagttagctctggatccggcggaggcggaagtggaggcggaggatctggcggcggaggctctttcgaacaggtgcagctggtgcagtctggggccgaagtgaagaaacctggggccagcgtgaaggtgtcctgcaaggccagcggatacacctttaccaactacggcatgaactgggtgcgccaggcccctggacagggcctggaatggatgggctggatcaacacctacaccggcgagcccacatacgccgacgccttcaagggcagattcgccttcagcctggacaccagcacctccaccgcctacctccagatcaacagcctgcggagcgacgacaccgccgtgtattattgcgccagagattacggcgactacgggatggactattggggccagggaaccaccgtgaccgtgtcctctacgcgtgaggacctgaagaacgtgttcccacctgaggtggccgtgttcgagcctagcgaggccgagatcagccacacccagaaagccaccctcgtgtgcctggctaccggcttctaccccgaccatgtggaactgtcttggtgggtcaacggcaaagaggtgcacagcggcgtgtgtaccgacccccagccactgaaagaacagcccgccctgaacgacagccggtactgcctgagcagcagactgagagtgtccgccaccttctggcagaacccccggaaccacttcagatgccaggtgcagttctacggcctgagcgagaacgacgagtggacccaggacagagccaagcccgtgacccagatcgtgtctgccgaagcctggggcagagccgatgatgtgattaagatccactggcaggaaaagaagtccaacaccatcctgggcagccaggaaggcaacaccatgaagaccaacgacacctacatgaagttcagctggctgaccgtgcccgagaagtccctggacaaagaacacagatgcatcgtgcggcacgaaaacaacaagaacggcgtggaccaggaaatcatcttcccacccatcaagaccgatgtgattacaatggaccccaaggacaactgctccaaggacgccaacgataccctgctgctccagctgaccaacaccagcgcctactacatgtacttgttgctgctgctgaagtccgtggtgtacttcgccatcatcacatgctgcctgctgatggctatggtcaagcggaaggacagccgggga

SEQ ID NO: 6854 - DNA, 2997 bp, synthetic construct
  source 1..2997: mol_type = other DNA
atggccttaccagtgaccgccttgctcctgccgctggccttgctgctccacgccgccaggccggaagtgcagctggttgaatctggcggaggactggttcagcctggcggatctctgagactgtcttgtgccgccagcggcttcagcttcagcgacttttggatgagctgggtccgacaggcccctggcaaaggacttgaatgggtcgccacaatcagccaggccggcagcgagaaggactacgtggactctgtgaagggcagattcaccatcagccgggacaacgccaagaagtccctgtacctccagatgaacagcctgagagccgaggacaccgccgtgtactattgtgcctctggcgtgtacagcttcgactacagaggccagggcaccctggtcacagtctcttctggtaccggcggaggcggatctggcggcggaggtagcggtggcggaggatctgaattcgacatcgtgatgacccagacccccctgaccctgagcgtgacaatcggacagcctgccagcatctcctgcaagagcagccagagcctgctggacagcgacggcaagacctacctgaactggctgctgcagaggccaggccagagccccgagagactgatctacctggtgtccaagctggactccggcgtgcccgatagattcacaggcagcggctccggcaccgacttcaccctgaagatcagccgggtggaagccgaggacctgggcgtgtactgttgttggcagggcacccacttcccttacaccttcggcggagggaccaaggtggaaatcaagggcctcgagatccagaaccctgatcctgccgtgtaccagctgcgggatagcaagagcagcgacaagagcgtgtgtctgttcaccgacttcgacagccagaccaacgtgtcccagagcaaggactccgacgtgtacatcaccgataagtgcgtgctggacatgcggagcatggacttcaagagcaactccgccgtggcctggtccaacaagtccgatttcgcctgcgccaacgccttcaacaacagcattatccccgaggacacattcttcccaagccccgagagcagcgactccaccgaccacgtgaagcccaaagagacagagaacaccaagcagcccagcaagagctgccacaagcccaaggccatcgtgcacaccgagaaagtgaacatgatgagcctgaccgtgctgggcctgcggatgctgttcgccaaaaccgtggccgtgaacttcctgctgaccgccaagctgttcttcctcctcaccgcccgcgccaagagaagcggatctggcgtgaagcagaccctgaatttcgacctgctgaagctggctggcgacgtggaatccaacccaggccctactagtatggactggatttggcgcatccttttccttgtcggcgctgctaccggcgcgcattccgggccccagctccagctgcaagagtctggacctggcctggtcaagcctagcgagacactgagcctgacctgtaccgtgtccggcgatagcatcagcagcggcgattactactggggctggatcagacagcctcctggcaaaggactggaatggatcggccacatctactacagcggcgtgacctactacaaccccagcctgaagtccagagtgaccatcagcgtggacaccagccggaaccagttctccctgaagctgtctagcgtgacagccgccgataccgccgtgtactactgcaccagagaggacagcagcaactggcggagtagaggccagggaacactggtcacagttagctctggatccggcggaggcggaagtggaggcggaggatctggcggcggaggctctttcgaacaggtgcaactgcagcagcctggcgctgaacttgtgcggccaggcgcctctgtgaagctgagctgtaaagccagcggctacaccttcaccagctactggatgaactgggtcaagcagcgcccaggccagggcctggaatggatcggaatgatcgaccccagcgacagcgagacacactacaaccacatcttcaaggacaaggccaccctgaccgtggacaagtccagcagcacagcctacctgcaactgtccagcctgaccagcgaggacagcgccgtgtactactgcgcccggaacctgtatctgtggggccagggaacaagcgtgaccgtgtctagcacgcgtgaggacctgaagaacgtgttcccacctgaggtggccgtgttcgagcctagcgaggccgagatcagccacacccagaaagccaccctcgtgtgcctggctaccggcttctaccccgaccatgtggaactgtcttggtgggtcaacggcaaagaggtgcacagcggcgtgtgtaccgacccccagccactgaaagaacagcccgccctgaacgacagccggtactgcctgagcagcagactgagagtgtccgccaccttctggcagaacccccggaaccacttcagatgccaggtgcagttctacggcctgagcgagaacgacgagtggacccaggacagagccaagcccgtgacccagatcgtgtctgccgaagcctggggcagagccgatgatgtgattaagatccactggcaggaaaagaagtccaacaccatcctgggcagccaggaaggcaacaccatgaagaccaacgacacctacatgaagttcagctggctgaccgtgcccgagaagtccctggacaaagaacacagatgcatcgtgcggcacgaaaacaacaagaacggcgtggaccaggaaatcatcttcccacccatcaagaccgatgtgattacaatggaccccaaggacaactgctccaaggacgccaacgataccctgctgctccagctgaccaacaccagcgcctactacatgtacttgttgctgctgctgaagtccgtggtgtacttcgccatcatcacatgctgcctgctgatggctatggtcaagcggaaggacagccgggga

SEQ ID NO: 6855 - DNA, 3021 bp, synthetic construct
  source 1..3021: mol_type = other DNA
atggccttaccagtgaccgccttgctcctgccgctggccttgctgctccacgccgccaggccggaagtgcagctggttgaatctggcggaggactggttcagcctggcggatctctgagactgtcttgtgccgccagcggcttcagcttcagcgacttttggatgagctgggtccgacaggcccctggcaaaggacttgaatgggtcgccacaatcagccaggccggcagcgagaaggactacgtggactctgtgaagggcagattcaccatcagccgggacaacgccaagaagtccctgtacctccagatgaacagcctgagagccgaggacaccgccgtgtactattgtgcctctggcgtgtacagcttcgactacagaggccagggcaccctggtcacagtctcttctggtaccggcggaggcggatctggcggcggaggtagcggtggcggaggatctgaattcgacatcgtgatgacccagagccccgatagcctggccgtgtctctgggagagagagccaccatcaactgcgagagcagccagagcctgctgaacagcggcaaccagaagaactacctgacctggtatcagcagaagcccggccagccccccaagcccctgatctattgggccagcaccagagaaagcggcgtgcccgatagattcagcggcagcggaagcggcaccgacttcaccctgaccatcagttctcttcaggccgaggacgtggccgtgtactactgccagaacgactacagctacccctacaccttcggccagggcaccaagctggaaatcaagagactcgagatccagaaccctgatcctgccgtgtaccagctgcgggatagcaagagcagcgacaagagcgtgtgtctgttcaccgacttcgacagccagaccaacgtgtcccagagcaaggactccgacgtgtacatcaccgataagtgcgtgctggacatgcggagcatggacttcaagagcaactccgccgtggcctggtccaacaagtccgatttcgcctgcgccaacgccttcaacaacagcattatccccgaggacacattcttcccaagccccgagagcagcgactccaccgaccacgtgaagcccaaagagacagagaacaccaagcagcccagcaagagctgccacaagcccaaggccatcgtgcacaccgagaaagtgaacatgatgagcctgaccgtgctgggcctgcggatgctgttcgccaaaaccgtggccgtgaacttcctgctgaccgccaagctgttcttcctcctcaccgcccgcgccaagagaagcggatctggcgtgaagcagaccctgaatttcgacctgctgaagctggctggcgacgtggaatccaacccaggccctactagtatggactggatttggcgcatccttttccttgtcggcgctgctaccggcgcgcattccgggccccagctccagctgcaagagtctggacctggcctggtcaagcctagcgagacactgagcctgacctgtaccgtgtccggcgatagcatcagcagcggcgattactactggggctggatcagacagcctcctggcaaaggactggaatggatcggccacatctactacagcggcgtgacctactacaaccccagcctgaagtccagagtgaccatcagcgtggacaccagccggaaccagttctccctgaagctgtctagcgtgacagccgccgataccgccgtgtactactgcaccagagaggacagcagcaactggcggagtagaggccagggaacactggtcacagttagctctggatccggcggaggcggaagtggaggcggaggatctggcggcggaggctctttcgaagaagtgcagctggtgcagtctggggccgaagtgaagaagcctggcgagagcctgaagatcagctgcaagggcagcggctacagcttcaccgactactacatgaagtgggccagacagatgcccggcaagggcctggaatggatgggcgacatcatccccagcaacggggccaccttctacaaccagaaattcaagggccaagtgaccatctccgccgacaagagcatcagcaccacctacctccagtggtccagcctgaaggccagcgacaccgccatgtactattgcgccagaagccatctgctgcgggccagttggttcgcctattggggccagggaacaatggtcacagtgtccagcacgcgtgaggacctgaagaacgtgttcccacctgaggtggccgtgttcgagcctagcgaggccgagatcagccacacccagaaagccaccctcgtgtgcctggctaccggcttctaccccgaccatgtggaactgtcttggtgggtcaacggcaaagaggtgcacagcggcgtgtgtaccgacccccagccactgaaagaacagcccgccctgaacgacagccggtactgcctgagcagcagactgagagtgtccgccaccttctggcagaacccccggaaccacttcagatgccaggtgcagttctacggcctgagcgagaacgacgagtggacccaggacagagccaagcccgtgacccagatcgtgtctgccgaagcctggggcagagccgatgatgtgattaagatccactggcaggaaaagaagtccaacaccatcctgggcagccaggaaggcaacaccatgaagaccaacgacacctacatgaagttcagctggctgaccgtgcccgagaagtccctggacaaagaacacagatgcatcgtgcggcacgaaaacaacaagaacggcgtggaccaggaaatcatcttcccacccatcaagaccgatgtgattacaatggaccccaaggacaactgctccaaggacgccaacgataccctgctgctccagctgaccaacaccagcgcctactacatgtacttgttgctgctgctgaagtccgtggtgtacttcgccatcatcacatgctgcctgctgatggctatggtcaagcggaaggacagccgggga

SEQ ID NO: 6856 - DNA, 3006 bp, synthetic construct
  source 1..3006: mol_type = other DNA
atggccttaccagtgaccgccttgctcctgccgctggccttgctgctccacgccgccaggccggaagtgcagctggttgaatctggcggaggactggttcagcctggcggatctctgagactgtcttgtgccgccagcggcttcagcttcagcgacttttggatgagctgggtccgacaggcccctggcaaaggacttgaatgggtcgccacaatcagccaggccggcagcgagaaggactacgtggactctgtgaagggcagattcaccatcagccgggacaacgccaagaagtccctgtacctccagatgaacagcctgagagccgaggacaccgccgtgtactattgtgcctctggcgtgtacagcttcgactacagaggccagggcaccctggtcacagtctcttctggtaccggcggaggcggatctggcggcggaggtagcggtggcggaggatctgaattcgacatccagatgacccagtctaccagttccctgagtgcatccctcggagacagggtgacgatcagttgcagcgcaagccaagggatcaataactatctgaactggtatcagcagaaaccggacggaacagtcgaactcctgatttattacaccagcacccttcagagtggcgtcccttcccggttcagtggctccggaagcgggaccgattactccctgaccatttctaatctggagccagaggacataggaacgtattattgccagcagtatagtaaactgccacgaacttttggaggggggacgaaactggagatcaaactcgagatccagaaccctgatcctgccgtgtaccagctgcgggatagcaagagcagcgacaagagcgtgtgtctgttcaccgacttcgacagccagaccaacgtgtcccagagcaaggactccgacgtgtacatcaccgataagtgcgtgctggacatgcggagcatggacttcaagagcaactccgccgtggcctggtccaacaagtccgatttcgcctgcgccaacgccttcaacaacagcattatccccgaggacacattcttcccaagccccgagagcagcgactccaccgaccacgtgaagcccaaagagacagagaacaccaagcagcccagcaagagctgccacaagcccaaggccatcgtgcacaccgagaaagtgaacatgatgagcctgaccgtgctgggcctgcggatgctgttcgccaaaaccgtggccgtgaacttcctgctgaccgccaagctgttcttcctcctcaccgcccgcgccaagagaagcggatctggcgtgaagcagaccctgaatttcgacctgctgaagctggctggcgacgtggaatccaacccaggccctactagtatggactggatttggcgcatccttttccttgtcggcgctgctaccggcgcgcattccgggccccagctccagctgcaagagtctggacctggcctggtcaagcctagcgagacactgagcctgacctgtaccgtgtccggcgatagcatcagcagcggcgattactactggggctggatcagacagcctcctggcaaaggactggaatggatcggccacatctactacagcggcgtgacctactacaaccccagcctgaagtccagagtgaccatcagcgtggacaccagccggaaccagttctccctgaagctgtctagcgtgacagccgccgataccgccgtgtactactgcaccagagaggacagcagcaactggcggagtagaggccagggaacactggtcacagttagctctggatccggcggaggcggaagtggaggcggaggatctggcggcggaggctctttcgaacaggtgcaactccagcagtccggaagcgagcttatgatgccaggggcatcagtgaagatcagctgcaaggctactggctacaccttctctaattactggatagagtgggttaaacaaaggccagggcacggcctggaatggatcggcgagatcctgcctgggacaggccgaaccatttataacgagaagttcaaaggcaaggctactttcaccgcagatataagctctaatacagtgcaaatgcagctctcttccctgacaagtgaggatagtgccgtgtattattgcgcacgaagagattactatggaaatttttattacgctatggattattggggtcaaggaacaagtgtgaccgttagcagcacgcgtgaggacctgaagaacgtgttcccacctgaggtggccgtgttcgagcctagcgaggccgagatcagccacacccagaaagccaccctcgtgtgcctggctaccggcttctaccccgaccatgtggaactgtcttggtgggtcaacggcaaagaggtgcacagcggcgtgtgtaccgacccccagccactgaaagaacagcccgccctgaacgacagccggtactgcctgagcagcagactgagagtgtccgccaccttctggcagaacccccggaaccacttcagatgccaggtgcagttctacggcctgagcgagaacgacgagtggacccaggacagagccaagcccgtgacccagatcgtgtctgccgaagcctggggcagagccgatgatgtgattaagatccactggcaggaaaagaagtccaacaccatcctgggcagccaggaaggcaacaccatgaagaccaacgacacctacatgaagttcagctggctgaccgtgcccgagaagtccctggacaaagaacacagatgcatcgtgcggcacgaaaacaacaagaacggcgtggaccaggaaatcatcttcccacccatcaagaccgatgtgattacaatggaccccaaggacaactgctccaaggacgccaacgataccctgctgctccagctgaccaacaccagcgcctactacatgtacttgttgctgctgctgaagtccgtggtgtacttcgccatcatcacatgctgcctgctgatggctatggtcaagcggaaggacagccgggga

SEQ ID NO: 6857 - DNA, 2991 bp, synthetic construct
  source 1..2991: mol_type = other DNA
atggccttaccagtgaccgccttgctcctgccgctggccttgctgctccacgccgccaggccggaagtgcagctggttgaatctggcggaggactggttcagcctggcggatctctgagactgtcttgtgccgccagcggcttcagcttcagcgacttttggatgagctgggtccgacaggcccctggcaaaggacttgaatgggtcgccacaatcagccaggccggcagcgagaaggactacgtggactctgtgaagggcagattcaccatcagccgggacaacgccaagaagtccctgtacctccagatgaacagcctgagagccgaggacaccgccgtgtactattgtgcctctggcgtgtacagcttcgactacagaggccagggcaccctggtcacagtctcttctggtaccggcggaggcggatctggcggcggaggtagcggtggcggaggatctgaattcgacatccagatgacccagagccctgccagcctgtccgtgtctgtgggcgagacagtgaccatcacctgtcgggccagcgagaacatctacagcaacctggcctggtatcagcagaagcagggcaagagcccccaactgctggtgtacgccgccaccaatctggccgatggcgtgcccagcagattttccggctctggcagcggcacccagtacagcctgaagatcaacagcctccagagcgaggacttcggcagctactactgccagcacttctggggcacctggacctttggaggaggcaccaccctggaaatcaagctcgagatccagaaccctgatcctgccgtgtaccagctgcgggatagcaagagcagcgacaagagcgtgtgtctgttcaccgacttcgacagccagaccaacgtgtcccagagcaaggactccgacgtgtacatcaccgataagtgcgtgctggacatgcggagcatggacttcaagagcaactccgccgtggcctggtccaacaagtccgatttcgcctgcgccaacgccttcaacaacagcattatccccgaggacacattcttcccaagccccgagagcagcgactccaccgaccacgtgaagcccaaagagacagagaacaccaagcagcccagcaagagctgccacaagcccaaggccatcgtgcacaccgagaaagtgaacatgatgagcctgaccgtgctgggcctgcggatgctgttcgccaaaaccgtggccgtgaacttcctgctgaccgccaagctgttcttcctcctcaccgcccgcgccaagagaagcggatctggcgtgaagcagaccctgaatttcgacctgctgaagctggctggcgacgtggaatccaacccaggccctactagtatggactggatttggcgcatccttttccttgtcggcgctgctaccggcgcgcattccgggccccagctccagctgcaagagtctggacctggcctggtcaagcctagcgagacactgagcctgacctgtaccgtgtccggcgatagcatcagcagcggcgattactactggggctggatcagacagcctcctggcaaaggactggaatggatcggccacatctactacagcggcgtgacctactacaaccccagcctgaagtccagagtgaccatcagcgtggacaccagccggaaccagttctccctgaagctgtctagcgtgacagccgccgataccgccgtgtactactgcaccagagaggacagcagcaactggcggagtagaggccagggaacactggtcacagttagctctggatccggcggaggcggaagtggaggcggaggatctggcggcggaggctctttcgaagaagtgcaactccagcagagcggccctgagcttgtgaagcctggcgcttccgtgaagatgagctgcaaggccagcggctacaccttcaccgactactacatgaagtggatgaagcagagccacggcaagtccctggaatggatcggcgacatcaaccccaacaacggcggcaccacctacaaccagaagttcaagggcaaggccaccctgaccgtggacaagagcagcagcaccgcctacatgcaactgaacagcctgaccagcgaggacagcgccgtgtactactgcgccagagactacggctacggctatttcgactactggggccagggcacaaccctgacagtgtcctctacgcgtgaggacctgaagaacgtgttcccacctgaggtggccgtgttcgagcctagcgaggccgagatcagccacacccagaaagccaccctcgtgtgcctggctaccggcttctaccccgaccatgtggaactgtcttggtgggtcaacggcaaagaggtgcacagcggcgtgtgtaccgacccccagccactgaaagaacagcccgccctgaacgacagccggtactgcctgagcagcagactgagagtgtccgccaccttctggcagaacccccggaaccacttcagatgccaggtgcagttctacggcctgagcgagaacgacgagtggacccaggacagagccaagcccgtgacccagatcgtgtctgccgaagcctggggcagagccgatgatgtgattaagatccactggcaggaaaagaagtccaacaccatcctgggcagccaggaaggcaacaccatgaagaccaacgacacctacatgaagttcagctggctgaccgtgcccgagaagtccctggacaaagaacacagatgcatcgtgcggcacgaaaacaacaagaacggcgtggaccaggaaatcatcttcccacccatcaagaccgatgtgattacaatggaccccaaggacaactgctccaaggacgccaacgataccctgctgctccagctgaccaacaccagcgcctactacatgtacttgttgctgctgctgaagtccgtggtgtacttcgccatcatcacatgctgcctgctgatggctatggtcaagcggaaggacagccgggga

SEQ ID NO: 6858 - DNA, 3000 bp, synthetic construct
  source 1..3000: mol_type = other DNA
atggccttaccagtgaccgccttgctcctgccgctggccttgctgctccacgccgccaggccggaagtgcagctggttgaatctggcggaggactggttcagcctggcggatctctgagactgtcttgtgccgccagcggcttcagcttcagcgacttttggatgagctgggtccgacaggcccctggcaaaggacttgaatgggtcgccacaatcagccaggccggcagcgagaaggactacgtggactctgtgaagggcagattcaccatcagccgggacaacgccaagaagtccctgtacctccagatgaacagcctgagagccgaggacaccgccgtgtactattgtgcctctggcgtgtacagcttcgactacagaggccagggcaccctggtcacagtctcttctggtaccggcggaggcggatctggcggcggaggtagcggtggcggaggatctgaattcgagatcgtgctgacacagagccctggcaccctgagcctgtctccaggcgaaagagccacactgagctgtcgggcctctcagagcgtgggaggctacctggcttggtatcagcagaagccaggccaggcccccagactgctgatctacgacgccagcaatcgggccacaggcatccccgccagattttctggcagcggctccggcaccgacttcaccctgacaatcagcagcctggaacccgaggacttcgccgtgtactactgccagcagcggaacaactggccccccatgtacacattcggccagggcaccaagctggaaatcaagagactcgagatccagaaccctgatcctgccgtgtaccagctgcgggatagcaagagcagcgacaagagcgtgtgtctgttcaccgacttcgacagccagaccaacgtgtcccagagcaaggactccgacgtgtacatcaccgataagtgcgtgctggacatgcggagcatggacttcaagagcaactccgccgtggcctggtccaacaagtccgatttcgcctgcgccaacgccttcaacaacagcattatccccgaggacacattcttcccaagccccgagagcagcgactccaccgaccacgtgaagcccaaagagacagagaacaccaagcagcccagcaagagctgccacaagcccaaggccatcgtgcacaccgagaaagtgaacatgatgagcctgaccgtgctgggcctgcggatgctgttcgccaaaaccgtggccgtgaacttcctgctgaccgccaagctgttcttcctcctcaccgcccgcgccaagagaagcggatctggcgtgaagcagaccctgaatttcgacctgctgaagctggctggcgacgtggaatccaacccaggccctactagtatggactggatttggcgcatccttttccttgtcggcgctgctaccggcgcgcattccgggccccagctccagctgcaagagtctggacctggcctggtcaagcctagcgagacactgagcctgacctgtaccgtgtccggcgatagcatcagcagcggcgattactactggggctggatcagacagcctcctggcaaaggactggaatggatcggccacatctactacagcggcgtgacctactacaaccccagcctgaagtccagagtgaccatcagcgtggacaccagccggaaccagttctccctgaagctgtctagcgtgacagccgccgataccgccgtgtactactgcaccagagaggacagcagcaactggcggagtagaggccagggaacactggtcacagttagctctggatccggcggaggcggaagtggaggcggaggatctggcggcggaggctctttcgaacaggtgcaactggtgcagagcggagccgaagtgaagaaacccggcagcagcgtgaaggtgtcctgcaaggcttccggcggcaccttcagcagctacgccatttcttgggtgcgccaggctcctggacagggcctggaatggatgggcggcatcatccctatcctgggcaccgccaactacgcccagaaattccagggcagagtgaccatcaccgccgacgagagcaccagcaccgcctacatggaactgagcagcctgcggagcgaggacacagccgtgtattattgcgccagatggggcggaggggccttcgacatttggggccagggaacaatggtcaccgtgtccagcacgcgtgaggacctgaagaacgtgttcccacctgaggtggccgtgttcgagcctagcgaggccgagatcagccacacccagaaagccaccctcgtgtgcctggctaccggcttctaccccgaccatgtggaactgtcttggtgggtcaacggcaaagaggtgcacagcggcgtgtgtaccgacccccagccactgaaagaacagcccgccctgaacgacagccggtactgcctgagcagcagactgagagtgtccgccaccttctggcagaacccccggaaccacttcagatgccaggtgcagttctacggcctgagcgagaacgacgagtggacccaggacagagccaagcccgtgacccagatcgtgtctgccgaagcctggggcagagccgatgatgtgattaagatccactggcaggaaaagaagtccaacaccatcctgggcagccaggaaggcaacaccatgaagaccaacgacacctacatgaagttcagctggctgaccgtgcccgagaagtccctggacaaagaacacagatgcatcgtgcggcacgaaaacaacaagaacggcgtggaccaggaaatcatcttcccacccatcaagaccgatgtgattacaatggaccccaaggacaactgctccaaggacgccaacgataccctgctgctccagctgaccaacaccagcgcctactacatgtacttgttgctgctgctgaagtccgtggtgtacttcgccatcatcacatgctgcctgctgatggctatggtcaagcggaaggacagccgggga

SEQ ID NO: 6859 - DNA, 2985 bp, synthetic construct
  source 1..2985: mol_type = other DNA
atggccttaccagtgaccgccttgctcctgccgctggccttgctgctccacgccgccaggccggaagtgcagctggttgaatctggcggaggactggttcagcctggcggatctctgagactgtcttgtgccgccagcggcttcagcttcagcgacttttggatgagctgggtccgacaggcccctggcaaaggacttgaatgggtcgccacaatcagccaggccggcagcgagaaggactacgtggactctgtgaagggcagattcaccatcagccgggacaacgccaagaagtccctgtacctccagatgaacagcctgagagccgaggacaccgccgtgtactattgtgcctctggcgtgtacagcttcgactacagaggccagggcaccctggtcacagtctcttctggtaccggcggaggcggatctggcggcggaggtagcggtggcggaggatctgaattccagatcgtgctgacacagagccctgccctgatgagcgccagccctggcgagaaagtgaccatgacctgtagcgccagcagcagcgtgcgctacatgtactggtatcagcagaagcccagaagcagccccaagccctggattcacctgaccagcaatctggcctctggcgtgcccgctagattttccggctctggcagcggcaccagctacagcctgaccatcagcagcatggaagccgaggacgccgccacctactactgccagcagtggtccagccaccccttcacatttggctccggcaccaagctggaaatcaagctcgagatccagaaccctgatcctgccgtgtaccagctgcgggatagcaagagcagcgacaagagcgtgtgtctgttcaccgacttcgacagccagaccaacgtgtcccagagcaaggactccgacgtgtacatcaccgataagtgcgtgctggacatgcggagcatggacttcaagagcaactccgccgtggcctggtccaacaagtccgatttcgcctgcgccaacgccttcaacaacagcattatccccgaggacacattcttcccaagccccgagagcagcgactccaccgaccacgtgaagcccaaagagacagagaacaccaagcagcccagcaagagctgccacaagcccaaggccatcgtgcacaccgagaaagtgaacatgatgagcctgaccgtgctgggcctgcggatgctgttcgccaaaaccgtggccgtgaacttcctgctgaccgccaagctgttcttcctcctcaccgcccgcgccaagagaagcggatctggcgtgaagcagaccctgaatttcgacctgctgaagctggctggcgacgtggaatccaacccaggccctactagtatggactggatttggcgcatccttttccttgtcggcgctgctaccggcgcgcattccgggccccagctccagctgcaagagtctggacctggcctggtcaagcctagcgagacactgagcctgacctgtaccgtgtccggcgatagcatcagcagcggcgattactactggggctggatcagacagcctcctggcaaaggactggaatggatcggccacatctactacagcggcgtgacctactacaaccccagcctgaagtccagagtgaccatcagcgtggacaccagccggaaccagttctccctgaagctgtctagcgtgacagccgccgataccgccgtgtactactgcaccagagaggacagcagcaactggcggagtagaggccagggaacactggtcacagttagctctggatccggcggaggcggaagtggaggcggaggatctggcggcggaggctctttcgaagatgtgcaactccaggaaagcggccctggccttgtgaagcctagccagagcctgtccctgacctgtaccgtgaccggcttcagcatcaccagcgactactcttggaactggatcagacagttccctggcaacaaactggaatggatgggctacatcagctactccggccacacctcctacaaccccagcctggaaagccggatctccatcaccagagacaccagcaagaaccagttcttcttgcaactgaacagcgtgaccaccgaggataccgccacatattactgtaccagaggcaactgggacgtggtgtactggggccagggcacacttgtgaccgtgtctgctacgcgtgaggacctgaagaacgtgttcccacctgaggtggccgtgttcgagcctagcgaggccgagatcagccacacccagaaagccaccctcgtgtgcctggctaccggcttctaccccgaccatgtggaactgtcttggtgggtcaacggcaaagaggtgcacagcggcgtgtgtaccgacccccagccactgaaagaacagcccgccctgaacgacagccggtactgcctgagcagcagactgagagtgtccgccaccttctggcagaacccccggaaccacttcagatgccaggtgcagttctacggcctgagcgagaacgacgagtggacccaggacagagccaagcccgtgacccagatcgtgtctgccgaagcctggggcagagccgatgatgtgattaagatccactggcaggaaaagaagtccaacaccatcctgggcagccaggaaggcaacaccatgaagaccaacgacacctacatgaagttcagctggctgaccgtgcccgagaagtccctggacaaagaacacagatgcatcgtgcggcacgaaaacaacaagaacggcgtggaccaggaaatcatcttcccacccatcaagaccgatgtgattacaatggaccccaaggacaactgctccaaggacgccaacgataccctgctgctccagctgaccaacaccagcgcctactacatgtacttgttgctgctgctgaagtccgtggtgtacttcgccatcatcacatgctgcctgctgatggctatggtcaagcggaaggacagccgggga

SEQ ID NO: 6860 - DNA, 3015 bp, synthetic construct
  source 1..3015: mol_type = other DNA
atggccttaccagtgaccgccttgctcctgccgctggccttgctgctccacgccgccaggccggaagtgcagctggttgaatctggcggaggactggttcagcctggcggatctctgagactgtcttgtgccgccagcggcttcagcttcagcgacttttggatgagctgggtccgacaggcccctggcaaaggacttgaatgggtcgccacaatcagccaggccggcagcgagaaggactacgtggactctgtgaagggcagattcaccatcagccgggacaacgccaagaagtccctgtacctccagatgaacagcctgagagccgaggacaccgccgtgtactattgtgcctctggcgtgtacagcttcgactacagaggccagggcaccctggtcacagtctcttctggtaccggcggaggcggatctggcggcggaggtagcggtggcggaggatctgaattcgacgtcgtgatgacccagagccctctgagcctgcctgtgacactgggacagcctgccagcatctcctgtcggagcagccagagcatcgtgcacagcgacggcaacacctacctggaatggtatcagcagcggccaggccagagccccagacggctgatctacaaggtgtccaacagattcagcggcgtgcccgacagattctccggcagcggctctggcaccgacttcaccctgaagatcagcagagtggaagccgaggacgtgggcgtgtactactgttttcaaggcagccacgccccctggacctttggcggaggaacaaaggtggaaatcaagctcgagatccagaaccctgatcctgccgtgtaccagctgcgggatagcaagagcagcgacaagagcgtgtgtctgttcaccgacttcgacagccagaccaacgtgtcccagagcaaggactccgacgtgtacatcaccgataagtgcgtgctggacatgcggagcatggacttcaagagcaactccgccgtggcctggtccaacaagtccgatttcgcctgcgccaacgccttcaacaacagcattatccccgaggacacattcttcccaagccccgagagcagcgactccaccgaccacgtgaagcccaaagagacagagaacaccaagcagcccagcaagagctgccacaagcccaaggccatcgtgcacaccgagaaagtgaacatgatgagcctgaccgtgctgggcctgcggatgctgttcgccaaaaccgtggccgtgaacttcctgctgaccgccaagctgttcttcctcctcaccgcccgcgccaagagaagcggatctggcgtgaagcagaccctgaatttcgacctgctgaagctggctggcgacgtggaatccaacccaggccctactagtatggactggatttggcgcatccttttccttgtcggcgctgctaccggcgcgcattccgggccccagctccagctgcaagagtctggacctggcctggtcaagcctagcgagacactgagcctgacctgtaccgtgtccggcgatagcatcagcagcggcgattactactggggctggatcagacagcctcctggcaaaggactggaatggatcggccacatctactacagcggcgtgacctactacaaccccagcctgaagtccagagtgaccatcagcgtggacaccagccggaaccagttctccctgaagctgtctagcgtgacagccgccgataccgccgtgtactactgcaccagagaggacagcagcaactggcggagtagaggccagggaacactggtcacagttagctctggatccggcggaggcggaagtggaggcggaggatctggcggcggaggctctttcgaagaagtgcaactggtggaatcaggcggcggactggtgcagcctggcggatctctgagactgagctgtgccgccagcggcttcaccttcagcagctacggaatgcactgggtgcgccaggcccctggcaaaggactggaatgggtggcctacatcaccaccagaagcagcaccatctactacgccgacagcgtgaagggccggttcaccatctccagagacaacgccaagaacagcctgtacctccagatgaactccctgcgggccgaggacaccgccgtgtactattgcaccagagagcccctgaccggctactacgctatggactattggggccagggcaccagcgtgaccgtgtctagtacgcgtgaggacctgaagaacgtgttcccacctgaggtggccgtgttcgagcctagcgaggccgagatcagccacacccagaaagccaccctcgtgtgcctggctaccggcttctaccccgaccatgtggaactgtcttggtgggtcaacggcaaagaggtgcacagcggcgtgtgtaccgacccccagccactgaaagaacagcccgccctgaacgacagccggtactgcctgagcagcagactgagagtgtccgccaccttctggcagaacccccggaaccacttcagatgccaggtgcagttctacggcctgagcgagaacgacgagtggacccaggacagagccaagcccgtgacccagatcgtgtctgccgaagcctggggcagagccgatgatgtgattaagatccactggcaggaaaagaagtccaacaccatcctgggcagccaggaaggcaacaccatgaagaccaacgacacctacatgaagttcagctggctgaccgtgcccgagaagtccctggacaaagaacacagatgcatcgtgcggcacgaaaacaacaagaacggcgtggaccaggaaatcatcttcccacccatcaagaccgatgtgattacaatggaccccaaggacaactgctccaaggacgccaacgataccctgctgctccagctgaccaacaccagcgcctactacatgtacttgttgctgctgctgaagtccgtggtgtacttcgccatcatcacatgctgcctgctgatggctatggtcaagcggaaggacagccgggga

SEQ ID NO: 6861 - DNA, 2991 bp, synthetic construct
  source 1..2991: mol_type = other DNA
atggccttaccagtgaccgccttgctcctgccgctggccttgctgctccacgccgccaggccggaagtgcagctggttgaatctggcggaggactggttcagcctggcggatctctgagactgtcttgtgccgccagcggcttcagcttcagcgacttttggatgagctgggtccgacaggcccctggcaaaggacttgaatgggtcgccacaatcagccaggccggcagcgagaaggactacgtggactctgtgaagggcagattcaccatcagccgggacaacgccaagaagtccctgtacctccagatgaacagcctgagagccgaggacaccgccgtgtactattgtgcctctggcgtgtacagcttcgactacagaggccagggcaccctggtcacagtctcttctggtaccggcggaggcggatctggcggcggaggtagcggtggcggaggatctgaattcgacatccagatgacccagagccccagcagcctgtctgccagcgtgggcgacagagtgaccatcacctgtagagccagccagagcatcagcctgtggctgaactggtatcagcagaagcccggcaaggcccccaagctgctgatctacgccgccagcacactccagagcggcgtgccaagcagattttccggcagcggctccggcaccgacttcaccctgacaatcagctccctccagcccgaggacttcgccacctactactgccagcagtactacaccagcccctacaccttcggccagggcaccaaggtggaaatcaagagactcgagatccagaaccctgatcctgccgtgtaccagctgcgggatagcaagagcagcgacaagagcgtgtgtctgttcaccgacttcgacagccagaccaacgtgtcccagagcaaggactccgacgtgtacatcaccgataagtgcgtgctggacatgcggagcatggacttcaagagcaactccgccgtggcctggtccaacaagtccgatttcgcctgcgccaacgccttcaacaacagcattatccccgaggacacattcttcccaagccccgagagcagcgactccaccgaccacgtgaagcccaaagagacagagaacaccaagcagcccagcaagagctgccacaagcccaaggccatcgtgcacaccgagaaagtgaacatgatgagcctgaccgtgctgggcctgcggatgctgttcgccaaaaccgtggccgtgaacttcctgctgaccgccaagctgttcttcctcctcaccgcccgcgccaagagaagcggatctggcgtgaagcagaccctgaatttcgacctgctgaagctggctggcgacgtggaatccaacccaggccctactagtatggactggatttggcgcatccttttccttgtcggcgctgctaccggcgcgcattccgggccccagctccagctgcaagagtctggacctggcctggtcaagcctagcgagacactgagcctgacctgtaccgtgtccggcgatagcatcagcagcggcgattactactggggctggatcagacagcctcctggcaaaggactggaatggatcggccacatctactacagcggcgtgacctactacaaccccagcctgaagtccagagtgaccatcagcgtggacaccagccggaaccagttctccctgaagctgtctagcgtgacagccgccgataccgccgtgtactactgcaccagagaggacagcagcaactggcggagtagaggccagggaacactggtcacagttagctctggatccggcggaggcggaagtggaggcggaggatctggcggcggaggctctttcgaacaggtgcaactgctggaatctggcggcggactggtgcagcctggcggatctctgagactgagctgtgccgccagcggcttcaccttcagcagctacgccatgagctgggtgcgccaggcccctggaaaaggactggaatgggtgtccgtgatccggtccagcggcagcagcacctattacgccgatagcgtgaagggccggttcaccatcagccgggacaacagcaagaacaccctgtacctccagatgaacagcctgcgggccgaggacaccgccgtgtactattgtgctaggggaggcggctacttcgactactggggccagggaacactcgtgaccgtgtcctctacgcgtgaggacctgaagaacgtgttcccacctgaggtggccgtgttcgagcctagcgaggccgagatcagccacacccagaaagccaccctcgtgtgcctggctaccggcttctaccccgaccatgtggaactgtcttggtgggtcaacggcaaagaggtgcacagcggcgtgtgtaccgacccccagccactgaaagaacagcccgccctgaacgacagccggtactgcctgagcagcagactgagagtgtccgccaccttctggcagaacccccggaaccacttcagatgccaggtgcagttctacggcctgagcgagaacgacgagtggacccaggacagagccaagcccgtgacccagatcgtgtctgccgaagcctggggcagagccgatgatgtgattaagatccactggcaggaaaagaagtccaacaccatcctgggcagccaggaaggcaacaccatgaagaccaacgacacctacatgaagttcagctggctgaccgtgcccgagaagtccctggacaaagaacacagatgcatcgtgcggcacgaaaacaacaagaacggcgtggaccaggaaatcatcttcccacccatcaagaccgatgtgattacaatggaccccaaggacaactgctccaaggacgccaacgataccctgctgctccagctgaccaacaccagcgcctactacatgtacttgttgctgctgctgaagtccgtggtgtacttcgccatcatcacatgctgcctgctgatggctatggtcaagcggaaggacagccgggga

SEQ ID NO: 6862 - DNA, 3000 bp, synthetic construct
  source 1..3000: mol_type = other DNA
atggccttaccagtgaccgccttgctcctgccgctggccttgctgctccacgccgccaggccggaagtgcagctggttgaatctggcggaggactggttcagcctggcggatctctgagactgtcttgtgccgccagcggcttcagcttcagcgacttttggatgagctgggtccgacaggcccctggcaaaggacttgaatgggtcgccacaatcagccaggccggcagcgagaaggactacgtggactctgtgaagggcagattcaccatcagccgggacaacgccaagaagtccctgtacctccagatgaacagcctgagagccgaggacaccgccgtgtactattgtgcctctggcgtgtacagcttcgactacagaggccagggcaccctggtcacagtctcttctggtaccggcggaggcggatctggcggcggaggtagcggtggcggaggatctgaattcgacatccagatgacccagagccccagcagcctgtctgccagcgtgggcgacagagtgaccatcacctgtagagccagccagagcatcagcagctacctgaactggtatcagcagaagcccggcaaggcccccaaactgctgatctacgccgtgtccacactccagagcggcgtgcccagcagattttctggcagcggctccggcaccgacttcaccctgacaatcagctccctccagcccgaggacttcgccacctactactgtcagcagagcggcaccttccctcccaccacatttggacagggcaccaaggtggaaatcaagagactcgagatccagaaccctgatcctgccgtgtaccagctgcgggatagcaagagcagcgacaagagcgtgtgtctgttcaccgacttcgacagccagaccaacgtgtcccagagcaaggactccgacgtgtacatcaccgataagtgcgtgctggacatgcggagcatggacttcaagagcaactccgccgtggcctggtccaacaagtccgatttcgcctgcgccaacgccttcaacaacagcattatccccgaggacacattcttcccaagccccgagagcagcgactccaccgaccacgtgaagcccaaagagacagagaacaccaagcagcccagcaagagctgccacaagcccaaggccatcgtgcacaccgagaaagtgaacatgatgagcctgaccgtgctgggcctgcggatgctgttcgccaaaaccgtggccgtgaacttcctgctgaccgccaagctgttcttcctcctcaccgcccgcgccaagagaagcggatctggcgtgaagcagaccctgaatttcgacctgctgaagctggctggcgacgtggaatccaacccaggccctactagtatggactggatttggcgcatccttttccttgtcggcgctgctaccggcgcgcattccgggccccagctccagctgcaagagtctggacctggcctggtcaagcctagcgagacactgagcctgacctgtaccgtgtccggcgatagcatcagcagcggcgattactactggggctggatcagacagcctcctggcaaaggactggaatggatcggccacatctactacagcggcgtgacctactacaaccccagcctgaagtccagagtgaccatcagcgtggacaccagccggaaccagttctccctgaagctgtctagcgtgacagccgccgataccgccgtgtactactgcaccagagaggacagcagcaactggcggagtagaggccagggaacactggtcacagttagctctggatccggcggaggcggaagtggaggcggaggatctggcggcggaggctctttcgaacaggtgcaactgctggaatctggcggcggactggtgcagcctggcggatctctgagactgagctgtgccgccagcggcttcaccttcagcagccacggaatgcactgggtgcgccaggcccctggaaagggactggaatgggtgtccgtgatctccggcagcggcagcaataccggctacgccgatagcgtgaagggccggttcaccatcagccgggacaacagcaagaacaccctgtacctccagatgaacagcctgcgggccgaggacaccgccgtgtactattgtgccagacagtggggcagctacgccttcgattcttggggccagggcaccctcgtgaccgtgtcatctacgcgtgaggacctgaagaacgtgttcccacctgaggtggccgtgttcgagcctagcgaggccgagatcagccacacccagaaagccaccctcgtgtgcctggctaccggcttctaccccgaccatgtggaactgtcttggtgggtcaacggcaaagaggtgcacagcggcgtgtgtaccgacccccagccactgaaagaacagcccgccctgaacgacagccggtactgcctgagcagcagactgagagtgtccgccaccttctggcagaacccccggaaccacttcagatgccaggtgcagttctacggcctgagcgagaacgacgagtggacccaggacagagccaagcccgtgacccagatcgtgtctgccgaagcctggggcagagccgatgatgtgattaagatccactggcaggaaaagaagtccaacaccatcctgggcagccaggaaggcaacaccatgaagaccaacgacacctacatgaagttcagctggctgaccgtgcccgagaagtccctggacaaagaacacagatgcatcgtgcggcacgaaaacaacaagaacggcgtggaccaggaaatcatcttcccacccatcaagaccgatgtgattacaatggaccccaaggacaactgctccaaggacgccaacgataccctgctgctccagctgaccaacaccagcgcctactacatgtacttgttgctgctgctgaagtccgtggtgtacttcgccatcatcacatgctgcctgctgatggctatggtcaagcggaaggacagccgggga

SEQ ID NO: 6863 - DNA, 3030 bp, synthetic construct
  source 1..3030: mol_type = other DNA
atggccttaccagtgaccgccttgctcctgccgctggccttgctgctccacgccgccaggccggaagtgcagctggttgaatctggcggaggactggttcagcctggcggatctctgagactgtcttgtgccgccagcggcttcagcttcagcgacttttggatgagctgggtccgacaggcccctggcaaaggacttgaatgggtcgccacaatcagccaggccggcagcgagaaggactacgtggactctgtgaagggcagattcaccatcagccgggacaacgccaagaagtccctgtacctccagatgaacagcctgagagccgaggacaccgccgtgtactattgtgcctctggcgtgtacagcttcgactacagaggccagggcaccctggtcacagtctcttctggtaccggcggaggcggatctggcggcggaggtagcggtggcggaggatctgaattcgacatcgtgatgagccagagccctagcagcctggccgtgtccgtgggcgagaaagtgaccatgagctgcaagagcagccagtccctgctgcacagcagcaaccagaagaactacctggcctggtatcagcagaagcccggccagtcccccaaggtgctgatctactgggccagcaccagagaaagcggcgtgcccgatagattcaccggcagcggctctggcaccgacttcaccctgaccatcaccagcgtgaagtccgaggacctggctgtgtactactgccagcagtattacagctacccctggaccttcggcggaggcacccggctggaaatcaaaagactcgagatccagaaccctgatcctgccgtgtaccagctgcgggatagcaagagcagcgacaagagcgtgtgtctgttcaccgacttcgacagccagaccaacgtgtcccagagcaaggactccgacgtgtacatcaccgataagtgcgtgctggacatgcggagcatggacttcaagagcaactccgccgtggcctggtccaacaagtccgatttcgcctgcgccaacgccttcaacaacagcattatccccgaggacacattcttcccaagccccgagagcagcgactccaccgaccacgtgaagcccaaagagacagagaacaccaagcagcccagcaagagctgccacaagcccaaggccatcgtgcacaccgagaaagtgaacatgatgagcctgaccgtgctgggcctgcggatgctgttcgccaaaaccgtggccgtgaacttcctgctgaccgccaagctgttcttcctcctcaccgcccgcgccaagagaagcggatctggcgtgaagcagaccctgaatttcgacctgctgaagctggctggcgacgtggaatccaacccaggccctactagtatggactggatttggcgcatccttttccttgtcggcgctgctaccggcgcgcattccgggccccagctccagctgcaagagtctggacctggcctggtcaagcctagcgagacactgagcctgacctgtaccgtgtccggcgatagcatcagcagcggcgattactactggggctggatcagacagcctcctggcaaaggactggaatggatcggccacatctactacagcggcgtgacctactacaaccccagcctgaagtccagagtgaccatcagcgtggacaccagccggaaccagttctccctgaagctgtctagcgtgacagccgccgataccgccgtgtactactgcaccagagaggacagcagcaactggcggagtagaggccagggaacactggtcacagttagctctggatccggcggaggcggaagtggaggcggaggatctggcggcggaggctctttcgaagaagtgcaactccagcagagcgtggccgagcttgtgaagcctggcgcttccgtgaagatgtcctgcaaggtgtccggctacaccctgacagaccacaccatccactggatgaagcagcggcctgagcagggcctggaatggatcggctacatctaccccagggacggcatcaccggctacaacgagaagttcaagggcaaggccacactgaccgccgacaccagcagcagcacagcctacatgcaactgaacagcctgaccagcgaggacagcgccgtgtacttctgtgccagatggggctacagctacagaaactacgcctactactacgactactggggccagggcacaaccctgaccgtgtctagtacgcgtgaggacctgaagaacgtgttcccacctgaggtggccgtgttcgagcctagcgaggccgagatcagccacacccagaaagccaccctcgtgtgcctggctaccggcttctaccccgaccatgtggaactgtcttggtgggtcaacggcaaagaggtgcacagcggcgtgtgtaccgacccccagccactgaaagaacagcccgccctgaacgacagccggtactgcctgagcagcagactgagagtgtccgccaccttctggcagaacccccggaaccacttcagatgccaggtgcagttctacggcctgagcgagaacgacgagtggacccaggacagagccaagcccgtgacccagatcgtgtctgccgaagcctggggcagagccgatgatgtgattaagatccactggcaggaaaagaagtccaacaccatcctgggcagccaggaaggcaacaccatgaagaccaacgacacctacatgaagttcagctggctgaccgtgcccgagaagtccctggacaaagaacacagatgcatcgtgcggcacgaaaacaacaagaacggcgtggaccaggaaatcatcttcccacccatcaagaccgatgtgattacaatggaccccaaggacaactgctccaaggacgccaacgataccctgctgctccagctgaccaacaccagcgcctactacatgtacttgttgctgctgctgaagtccgtggtgtacttcgccatcatcacatgctgcctgctgatggctatggtcaagcggaaggacagccgggga

SEQ ID NO: 6864 - DNA, 3021 bp, synthetic construct
  source 1..3021: mol_type = other DNA
atggccttaccagtgaccgccttgctcctgccgctggccttgctgctccacgccgccaggccggaagtgcagctggttgaatctggcggaggactggttcagcctggcggatctctgagactgtcttgtgccgccagcggcttcagcttcagcgacttttggatgagctgggtccgacaggcccctggcaaaggacttgaatgggtcgccacaatcagccaggccggcagcgagaaggactacgtggactctgtgaagggcagattcaccatcagccgggacaacgccaagaagtccctgtacctccagatgaacagcctgagagccgaggacaccgccgtgtactattgtgcctctggcgtgtacagcttcgactacagaggccagggcaccctggtcacagtctcttctggtaccggcggaggcggatctggcggcggaggtagcggtggcggaggatctgaattcgagatcgtgctgacacagagccctggcaccctgagcctgtctccaggcgaaagagccacactgagctgtcgggccagccagagcgtgtccagctcttacctggcctggtatcagcagaagcccggccaggctccccggctgctgatctacggaacaagcagcagagccaccggcatccccgacagattttctggcagcggctccggcaccgacttcaccctgacaatcagcagactggaacccgaggacttcgccgtgtactactgccagcagtacggcagcagccccttcacctttggcggaggcaccaaggtggaaatcaagagactcgagatccagaaccctgatcctgccgtgtaccagctgcgggatagcaagagcagcgacaagagcgtgtgtctgttcaccgacttcgacagccagaccaacgtgtcccagagcaaggactccgacgtgtacatcaccgataagtgcgtgctggacatgcggagcatggacttcaagagcaactccgccgtggcctggtccaacaagtccgatttcgcctgcgccaacgccttcaacaacagcattatccccgaggacacattcttcccaagccccgagagcagcgactccaccgaccacgtgaagcccaaagagacagagaacaccaagcagcccagcaagagctgccacaagcccaaggccatcgtgcacaccgagaaagtgaacatgatgagcctgaccgtgctgggcctgcggatgctgttcgccaaaaccgtggccgtgaacttcctgctgaccgccaagctgttcttcctcctcaccgcccgcgccaagagaagcggatctggcgtgaagcagaccctgaatttcgacctgctgaagctggctggcgacgtggaatccaacccaggccctactagtatggactggatttggcgcatccttttccttgtcggcgctgctaccggcgcgcattccgggccccagctccagctgcaagagtctggacctggcctggtcaagcctagcgagacactgagcctgacctgtaccgtgtccggcgatagcatcagcagcggcgattactactggggctggatcagacagcctcctggcaaaggactggaatggatcggccacatctactacagcggcgtgacctactacaaccccagcctgaagtccagagtgaccatcagcgtggacaccagccggaaccagttctccctgaagctgtctagcgtgacagccgccgataccgccgtgtactactgcaccagagaggacagcagcaactggcggagtagaggccagggaacactggtcacagttagctctggatccggcggaggcggaagtggaggcggaggatctggcggcggaggctctttcgaacaggtgcaactccaggaatctggccccggactggctaagcccagcgagacactgagcctgacctgtaccgtgtccggcgacagcatcaccagctactactggtcctggatcagacagccccctggcaagggcctggaatggatcggctacatctactacagcggcagcaccaactacaaccccagcctgaagtccagagtgaccatcagcgtggacaccagcaagaaccagttctccctgaagctgagcagcgtgacagccgccgacaccgccgtgtattattgcgccagagatcagcggagaatcgccgctgccggcacccacttttacggcatggatgtgtggggccagggcaccaccgtgaccgtgtcatctacgcgtgaggacctgaagaacgtgttcccacctgaggtggccgtgttcgagcctagcgaggccgagatcagccacacccagaaagccaccctcgtgtgcctggctaccggcttctaccccgaccatgtggaactgtcttggtgggtcaacggcaaagaggtgcacagcggcgtgtgtaccgacccccagccactgaaagaacagcccgccctgaacgacagccggtactgcctgagcagcagactgagagtgtccgccaccttctggcagaacccccggaaccacttcagatgccaggtgcagttctacggcctgagcgagaacgacgagtggacccaggacagagccaagcccgtgacccagatcgtgtctgccgaagcctggggcagagccgatgatgtgattaagatccactggcaggaaaagaagtccaacaccatcctgggcagccaggaaggcaacaccatgaagaccaacgacacctacatgaagttcagctggctgaccgtgcccgagaagtccctggacaaagaacacagatgcatcgtgcggcacgaaaacaacaagaacggcgtggaccaggaaatcatcttcccacccatcaagaccgatgtgattacaatggaccccaaggacaactgctccaaggacgccaacgataccctgctgctccagctgaccaacaccagcgcctactacatgtacttgttgctgctgctgaagtccgtggtgtacttcgccatcatcacatgctgcctgctgatggctatggtcaagcggaaggacagccgggga

SEQ ID NO: 6865 - DNA, 2997 bp, synthetic construct
  source 1..2997: mol_type = other DNA
atggccttaccagtgaccgccttgctcctgccgctggccttgctgctccacgccgccaggccggaagtgcagctggttgaatctggcggaggactggttcagcctggcggatctctgagactgtcttgtgccgccagcggcttcagcttcagcgacttttggatgagctgggtccgacaggcccctggcaaaggacttgaatgggtcgccacaatcagccaggccggcagcgagaaggactacgtggactctgtgaagggcagattcaccatcagccgggacaacgccaagaagtccctgtacctccagatgaacagcctgagagccgaggacaccgccgtgtactattgtgcctctggcgtgtacagcttcgactacagaggccagggcaccctggtcacagtctcttctggtaccggcggaggcggatctggcggcggaggtagcggtggcggaggatctgaattcgacatcctgctgacccagagccccgtgatcctgtccgtgtctcctggcgagagagtgtccttcagctgtcgggccagccagagcatcggcaccaacatccactggtatcagcagcggaccaacggcagccccagactgctgattaagtacgccagcgagtccatcagcggcatccccagcagattttccggcagcggctccggcaccgacttcaccctgagcatcaacagcgtggaaagcgaggacattgccgactactactgccagcagaacaacaactggcccaccaccttcggagccggcaccaagctggaactgaagctcgagatccagaaccctgatcctgccgtgtaccagctgcgggatagcaagagcagcgacaagagcgtgtgtctgttcaccgacttcgacagccagaccaacgtgtcccagagcaaggactccgacgtgtacatcaccgataagtgcgtgctggacatgcggagcatggacttcaagagcaactccgccgtggcctggtccaacaagtccgatttcgcctgcgccaacgccttcaacaacagcattatccccgaggacacattcttcccaagccccgagagcagcgactccaccgaccacgtgaagcccaaagagacagagaacaccaagcagcccagcaagagctgccacaagcccaaggccatcgtgcacaccgagaaagtgaacatgatgagcctgaccgtgctgggcctgcggatgctgttcgccaaaaccgtggccgtgaacttcctgctgaccgccaagctgttcttcctcctcaccgcccgcgccaagagaagcggatctggcgtgaagcagaccctgaatttcgacctgctgaagctggctggcgacgtggaatccaacccaggccctactagtatggactggatttggcgcatccttttccttgtcggcgctgctaccggcgcgcattccgggccccagctccagctgcaagagtctggacctggcctggtcaagcctagcgagacactgagcctgacctgtaccgtgtccggcgatagcatcagcagcggcgattactactggggctggatcagacagcctcctggcaaaggactggaatggatcggccacatctactacagcggcgtgacctactacaaccccagcctgaagtccagagtgaccatcagcgtggacaccagccggaaccagttctccctgaagctgtctagcgtgacagccgccgataccgccgtgtactactgcaccagagaggacagcagcaactggcggagtagaggccagggaacactggtcacagttagctctggatccggcggaggcggaagtggaggcggaggatctggcggcggaggctctttcgaacaggtgcagctgaagcagagcggacctggcctggtgcagcctagccagagcctgtccatcacctgtaccgtgtccggcttcagcctgaccaactacggcgtgcactgggtgcgccagagccctggaaaaggactggaatggctgggagtgatttggagcggcggcaacaccgactacaacacccccttcaccagcagactgtctatcaacaaggacaacagcaagagccaggtgttcttcaagatgaacagcctccagagcaacgacaccgccatctactactgtgctagagccctgacctactatgactacgagttcgcctactggggccagggcacactcgtgacagtgtctgctacgcgtgaggacctgaagaacgtgttcccacctgaggtggccgtgttcgagcctagcgaggccgagatcagccacacccagaaagccaccctcgtgtgcctggctaccggcttctaccccgaccatgtggaactgtcttggtgggtcaacggcaaagaggtgcacagcggcgtgtgtaccgacccccagccactgaaagaacagcccgccctgaacgacagccggtactgcctgagcagcagactgagagtgtccgccaccttctggcagaacccccggaaccacttcagatgccaggtgcagttctacggcctgagcgagaacgacgagtggacccaggacagagccaagcccgtgacccagatcgtgtctgccgaagcctggggcagagccgatgatgtgattaagatccactggcaggaaaagaagtccaacaccatcctgggcagccaggaaggcaacaccatgaagaccaacgacacctacatgaagttcagctggctgaccgtgcccgagaagtccctggacaaagaacacagatgcatcgtgcggcacgaaaacaacaagaacggcgtggaccaggaaatcatcttcccacccatcaagaccgatgtgattacaatggaccccaaggacaactgctccaaggacgccaacgataccctgctgctccagctgaccaacaccagcgcctactacatgtacttgttgctgctgctgaagtccgtggtgtacttcgccatcatcacatgctgcctgctgatggctatggtcaagcggaaggacagccgggga

SEQ ID NO: 6866 - DNA, 2976 bp, synthetic construct
  source 1..2976: mol_type = other DNA
atggccttaccagtgaccgccttgctcctgccgctggccttgctgctccacgccgccaggccggaagtgcagctggttgaatctggcggaggactggttcagcctggcggatctctgagactgtcttgtgccgccagcggcttcagcttcagcgacttttggatgagctgggtccgacaggcccctggcaaaggacttgaatgggtcgccacaatcagccaggccggcagcgagaaggactacgtggactctgtgaagggcagattcaccatcagccgggacaacgccaagaagtccctgtacctccagatgaacagcctgagagccgaggacaccgccgtgtactattgtgcctctggcgtgtacagcttcgactacagaggccagggcaccctggtcacagtctcttctggtaccggcggaggcggatctggcggcggaggtagcggtggcggaggatctgaattcatgacccagagccccaagttcctgctggtgtctgccggcgacagagtgaccctgacatgcaaggccagccagagcgtgaacaacgacgtgtactggtatcagcaggaacccggccagtcccccaagctgctgatctactgggccagcaccagagaaagcggcgtgcccgatagattcaccggcagcggctctggcaccgacttcaccctgacaatcagcagcgtgcaggccgaggacctggccgtgtactactgcaagcagagctacaacctgtacaccttcggcggaggcaccaagctggaaatcaagagactcgagatccagaaccctgatcctgccgtgtaccagctgcgggatagcaagagcagcgacaagagcgtgtgtctgttcaccgacttcgacagccagaccaacgtgtcccagagcaaggactccgacgtgtacatcaccgataagtgcgtgctggacatgcggagcatggacttcaagagcaactccgccgtggcctggtccaacaagtccgatttcgcctgcgccaacgccttcaacaacagcattatccccgaggacacattcttcccaagccccgagagcagcgactccaccgaccacgtgaagcccaaagagacagagaacaccaagcagcccagcaagagctgccacaagcccaaggccatcgtgcacaccgagaaagtgaacatgatgagcctgaccgtgctgggcctgcggatgctgttcgccaaaaccgtggccgtgaacttcctgctgaccgccaagctgttcttcctcctcaccgcccgcgccaagagaagcggatctggcgtgaagcagaccctgaatttcgacctgctgaagctggctggcgacgtggaatccaacccaggccctactagtatggactggatttggcgcatccttttccttgtcggcgctgctaccggcgcgcattccgggccccagctccagctgcaagagtctggacctggcctggtcaagcctagcgagacactgagcctgacctgtaccgtgtccggcgatagcatcagcagcggcgattactactggggctggatcagacagcctcctggcaaaggactggaatggatcggccacatctactacagcggcgtgacctactacaaccccagcctgaagtccagagtgaccatcagcgtggacaccagccggaaccagttctccctgaagctgtctagcgtgacagccgccgataccgccgtgtactactgcaccagagaggacagcagcaactggcggagtagaggccagggaacactggtcacagttagctctggatccggcggaggcggaagtggaggcggaggatctggcggcggaggctctttcgaagaatctggaagaggactggtgcagcctggcggcagcagaaagctgtcttgtgccgccagcggcttcaccttcagcaccagcggaatgcactgggtgcgccaggcccctgagaagggactggaatgggtggcctacatcagctccggcagcaccaccatctaccacgccgataccgtgaagggccggttcaccatcagccgggacaaccccaagaataccctgttcctccagatgaccagcctgcggagcgaggacaccgccatgtactattgctgcgccagaagcggccagttcggcaactacttcgactactggggccagggcaccaccctgaccgtgtcatctacgcgtgaggacctgaagaacgtgttcccacctgaggtggccgtgttcgagcctagcgaggccgagatcagccacacccagaaagccaccctcgtgtgcctggctaccggcttctaccccgaccatgtggaactgtcttggtgggtcaacggcaaagaggtgcacagcggcgtgtgtaccgacccccagccactgaaagaacagcccgccctgaacgacagccggtactgcctgagcagcagactgagagtgtccgccaccttctggcagaacccccggaaccacttcagatgccaggtgcagttctacggcctgagcgagaacgacgagtggacccaggacagagccaagcccgtgacccagatcgtgtctgccgaagcctggggcagagccgatgatgtgattaagatccactggcaggaaaagaagtccaacaccatcctgggcagccaggaaggcaacaccatgaagaccaacgacacctacatgaagttcagctggctgaccgtgcccgagaagtccctggacaaagaacacagatgcatcgtgcggcacgaaaacaacaagaacggcgtggaccaggaaatcatcttcccacccatcaagaccgatgtgattacaatggaccccaaggacaactgctccaaggacgccaacgataccctgctgctccagctgaccaacaccagcgcctactacatgtacttgttgctgctgctgaagtccgtggtgtacttcgccatcatcacatgctgcctgctgatggctatggtcaagcggaaggacagccgggga

SEQ ID NO: 6867 - DNA, 2991 bp, synthetic construct
  source 1..2991: mol_type = other DNA
atggccttaccagtgaccgccttgctcctgccgctggccttgctgctccacgccgccaggccggaagtgcagctggttgaatctggcggaggactggttcagcctggcggatctctgagactgtcttgtgccgccagcggcttcagcttcagcgacttttggatgagctgggtccgacaggcccctggcaaaggacttgaatgggtcgccacaatcagccaggccggcagcgagaaggactacgtggactctgtgaagggcagattcaccatcagccgggacaacgccaagaagtccctgtacctccagatgaacagcctgagagccgaggacaccgccgtgtactattgtgcctctggcgtgtacagcttcgactacagaggccagggcaccctggtcacagtctcttctggtaccggcggaggcggatctggcggcggaggtagcggtggcggaggatctgaattccagagcccatctagcctggctgtgtctgccggcgagaaagtgaccatgagctgcaagagcagccagagcctgctgaacagccggacccggaagaactacctggcctggtatcagcagaagcccggccagagccccaagctgctgatctactgggccagcaccagagaaagcggcgtgcccgatagattcaccggctctggcagcggcaccgacttcaccctgacaatcagcagcgtgcaggccgaggacctggccgtgtactactgcaagcagagcaacctgtacaccttcggcggaggcaccaagctggaaatcaagctcgagatccagaaccctgatcctgccgtgtaccagctgcgggatagcaagagcagcgacaagagcgtgtgtctgttcaccgacttcgacagccagaccaacgtgtcccagagcaaggactccgacgtgtacatcaccgataagtgcgtgctggacatgcggagcatggacttcaagagcaactccgccgtggcctggtccaacaagtccgatttcgcctgcgccaacgccttcaacaacagcattatccccgaggacacattcttcccaagccccgagagcagcgactccaccgaccacgtgaagcccaaagagacagagaacaccaagcagcccagcaagagctgccacaagcccaaggccatcgtgcacaccgagaaagtgaacatgatgagcctgaccgtgctgggcctgcggatgctgttcgccaaaaccgtggccgtgaacttcctgctgaccgccaagctgttcttcctcctcaccgcccgcgccaagagaagcggatctggcgtgaagcagaccctgaatttcgacctgctgaagctggctggcgacgtggaatccaacccaggccctactagtatggactggatttggcgcatccttttccttgtcggcgctgctaccggcgcgcattccgggccccagctccagctgcaagagtctggacctggcctggtcaagcctagcgagacactgagcctgacctgtaccgtgtccggcgatagcatcagcagcggcgattactactggggctggatcagacagcctcctggcaaaggactggaatggatcggccacatctactacagcggcgtgacctactacaaccccagcctgaagtccagagtgaccatcagcgtggacaccagccggaaccagttctccctgaagctgtctagcgtgacagccgccgataccgccgtgtactactgcaccagagaggacagcagcaactggcggagtagaggccagggaacactggtcacagttagctctggatccggcggaggcggaagtggaggcggaggatctggcggcggaggctctttcgaacaggtgcagctggaagagtctggacccgagcttgtgaagcctggggccagcgtgaagctgtcctgtaaagccagcggctacaccttcaccgagtacatcatccactgggtcaagcagcggagcggccagggcctggaatggatcggctggttttaccctggctccggcagcatcaagtacaacgagaagttcaaggacaaggccaccctgaccgccgacaagtccagcagcaccgtgtacatggaactgagcggcctgaccagcgaggacagcgccgtgtatttctgcgccagacacgacggctacagctacttcgactattggggccagggcaccacactgaccgtgtcctctacgcgtgaggacctgaagaacgtgttcccacctgaggtggccgtgttcgagcctagcgaggccgagatcagccacacccagaaagccaccctcgtgtgcctggctaccggcttctaccccgaccatgtggaactgtcttggtgggtcaacggcaaagaggtgcacagcggcgtgtgtaccgacccccagccactgaaagaacagcccgccctgaacgacagccggtactgcctgagcagcagactgagagtgtccgccaccttctggcagaacccccggaaccacttcagatgccaggtgcagttctacggcctgagcgagaacgacgagtggacccaggacagagccaagcccgtgacccagatcgtgtctgccgaagcctggggcagagccgatgatgtgattaagatccactggcaggaaaagaagtccaacaccatcctgggcagccaggaaggcaacaccatgaagaccaacgacacctacatgaagttcagctggctgaccgtgcccgagaagtccctggacaaagaacacagatgcatcgtgcggcacgaaaacaacaagaacggcgtggaccaggaaatcatcttcccacccatcaagaccgatgtgattacaatggaccccaaggacaactgctccaaggacgccaacgataccctgctgctccagctgaccaacaccagcgcctactacatgtacttgttgctgctgctgaagtccgtggtgtacttcgccatcatcacatgctgcctgctgatggctatggtcaagcggaaggacagccgggga

SEQ ID NO: 6868 - DNA, 3000 bp, synthetic construct
  source 1..3000: mol_type = other DNA
atggccttaccagtgaccgccttgctcctgccgctggccttgctgctccacgccgccaggccggaagtgcagctggttgaatctggcggaggactggttcagcctggcggatctctgagactgtcttgtgccgccagcggcttcagcttcagcgacttttggatgagctgggtccgacaggcccctggcaaaggacttgaatgggtcgccacaatcagccaggccggcagcgagaaggactacgtggactctgtgaagggcagattcaccatcagccgggacaacgccaagaagtccctgtacctccagatgaacagcctgagagccgaggacaccgccgtgtactattgtgcctctggcgtgtacagcttcgactacagaggccagggcaccctggtcacagtctcttctggtaccggcggaggcggatctggcggcggaggtagcggtggcggaggatctgaattcgacatccagatgacccagagccccagcagcctgtctgcctctctgggcgagagagtgtccctgacctgtcgggccacacaggaactgagcggctacctgtcttggctgcagcagaagcccgacggcaccatcaagcggctgatctacgccgccagcaccctggatagcggcgtgcccaagagattcagcggcaacagaagcggcagcgactacagcctgaccatcagctccctggaaagcgaggacttcgccgactactactgcctgcagtacgccatctacccctacaccttcggcggaggcaccaagctggaaatcaagctcgagatccagaaccctgatcctgccgtgtaccagctgcgggatagcaagagcagcgacaagagcgtgtgtctgttcaccgacttcgacagccagaccaacgtgtcccagagcaaggactccgacgtgtacatcaccgataagtgcgtgctggacatgcggagcatggacttcaagagcaactccgccgtggcctggtccaacaagtccgatttcgcctgcgccaacgccttcaacaacagcattatccccgaggacacattcttcccaagccccgagagcagcgactccaccgaccacgtgaagcccaaagagacagagaacaccaagcagcccagcaagagctgccacaagcccaaggccatcgtgcacaccgagaaagtgaacatgatgagcctgaccgtgctgggcctgcggatgctgttcgccaaaaccgtggccgtgaacttcctgctgaccgccaagctgttcttcctcctcaccgcccgcgccaagagaagcggatctggcgtgaagcagaccctgaatttcgacctgctgaagctggctggcgacgtggaatccaacccaggccctactagtatggactggatttggcgcatccttttccttgtcggcgctgctaccggcgcgcattccgggccccagctccagctgcaagagtctggacctggcctggtcaagcctagcgagacactgagcctgacctgtaccgtgtccggcgatagcatcagcagcggcgattactactggggctggatcagacagcctcctggcaaaggactggaatggatcggccacatctactacagcggcgtgacctactacaaccccagcctgaagtccagagtgaccatcagcgtggacaccagccggaaccagttctccctgaagctgtctagcgtgacagccgccgataccgccgtgtactactgcaccagagaggacagcagcaactggcggagtagaggccagggaacactggtcacagttagctctggatccggcggaggcggaagtggaggcggaggatctggcggcggaggctctttcgaagaggtgcaactgcagcagtctggccccgagcttgtgaagcctggcgcctccgtgaagatgagctgcaaggccagcggctacacctttaccagctacttcatccactgggtcaagcagaaacccggccagggcctggaatggatcggcttcatcaacccttacaacgacggcagcaagtacaacgagaagttcaagggcaaggccaccctgaccagcgacaagagcagcagcaccgcctacatggaactgtccagcctgacatccgaggacagcgccgtgtactactgcaccagggacgacggctactacggctacgccatggactactggggccagggaacaagcgtcaccgtgtcctctacgcgtgaggacctgaagaacgtgttcccacctgaggtggccgtgttcgagcctagcgaggccgagatcagccacacccagaaagccaccctcgtgtgcctggctaccggcttctaccccgaccatgtggaactgtcttggtgggtcaacggcaaagaggtgcacagcggcgtgtgtaccgacccccagccactgaaagaacagcccgccctgaacgacagccggtactgcctgagcagcagactgagagtgtccgccaccttctggcagaacccccggaaccacttcagatgccaggtgcagttctacggcctgagcgagaacgacgagtggacccaggacagagccaagcccgtgacccagatcgtgtctgccgaagcctggggcagagccgatgatgtgattaagatccactggcaggaaaagaagtccaacaccatcctgggcagccaggaaggcaacaccatgaagaccaacgacacctacatgaagttcagctggctgaccgtgcccgagaagtccctggacaaagaacacagatgcatcgtgcggcacgaaaacaacaagaacggcgtggaccaggaaatcatcttcccacccatcaagaccgatgtgattacaatggaccccaaggacaactgctccaaggacgccaacgataccctgctgctccagctgaccaacaccagcgcctactacatgtacttgttgctgctgctgaagtccgtggtgtacttcgccatcatcacatgctgcctgctgatggctatggtcaagcggaaggacagccgggga

SEQ ID NO: 6869 - DNA, 3015 bp, synthetic construct
  source 1..3015: mol_type = other DNA
atggccttaccagtgaccgccttgctcctgccgctggccttgctgctccacgccgccaggccggaagtgcagctggttgaatctggcggaggactggttcagcctggcggatctctgagactgtcttgtgccgccagcggcttcagcttcagcgacttttggatgagctgggtccgacaggcccctggcaaaggacttgaatgggtcgccacaatcagccaggccggcagcgagaaggactacgtggactctgtgaagggcagattcaccatcagccgggacaacgccaagaagtccctgtacctccagatgaacagcctgagagccgaggacaccgccgtgtactattgtgcctctggcgtgtacagcttcgactacagaggccagggcaccctggtcacagtctcttctggtaccggcggaggcggatctggcggcggaggtagcggtggcggaggatctgaattcgacaccatcgtgctgacacagagccctgcttccctggccgtgtccctgggacagagagccaccatctcttgcagagccagcgagagcgtggacagctacggcaacagcttcatgcactggtatcagcagaagcccggccagccccccaagctgctgatctacctggcctccaacctggaaagcggcgtgcccgccagattttctggcagcggcagcagaaccgacttcaccctgaccatcgaccccgtggaagccgatgatgccgccacctactactgccagcagaacaactacgacccctggaccttcggcggaggcaccaagctggaaatcaagctcgagatccagaaccctgatcctgccgtgtaccagctgcgggatagcaagagcagcgacaagagcgtgtgtctgttcaccgacttcgacagccagaccaacgtgtcccagagcaaggactccgacgtgtacatcaccgataagtgcgtgctggacatgcggagcatggacttcaagagcaactccgccgtggcctggtccaacaagtccgatttcgcctgcgccaacgccttcaacaacagcattatccccgaggacacattcttcccaagccccgagagcagcgactccaccgaccacgtgaagcccaaagagacagagaacaccaagcagcccagcaagagctgccacaagcccaaggccatcgtgcacaccgagaaagtgaacatgatgagcctgaccgtgctgggcctgcggatgctgttcgccaaaaccgtggccgtgaacttcctgctgaccgccaagctgttcttcctcctcaccgcccgcgccaagagaagcggatctggcgtgaagcagaccctgaatttcgacctgctgaagctggctggcgacgtggaatccaacccaggccctactagtatggactggatttggcgcatccttttccttgtcggcgctgctaccggcgcgcattccgggccccagctccagctgcaagagtctggacctggcctggtcaagcctagcgagacactgagcctgacctgtaccgtgtccggcgatagcatcagcagcggcgattactactggggctggatcagacagcctcctggcaaaggactggaatggatcggccacatctactacagcggcgtgacctactacaaccccagcctgaagtccagagtgaccatcagcgtggacaccagccggaaccagttctccctgaagctgtctagcgtgacagccgccgataccgccgtgtactactgcaccagagaggacagcagcaactggcggagtagaggccagggaacactggtcacagttagctctggatccggcggaggcggaagtggaggcggaggatctggcggcggaggctctttcgaagaagtgcaactccagcagagcggccctgagcttgtgaagcctggcgcttccgtgaagatgagctgcaaggccagcggctacaccttcaccagctacgtgatgcactgggtcaagcagaaacctggacagggcctggaatggatcggctacatcaacccctacaacgacggcaccaagtacaacgagaagttcaagggcaaggccaccctgacaagcgacaccagcagcagcaccgcctacatggaactgaacagcctgaccagcgaggacagcgccgtgtacttctgcgccagacccatctacttcgacaacgactacttcgattactggggccagggcaccaccctgaaggtgtcctctacgcgtgaggacctgaagaacgtgttcccacctgaggtggccgtgttcgagcctagcgaggccgagatcagccacacccagaaagccaccctcgtgtgcctggctaccggcttctaccccgaccatgtggaactgtcttggtgggtcaacggcaaagaggtgcacagcggcgtgtgtaccgacccccagccactgaaagaacagcccgccctgaacgacagccggtactgcctgagcagcagactgagagtgtccgccaccttctggcagaacccccggaaccacttcagatgccaggtgcagttctacggcctgagcgagaacgacgagtggacccaggacagagccaagcccgtgacccagatcgtgtctgccgaagcctggggcagagccgatgatgtgattaagatccactggcaggaaaagaagtccaacaccatcctgggcagccaggaaggcaacaccatgaagaccaacgacacctacatgaagttcagctggctgaccgtgcccgagaagtccctggacaaagaacacagatgcatcgtgcggcacgaaaacaacaagaacggcgtggaccaggaaatcatcttcccacccatcaagaccgatgtgattacaatggaccccaaggacaactgctccaaggacgccaacgataccctgctgctccagctgaccaacaccagcgcctactacatgtacttgttgctgctgctgaagtccgtggtgtacttcgccatcatcacatgctgcctgctgatggctatggtcaagcggaaggacagccgggga

SEQ ID NO: 6870 - DNA, 3000 bp, synthetic construct
  source 1..3000: mol_type = other DNA
atggccttaccagtgaccgccttgctcctgccgctggccttgctgctccacgccgccaggccggaagtgcagctggttgaatctggcggaggactggttcagcctggcggatctctgagactgtcttgtgccgccagcggcttcagcttcagcgacttttggatgagctgggtccgacaggcccctggcaaaggacttgaatgggtcgccacaatcagccaggccggcagcgagaaggactacgtggactctgtgaagggcagattcaccatcagccgggacaacgccaagaagtccctgtacctccagatgaacagcctgagagccgaggacaccgccgtgtactattgtgcctctggcgtgtacagcttcgactacagaggccagggcaccctggtcacagtctcttctggtaccggcggaggcggatctggcggcggaggtagcggtggcggaggatctgaattcgacatccagatgacccagagccccagcagcctgtctgccagcgtgggcgacagagtgaccatcacatgcaaggccagccaggacgtgggaatcgccgtggcctggtatcagcagaaacccggcaaggtgcccaagctgctgatctactgggccagcaccagacacaccggcgtgcccgatagattttccggcagcggctccggcaccgacttcaccctgacaatcagctccctccagcccgaggacgtggcaacctactactgccagcagtacagcagctacccctacaccttcggccagggcaccaaggtggaaatcaagagactcgagatccagaaccctgatcctgccgtgtaccagctgcgggatagcaagagcagcgacaagagcgtgtgtctgttcaccgacttcgacagccagaccaacgtgtcccagagcaaggactccgacgtgtacatcaccgataagtgcgtgctggacatgcggagcatggacttcaagagcaactccgccgtggcctggtccaacaagtccgatttcgcctgcgccaacgccttcaacaacagcattatccccgaggacacattcttcccaagccccgagagcagcgactccaccgaccacgtgaagcccaaagagacagagaacaccaagcagcccagcaagagctgccacaagcccaaggccatcgtgcacaccgagaaagtgaacatgatgagcctgaccgtgctgggcctgcggatgctgttcgccaaaaccgtggccgtgaacttcctgctgaccgccaagctgttcttcctcctcaccgcccgcgccaagagaagcggatctggcgtgaagcagaccctgaatttcgacctgctgaagctggctggcgacgtggaatccaacccaggccctactagtatggactggatttggcgcatccttttccttgtcggcgctgctaccggcgcgcattccgggccccagctccagctgcaagagtctggacctggcctggtcaagcctagcgagacactgagcctgacctgtaccgtgtccggcgatagcatcagcagcggcgattactactggggctggatcagacagcctcctggcaaaggactggaatggatcggccacatctactacagcggcgtgacctactacaaccccagcctgaagtccagagtgaccatcagcgtggacaccagccggaaccagttctccctgaagctgtctagcgtgacagccgccgataccgccgtgtactactgcaccagagaggacagcagcaactggcggagtagaggccagggaacactggtcacagttagctctggatccggcggaggcggaagtggaggcggaggatctggcggcggaggctctttcgaagaagtgcaactggtggaatcaggcggcggactggtgcagcctggcggatctctgagactgagctgtgccgccagcggcttcgacttcagccggtactggatgagctgggtgcgccaggcccctggcaaaggactggaatggatcggcgagatcaaccccgacagcagcaccatcaactacgcccccagcctgaaggacaagttcatcatcagccgggacaacgccaagaacagcctgtacctccagatgaactccctgcgggccgaggacaccgccgtgtactattgcgccagacccgacggcaactactggtacttcgacgtgtggggccagggaaccctcgtgaccgtgtcatctacgcgtgaggacctgaagaacgtgttcccacctgaggtggccgtgttcgagcctagcgaggccgagatcagccacacccagaaagccaccctcgtgtgcctggctaccggcttctaccccgaccatgtggaactgtcttggtgggtcaacggcaaagaggtgcacagcggcgtgtgtaccgacccccagccactgaaagaacagcccgccctgaacgacagccggtactgcctgagcagcagactgagagtgtccgccaccttctggcagaacccccggaaccacttcagatgccaggtgcagttctacggcctgagcgagaacgacgagtggacccaggacagagccaagcccgtgacccagatcgtgtctgccgaagcctggggcagagccgatgatgtgattaagatccactggcaggaaaagaagtccaacaccatcctgggcagccaggaaggcaacaccatgaagaccaacgacacctacatgaagttcagctggctgaccgtgcccgagaagtccctggacaaagaacacagatgcatcgtgcggcacgaaaacaacaagaacggcgtggaccaggaaatcatcttcccacccatcaagaccgatgtgattacaatggaccccaaggacaactgctccaaggacgccaacgataccctgctgctccagctgaccaacaccagcgcctactacatgtacttgttgctgctgctgaagtccgtggtgtacttcgccatcatcacatgctgcctgctgatggctatggtcaagcggaaggacagccgggga

SEQ ID NO: 6871 - DNA, 3000 bp, synthetic construct
  source 1..3000: mol_type = other DNA
atggccttaccagtgaccgccttgctcctgccgctggccttgctgctccacgccgccaggccggaagtgcagctggttgaatctggcggaggactggttcagcctggcggatctctgagactgtcttgtgccgccagcggcttcagcttcagcgacttttggatgagctgggtccgacaggcccctggcaaaggacttgaatgggtcgccacaatcagccaggccggcagcgagaaggactacgtggactctgtgaagggcagattcaccatcagccgggacaacgccaagaagtccctgtacctccagatgaacagcctgagagccgaggacaccgccgtgtactattgtgcctctggcgtgtacagcttcgactacagaggccagggcaccctggtcacagtctcttctggtaccggcggaggcggatctggcggcggaggtagcggtggcggaggatctgaattcgacatcgtgatgacccagagccagaagagcatgagcaccagcgtgggcgacagagtgagcatcacctgcaaggccagccaggacgtgatcaccggcgtggcctggtaccagcagaagcccggccagagccccaagctgctgatctacagcgccagctacagatacaccggcgtgcccgacagattcaccggcagcggcagcggcaccgacttcaccttcaccatcagcaacgtgcaggccgaggacctggccgtgtactactgccagcagcactacagcacccccctgaccttcggcgccggcaccaagctggagctgaagctcgagatccagaaccctgatcctgccgtgtaccagctgcgggatagcaagagcagcgacaagagcgtgtgtctgttcaccgacttcgacagccagaccaacgtgtcccagagcaaggactccgacgtgtacatcaccgataagtgcgtgctggacatgcggagcatggacttcaagagcaactccgccgtggcctggtccaacaagtccgatttcgcctgcgccaacgccttcaacaacagcattatccccgaggacacattcttcccaagccccgagagcagcgactccaccgaccacgtgaagcccaaagagacagagaacaccaagcagcccagcaagagctgccacaagcccaaggccatcgtgcacaccgagaaagtgaacatgatgagcctgaccgtgctgggcctgcggatgctgttcgccaaaaccgtggccgtgaacttcctgctgaccgccaagctgttcttcctcctcaccgcccgcgccaagagaagcggatctggcgtgaagcagaccctgaatttcgacctgctgaagctggctggcgacgtggaatccaacccaggccctactagtatggactggatttggcgcatccttttccttgtcggcgctgctaccggcgcgcattccgggccccagctccagctgcaagagtctggacctggcctggtcaagcctagcgagacactgagcctgacctgtaccgtgtccggcgatagcatcagcagcggcgattactactggggctggatcagacagcctcctggcaaaggactggaatggatcggccacatctactacagcggcgtgacctactacaaccccagcctgaagtccagagtgaccatcagcgtggacaccagccggaaccagttctccctgaagctgtctagcgtgacagccgccgataccgccgtgtactactgcaccagagaggacagcagcaactggcggagtagaggccagggaacactggtcacagttagctctggatccggcggaggcggaagtggaggcggaggatctggcggcggaggctctttcgaacaggtgcagctgcagcagcccggcgccgagctggtgagacccggcgccagcgtgaagctgagctgcaaggccagcggctacagcttcaccacctactggatgaactgggtgaagcagagacccggccagggcctggagtggatcggcatgatccaccccagcgacagcgagaccagactgaaccagaagttcaaggacaaggccaccctgaccgtggacaagagcagcagcaccgcctacatgcagctgagcagccccaccagcgaggacagcgccgtgtactactgcgccagaagcaccatgatcgccaccagagccatggactactggggccagggcaccagcgtgaccgtgagcagcacgcgtgaggacctgaagaacgtgttcccacctgaggtggccgtgttcgagcctagcgaggccgagatcagccacacccagaaagccaccctcgtgtgcctggctaccggcttctaccccgaccatgtggaactgtcttggtgggtcaacggcaaagaggtgcacagcggcgtgtgtaccgacccccagccactgaaagaacagcccgccctgaacgacagccggtactgcctgagcagcagactgagagtgtccgccaccttctggcagaacccccggaaccacttcagatgccaggtgcagttctacggcctgagcgagaacgacgagtggacccaggacagagccaagcccgtgacccagatcgtgtctgccgaagcctggggcagagccgatgatgtgattaagatccactggcaggaaaagaagtccaacaccatcctgggcagccaggaaggcaacaccatgaagaccaacgacacctacatgaagttcagctggctgaccgtgcccgagaagtccctggacaaagaacacagatgcatcgtgcggcacgaaaacaacaagaacggcgtggaccaggaaatcatcttcccacccatcaagaccgatgtgattacaatggaccccaaggacaactgctccaaggacgccaacgataccctgctgctccagctgaccaacaccagcgcctactacatgtacttgttgctgctgctgaagtccgtggtgtacttcgccatcatcacatgctgcctgctgatggctatggtcaagcggaaggacagccgggga

SEQ ID NO: 6872 - DNA, 3018 bp, synthetic construct
  source 1..3018: mol_type = other DNA
atggccttaccagtgaccgccttgctcctgccgctggccttgctgctccacgccgccaggccggaagtgcagctggttgaatctggcggaggactggttcagcctggcggatctctgagactgtcttgtgccgccagcggcttcagcttcagcgacttttggatgagctgggtccgacaggcccctggcaaaggacttgaatgggtcgccacaatcagccaggccggcagcgagaaggactacgtggactctgtgaagggcagattcaccatcagccgggacaacgccaagaagtccctgtacctccagatgaacagcctgagagccgaggacaccgccgtgtactattgtgcctctggcgtgtacagcttcgactacagaggccagggcaccctggtcacagtctcttctggtaccggcggaggcggatctggcggcggaggtagcggtggcggaggatctgaattccagagcgtgctgacacagcctccatccgtgtctggcgctccaggccagagagtgaccatctcctgtaccggcagcggcagcaacatcggagccccctacgacgtgtcctggtatcagcaactgcctggcaccgcccccaagctgctgatctaccacaacaacaagcggcccagcggcgtgcccgatagattcagcggctctaagagcggcaccagcgccagcctggctatcactggactccaggccgaggacgaggccgactactactgtgccacagtggaagccggcctgagcggctctgtgtttggcggcggaacaaagctgaccgtgctgggagctctcgagatccagaaccctgatcctgccgtgtaccagctgcgggatagcaagagcagcgacaagagcgtgtgtctgttcaccgacttcgacagccagaccaacgtgtcccagagcaaggactccgacgtgtacatcaccgataagtgcgtgctggacatgcggagcatggacttcaagagcaactccgccgtggcctggtccaacaagtccgatttcgcctgcgccaacgccttcaacaacagcattatccccgaggacacattcttcccaagccccgagagcagcgactccaccgaccacgtgaagcccaaagagacagagaacaccaagcagcccagcaagagctgccacaagcccaaggccatcgtgcacaccgagaaagtgaacatgatgagcctgaccgtgctgggcctgcggatgctgttcgccaaaaccgtggccgtgaacttcctgctgaccgccaagctgttcttcctcctcaccgcccgcgccaagagaagcggatctggcgtgaagcagaccctgaatttcgacctgctgaagctggctggcgacgtggaatccaacccaggccctactagtatggactggatttggcgcatccttttccttgtcggcgctgctaccggcgcgcattccgggccccagctccagctgcaagagtctggacctggcctggtcaagcctagcgagacactgagcctgacctgtaccgtgtccggcgatagcatcagcagcggcgattactactggggctggatcagacagcctcctggcaaaggactggaatggatcggccacatctactacagcggcgtgacctactacaaccccagcctgaagtccagagtgaccatcagcgtggacaccagccggaaccagttctccctgaagctgtctagcgtgacagccgccgataccgccgtgtactactgcaccagagaggacagcagcaactggcggagtagaggccagggaacactggtcacagttagctctggatccggcggaggcggaagtggaggcggaggatctggcggcggaggctctttcgaacaggtgcaactggtgcagagcggagccgaagtgaagaaacctggggccagcgtgaaggtgtcctgcaaggtgtccggctacaccctgaccgagctgagcattcactgggtgcgccaggcccctggcaagggactggaatggatgggcggcttcgaccccgaagagaacgagatcgtgtacgcccagcggttccagggcagagtgacaatgaccgaggacaccagcaccgacaccgcctacatggaactgagcagcctgcggagcgaggataccgccgtgtactactgcgccatcgtgggcagcttcagccctctgacactgggcctgtggggccagggaactatggtcaccgtgtccagcacgcgtgaggacctgaagaacgtgttcccacctgaggtggccgtgttcgagcctagcgaggccgagatcagccacacccagaaagccaccctcgtgtgcctggctaccggcttctaccccgaccatgtggaactgtcttggtgggtcaacggcaaagaggtgcacagcggcgtgtgtaccgacccccagccactgaaagaacagcccgccctgaacgacagccggtactgcctgagcagcagactgagagtgtccgccaccttctggcagaacccccggaaccacttcagatgccaggtgcagttctacggcctgagcgagaacgacgagtggacccaggacagagccaagcccgtgacccagatcgtgtctgccgaagcctggggcagagccgatgatgtgattaagatccactggcaggaaaagaagtccaacaccatcctgggcagccaggaaggcaacaccatgaagaccaacgacacctacatgaagttcagctggctgaccgtgcccgagaagtccctggacaaagaacacagatgcatcgtgcggcacgaaaacaacaagaacggcgtggaccaggaaatcatcttcccacccatcaagaccgatgtgattacaatggaccccaaggacaactgctccaaggacgccaacgataccctgctgctccagctgaccaacaccagcgcctactacatgtacttgttgctgctgctgaagtccgtggtgtacttcgccatcatcacatgctgcctgctgatggctatggtcaagcggaaggacagccgggga

SEQ ID NO: 6873 - DNA, 3018 bp, synthetic construct
  source 1..3018: mol_type = other DNA
atggccttaccagtgaccgccttgctcctgccgctggccttgctgctccacgccgccaggccggaagtgcagctggttgaatctggcggaggactggttcagcctggcggatctctgagactgtcttgtgccgccagcggcttcagcttcagcgacttttggatgagctgggtccgacaggcccctggcaaaggacttgaatgggtcgccacaatcagccaggccggcagcgagaaggactacgtggactctgtgaagggcagattcaccatcagccgggacaacgccaagaagtccctgtacctccagatgaacagcctgagagccgaggacaccgccgtgtactattgtgcctctggcgtgtacagcttcgactacagaggccagggcaccctggtcacagtctcttctggtaccggcggaggcggatctggcggcggaggtagcggtggcggaggatctgaattccagagcgtgctgacacagcctccatccgtgtctggcgctccaggccagagagtgaccatctcctgtaccggcagcggcagcaacatcggagccccctacgacgtgtcctggtatcagcaactgcctggcaccgcccccaagctgctgatctaccacaacaacaagcggcccagcggcgtgcccgatagattcagcggctctaagagcggcaccagcgccagcctggctatcactggactccaggccgaggacgaggccgactactactgccagagctacgacagcagcagcatcagcaccatcttcggcggaggcaccaagctgacagtgctgggagctctcgagatccagaaccctgatcctgccgtgtaccagctgcgggatagcaagagcagcgacaagagcgtgtgtctgttcaccgacttcgacagccagaccaacgtgtcccagagcaaggactccgacgtgtacatcaccgataagtgcgtgctggacatgcggagcatggacttcaagagcaactccgccgtggcctggtccaacaagtccgatttcgcctgcgccaacgccttcaacaacagcattatccccgaggacacattcttcccaagccccgagagcagcgactccaccgaccacgtgaagcccaaagagacagagaacaccaagcagcccagcaagagctgccacaagcccaaggccatcgtgcacaccgagaaagtgaacatgatgagcctgaccgtgctgggcctgcggatgctgttcgccaaaaccgtggccgtgaacttcctgctgaccgccaagctgttcttcctcctcaccgcccgcgccaagagaagcggatctggcgtgaagcagaccctgaatttcgacctgctgaagctggctggcgacgtggaatccaacccaggccctactagtatggactggatttggcgcatccttttccttgtcggcgctgctaccggcgcgcattccgggccccagctccagctgcaagagtctggacctggcctggtcaagcctagcgagacactgagcctgacctgtaccgtgtccggcgatagcatcagcagcggcgattactactggggctggatcagacagcctcctggcaaaggactggaatggatcggccacatctactacagcggcgtgacctactacaaccccagcctgaagtccagagtgaccatcagcgtggacaccagccggaaccagttctccctgaagctgtctagcgtgacagccgccgataccgccgtgtactactgcaccagagaggacagcagcaactggcggagtagaggccagggaacactggtcacagttagctctggatccggcggaggcggaagtggaggcggaggatctggcggcggaggctctttcgaacaggtgcaactggtgcagagcggagccgaagtgaagaaacctggggccagcgtgaaggtgtcctgcaaggtgtccggctacaccctgaccgagctgagcattcactgggtgcgccaggcccctggcaagggactggaatggatgggcggcttcgaccccgaagagaacgagatcgtgtacgcccagcggttccagggcagagtgacaatgaccgaggacaccagcaccgacaccgcctacatggaactgagcagcctgcggagcgaggataccgccgtgtactactgtgccatcgtgggcagcttcagcggaatcgcctacagaccttggggccagggcacaatggtcaccgtgtctagcacgcgtgaggacctgaagaacgtgttcccacctgaggtggccgtgttcgagcctagcgaggccgagatcagccacacccagaaagccaccctcgtgtgcctggctaccggcttctaccccgaccatgtggaactgtcttggtgggtcaacggcaaagaggtgcacagcggcgtgtgtaccgacccccagccactgaaagaacagcccgccctgaacgacagccggtactgcctgagcagcagactgagagtgtccgccaccttctggcagaacccccggaaccacttcagatgccaggtgcagttctacggcctgagcgagaacgacgagtggacccaggacagagccaagcccgtgacccagatcgtgtctgccgaagcctggggcagagccgatgatgtgattaagatccactggcaggaaaagaagtccaacaccatcctgggcagccaggaaggcaacaccatgaagaccaacgacacctacatgaagttcagctggctgaccgtgcccgagaagtccctggacaaagaacacagatgcatcgtgcggcacgaaaacaacaagaacggcgtggaccaggaaatcatcttcccacccatcaagaccgatgtgattacaatggaccccaaggacaactgctccaaggacgccaacgataccctgctgctccagctgaccaacaccagcgcctactacatgtacttgttgctgctgctgaagtccgtggtgtacttcgccatcatcacatgctgcctgctgatggctatggtcaagcggaaggacagccgggga

SEQ ID NO: 6874 - DNA, 2982 bp, synthetic construct
  source 1..2982: mol_type = other DNA
atggccttaccagtgaccgccttgctcctgccgctggccttgctgctccacgccgccaggccggaagtgcagctggttgaatctggcggaggactggttcagcctggcggatctctgagactgtcttgtgccgccagcggcttcagcttcagcgacttttggatgagctgggtccgacaggcccctggcaaaggacttgaatgggtcgccacaatcagccaggccggcagcgagaaggactacgtggactctgtgaagggcagattcaccatcagccgggacaacgccaagaagtccctgtacctccagatgaacagcctgagagccgaggacaccgccgtgtactattgtgcctctggcgtgtacagcttcgactacagaggccagggcaccctggtcacagtctcttctggtaccggcggaggcggatctggcggcggaggtagcggtggcggaggatctgaattcgacatccagatgacccagagccccagcagcctgtctgccagcgtgggcgacagagtgaccatcacctgtagagccagccagggcatcagaaacaacctggcctggtatcagcagaagcccggcaaggcccccaagcggctgatctacgccgccagcaatctccagagcggcgtgcccagcagattcacaggctctggcagcggcaccgagttcaccctgatcgtgtctagcctccagcccgaggacttcgccacctactactgcctccagcaccacagctaccccctgacatctggcggaggcaccaaggtggaactcgagatccagaaccctgatcctgccgtgtaccagctgcgggatagcaagagcagcgacaagagcgtgtgtctgttcaccgacttcgacagccagaccaacgtgtcccagagcaaggactccgacgtgtacatcaccgataagtgcgtgctggacatgcggagcatggacttcaagagcaactccgccgtggcctggtccaacaagtccgatttcgcctgcgccaacgccttcaacaacagcattatccccgaggacacattcttcccaagccccgagagcagcgactccaccgaccacgtgaagcccaaagagacagagaacaccaagcagcccagcaagagctgccacaagcccaaggccatcgtgcacaccgagaaagtgaacatgatgagcctgaccgtgctgggcctgcggatgctgttcgccaaaaccgtggccgtgaacttcctgctgaccgccaagctgttcttcctcctcaccgcccgcgccaagagaagcggatctggcgtgaagcagaccctgaatttcgacctgctgaagctggctggcgacgtggaatccaacccaggccctactagtatggactggatttggcgcatccttttccttgtcggcgctgctaccggcgcgcattccgggccccagctccagctgcaagagtctggacctggcctggtcaagcctagcgagacactgagcctgacctgtaccgtgtccggcgatagcatcagcagcggcgattactactggggctggatcagacagcctcctggcaaaggactggaatggatcggccacatctactacagcggcgtgacctactacaaccccagcctgaagtccagagtgaccatcagcgtggacaccagccggaaccagttctccctgaagctgtctagcgtgacagccgccgataccgccgtgtactactgcaccagagaggacagcagcaactggcggagtagaggccagggaacactggtcacagttagctctggatccggcggaggcggaagtggaggcggaggatctggcggcggaggctctttcgaagaggtgcaggtgctggaaagtggcggaggactggtgcagcctggcggctctctgagactgtcttgtgccgccagcggcttcaccttcagcagctacgccatgagctgggtgcgccaggcccctggaaaaggactggaatgggtgtccgccatcagcggctctggcgggtctaccaactacgccgatagcgtgaagggccggttcaccatcagccgggacaacagcaagaacaccctgtacctccagatgaacagcctgcgggccgaggacaccgccgtgtattattgtgccggcagcagcgggtggagcgagtattggggacagggcaccctcgtgaccgtgtcctctacgcgtgaggacctgaagaacgtgttcccacctgaggtggccgtgttcgagcctagcgaggccgagatcagccacacccagaaagccaccctcgtgtgcctggctaccggcttctaccccgaccatgtggaactgtcttggtgggtcaacggcaaagaggtgcacagcggcgtgtgtaccgacccccagccactgaaagaacagcccgccctgaacgacagccggtactgcctgagcagcagactgagagtgtccgccaccttctggcagaacccccggaaccacttcagatgccaggtgcagttctacggcctgagcgagaacgacgagtggacccaggacagagccaagcccgtgacccagatcgtgtctgccgaagcctggggcagagccgatgatgtgattaagatccactggcaggaaaagaagtccaacaccatcctgggcagccaggaaggcaacaccatgaagaccaacgacacctacatgaagttcagctggctgaccgtgcccgagaagtccctggacaaagaacacagatgcatcgtgcggcacgaaaacaacaagaacggcgtggaccaggaaatcatcttcccacccatcaagaccgatgtgattacaatggaccccaaggacaactgctccaaggacgccaacgataccctgctgctccagctgaccaacaccagcgcctactacatgtacttgttgctgctgctgaagtccgtggtgtacttcgccatcatcacatgctgcctgctgatggctatggtcaagcggaaggacagccgggga

SEQ ID NO: 6875 - DNA, 3000 bp, synthetic construct
  source 1..3000: mol_type = other DNA
atggccttaccagtgaccgccttgctcctgccgctggccttgctgctccacgccgccaggccggaagtgcagctggttgaatctggcggaggactggttcagcctggcggatctctgagactgtcttgtgccgccagcggcttcagcttcagcgacttttggatgagctgggtccgacaggcccctggcaaaggacttgaatgggtcgccacaatcagccaggccggcagcgagaaggactacgtggactctgtgaagggcagattcaccatcagccgggacaacgccaagaagtccctgtacctccagatgaacagcctgagagccgaggacaccgccgtgtactattgtgcctctggcgtgtacagcttcgactacagaggccagggcaccctggtcacagtctcttctggtaccggcggaggcggatctggcggcggaggtagcggtggcggaggatctgaattcgacgagatccagctggtgcagagcggagccgaagtgaagaagcctggcgagagcctgcggatcagctgcaagggcagcggcttcaacatcgaggactactacatccactgggtgcgccagatgcccggcaagggcctggaatggatgggcagaatcgaccccgagaacgacgagactaagtacggccccatcttccagggccacgtgaccatcagcgccgacaccagcatcaacaccgtgtacctccagtggtccagcctgaaggccagcgacaccgccatgtactactgcgcctttagaggcggcgtgtactggggccagggcaccacagtgacagtgtctagcctcgagatccagaaccctgatcctgccgtgtaccagctgcgggatagcaagagcagcgacaagagcgtgtgtctgttcaccgacttcgacagccagaccaacgtgtcccagagcaaggactccgacgtgtacatcaccgataagtgcgtgctggacatgcggagcatggacttcaagagcaactccgccgtggcctggtccaacaagtccgatttcgcctgcgccaacgccttcaacaacagcattatccccgaggacacattcttcccaagccccgagagcagcgactccaccgaccacgtgaagcccaaagagacagagaacaccaagcagcccagcaagagctgccacaagcccaaggccatcgtgcacaccgagaaagtgaacatgatgagcctgaccgtgctgggcctgcggatgctgttcgccaaaaccgtggccgtgaacttcctgctgaccgccaagctgttcttcctcctcaccgcccgcgccaagagaagcggatctggcgtgaagcagaccctgaatttcgacctgctgaagctggctggcgacgtggaatccaacccaggccctactagtatggactggatttggcgcatccttttccttgtcggcgctgctaccggcgcgcattccgggccccagctccagctgcaagagtctggacctggcctggtcaagcctagcgagacactgagcctgacctgtaccgtgtccggcgatagcatcagcagcggcgattactactggggctggatcagacagcctcctggcaaaggactggaatggatcggccacatctactacagcggcgtgacctactacaaccccagcctgaagtccagagtgaccatcagcgtggacaccagccggaaccagttctccctgaagctgtctagcgtgacagccgccgataccgccgtgtactactgcaccagagaggacagcagcaactggcggagtagaggccagggaacactggtcacagttagctctggatccggcggaggcggaagtggaggcggaggatctggcggcggaggctctttcgaagatgtcgtgatgacccagagccccgacagcctggctgtgtctctgggagagagagccaccatcaactgcaagtccagccagtccctgctggacagcgacggcaagacctacctgaactggctccagcagaagcccggccagccccccaagagactgatctccctggtgtccaagctggactccggcgtgcccgatagattttccggctctggcagcggcaccgacttcaccctgacaatcagctcccttcaggccgaggacgtggccgtgtactattgctggcagggcacacacttccccggcacctttggcggaggcaccaaggtggaaatcaagacgcgtgaggacctgaagaacgtgttcccacctgaggtggccgtgttcgagcctagcgaggccgagatcagccacacccagaaagccaccctcgtgtgcctggctaccggcttctaccccgaccatgtggaactgtcttggtgggtcaacggcaaagaggtgcacagcggcgtgtgtaccgacccccagccactgaaagaacagcccgccctgaacgacagccggtactgcctgagcagcagactgagagtgtccgccaccttctggcagaacccccggaaccacttcagatgccaggtgcagttctacggcctgagcgagaacgacgagtggacccaggacagagccaagcccgtgacccagatcgtgtctgccgaagcctggggcagagccgatgatgtgattaagatccactggcaggaaaagaagtccaacaccatcctgggcagccaggaaggcaacaccatgaagaccaacgacacctacatgaagttcagctggctgaccgtgcccgagaagtccctggacaaagaacacagatgcatcgtgcggcacgaaaacaacaagaacggcgtggaccaggaaatcatcttcccacccatcaagaccgatgtgattacaatggaccccaaggacaactgctccaaggacgccaacgataccctgctgctccagctgaccaacaccagcgcctactacatgtacttgttgctgctgctgaagtccgtggtgtacttcgccatcatcacatgctgcctgctgatggctatggtcaagcggaaggacagccgggga

SEQ ID NO: 6876 - DNA, 3021 bp, synthetic construct
  source 1..3021: mol_type = other DNA
atggccttaccagtgaccgccttgctcctgccgctggccttgctgctccacgccgccaggccggaagtgcagctggttgaatctggcggaggactggttcagcctggcggatctctgagactgtcttgtgccgccagcggcttcagcttcagcgacttttggatgagctgggtccgacaggcccctggcaaaggacttgaatgggtcgccacaatcagccaggccggcagcgagaaggactacgtggactctgtgaagggcagattcaccatcagccgggacaacgccaagaagtccctgtacctccagatgaacagcctgagagccgaggacaccgccgtgtactattgtgcctctggcgtgtacagcttcgactacagaggccagggcaccctggtcacagtctcttctggtaccggcggaggcggatctggcggcggaggtagcggtggcggaggatctgaattcgacgagcttgtgatgacccagagccccagcagcctgacagtgacagccggcgagaaagtgaccatgagctgcaagagcagccagagcctgctgaacagcggcaaccagaagaactacctgacctggtatcagcagaagcccggccagccccccaagctgctgatctactgggccagcaccagagaaagcggcgtgcccgatagattcaccggctctggcagcggcaccgacttcaccctgacaatcagcagcgtgcaggccgaggacctggccgtgtactactgccagaacgactacagctaccccctgaccttcggagccggcaccaagctggaaatcaagctcgagatccagaaccctgatcctgccgtgtaccagctgcgggatagcaagagcagcgacaagagcgtgtgtctgttcaccgacttcgacagccagaccaacgtgtcccagagcaaggactccgacgtgtacatcaccgataagtgcgtgctggacatgcggagcatggacttcaagagcaactccgccgtggcctggtccaacaagtccgatttcgcctgcgccaacgccttcaacaacagcattatccccgaggacacattcttcccaagccccgagagcagcgactccaccgaccacgtgaagcccaaagagacagagaacaccaagcagcccagcaagagctgccacaagcccaaggccatcgtgcacaccgagaaagtgaacatgatgagcctgaccgtgctgggcctgcggatgctgttcgccaaaaccgtggccgtgaacttcctgctgaccgccaagctgttcttcctcctcaccgcccgcgccaagagaagcggatctggcgtgaagcagaccctgaatttcgacctgctgaagctggctggcgacgtggaatccaacccaggccctactagtatggactggatttggcgcatccttttccttgtcggcgctgctaccggcgcgcattccgggccccagctccagctgcaagagtctggacctggcctggtcaagcctagcgagacactgagcctgacctgtaccgtgtccggcgatagcatcagcagcggcgattactactggggctggatcagacagcctcctggcaaaggactggaatggatcggccacatctactacagcggcgtgacctactacaaccccagcctgaagtccagagtgaccatcagcgtggacaccagccggaaccagttctccctgaagctgtctagcgtgacagccgccgataccgccgtgtactactgcaccagagaggacagcagcaactggcggagtagaggccagggaacactggtcacagttagctctggatccggcggaggcggaagtggaggcggaggatctggcggcggaggctctttcgaagaagtgcagctgctggaacagtctggcgccgaacttgtgcggcctggcaccagcgtgaagatcagctgtaaagccagcggctacgccttcaccaactactggctgggctgggtcaagcagaggcctggacacggcctggaatggatcggcgacatctttcccggctccggcaacatccactacaacgagaagttcaagggcaaggccaccctgaccgccgacaagtctagcagcaccgcctacatgcagctgtccagcctgacctttgaggacagcgccgtgtatttctgtgcccggctgcggaactgggacgagcccatggattattggggccagggcaccaccgtgaccgtgtctagtacgcgtgaggacctgaagaacgtgttcccacctgaggtggccgtgttcgagcctagcgaggccgagatcagccacacccagaaagccaccctcgtgtgcctggctaccggcttctaccccgaccatgtggaactgtcttggtgggtcaacggcaaagaggtgcacagcggcgtgtgtaccgacccccagccactgaaagaacagcccgccctgaacgacagccggtactgcctgagcagcagactgagagtgtccgccaccttctggcagaacccccggaaccacttcagatgccaggtgcagttctacggcctgagcgagaacgacgagtggacccaggacagagccaagcccgtgacccagatcgtgtctgccgaagcctggggcagagccgatgatgtgattaagatccactggcaggaaaagaagtccaacaccatcctgggcagccaggaaggcaacaccatgaagaccaacgacacctacatgaagttcagctggctgaccgtgcccgagaagtccctggacaaagaacacagatgcatcgtgcggcacgaaaacaacaagaacggcgtggaccaggaaatcatcttcccacccatcaagaccgatgtgattacaatggaccccaaggacaactgctccaaggacgccaacgataccctgctgctccagctgaccaacaccagcgcctactacatgtacttgttgctgctgctgaagtccgtggtgtacttcgccatcatcacatgctgcctgctgatggctatggtcaagcggaaggacagccgggga

SEQ ID NO: 6877 - DNA, 3024 bp, synthetic construct
  source 1..3024: mol_type = other DNA
atggccttaccagtgaccgccttgctcctgccgctggccttgctgctccacgccgccaggccggaagtgcagctggttgaatctggcggaggactggttcagcctggcggatctctgagactgtcttgtgccgccagcggcttcagcttcagcgacttttggatgagctgggtccgacaggcccctggcaaaggacttgaatgggtcgccacaatcagccaggccggcagcgagaaggactacgtggactctgtgaagggcagattcaccatcagccgggacaacgccaagaagtccctgtacctccagatgaacagcctgagagccgaggacaccgccgtgtactattgtgcctctggcgtgtacagcttcgactacagaggccagggcaccctggtcacagtctcttctggtaccggcggaggcggatctggcggcggaggtagcggtggcggaggatctgaattcgacgagctgcagatgacccagagccctagcagcctgtctgccagcgtgggcgacagagtgaccatcacctgtagagccagccagagcatcagcagctacctgaactggtatcagcagaagcccggccagccccccaaactgctgatctactgggccagcaccagagaaagcggcgtgcccgatagattcagcggcagcgagagcggcaccaactacaccctgaccatcagctccctgcagcccgaggacttcgccacctacttttgccagcagagcgacagcctgcccatcacctttggacagggcacccggctggacattcagctcgagatccagaaccctgatcctgccgtgtaccagctgcgggatagcaagagcagcgacaagagcgtgtgtctgttcaccgacttcgacagccagaccaacgtgtcccagagcaaggactccgacgtgtacatcaccgataagtgcgtgctggacatgcggagcatggacttcaagagcaactccgccgtggcctggtccaacaagtccgatttcgcctgcgccaacgccttcaacaacagcattatccccgaggacacattcttcccaagccccgagagcagcgactccaccgaccacgtgaagcccaaagagacagagaacaccaagcagcccagcaagagctgccacaagcccaaggccatcgtgcacaccgagaaagtgaacatgatgagcctgaccgtgctgggcctgcggatgctgttcgccaaaaccgtggccgtgaacttcctgctgaccgccaagctgttcttcctcctcaccgcccgcgccaagagaagcggatctggcgtgaagcagaccctgaatttcgacctgctgaagctggctggcgacgtggaatccaacccaggccctactagtatggactggatttggcgcatccttttccttgtcggcgctgctaccggcgcgcattccgggccccagctccagctgcaagagtctggacctggcctggtcaagcctagcgagacactgagcctgacctgtaccgtgtccggcgatagcatcagcagcggcgattactactggggctggatcagacagcctcctggcaaaggactggaatggatcggccacatctactacagcggcgtgacctactacaaccccagcctgaagtccagagtgaccatcagcgtggacaccagccggaaccagttctccctgaagctgtctagcgtgacagccgccgataccgccgtgtactactgcaccagagaggacagcagcaactggcggagtagaggccagggaacactggtcacagttagctctggatccggcggaggcggaagtggaggcggaggatctggcggcggaggctctttcgaagaggtgcaactgctggaatctgggggcggagtggtgcagcctggcagaagcctgagactgagctgtgccgccagcggcttcaccttcagctcctacggaatgcactgggtgcgccaggcccctggcaaaggactggaatgggtggccgtgatctcctacgacggcagcaacaagtactacgccgacagcgtgaagggccggttcaccatcagccgggacaacagcaagaacaccctgtacctgcagatgaacagcctgcgggccgaggacaccgccgtgtactactgcgccaaggatatgggctggggcagcggctggcggccttactactactacggcatggacgtgtggggccagggcaccaccgtgacagtgtcatctacgcgtgaggacctgaagaacgtgttcccacctgaggtggccgtgttcgagcctagcgaggccgagatcagccacacccagaaagccaccctcgtgtgcctggctaccggcttctaccccgaccatgtggaactgtcttggtgggtcaacggcaaagaggtgcacagcggcgtgtgtaccgacccccagccactgaaagaacagcccgccctgaacgacagccggtactgcctgagcagcagactgagagtgtccgccaccttctggcagaacccccggaaccacttcagatgccaggtgcagttctacggcctgagcgagaacgacgagtggacccaggacagagccaagcccgtgacccagatcgtgtctgccgaagcctggggcagagccgatgatgtgattaagatccactggcaggaaaagaagtccaacaccatcctgggcagccaggaaggcaacaccatgaagaccaacgacacctacatgaagttcagctggctgaccgtgcccgagaagtccctggacaaagaacacagatgcatcgtgcggcacgaaaacaacaagaacggcgtggaccaggaaatcatcttcccacccatcaagaccgatgtgattacaatggaccccaaggacaactgctccaaggacgccaacgataccctgctgctccagctgaccaacaccagcgcctactacatgtacttgttgctgctgctgaagtccgtggtgtacttcgccatcatcacatgctgcctgctgatggctatggtcaagcggaaggacagccgggga

SEQ ID NO: 6878 - DNA, 3015 bp, synthetic construct
  source 1..3015: mol_type = other DNA
atggccttaccagtgaccgccttgctcctgccgctggccttgctgctccacgccgccaggccggaagtgcagctggttgaatctggcggaggactggttcagcctggcggatctctgagactgtcttgtgccgccagcggcttcagcttcagcgacttttggatgagctgggtccgacaggcccctggcaaaggacttgaatgggtcgccacaatcagccaggccggcagcgagaaggactacgtggactctgtgaagggcagattcaccatcagccgggacaacgccaagaagtccctgtacctccagatgaacagcctgagagccgaggacaccgccgtgtactattgtgcctctggcgtgtacagcttcgactacagaggccagggcaccctggtcacagtctcttctggtaccggcggaggcggatctggcggcggaggtagcggtggcggaggatctgaattcgacgacatccaaatgacacagagtccttctagtttgagtgcgagcgtgggggacagggtgaccattacctgcagggccagccagagcataagctcataccttaattggtaccagcaaaaaccaggtaaggcccctaagctcctgatctacgcggcctcttcacttcaatctggggtcccttcccgcttcagtggctccggcagcggcaccgacttcacgctcactatatcaagtctgcagcctgaggatctcgccacctattactgtcaacaaagttattccacccctttcacctttggaccgggcacgaaagtggatattaagctcgagatccagaaccctgatcctgccgtgtaccagctgcgggatagcaagagcagcgacaagagcgtgtgtctgttcaccgacttcgacagccagaccaacgtgtcccagagcaaggactccgacgtgtacatcaccgataagtgcgtgctggacatgcggagcatggacttcaagagcaactccgccgtggcctggtccaacaagtccgatttcgcctgcgccaacgccttcaacaacagcattatccccgaggacacattcttcccaagccccgagagcagcgactccaccgaccacgtgaagcccaaagagacagagaacaccaagcagcccagcaagagctgccacaagcccaaggccatcgtgcacaccgagaaagtgaacatgatgagcctgaccgtgctgggcctgcggatgctgttcgccaaaaccgtggccgtgaacttcctgctgaccgccaagctgttcttcctcctcaccgcccgcgccaagagaagcggatctggcgtgaagcagaccctgaatttcgacctgctgaagctggctggcgacgtggaatccaacccaggccctactagtatggactggatttggcgcatccttttccttgtcggcgctgctaccggcgcgcattccgggccccagctccagctgcaagagtctggacctggcctggtcaagcctagcgagacactgagcctgacctgtaccgtgtccggcgatagcatcagcagcggcgattactactggggctggatcagacagcctcctggcaaaggactggaatggatcggccacatctactacagcggcgtgacctactacaaccccagcctgaagtccagagtgaccatcagcgtggacaccagccggaaccagttctccctgaagctgtctagcgtgacagccgccgataccgccgtgtactactgcaccagagaggacagcagcaactggcggagtagaggccagggaacactggtcacagttagctctggatccggcggaggcggaagtggaggcggaggatctggcggcggaggctctttcgaagtgcacgaggtccagcttgtgcagtccggggcagaggtcaagaagcctggttctagcgtaaaagtgagttgcaaagcctcaggtgggacattttcatcctacgcgatcagttgggttagacaggctcctggtcaagggctggaatggatgggcggaattattccaatcttcggaacagcgaattacgcgcagaagttccagggtagagtaaccatcactgctgacaagtccacctccaccgcatacatggaattgtctagtctccggagcgaggatacggcggtgtattattgtgctacgttcgccctgtttggcttccgcgaacaggctttcgacatctgggggcagggcacgacagtcacggttagtagtacgcgtgaggacctgaagaacgtgttcccacctgaggtggccgtgttcgagcctagcgaggccgagatcagccacacccagaaagccaccctcgtgtgcctggctaccggcttctaccccgaccatgtggaactgtcttggtgggtcaacggcaaagaggtgcacagcggcgtgtgtaccgacccccagccactgaaagaacagcccgccctgaacgacagccggtactgcctgagcagcagactgagagtgtccgccaccttctggcagaacccccggaaccacttcagatgccaggtgcagttctacggcctgagcgagaacgacgagtggacccaggacagagccaagcccgtgacccagatcgtgtctgccgaagcctggggcagagccgatgatgtgattaagatccactggcaggaaaagaagtccaacaccatcctgggcagccaggaaggcaacaccatgaagaccaacgacacctacatgaagttcagctggctgaccgtgcccgagaagtccctggacaaagaacacagatgcatcgtgcggcacgaaaacaacaagaacggcgtggaccaggaaatcatcttcccacccatcaagaccgatgtgattacaatggaccccaaggacaactgctccaaggacgccaacgataccctgctgctccagctgaccaacaccagcgcctactacatgtacttgttgctgctgctgaagtccgtggtgtacttcgccatcatcacatgctgcctgctgatggctatggtcaagcggaaggacagccgggga

SEQ ID NO: 6879 - DNA, 3009 bp, synthetic construct
  source 1..3009: mol_type = other DNA
atggccttaccagtgaccgccttgctcctgccgctggccttgctgctccacgccgccaggccggaagtgcagctggttgaatctggcggaggactggttcagcctggcggatctctgagactgtcttgtgccgccagcggcttcagcttcagcgacttttggatgagctgggtccgacaggcccctggcaaaggacttgaatgggtcgccacaatcagccaggccggcagcgagaaggactacgtggactctgtgaagggcagattcaccatcagccgggacaacgccaagaagtccctgtacctccagatgaacagcctgagagccgaggacaccgccgtgtactattgtgcctctggcgtgtacagcttcgactacagaggccagggcaccctggtcacagtctcttctggtaccggcggaggcggatctggcggcggaggtagcggtggcggaggatctgaattcgacatcgtgctgacccagagccctctgagcctggccgtgtctctgggacagcctgccatcatcagctgcaaggccagccagagcgtgtcctttgccggcacctctctgatgcactggtatcaccagaagcccggccagcagcccagactgctgatctacagagccagcaacctggaagccggcgtgcccgatagattttccggcagcggcagcaagaccgacttcaccctgaccatcagccccgtggaagccgaagatgccgccacctactactgccagcagagcagagagtacccctacaccttcggcggaggcaccaagctggaaatcaagaggctcgagatccagaaccctgatcctgccgtgtaccagctgcgggatagcaagagcagcgacaagagcgtgtgtctgttcaccgacttcgacagccagaccaacgtgtcccagagcaaggactccgacgtgtacatcaccgataagtgcgtgctggacatgcggagcatggacttcaagagcaactccgccgtggcctggtccaacaagtccgatttcgcctgcgccaacgccttcaacaacagcattatccccgaggacacattcttcccaagccccgagagcagcgactccaccgaccacgtgaagcccaaagagacagagaacaccaagcagcccagcaagagctgccacaagcccaaggccatcgtgcacaccgagaaagtgaacatgatgagcctgaccgtgctgggcctgcggatgctgttcgccaaaaccgtggccgtgaacttcctgctgaccgccaagctgttcttcctcctcaccgcccgcgccaagagaagcggatctggcgtgaagcagaccctgaatttcgacctgctgaagctggctggcgacgtggaatccaacccaggccctactagtatggactggatttggcgcatccttttccttgtcggcgctgctaccggcgcgcattccgggccccagctccagctgcaagagtctggacctggcctggtcaagcctagcgagacactgagcctgacctgtaccgtgtccggcgatagcatcagcagcggcgattactactggggctggatcagacagcctcctggcaaaggactggaatggatcggccacatctactacagcggcgtgacctactacaaccccagcctgaagtccagagtgaccatcagcgtggacaccagccggaaccagttctccctgaagctgtctagcgtgacagccgccgataccgccgtgtactactgcaccagagaggacagcagcaactggcggagtagaggccagggaacactggtcacagttagctctggatccggcggaggcggaagtggaggcggaggatctggcggcggaggctctttcgaacaggtccaactggtgcagagcggagccgaggtcgtgaagcctggcgcttccgtgaagattagctgcaaagccagcggctacacctttaccggctactttatgaactgggtcaagcagagccctggccagagcctggaatggatcggcagaatccacccctacgacggcgacaccttctacaaccagaagttccagggcaaggccaccctgacagtggacaagagcagcaacaccgcccacatggaactgctgagcctgaccagcgaggacttcgccgtgtactactgcaccagatacgacggcagccgggctatggactattggggccagggcaccaccgtgaccgtgtctagtacgcgtgaggacctgaagaacgtgttcccacctgaggtggccgtgttcgagcctagcgaggccgagatcagccacacccagaaagccaccctcgtgtgcctggctaccggcttctaccccgaccatgtggaactgtcttggtgggtcaacggcaaagaggtgcacagcggcgtgtgtaccgacccccagccactgaaagaacagcccgccctgaacgacagccggtactgcctgagcagcagactgagagtgtccgccaccttctggcagaacccccggaaccacttcagatgccaggtgcagttctacggcctgagcgagaacgacgagtggacccaggacagagccaagcccgtgacccagatcgtgtctgccgaagcctggggcagagccgatgatgtgattaagatccactggcaggaaaagaagtccaacaccatcctgggcagccaggaaggcaacaccatgaagaccaacgacacctacatgaagttcagctggctgaccgtgcccgagaagtccctggacaaagaacacagatgcatcgtgcggcacgaaaacaacaagaacggcgtggaccaggaaatcatcttcccacccatcaagaccgatgtgattacaatggaccccaaggacaactgctccaaggacgccaacgataccctgctgctccagctgaccaacaccagcgcctactacatgtacttgttgctgctgctgaagtccgtggtgtacttcgccatcatcacatgctgcctgctgatggctatggtcaagcggaaggacagccgggga

SEQ ID NO: 6880 - DNA, 3000 bp, synthetic construct
  source 1..3000: mol_type = other DNA
atggccttaccagtgaccgccttgctcctgccgctggccttgctgctccacgccgccaggccggaagtgcagctggttgaatctggcggaggactggttcagcctggcggatctctgagactgtcttgtgccgccagcggcttcagcttcagcgacttttggatgagctgggtccgacaggcccctggcaaaggacttgaatgggtcgccacaatcagccaggccggcagcgagaaggactacgtggactctgtgaagggcagattcaccatcagccgggacaacgccaagaagtccctgtacctccagatgaacagcctgagagccgaggacaccgccgtgtactattgtgcctctggcgtgtacagcttcgactacagaggccagggcaccctggtcacagtctcttctggtaccggcggaggcggatctggcggcggaggtagcggtggcggaggatctgaattcgacgacgttgtgatgacccagacccccctgagcctgcctgtgacacctggcgaacctgccagcatcagctgtcggagcagccagagcctggtgcacagaaacggcaacacctacctgcactggtatctccagaagcccggccagagccccaagctgctgatccacaaggtgtccaacagattcagcggcgtgcccgacagattctccggcagcggctctggcaccgacttcaccctgaagatcagccgggtggaagccgaggacctgggcgtgtacttctgtagccagagcacccatgtgccccccctgacatttggagccggcaccaagctggaactgaagctcgagatccagaaccctgatcctgccgtgtaccagctgcgggatagcaagagcagcgacaagagcgtgtgtctgttcaccgacttcgacagccagaccaacgtgtcccagagcaaggactccgacgtgtacatcaccgataagtgcgtgctggacatgcggagcatggacttcaagagcaactccgccgtggcctggtccaacaagtccgatttcgcctgcgccaacgccttcaacaacagcattatccccgaggacacattcttcccaagccccgagagcagcgactccaccgaccacgtgaagcccaaagagacagagaacaccaagcagcccagcaagagctgccacaagcccaaggccatcgtgcacaccgagaaagtgaacatgatgagcctgaccgtgctgggcctgcggatgctgttcgccaaaaccgtggccgtgaacttcctgctgaccgccaagctgttcttcctcctcaccgcccgcgccaagagaagcggatctggcgtgaagcagaccctgaatttcgacctgctgaagctggctggcgacgtggaatccaacccaggccctactagtatggactggatttggcgcatccttttccttgtcggcgctgctaccggcgcgcattccgggccccagctccagctgcaagagtctggacctggcctggtcaagcctagcgagacactgagcctgacctgtaccgtgtccggcgatagcatcagcagcggcgattactactggggctggatcagacagcctcctggcaaaggactggaatggatcggccacatctactacagcggcgtgacctactacaaccccagcctgaagtccagagtgaccatcagcgtggacaccagccggaaccagttctccctgaagctgtctagcgtgacagccgccgataccgccgtgtactactgcaccagagaggacagcagcaactggcggagtagaggccagggaacactggtcacagttagctctggatccggcggaggcggaagtggaggcggaggatctggcggcggaggctctttcgaagaagtgcagctggtgcagtctggcgctgaggtggaaaagcctggggccagcgtgaagattagctgcaaggccagcggcagcagcttcaccggctacaacatgaactgggtgcgccagaacatcggcaagagcctggaatggatcggagccatcgacccctactacggcggcaccagctacaaccagaagttcaagggcagagccaccctgaccgtggacaagagcaccagcaccgcctacatgcacctgaagtccctgcggagcgaggacaccgccgtgtactactgtgtgtccggcatggaatattggggccagggcaccagcgtgaccgtgtctagtacgcgtgaggacctgaagaacgtgttcccacctgaggtggccgtgttcgagcctagcgaggccgagatcagccacacccagaaagccaccctcgtgtgcctggctaccggcttctaccccgaccatgtggaactgtcttggtgggtcaacggcaaagaggtgcacagcggcgtgtgtaccgacccccagccactgaaagaacagcccgccctgaacgacagccggtactgcctgagcagcagactgagagtgtccgccaccttctggcagaacccccggaaccacttcagatgccaggtgcagttctacggcctgagcgagaacgacgagtggacccaggacagagccaagcccgtgacccagatcgtgtctgccgaagcctggggcagagccgatgatgtgattaagatccactggcaggaaaagaagtccaacaccatcctgggcagccaggaaggcaacaccatgaagaccaacgacacctacatgaagttcagctggctgaccgtgcccgagaagtccctggacaaagaacacagatgcatcgtgcggcacgaaaacaacaagaacggcgtggaccaggaaatcatcttcccacccatcaagaccgatgtgattacaatggaccccaaggacaactgctccaaggacgccaacgataccctgctgctccagctgaccaacaccagcgcctactacatgtacttgttgctgctgctgaagtccgtggtgtacttcgccatcatcacatgctgcctgctgatggctatggtcaagcggaaggacagccgggga

SEQ ID NO: 6881 - DNA, 2994 bp, synthetic construct
  source 1..2994: mol_type = other DNA
atggccttaccagtgaccgccttgctcctgccgctggccttgctgctccacgccgccaggccggaagtgcagctggttgaatctggcggaggactggttcagcctggcggatctctgagactgtcttgtgccgccagcggcttcagcttcagcgacttttggatgagctgggtccgacaggcccctggcaaaggacttgaatgggtcgccacaatcagccaggccggcagcgagaaggactacgtggactctgtgaagggcagattcaccatcagccgggacaacgccaagaagtccctgtacctccagatgaacagcctgagagccgaggacaccgccgtgtactattgtgcctctggcgtgtacagcttcgactacagaggccagggcaccctggtcacagtctcttctggtaccggcggaggcggatctggcggcggaggtagcggtggcggaggatctgaattcgacgagatcgtgatgacccagacccctgccaccctgtctgtgtctgccggcgagagagtgaccattacctgcaaggccagccagagcgtgtccaacgacgtgacctggtatcagcagaagcccggccaggcccccagactgctgatctacagcgccagcaacagatacagcggcgtgcccgccagattttccggcagcggctacggcaccgagttcaccttcaccatcagcagcgtgcagagcgaggacttcgccgtgtacttctgtcagcaagactacagcagcttcggccagggcaccaagctggaaatcaagaggctcgagatccagaaccctgatcctgccgtgtaccagctgcgggatagcaagagcagcgacaagagcgtgtgtctgttcaccgacttcgacagccagaccaacgtgtcccagagcaaggactccgacgtgtacatcaccgataagtgcgtgctggacatgcggagcatggacttcaagagcaactccgccgtggcctggtccaacaagtccgatttcgcctgcgccaacgccttcaacaacagcattatccccgaggacacattcttcccaagccccgagagcagcgactccaccgaccacgtgaagcccaaagagacagagaacaccaagcagcccagcaagagctgccacaagcccaaggccatcgtgcacaccgagaaagtgaacatgatgagcctgaccgtgctgggcctgcggatgctgttcgccaaaaccgtggccgtgaacttcctgctgaccgccaagctgttcttcctcctcaccgcccgcgccaagagaagcggatctggcgtgaagcagaccctgaatttcgacctgctgaagctggctggcgacgtggaatccaacccaggccctactagtatggactggatttggcgcatccttttccttgtcggcgctgctaccggcgcgcattccgggccccagctccagctgcaagagtctggacctggcctggtcaagcctagcgagacactgagcctgacctgtaccgtgtccggcgatagcatcagcagcggcgattactactggggctggatcagacagcctcctggcaaaggactggaatggatcggccacatctactacagcggcgtgacctactacaaccccagcctgaagtccagagtgaccatcagcgtggacaccagccggaaccagttctccctgaagctgtctagcgtgacagccgccgataccgccgtgtactactgcaccagagaggacagcagcaactggcggagtagaggccagggaacactggtcacagttagctctggatccggcggaggcggaagtggaggcggaggatctggcggcggaggctctttcgaacaggtgcagctggtggaatctggacctggcgtggtgcagcctggcagaagcctgagaatcagctgtgccgtgtccggcttcagcgtgaccaactacggcgtgcactgggtgcgccagccacctggaaaaggactggaatggctgggcgtgatctgggctggcggcatcaccaactacaacagcgccttcatgtcccggctgaccatctccaaggacaacagcaagaacaccgtgtacctccagatgaacagcctgcgggccgaggacaccgccatgtactactgtgcttccagaggcggccactacggctacgccctggattattggggccagggaaccctcgtgaccgtgtcctctacgcgtgaggacctgaagaacgtgttcccacctgaggtggccgtgttcgagcctagcgaggccgagatcagccacacccagaaagccaccctcgtgtgcctggctaccggcttctaccccgaccatgtggaactgtcttggtgggtcaacggcaaagaggtgcacagcggcgtgtgtaccgacccccagccactgaaagaacagcccgccctgaacgacagccggtactgcctgagcagcagactgagagtgtccgccaccttctggcagaacccccggaaccacttcagatgccaggtgcagttctacggcctgagcgagaacgacgagtggacccaggacagagccaagcccgtgacccagatcgtgtctgccgaagcctggggcagagccgatgatgtgattaagatccactggcaggaaaagaagtccaacaccatcctgggcagccaggaaggcaacaccatgaagaccaacgacacctacatgaagttcagctggctgaccgtgcccgagaagtccctggacaaagaacacagatgcatcgtgcggcacgaaaacaacaagaacggcgtggaccaggaaatcatcttcccacccatcaagaccgatgtgattacaatggaccccaaggacaactgctccaaggacgccaacgataccctgctgctccagctgaccaacaccagcgcctactacatgtacttgttgctgctgctgaagtccgtggtgtacttcgccatcatcacatgctgcctgctgatggctatggtcaagcggaaggacagccgggga

SEQ ID NO: 6882 - DNA, 3000 bp, synthetic construct
  source 1..3000: mol_type = other DNA
atggccttaccagtgaccgccttgctcctgccgctggccttgctgctccacgccgccaggccggaagtgcagctggttgaatctggcggaggactggttcagcctggcggatctctgagactgtcttgtgccgccagcggcttcagcttcagcgacttttggatgagctgggtccgacaggcccctggcaaaggacttgaatgggtcgccacaatcagccaggccggcagcgagaaggactacgtggactctgtgaagggcagattcaccatcagccgggacaacgccaagaagtccctgtacctccagatgaacagcctgagagccgaggacaccgccgtgtactattgtgcctctggcgtgtacagcttcgactacagaggccagggcaccctggtcacagtctcttctggtaccggcggaggcggatctggcggcggaggtagcggtggcggaggatctgaattcgacatccagatgacccagaccgccagcagcctgcctgcctctctgggcgacagagtgaccatctcctgtagcgccagccaggacatcagcaactacctgaactggtatcagcagaaacccgacggcaccgtgaagctgctgatcttctacagcagcaacctgcacagcggcgtgcccagcagattttctggcggcggaagcggcaccgactacagcctgaccatcagcaatctggaacccgaggacattgccacctacttttgccaccagtacagcaagctgccctggacctttggcggaggcaccaagctggaaatcaagagactcgagatccagaaccctgatcctgccgtgtaccagctgcgggatagcaagagcagcgacaagagcgtgtgtctgttcaccgacttcgacagccagaccaacgtgtcccagagcaaggactccgacgtgtacatcaccgataagtgcgtgctggacatgcggagcatggacttcaagagcaactccgccgtggcctggtccaacaagtccgatttcgcctgcgccaacgccttcaacaacagcattatccccgaggacacattcttcccaagccccgagagcagcgactccaccgaccacgtgaagcccaaagagacagagaacaccaagcagcccagcaagagctgccacaagcccaaggccatcgtgcacaccgagaaagtgaacatgatgagcctgaccgtgctgggcctgcggatgctgttcgccaaaaccgtggccgtgaacttcctgctgaccgccaagctgttcttcctcctcaccgcccgcgccaagagaagcggatctggcgtgaagcagaccctgaatttcgacctgctgaagctggctggcgacgtggaatccaacccaggccctactagtatggactggatttggcgcatccttttccttgtcggcgctgctaccggcgcgcattccgggccccagctccagctgcaagagtctggacctggcctggtcaagcctagcgagacactgagcctgacctgtaccgtgtccggcgatagcatcagcagcggcgattactactggggctggatcagacagcctcctggcaaaggactggaatggatcggccacatctactacagcggcgtgacctactacaaccccagcctgaagtccagagtgaccatcagcgtggacaccagccggaaccagttctccctgaagctgtctagcgtgacagccgccgataccgccgtgtactactgcaccagagaggacagcagcaactggcggagtagaggccagggaacactggtcacagttagctctggatccggcggaggcggaagtggaggcggaggatctggcggcggaggctctttcgaagaagtgaccctggtggaaagcggcggagacttcgtgaagcctggcggctctctgaaggtgtcctgtgccgccagcggcttcgcctttagccactacgccatgagctgggtgcgccagacccctgccaagagactggaatgggtggcctacatcagcagcggcggctccggcacctactactccgatagcgtgaagggccggttcaccatcagccgggacaacgccaagaacaccctgtacctccagatgcggagcctgcggagcgaggacagcgccatgtatttctgcaccagagtgaagctgggcacctattacttcgactcttggggccagggcaccaccctgaccgtgtcatctacgcgtgaggacctgaagaacgtgttcccacctgaggtggccgtgttcgagcctagcgaggccgagatcagccacacccagaaagccaccctcgtgtgcctggctaccggcttctaccccgaccatgtggaactgtcttggtgggtcaacggcaaagaggtgcacagcggcgtgtgtaccgacccccagccactgaaagaacagcccgccctgaacgacagccggtactgcctgagcagcagactgagagtgtccgccaccttctggcagaacccccggaaccacttcagatgccaggtgcagttctacggcctgagcgagaacgacgagtggacccaggacagagccaagcccgtgacccagatcgtgtctgccgaagcctggggcagagccgatgatgtgattaagatccactggcaggaaaagaagtccaacaccatcctgggcagccaggaaggcaacaccatgaagaccaacgacacctacatgaagttcagctggctgaccgtgcccgagaagtccctggacaaagaacacagatgcatcgtgcggcacgaaaacaacaagaacggcgtggaccaggaaatcatcttcccacccatcaagaccgatgtgattacaatggaccccaaggacaactgctccaaggacgccaacgataccctgctgctccagctgaccaacaccagcgcctactacatgtacttgttgctgctgctgaagtccgtggtgtacttcgccatcatcacatgctgcctgctgatggctatggtcaagcggaaggacagccgggga

SEQ ID NO: 6883 - DNA, 3006 bp, synthetic construct
  source 1..3006: mol_type = other DNA
atggccttaccagtgaccgccttgctcctgccgctggccttgctgctccacgccgccaggccggaagtgcagctggttgaatctggcggaggactggttcagcctggcggatctctgagactgtcttgtgccgccagcggcttcagcttcagcgacttttggatgagctgggtccgacaggcccctggcaaaggacttgaatgggtcgccacaatcagccaggccggcagcgagaaggactacgtggactctgtgaagggcagattcaccatcagccgggacaacgccaagaagtccctgtacctccagatgaacagcctgagagccgaggacaccgccgtgtactattgtgcctctggcgtgtacagcttcgactacagaggccagggcaccctggtcacagtctcttctggtaccggcggaggcggatctggcggcggaggtagcggtggcggaggatctgaattccagttcgtgctgacccagagcccttctgcctctgctgccctgggagcctctgccaagctgacctgtacactgagcagcgcccacaagacctacaccatcgactggtatcagcagcagaagggaaaggcccccagatacctgatccaagtgaagtccgacggcacctacacaaaggccaccggcgtgcccgatagattcagcggcagtagcagcggagccgatagatacctgattatccccagcgtgcaggccgacgacgaggccgattactactgcggcaccgattacaccggcggctacgtgttcggcggaggcacacaactgaccgtgacactcgagatccagaaccctgatcctgccgtgtaccagctgcgggatagcaagagcagcgacaagagcgtgtgtctgttcaccgacttcgacagccagaccaacgtgtcccagagcaaggactccgacgtgtacatcaccgataagtgcgtgctggacatgcggagcatggacttcaagagcaactccgccgtggcctggtccaacaagtccgatttcgcctgcgccaacgccttcaacaacagcattatccccgaggacacattcttcccaagccccgagagcagcgactccaccgaccacgtgaagcccaaagagacagagaacaccaagcagcccagcaagagctgccacaagcccaaggccatcgtgcacaccgagaaagtgaacatgatgagcctgaccgtgctgggcctgcggatgctgttcgccaaaaccgtggccgtgaacttcctgctgaccgccaagctgttcttcctcctcaccgcccgcgccaagagaagcggatctggcgtgaagcagaccctgaatttcgacctgctgaagctggctggcgacgtggaatccaacccaggccctactagtatggactggatttggcgcatccttttccttgtcggcgctgctaccggcgcgcattccgggccccagctccagctgcaagagtctggacctggcctggtcaagcctagcgagacactgagcctgacctgtaccgtgtccggcgatagcatcagcagcggcgattactactggggctggatcagacagcctcctggcaaaggactggaatggatcggccacatctactacagcggcgtgacctactacaaccccagcctgaagtccagagtgaccatcagcgtggacaccagccggaaccagttctccctgaagctgtctagcgtgacagccgccgataccgccgtgtactactgcaccagagaggacagcagcaactggcggagtagaggccagggaacactggtcacagttagctctggatccggcggaggcggaagtggaggcggaggatctggcggcggaggctctttcgaagagcaactgaaagagtctggcggcggactgttcaagcccaccgataccctgaccctgacctgcaccgtgtccggcttcagcctgagctactacggcgtgaactgggtgcgccaggcccctggcaatggcctggaatggatcggcacaatcggcggcagcggcgacacctactatgcctcttgggccaagtccagaagcaccatcatcagaaacaccaacgagaacaccgtgaccctgaagatgaccagcctgacagccgccgacaccgccacctacttttgcgtcagatacgccaacatcggctacgagtatttcaacgtgtggggacccggcaccctcgtgaccgtgtcatctacgcgtgaggacctgaagaacgtgttcccacctgaggtggccgtgttcgagcctagcgaggccgagatcagccacacccagaaagccaccctcgtgtgcctggctaccggcttctaccccgaccatgtggaactgtcttggtgggtcaacggcaaagaggtgcacagcggcgtgtgtaccgacccccagccactgaaagaacagcccgccctgaacgacagccggtactgcctgagcagcagactgagagtgtccgccaccttctggcagaacccccggaaccacttcagatgccaggtgcagttctacggcctgagcgagaacgacgagtggacccaggacagagccaagcccgtgacccagatcgtgtctgccgaagcctggggcagagccgatgatgtgattaagatccactggcaggaaaagaagtccaacaccatcctgggcagccaggaaggcaacaccatgaagaccaacgacacctacatgaagttcagctggctgaccgtgcccgagaagtccctggacaaagaacacagatgcatcgtgcggcacgaaaacaacaagaacggcgtggaccaggaaatcatcttcccacccatcaagaccgatgtgattacaatggaccccaaggacaactgctccaaggacgccaacgataccctgctgctccagctgaccaacaccagcgcctactacatgtacttgttgctgctgctgaagtccgtggtgtacttcgccatcatcacatgctgcctgctgatggctatggtcaagcggaaggacagccgggga

SEQ ID NO: 6884 - DNA, 3021 bp, synthetic construct
  source 1..3021: mol_type = other DNA
atggccttaccagtgaccgccttgctcctgccgctggccttgctgctccacgccgccaggccggaagtgcagctggttgaatctggcggaggactggttcagcctggcggatctctgagactgtcttgtgccgccagcggcttcagcttcagcgacttttggatgagctgggtccgacaggcccctggcaaaggacttgaatgggtcgccacaatcagccaggccggcagcgagaaggactacgtggactctgtgaagggcagattcaccatcagccgggacaacgccaagaagtccctgtacctccagatgaacagcctgagagccgaggacaccgccgtgtactattgtgcctctggcgtgtacagcttcgactacagaggccagggcaccctggtcacagtctcttctggtaccggcggaggcggatctggcggcggaggtagcggtggcggaggatctgaattccagttcgtgctgacccagagcccttctgtgtctgccgccctgggagcctctgccaagctgacctgtacactgagcagcgcccacaagacctacaccatcgactggtatcagcagcagcagggcgaggcccccagatacctgatgcaagtgaagtccgacggcagctacaccaagggcaccggcgtgcccgatagattcagcggcagtagcagcggagccgatagatacctgattatccccagcgtgcaggccgacgacgaggccggatatgtgtgcggcgctgacgacaatggcggctacgtgttcggcggaggcacccaactgacagtgacactcgagatccagaaccctgatcctgccgtgtaccagctgcgggatagcaagagcagcgacaagagcgtgtgtctgttcaccgacttcgacagccagaccaacgtgtcccagagcaaggactccgacgtgtacatcaccgataagtgcgtgctggacatgcggagcatggacttcaagagcaactccgccgtggcctggtccaacaagtccgatttcgcctgcgccaacgccttcaacaacagcattatccccgaggacacattcttcccaagccccgagagcagcgactccaccgaccacgtgaagcccaaagagacagagaacaccaagcagcccagcaagagctgccacaagcccaaggccatcgtgcacaccgagaaagtgaacatgatgagcctgaccgtgctgggcctgcggatgctgttcgccaaaaccgtggccgtgaacttcctgctgaccgccaagctgttcttcctcctcaccgcccgcgccaagagaagcggatctggcgtgaagcagaccctgaatttcgacctgctgaagctggctggcgacgtggaatccaacccaggccctactagtatggactggatttggcgcatccttttccttgtcggcgctgctaccggcgcgcattccgggccccagctccagctgcaagagtctggacctggcctggtcaagcctagcgagacactgagcctgacctgtaccgtgtccggcgatagcatcagcagcggcgattactactggggctggatcagacagcctcctggcaaaggactggaatggatcggccacatctactacagcggcgtgacctactacaaccccagcctgaagtccagagtgaccatcagcgtggacaccagccggaaccagttctccctgaagctgtctagcgtgacagccgccgataccgccgtgtactactgcaccagagaggacagcagcaactggcggagtagaggccagggaacactggtcacagttagctctggatccggcggaggcggaagtggaggcggaggatctggcggcggaggctctttcgaacagagcgtgaaagagtctgagggcggcctgttcaagcccaccgataccctgaccctgacctgcaccgtgtccggcttcagcctgagcagacacgccctgacatgggtgcgccaggcccctggaaatggcctggaatggatcggagccatcgacaacgccggcaccacctactatgcctcttgggccaagtccagaagcaccatcacccggaacaccgacctgcacaccgtgaccctgaagatgaccagcctgaccgccagcgacaccgccacctacttttgcgccagagtgttctacgacatcaacagcggctactacctggacggcatggacctgtggggacctggcacacttgtgaccgtgtccagcacgcgtgaggacctgaagaacgtgttcccacctgaggtggccgtgttcgagcctagcgaggccgagatcagccacacccagaaagccaccctcgtgtgcctggctaccggcttctaccccgaccatgtggaactgtcttggtgggtcaacggcaaagaggtgcacagcggcgtgtgtaccgacccccagccactgaaagaacagcccgccctgaacgacagccggtactgcctgagcagcagactgagagtgtccgccaccttctggcagaacccccggaaccacttcagatgccaggtgcagttctacggcctgagcgagaacgacgagtggacccaggacagagccaagcccgtgacccagatcgtgtctgccgaagcctggggcagagccgatgatgtgattaagatccactggcaggaaaagaagtccaacaccatcctgggcagccaggaaggcaacaccatgaagaccaacgacacctacatgaagttcagctggctgaccgtgcccgagaagtccctggacaaagaacacagatgcatcgtgcggcacgaaaacaacaagaacggcgtggaccaggaaatcatcttcccacccatcaagaccgatgtgattacaatggaccccaaggacaactgctccaaggacgccaacgataccctgctgctccagctgaccaacaccagcgcctactacatgtacttgttgctgctgctgaagtccgtggtgtacttcgccatcatcacatgctgcctgctgatggctatggtcaagcggaaggacagccgggga

SEQ ID NO: 6885 - DNA, 3003 bp, synthetic construct
  source 1..3003: mol_type = other DNA
atggccttaccagtgaccgccttgctcctgccgctggccttgctgctccacgccgccaggccggaagtgcagctggttgaatctggcggaggactggttcagcctggcggatctctgagactgtcttgtgccgccagcggcttcagcttcagcgacttttggatgagctgggtccgacaggcccctggcaaaggacttgaatgggtcgccacaatcagccaggccggcagcgagaaggactacgtggactctgtgaagggcagattcaccatcagccgggacaacgccaagaagtccctgtacctccagatgaacagcctgagagccgaggacaccgccgtgtactattgtgcctctggcgtgtacagcttcgactacagaggccagggcaccctggtcacagtctcttctggtaccggcggaggcggatctggcggcggaggtagcggtggcggaggatctgaattcgacatccagatgacccagagccccagcagcctgtctgccagcgtgggcgacagagtgaccatcacctgtagagccagccagggcatcagctcttggctggcctggtatcagcagaagcccgagaaggcccccaagagcctgatctacgccgcctctagtctccagagcggcgtgcccagcagattttctggcagcggctccggcaccgacttcaccctgacaatcagctccctccagcccgaggacttcgccacctactactgccagcagtacaacagctacccccccacctttggcggaggcaccaaggtggaaatcaagctcgagatccagaaccctgatcctgccgtgtaccagctgcgggatagcaagagcagcgacaagagcgtgtgtctgttcaccgacttcgacagccagaccaacgtgtcccagagcaaggactccgacgtgtacatcaccgataagtgcgtgctggacatgcggagcatggacttcaagagcaactccgccgtggcctggtccaacaagtccgatttcgcctgcgccaacgccttcaacaacagcattatccccgaggacacattcttcccaagccccgagagcagcgactccaccgaccacgtgaagcccaaagagacagagaacaccaagcagcccagcaagagctgccacaagcccaaggccatcgtgcacaccgagaaagtgaacatgatgagcctgaccgtgctgggcctgcggatgctgttcgccaaaaccgtggccgtgaacttcctgctgaccgccaagctgttcttcctcctcaccgcccgcgccaagagaagcggatctggcgtgaagcagaccctgaatttcgacctgctgaagctggctggcgacgtggaatccaacccaggccctactagtatggactggatttggcgcatccttttccttgtcggcgctgctaccggcgcgcattccgggccccagctccagctgcaagagtctggacctggcctggtcaagcctagcgagacactgagcctgacctgtaccgtgtccggcgatagcatcagcagcggcgattactactggggctggatcagacagcctcctggcaaaggactggaatggatcggccacatctactacagcggcgtgacctactacaaccccagcctgaagtccagagtgaccatcagcgtggacaccagccggaaccagttctccctgaagctgtctagcgtgacagccgccgataccgccgtgtactactgcaccagagaggacagcagcaactggcggagtagaggccagggaacactggtcacagttagctctggatccggcggaggcggaagtggaggcggaggatctggcggcggaggctctttcgaagaagtgcaactggtggaatcaggcggcggactggtgcagcctggcgagtctctgagactgagctgtgtggcctccggcttcaccttcagccggtacaagatgaactgggtgcgccaggcccctggcaagggactggaatgggtgtcctacatcagccgcagcggcagagacatctactacgccgacagcgtgaagggccggttcaccatcagcagagacaacgccaagaacagcctgtacctccagatgaactccctgcgggacgaggacaccgccgtgtactactgtgccggaaccgtgaccacctattactacttcggcatggacgtgtggggccacggcaccaccgtgacagtgtcatctacgcgtgaggacctgaagaacgtgttcccacctgaggtggccgtgttcgagcctagcgaggccgagatcagccacacccagaaagccaccctcgtgtgcctggctaccggcttctaccccgaccatgtggaactgtcttggtgggtcaacggcaaagaggtgcacagcggcgtgtgtaccgacccccagccactgaaagaacagcccgccctgaacgacagccggtactgcctgagcagcagactgagagtgtccgccaccttctggcagaacccccggaaccacttcagatgccaggtgcagttctacggcctgagcgagaacgacgagtggacccaggacagagccaagcccgtgacccagatcgtgtctgccgaagcctggggcagagccgatgatgtgattaagatccactggcaggaaaagaagtccaacaccatcctgggcagccaggaaggcaacaccatgaagaccaacgacacctacatgaagttcagctggctgaccgtgcccgagaagtccctggacaaagaacacagatgcatcgtgcggcacgaaaacaacaagaacggcgtggaccaggaaatcatcttcccacccatcaagaccgatgtgattacaatggaccccaaggacaactgctccaaggacgccaacgataccctgctgctccagctgaccaacaccagcgcctactacatgtacttgttgctgctgctgaagtccgtggtgtacttcgccatcatcacatgctgcctgctgatggctatggtcaagcggaaggacagccgggga

SEQ ID NO: 6886 - DNA, 3006 bp, synthetic construct
  source 1..3006: mol_type = other DNA
atggccttaccagtgaccgccttgctcctgccgctggccttgctgctccacgccgccaggccggaagtgcagctggttgaatctggcggaggactggttcagcctggcggatctctgagactgtcttgtgccgccagcggcttcagcttcagcgacttttggatgagctgggtccgacaggcccctggcaaaggacttgaatgggtcgccacaatcagccaggccggcagcgagaaggactacgtggactctgtgaagggcagattcaccatcagccgggacaacgccaagaagtccctgtacctccagatgaacagcctgagagccgaggacaccgccgtgtactattgtgcctctggcgtgtacagcttcgactacagaggccagggcaccctggtcacagtctcttctggtaccggcggaggcggatctggcggcggaggtagcggtggcggaggatctgaattcgacatccagatgacccagagccccagcagcctgtctgccagcgtgggcgacagagtgaccatcacctgtagagccagccagggcatcagctcttggctggcctggtatcagcagaagcccgagaaggcccccaagagcctgatctacgccgcctctagtctccagagcggcgtgcccagcagattttctggcagcggctccggcaccgacttcaccctgacaatcagctccctccagcccgaggacttcgccacctactactgccagcagtacaacagctaccctcccacctttggcggaggcaccaaggtggaaatcaagctcgagatccagaaccctgatcctgccgtgtaccagctgcgggatagcaagagcagcgacaagagcgtgtgtctgttcaccgacttcgacagccagaccaacgtgtcccagagcaaggactccgacgtgtacatcaccgataagtgcgtgctggacatgcggagcatggacttcaagagcaactccgccgtggcctggtccaacaagtccgatttcgcctgcgccaacgccttcaacaacagcattatccccgaggacacattcttcccaagccccgagagcagcgactccaccgaccacgtgaagcccaaagagacagagaacaccaagcagcccagcaagagctgccacaagcccaaggccatcgtgcacaccgagaaagtgaacatgatgagcctgaccgtgctgggcctgcggatgctgttcgccaaaaccgtggccgtgaacttcctgctgaccgccaagctgttcttcctcctcaccgcccgcgccaagagaagcggatctggcgtgaagcagaccctgaatttcgacctgctgaagctggctggcgacgtggaatccaacccaggccctactagtatggactggatttggcgcatccttttccttgtcggcgctgctaccggcgcgcattccgggccccagctccagctgcaagagtctggacctggcctggtcaagcctagcgagacactgagcctgacctgtaccgtgtccggcgatagcatcagcagcggcgattactactggggctggatcagacagcctcctggcaaaggactggaatggatcggccacatctactacagcggcgtgacctactacaaccccagcctgaagtccagagtgaccatcagcgtggacaccagccggaaccagttctccctgaagctgtctagcgtgacagccgccgataccgccgtgtactactgcaccagagaggacagcagcaactggcggagtagaggccagggaacactggtcacagttagctctggatccggcggaggcggaagtggaggcggaggatctggcggcggaggctctttcgaagaagtgcaactggtggaatccgggggaggctctgtgcagcctggcgagtctctgagactgagctgtgtggcctccggcttcaccttcagccggtacaagatgaactgggtgcgccaggcccctggcaagggactggaatgggtgtcctacatcagccgcagcggcagagacatctactacgccgacagcgtgaagggccggttcaccatcagcagagacaacgccaagaacagcctgtacctccagatgaactccctgcgggacgaggacaccgccgtgtactactgtgccggaaccgtgaccacctattactacgacttcggcatggacgtgtggggccagggcacaaccgtgacagtgtctagcacgcgtgaggacctgaagaacgtgttcccacctgaggtggccgtgttcgagcctagcgaggccgagatcagccacacccagaaagccaccctcgtgtgcctggctaccggcttctaccccgaccatgtggaactgtcttggtgggtcaacggcaaagaggtgcacagcggcgtgtgtaccgacccccagccactgaaagaacagcccgccctgaacgacagccggtactgcctgagcagcagactgagagtgtccgccaccttctggcagaacccccggaaccacttcagatgccaggtgcagttctacggcctgagcgagaacgacgagtggacccaggacagagccaagcccgtgacccagatcgtgtctgccgaagcctggggcagagccgatgatgtgattaagatccactggcaggaaaagaagtccaacaccatcctgggcagccaggaaggcaacaccatgaagaccaacgacacctacatgaagttcagctggctgaccgtgcccgagaagtccctggacaaagaacacagatgcatcgtgcggcacgaaaacaacaagaacggcgtggaccaggaaatcatcttcccacccatcaagaccgatgtgattacaatggaccccaaggacaactgctccaaggacgccaacgataccctgctgctccagctgaccaacaccagcgcctactacatgtacttgttgctgctgctgaagtccgtggtgtacttcgccatcatcacatgctgcctgctgatggctatggtcaagcggaaggacagccgggga

SEQ ID NO: 6887 - DNA, 3000 bp, synthetic construct
  source 1..3000: mol_type = other DNA
atggccttaccagtgaccgccttgctcctgccgctggccttgctgctccacgccgccaggccggaagtgcagctggttgaatctggcggaggactggttcagcctggcggatctctgagactgtcttgtgccgccagcggcttcagcttcagcgacttttggatgagctgggtccgacaggcccctggcaaaggacttgaatgggtcgccacaatcagccaggccggcagcgagaaggactacgtggactctgtgaagggcagattcaccatcagccgggacaacgccaagaagtccctgtacctccagatgaacagcctgagagccgaggacaccgccgtgtactattgtgcctctggcgtgtacagcttcgactacagaggccagggcaccctggtcacagtctcttctggtaccggcggaggcggatctggcggcggaggtagcggtggcggaggatctgaattccagtctgtgctgacacagcctccatctgcctctggcacacctggacagagagtgaccatcagctgtagcggcagcagaagcaacgtcggcggcaactacgtgttctggtatcagcaggtcccaggcgctacccctaagctgctgatctacagaagcaatcagcggcctagcggcgtgcccgatagatttgccggaagcaagagcggcagctctgccagccttgccatctctggactgagaagcgaggacgaggccgactactactgtgccacctgggatgatagcctgagcggcttcgtgtttggcaccggcaccaaagtgacagtgcttggtctcgagatccagaaccctgatcctgccgtgtaccagctgcgggatagcaagagcagcgacaagagcgtgtgtctgttcaccgacttcgacagccagaccaacgtgtcccagagcaaggactccgacgtgtacatcaccgataagtgcgtgctggacatgcggagcatggacttcaagagcaactccgccgtggcctggtccaacaagtccgatttcgcctgcgccaacgccttcaacaacagcattatccccgaggacacattcttcccaagccccgagagcagcgactccaccgaccacgtgaagcccaaagagacagagaacaccaagcagcccagcaagagctgccacaagcccaaggccatcgtgcacaccgagaaagtgaacatgatgagcctgaccgtgctgggcctgcggatgctgttcgccaaaaccgtggccgtgaacttcctgctgaccgccaagctgttcttcctcctcaccgcccgcgccaagagaagcggatctggcgtgaagcagaccctgaatttcgacctgctgaagctggctggcgacgtggaatccaacccaggccctactagtatggactggatttggcgcatccttttccttgtcggcgctgctaccggcgcgcattccgggccccagctccagctgcaagagtctggacctggcctggtcaagcctagcgagacactgagcctgacctgtaccgtgtccggcgatagcatcagcagcggcgattactactggggctggatcagacagcctcctggcaaaggactggaatggatcggccacatctactacagcggcgtgacctactacaaccccagcctgaagtccagagtgaccatcagcgtggacaccagccggaaccagttctccctgaagctgtctagcgtgacagccgccgataccgccgtgtactactgcaccagagaggacagcagcaactggcggagtagaggccagggaacactggtcacagttagctctggatccggcggaggcggaagtggaggcggaggatctggcggcggaggctctttcgaagttcagctggttgaatctggcggcggactggttaagcctggcggatctctgagactgtcttgtgccgccagcggcttcaccttcagcgattactacatgagctggatcagacaggcccctggcaaaggactggaatgggtgtcctacatcagcagcagcggctccaccatctactacgccgatagcgtgaagggcagattcaccatcagccgggacaacgccaagaacagcctgtacctccagatgaactccctgagagccgaggacaccgccgtgtactattgcgccagaggctacggcaaagcctacgatcaatggggccagggcacactggtcaccgtttcttctacgcgtgaggacctgaagaacgtgttcccacctgaggtggccgtgttcgagcctagcgaggccgagatcagccacacccagaaagccaccctcgtgtgcctggctaccggcttctaccccgaccatgtggaactgtcttggtgggtcaacggcaaagaggtgcacagcggcgtgtgtaccgacccccagccactgaaagaacagcccgccctgaacgacagccggtactgcctgagcagcagactgagagtgtccgccaccttctggcagaacccccggaaccacttcagatgccaggtgcagttctacggcctgagcgagaacgacgagtggacccaggacagagccaagcccgtgacccagatcgtgtctgccgaagcctggggcagagccgatgatgtgattaagatccactggcaggaaaagaagtccaacaccatcctgggcagccaggaaggcaacaccatgaagaccaacgacacctacatgaagttcagctggctgaccgtgcccgagaagtccctggacaaagaacacagatgcatcgtgcggcacgaaaacaacaagaacggcgtggaccaggaaatcatcttcccacccatcaagaccgatgtgattacaatggaccccaaggacaactgctccaaggacgccaacgataccctgctgctccagctgaccaacaccagcgcctactacatgtacttgttgctgctgctgaagtccgtggtgtacttcgccatcatcacatgctgcctgctgatggctatggtcaagcggaaggacagccgggga

SEQ ID NO: 6888 - DNA, 2997 bp, synthetic construct
  source 1..2997: mol_type = other DNA
atggccttaccagtgaccgccttgctcctgccgctggccttgctgctccacgccgccaggccggaagtgcagctggttgaatctggcggaggactggttcagcctggcggatctctgagactgtcttgtgccgccagcggcttcagcttcagcgacttttggatgagctgggtccgacaggcccctggcaaaggacttgaatgggtcgccacaatcagccaggccggcagcgagaaggactacgtggactctgtgaagggcagattcaccatcagccgggacaacgccaagaagtccctgtacctccagatgaacagcctgagagccgaggacaccgccgtgtactattgtgcctctggcgtgtacagcttcgactacagaggccagggcaccctggtcacagtctcttctggtaccggcggaggcggatctggcggcggaggtagcggtggcggaggatctgaattccagtctgtggtcacacagccacctagcatgtctgccgctccaggccagcaagtgaccatctcttgtagcggcggcaacagcaacatcgagcggaactacgtgtcctggtatctgcaactgcctggcacagcccctaagctggtcatcttcgacaacgacagacggcccagcggcatccccgatagattttctggcagcaagagcggcaccagcgccacactgggaattaccggacttcagacaggcgacgaggccgactactactgtggcacatgggactctagcctgagaggctgggttttcggcggaggcacaaagctgacagtgcttggtctcgagatccagaaccctgatcctgccgtgtaccagctgcgggatagcaagagcagcgacaagagcgtgtgtctgttcaccgacttcgacagccagaccaacgtgtcccagagcaaggactccgacgtgtacatcaccgataagtgcgtgctggacatgcggagcatggacttcaagagcaactccgccgtggcctggtccaacaagtccgatttcgcctgcgccaacgccttcaacaacagcattatccccgaggacacattcttcccaagccccgagagcagcgactccaccgaccacgtgaagcccaaagagacagagaacaccaagcagcccagcaagagctgccacaagcccaaggccatcgtgcacaccgagaaagtgaacatgatgagcctgaccgtgctgggcctgcggatgctgttcgccaaaaccgtggccgtgaacttcctgctgaccgccaagctgttcttcctcctcaccgcccgcgccaagagaagcggatctggcgtgaagcagaccctgaatttcgacctgctgaagctggctggcgacgtggaatccaacccaggccctactagtatggactggatttggcgcatccttttccttgtcggcgctgctaccggcgcgcattccgggccccagctccagctgcaagagtctggacctggcctggtcaagcctagcgagacactgagcctgacctgtaccgtgtccggcgatagcatcagcagcggcgattactactggggctggatcagacagcctcctggcaaaggactggaatggatcggccacatctactacagcggcgtgacctactacaaccccagcctgaagtccagagtgaccatcagcgtggacaccagccggaaccagttctccctgaagctgtctagcgtgacagccgccgataccgccgtgtactactgcaccagagaggacagcagcaactggcggagtagaggccagggaacactggtcacagttagctctggatccggcggaggcggaagtggaggcggaggatctggcggcggaggctctttcgaagtgcagctcgttgagtctggcggcggactgattcaacctggcggaagcctgagactgagctgtgccgcttccggcttcaccttcagcaactacgccatgaactgggttcgacaggcccctggcaaaggactggaatgggtgtccaccatcaacggcagaggcagcagcaccatctacgccgattctgtgaagggcagattcaccatcagccgggacaacagcaagaacaccctgtacctccagatgaactccctgagagccgaggacaccgccacctattactgtgcccggtacatcagcagaggactgggcgattcttggggccagggcacactggttacagtgacgcgtgaggacctgaagaacgtgttcccacctgaggtggccgtgttcgagcctagcgaggccgagatcagccacacccagaaagccaccctcgtgtgcctggctaccggcttctaccccgaccatgtggaactgtcttggtgggtcaacggcaaagaggtgcacagcggcgtgtgtaccgacccccagccactgaaagaacagcccgccctgaacgacagccggtactgcctgagcagcagactgagagtgtccgccaccttctggcagaacccccggaaccacttcagatgccaggtgcagttctacggcctgagcgagaacgacgagtggacccaggacagagccaagcccgtgacccagatcgtgtctgccgaagcctggggcagagccgatgatgtgattaagatccactggcaggaaaagaagtccaacaccatcctgggcagccaggaaggcaacaccatgaagaccaacgacacctacatgaagttcagctggctgaccgtgcccgagaagtccctggacaaagaacacagatgcatcgtgcggcacgaaaacaacaagaacggcgtggaccaggaaatcatcttcccacccatcaagaccgatgtgattacaatggaccccaaggacaactgctccaaggacgccaacgataccctgctgctccagctgaccaacaccagcgcctactacatgtacttgttgctgctgctgaagtccgtggtgtacttcgccatcatcacatgctgcctgctgatggctatggtcaagcggaaggacagccgggga

SEQ ID NO: 6889 - DNA, 3000 bp, synthetic construct
  source 1..3000: mol_type = other DNA
atggccttaccagtgaccgccttgctcctgccgctggccttgctgctccacgccgccaggccggaagtgcagctggttgaatctggcggaggactggttcagcctggcggatctctgagactgtcttgtgccgccagcggcttcagcttcagcgacttttggatgagctgggtccgacaggcccctggcaaaggacttgaatgggtcgccacaatcagccaggccggcagcgagaaggactacgtggactctgtgaagggcagattcaccatcagccgggacaacgccaagaagtccctgtacctccagatgaacagcctgagagccgaggacaccgccgtgtactattgtgcctctggcgtgtacagcttcgactacagaggccagggcaccctggtcacagtctcttctggtaccggcggaggcggatctggcggcggaggtagcggtggcggaggatctgaattcgacgtcgtgatgacccagacccctctgagcctgcctgtgtccctgggcgatcaggccagcatcagctgtagaagcagccagagcctggtgcacagcaacggcaacacctacctgcactggtatctccagaagcccggccagagccccaagctgctgatctacaaggtgtccaacagattcagcggcgtgcccgacagattctccggcagcggctctggcaccgacttcaccctgaagatcagccgggtggaagccgaggacctgggcgtgtacttctgtagccagaacacccccgtgccccccaagtttggcagcggcaccaagctggaaatcaagctcgagatccagaaccctgatcctgccgtgtaccagctgcgggatagcaagagcagcgacaagagcgtgtgtctgttcaccgacttcgacagccagaccaacgtgtcccagagcaaggactccgacgtgtacatcaccgataagtgcgtgctggacatgcggagcatggacttcaagagcaactccgccgtggcctggtccaacaagtccgatttcgcctgcgccaacgccttcaacaacagcattatccccgaggacacattcttcccaagccccgagagcagcgactccaccgaccacgtgaagcccaaagagacagagaacaccaagcagcccagcaagagctgccacaagcccaaggccatcgtgcacaccgagaaagtgaacatgatgagcctgaccgtgctgggcctgcggatgctgttcgccaaaaccgtggccgtgaacttcctgctgaccgccaagctgttcttcctcctcaccgcccgcgccaagagaagcggatctggcgtgaagcagaccctgaatttcgacctgctgaagctggctggcgacgtggaatccaacccaggccctactagtatggactggatttggcgcatccttttccttgtcggcgctgctaccggcgcgcattccgggccccagctccagctgcaagagtctggacctggcctggtcaagcctagcgagacactgagcctgacctgtaccgtgtccggcgatagcatcagcagcggcgattactactggggctggatcagacagcctcctggcaaaggactggaatggatcggccacatctactacagcggcgtgacctactacaaccccagcctgaagtccagagtgaccatcagcgtggacaccagccggaaccagttctccctgaagctgtctagcgtgacagccgccgataccgccgtgtactactgcaccagagaggacagcagcaactggcggagtagaggccagggaacactggtcacagttagctctggatccggcggaggcggaagtggaggcggaggatctggcggcggaggctctttcgaacaggtgcagctccagcagtctggcgctgaactcgtgcggcctggcgcttctgtgaagctgtcttgcaaggccagcggctacaccttcaacgactacgagatgcactgggtcaagcagacccctgtgcacggcctgaagtggatcggagccctggaacccaagaccggcgataccgcctacagccagaagttcaagggcaaggccaccctgaccgccgacaagagcagcagcacagcctacatggaactgcggagcctgaccagcgaggacagcgccgtgtactactgcaccagctgctactactacacctacagcggccagggcaccctcgtgacagtgtctgctacgcgtgaggacctgaagaacgtgttcccacctgaggtggccgtgttcgagcctagcgaggccgagatcagccacacccagaaagccaccctcgtgtgcctggctaccggcttctaccccgaccatgtggaactgtcttggtgggtcaacggcaaagaggtgcacagcggcgtgtgtaccgacccccagccactgaaagaacagcccgccctgaacgacagccggtactgcctgagcagcagactgagagtgtccgccaccttctggcagaacccccggaaccacttcagatgccaggtgcagttctacggcctgagcgagaacgacgagtggacccaggacagagccaagcccgtgacccagatcgtgtctgccgaagcctggggcagagccgatgatgtgattaagatccactggcaggaaaagaagtccaacaccatcctgggcagccaggaaggcaacaccatgaagaccaacgacacctacatgaagttcagctggctgaccgtgcccgagaagtccctggacaaagaacacagatgcatcgtgcggcacgaaaacaacaagaacggcgtggaccaggaaatcatcttcccacccatcaagaccgatgtgattacaatggaccccaaggacaactgctccaaggacgccaacgataccctgctgctccagctgaccaacaccagcgcctactacatgtacttgttgctgctgctgaagtccgtggtgtacttcgccatcatcacatgctgcctgctgatggctatggtcaagcggaaggacagccgggga

SEQ ID NO: 6890 - DNA, 2997 bp, synthetic construct
  source 1..2997: mol_type = other DNA
atggccttaccagtgaccgccttgctcctgccgctggccttgctgctccacgccgccaggccggaagtgcagctggttgaatctggcggaggactggttcagcctggcggatctctgagactgtcttgtgccgccagcggcttcagcttcagcgacttttggatgagctgggtccgacaggcccctggcaaaggacttgaatgggtcgccacaatcagccaggccggcagcgagaaggactacgtggactctgtgaagggcagattcaccatcagccgggacaacgccaagaagtccctgtacctccagatgaacagcctgagagccgaggacaccgccgtgtactattgtgcctctggcgtgtacagcttcgactacagaggccagggcaccctggtcacagtctcttctggtaccggcggaggcggatctggcggcggaggtagcggtggcggaggatctgaattcgacatccaactgacccagagccccagcagcctgtctgcctctgtgggcgacagagtgaccatcacctgtagagccagccagggcatcagaaacgacctgggctggtatcagcagaagcccggcaaggcccccaagcggctgatctatgctgccagctccctccagaatggcgtgcccagcagattttccggcagcggctctggcaccgagttcaccctgaccatcagctccctccagcccgaggacttcgccacctactactgcctccagcacaacacctaccccgccttcggccagggcaccaaggtggaaatcaagagactcgagatccagaaccctgatcctgccgtgtaccagctgcgggatagcaagagcagcgacaagagcgtgtgtctgttcaccgacttcgacagccagaccaacgtgtcccagagcaaggactccgacgtgtacatcaccgataagtgcgtgctggacatgcggagcatggacttcaagagcaactccgccgtggcctggtccaacaagtccgatttcgcctgcgccaacgccttcaacaacagcattatccccgaggacacattcttcccaagccccgagagcagcgactccaccgaccacgtgaagcccaaagagacagagaacaccaagcagcccagcaagagctgccacaagcccaaggccatcgtgcacaccgagaaagtgaacatgatgagcctgaccgtgctgggcctgcggatgctgttcgccaaaaccgtggccgtgaacttcctgctgaccgccaagctgttcttcctcctcaccgcccgcgccaagagaagcggatctggcgtgaagcagaccctgaatttcgacctgctgaagctggctggcgacgtggaatccaacccaggccctactagtatggactggatttggcgcatccttttccttgtcggcgctgctaccggcgcgcattccgggccccagctccagctgcaagagtctggacctggcctggtcaagcctagcgagacactgagcctgacctgtaccgtgtccggcgatagcatcagcagcggcgattactactggggctggatcagacagcctcctggcaaaggactggaatggatcggccacatctactacagcggcgtgacctactacaaccccagcctgaagtccagagtgaccatcagcgtggacaccagccggaaccagttctccctgaagctgtctagcgtgacagccgccgataccgccgtgtactactgcaccagagaggacagcagcaactggcggagtagaggccagggaacactggtcacagttagctctggatccggcggaggcggaagtggaggcggaggatctggcggcggaggctctttcgaacaggtgcaactccaggaatctggccctggcctcgtgaagcctagccagaccctgagcctgacctgtaccgtgtctggcggcagcatcagcagcttcaactactactggtcctggatcagacaccaccctggcaagggcctggaatggatcggctacatctactacagcggcagcacctacagcaaccccagcctgaagtcccgcgtgaccatctccgtggacaccagcaagaaccagtttagcctgaccctgtccagcgtgacagccgccgataccgccgtgtactactgcgccagaggctacaactggaactacttcgactactggggccagggaaccctcgtgaccgtgtctagtacgcgtgaggacctgaagaacgtgttcccacctgaggtggccgtgttcgagcctagcgaggccgagatcagccacacccagaaagccaccctcgtgtgcctggctaccggcttctaccccgaccatgtggaactgtcttggtgggtcaacggcaaagaggtgcacagcggcgtgtgtaccgacccccagccactgaaagaacagcccgccctgaacgacagccggtactgcctgagcagcagactgagagtgtccgccaccttctggcagaacccccggaaccacttcagatgccaggtgcagttctacggcctgagcgagaacgacgagtggacccaggacagagccaagcccgtgacccagatcgtgtctgccgaagcctggggcagagccgatgatgtgattaagatccactggcaggaaaagaagtccaacaccatcctgggcagccaggaaggcaacaccatgaagaccaacgacacctacatgaagttcagctggctgaccgtgcccgagaagtccctggacaaagaacacagatgcatcgtgcggcacgaaaacaacaagaacggcgtggaccaggaaatcatcttcccacccatcaagaccgatgtgattacaatggaccccaaggacaactgctccaaggacgccaacgataccctgctgctccagctgaccaacaccagcgcctactacatgtacttgttgctgctgctgaagtccgtggtgtacttcgccatcatcacatgctgcctgctgatggctatggtcaagcggaaggacagccgggga

SEQ ID NO: 6891 - DNA, 3003 bp, synthetic construct
  source 1..3003: mol_type = other DNA
atggccttaccagtgaccgccttgctcctgccgctggccttgctgctccacgccgccaggccggaagtgcagctggttgaatctggcggaggactggttcagcctggcggatctctgagactgtcttgtgccgccagcggcttcagcttcagcgacttttggatgagctgggtccgacaggcccctggcaaaggacttgaatgggtcgccacaatcagccaggccggcagcgagaaggactacgtggactctgtgaagggcagattcaccatcagccgggacaacgccaagaagtccctgtacctccagatgaacagcctgagagccgaggacaccgccgtgtactattgtgcctctggcgtgtacagcttcgactacagaggccagggcaccctggtcacagtctcttctggtaccggcggaggcggatctggcggcggaggtagcggtggcggaggatctgaattcgacgacatcgtgctgacccagagccccgccagcctggccgtgagcctgggccagagcgtgaccatcagctgcagagccagcgagagcgtggagtactacggcaccagcctgatgcagtggtaccagcagaagcccggccagccccccaagctgctgatctacgccaccagcaacgtggagagcggcgtgcccgccagattcagcggcagcggcagcggcaccgacttcagcctgaacatccaccccgtggaggaggacgacatcgccatgtacttctgccagcagagcagaaagctgcccagcaccttcggcggcggcaccaagctggagatcaagctcgagatccagaaccctgatcctgccgtgtaccagctgcgggatagcaagagcagcgacaagagcgtgtgtctgttcaccgacttcgacagccagaccaacgtgtcccagagcaaggactccgacgtgtacatcaccgataagtgcgtgctggacatgcggagcatggacttcaagagcaactccgccgtggcctggtccaacaagtccgatttcgcctgcgccaacgccttcaacaacagcattatccccgaggacacattcttcccaagccccgagagcagcgactccaccgaccacgtgaagcccaaagagacagagaacaccaagcagcccagcaagagctgccacaagcccaaggccatcgtgcacaccgagaaagtgaacatgatgagcctgaccgtgctgggcctgcggatgctgttcgccaaaaccgtggccgtgaacttcctgctgaccgccaagctgttcttcctcctcaccgcccgcgccaagagaagcggatctggcgtgaagcagaccctgaatttcgacctgctgaagctggctggcgacgtggaatccaacccaggccctactagtatggactggatttggcgcatccttttccttgtcggcgctgctaccggcgcgcattccgggccccagctccagctgcaagagtctggacctggcctggtcaagcctagcgagacactgagcctgacctgtaccgtgtccggcgatagcatcagcagcggcgattactactggggctggatcagacagcctcctggcaaaggactggaatggatcggccacatctactacagcggcgtgacctactacaaccccagcctgaagtccagagtgaccatcagcgtggacaccagccggaaccagttctccctgaagctgtctagcgtgacagccgccgataccgccgtgtactactgcaccagagaggacagcagcaactggcggagtagaggccagggaacactggtcacagttagctctggatccggcggaggcggaagtggaggcggaggatctggcggcggaggctctttcgaagacgtgagactgcaggagagcggccccggccaggtgaagcccagccagaccgtgagcctgacctgcagcgtgaccggctacagcatcaccaacggcaaccactggtggaactggatcagacaggtgagcggcagcaagctggagtggatcggctacatcagcagcagcggcagcaccgacagcaaccccagcctgaagagcagaatcagcatcaccagagacaccagcaagaaccagctgttcctgcagctgaacagcgtgaccaccgaggacatcgccacctactactgcgccagaggctactacttcgactactggggccagggcaccaccctgaccgtgagcagcacgcgtgaggacctgaagaacgtgttcccacctgaggtggccgtgttcgagcctagcgaggccgagatcagccacacccagaaagccaccctcgtgtgcctggctaccggcttctaccccgaccatgtggaactgtcttggtgggtcaacggcaaagaggtgcacagcggcgtgtgtaccgacccccagccactgaaagaacagcccgccctgaacgacagccggtactgcctgagcagcagactgagagtgtccgccaccttctggcagaacccccggaaccacttcagatgccaggtgcagttctacggcctgagcgagaacgacgagtggacccaggacagagccaagcccgtgacccagatcgtgtctgccgaagcctggggcagagccgatgatgtgattaagatccactggcaggaaaagaagtccaacaccatcctgggcagccaggaaggcaacaccatgaagaccaacgacacctacatgaagttcagctggctgaccgtgcccgagaagtccctggacaaagaacacagatgcatcgtgcggcacgaaaacaacaagaacggcgtggaccaggaaatcatcttcccacccatcaagaccgatgtgattacaatggaccccaaggacaactgctccaaggacgccaacgataccctgctgctccagctgaccaacaccagcgcctactacatgtacttgttgctgctgctgaagtccgtggtgtacttcgccatcatcacatgctgcctgctgatggctatggtcaagcggaaggacagccgggga

SEQ ID NO: 6892 - DNA, 3000 bp, synthetic construct
  source 1..3000: mol_type = other DNA
atggccttaccagtgaccgccttgctcctgccgctggccttgctgctccacgccgccaggccggaagtgcagctggttgaatctggcggaggactggttcagcctggcggatctctgagactgtcttgtgccgccagcggcttcagcttcagcgacttttggatgagctgggtccgacaggcccctggcaaaggacttgaatgggtcgccacaatcagccaggccggcagcgagaaggactacgtggactctgtgaagggcagattcaccatcagccgggacaacgccaagaagtccctgtacctccagatgaacagcctgagagccgaggacaccgccgtgtactattgtgcctctggcgtgtacagcttcgactacagaggccagggcaccctggtcacagtctcttctggtaccggcggaggcggatctggcggcggaggtagcggtggcggaggatctgaattcgacatccagatgacccagagccccagcagcctgtctgccagcgtgggcgacagagtgaccatcacctgtagagccagccaggacgtgaacaccgccgtggcctggtatcagcagaagcctggcaaggcccccaagctgctgatctacagcgccagcttcctggaaagcggcgtgcccagcagattcagcggaagcagaagcggcaccgacttcaccctgaccatcagctccctccagcccgaggacttcgccacctactactgccagcagcactacaccacccctcccaccttcggccagaccaaggtggaaatcaagagactcgagatccagaaccctgatcctgccgtgtaccagctgcgggatagcaagagcagcgacaagagcgtgtgtctgttcaccgacttcgacagccagaccaacgtgtcccagagcaaggactccgacgtgtacatcaccgataagtgcgtgctggacatgcggagcatggacttcaagagcaactccgccgtggcctggtccaacaagtccgatttcgcctgcgccaacgccttcaacaacagcattatccccgaggacacattcttcccaagccccgagagcagcgactccaccgaccacgtgaagcccaaagagacagagaacaccaagcagcccagcaagagctgccacaagcccaaggccatcgtgcacaccgagaaagtgaacatgatgagcctgaccgtgctgggcctgcggatgctgttcgccaaaaccgtggccgtgaacttcctgctgaccgccaagctgttcttcctcctcaccgcccgcgccaagagaagcggatctggcgtgaagcagaccctgaatttcgacctgctgaagctggctggcgacgtggaatccaacccaggccctactagtatggactggatttggcgcatccttttccttgtcggcgctgctaccggcgcgcattccgggccccagctccagctgcaagagtctggacctggcctggtcaagcctagcgagacactgagcctgacctgtaccgtgtccggcgatagcatcagcagcggcgattactactggggctggatcagacagcctcctggcaaaggactggaatggatcggccacatctactacagcggcgtgacctactacaaccccagcctgaagtccagagtgaccatcagcgtggacaccagccggaaccagttctccctgaagctgtctagcgtgacagccgccgataccgccgtgtactactgcaccagagaggacagcagcaactggcggagtagaggccagggaacactggtcacagttagctctggatccggcggaggcggaagtggaggcggaggatctggcggcggaggctctttcgaagaagtgcaactggtggaatctggcggcggactggtgcagcctggcggatctctgagactgagctgtgccgccagcggcttcaacatcaaggacacctacatccactgggtgcgccaggcccctggaaagggactggaatgggtggcccggatctaccccaccaacggctacaccagatacgccgacagcgtgaagggccggttcaccatcagcgccgacaccagcaagaataccgcctacctccagatgaacagcctgcgggccgaggataccgccgtgtactactgctcaagatggggaggcgacggcttctacgctatggacgtgtggggccagggcacccttgtgaccgtgtcatctacgcgtgaggacctgaagaacgtgttcccacctgaggtggccgtgttcgagcctagcgaggccgagatcagccacacccagaaagccaccctcgtgtgcctggctaccggcttctaccccgaccatgtggaactgtcttggtgggtcaacggcaaagaggtgcacagcggcgtgtgtaccgacccccagccactgaaagaacagcccgccctgaacgacagccggtactgcctgagcagcagactgagagtgtccgccaccttctggcagaacccccggaaccacttcagatgccaggtgcagttctacggcctgagcgagaacgacgagtggacccaggacagagccaagcccgtgacccagatcgtgtctgccgaagcctggggcagagccgatgatgtgattaagatccactggcaggaaaagaagtccaacaccatcctgggcagccaggaaggcaacaccatgaagaccaacgacacctacatgaagttcagctggctgaccgtgcccgagaagtccctggacaaagaacacagatgcatcgtgcggcacgaaaacaacaagaacggcgtggaccaggaaatcatcttcccacccatcaagaccgatgtgattacaatggaccccaaggacaactgctccaaggacgccaacgataccctgctgctccagctgaccaacaccagcgcctactacatgtacttgttgctgctgctgaagtccgtggtgtacttcgccatcatcacatgctgcctgctgatggctatggtcaagcggaaggacagccgggga

SEQ ID NO: 6893 - DNA, 2997 bp, synthetic construct
  source 1..2997: mol_type = other DNA
atggccttaccagtgaccgccttgctcctgccgctggccttgctgctccacgccgccaggccggaagtgcagctggttgaatctggcggaggactggttcagcctggcggatctctgagactgtcttgtgccgccagcggcttcagcttcagcgacttttggatgagctgggtccgacaggcccctggcaaaggacttgaatgggtcgccacaatcagccaggccggcagcgagaaggactacgtggactctgtgaagggcagattcaccatcagccgggacaacgccaagaagtccctgtacctccagatgaacagcctgagagccgaggacaccgccgtgtactattgtgcctctggcgtgtacagcttcgactacagaggccagggcaccctggtcacagtctcttctggtaccggcggaggcggatctggcggcggaggtagcggtggcggaggatctgaattcgaccagagcgtgctgacacagcctcctagcgtgtcagtggcccctggcaagaccgccagaatcccctgcgagggcaactacatcggcagcagcaacgtgcactggtatcagcagaagcccggccaggctcccgtgctcgtgatccacttcgacagcgacagacccagcggcatccccgacagattcagcggcagcaacagcggcaacatggctaccctgaccatcagcagagtggaagccggggacgaggccgactactactgtcaagtgtgggagaaccacggctgggtgttcggcggaggcaccaagctgacagtgctgtctctcgagatccagaaccctgatcctgccgtgtaccagctgcgggatagcaagagcagcgacaagagcgtgtgtctgttcaccgacttcgacagccagaccaacgtgtcccagagcaaggactccgacgtgtacatcaccgataagtgcgtgctggacatgcggagcatggacttcaagagcaactccgccgtggcctggtccaacaagtccgatttcgcctgcgccaacgccttcaacaacagcattatccccgaggacacattcttcccaagccccgagagcagcgactccaccgaccacgtgaagcccaaagagacagagaacaccaagcagcccagcaagagctgccacaagcccaaggccatcgtgcacaccgagaaagtgaacatgatgagcctgaccgtgctgggcctgcggatgctgttcgccaaaaccgtggccgtgaacttcctgctgaccgccaagctgttcttcctcctcaccgcccgcgccaagagaagcggatctggcgtgaagcagaccctgaatttcgacctgctgaagctggctggcgacgtggaatccaacccaggccctactagtatggactggatttggcgcatccttttccttgtcggcgctgctaccggcgcgcattccgggccccagctccagctgcaagagtctggacctggcctggtcaagcctagcgagacactgagcctgacctgtaccgtgtccggcgatagcatcagcagcggcgattactactggggctggatcagacagcctcctggcaaaggactggaatggatcggccacatctactacagcggcgtgacctactacaaccccagcctgaagtccagagtgaccatcagcgtggacaccagccggaaccagttctccctgaagctgtctagcgtgacagccgccgataccgccgtgtactactgcaccagagaggacagcagcaactggcggagtagaggccagggaacactggtcacagttagctctggatccggcggaggcggaagtggaggcggaggatctggcggcggaggctctttcgaagaggtgcaactggtggaaacaggcggcggactggtgcagcctggcgagtctctgagactgagctgtgccgccagcggcttcaccttcagcgactacgagatgaactgggtgcgccaggcccctggaaagggcctggaatgggtgtcctacatcagcagctccggcagcaccatctactacgccgacagcgtgaagggccggtttaccatctaccgggacaacgccaagaacagcctgtacctccagatgaactccctgcgggccgaggacaccgccctgtactattgtgccagagcctggggcgtgggaccccctgattattggggacagggcaccctcgtgaccgtgtcctctacgcgtgaggacctgaagaacgtgttcccacctgaggtggccgtgttcgagcctagcgaggccgagatcagccacacccagaaagccaccctcgtgtgcctggctaccggcttctaccccgaccatgtggaactgtcttggtgggtcaacggcaaagaggtgcacagcggcgtgtgtaccgacccccagccactgaaagaacagcccgccctgaacgacagccggtactgcctgagcagcagactgagagtgtccgccaccttctggcagaacccccggaaccacttcagatgccaggtgcagttctacggcctgagcgagaacgacgagtggacccaggacagagccaagcccgtgacccagatcgtgtctgccgaagcctggggcagagccgatgatgtgattaagatccactggcaggaaaagaagtccaacaccatcctgggcagccaggaaggcaacaccatgaagaccaacgacacctacatgaagttcagctggctgaccgtgcccgagaagtccctggacaaagaacacagatgcatcgtgcggcacgaaaacaacaagaacggcgtggaccaggaaatcatcttcccacccatcaagaccgatgtgattacaatggaccccaaggacaactgctccaaggacgccaacgataccctgctgctccagctgaccaacaccagcgcctactacatgtacttgttgctgctgctgaagtccgtggtgtacttcgccatcatcacatgctgcctgctgatggctatggtcaagcggaaggacagccgggga

SEQ ID NO: 6894 - DNA, 3021 bp, synthetic construct
  source 1..3021: mol_type = other DNA
atggccttaccagtgaccgccttgctcctgccgctggccttgctgctccacgccgccaggccggaagtgcagctggttgaatctggcggaggactggttcagcctggcggatctctgagactgtcttgtgccgccagcggcttcagcttcagcgacttttggatgagctgggtccgacaggcccctggcaaaggacttgaatgggtcgccacaatcagccaggccggcagcgagaaggactacgtggactctgtgaagggcagattcaccatcagccgggacaacgccaagaagtccctgtacctccagatgaacagcctgagagccgaggacaccgccgtgtactattgtgcctctggcgtgtacagcttcgactacagaggccagggcaccctggtcacagtctcttctggtaccggcggaggcggatctggcggcggaggtagcggtggcggaggatctgaattcgacatccagatgacccagagccccagcagcctgtctgccagcgtgggcgataccgtgaccatcacctgtcaggccaacggctacctgaactggtatcagcagcggagaggcaaggcccccaagctgctgatctacgacggcagcaagctggaaagaggcgtgcccagcagattcagcggcagaagatggggccaggagtacaacctgaccatcaacaacctccagcccgaggatattgccacatacttttgccaggtgtacgagttcgtggtgcccggcacacggctggacctgaagagaacagtggctgctcctctcgagatccagaaccctgatcctgccgtgtaccagctgcgggatagcaagagcagcgacaagagcgtgtgtctgttcaccgacttcgacagccagaccaacgtgtcccagagcaaggactccgacgtgtacatcaccgataagtgcgtgctggacatgcggagcatggacttcaagagcaactccgccgtggcctggtccaacaagtccgatttcgcctgcgccaacgccttcaacaacagcattatccccgaggacacattcttcccaagccccgagagcagcgactccaccgaccacgtgaagcccaaagagacagagaacaccaagcagcccagcaagagctgccacaagcccaaggccatcgtgcacaccgagaaagtgaacatgatgagcctgaccgtgctgggcctgcggatgctgttcgccaaaaccgtggccgtgaacttcctgctgaccgccaagctgttcttcctcctcaccgcccgcgccaagagaagcggatctggcgtgaagcagaccctgaatttcgacctgctgaagctggctggcgacgtggaatccaacccaggccctactagtatggactggatttggcgcatccttttccttgtcggcgctgctaccggcgcgcattccgggccccagctccagctgcaagagtctggacctggcctggtcaagcctagcgagacactgagcctgacctgtaccgtgtccggcgatagcatcagcagcggcgattactactggggctggatcagacagcctcctggcaaaggactggaatggatcggccacatctactacagcggcgtgacctactacaaccccagcctgaagtccagagtgaccatcagcgtggacaccagccggaaccagttctccctgaagctgtctagcgtgacagccgccgataccgccgtgtactactgcaccagagaggacagcagcaactggcggagtagaggccagggaacactggtcacagttagctctggatccggcggaggcggaagtggaggcggaggatctggcggcggaggctctttcgaacaggtgcagctgctccagtctggcgctgccgtgacaaagcctggcgcttctgtgcgggtgtcctgtgaagccagcggctacaacatccgggactacttcatccactggtggcggcaggctccaggccagggactccagtgggtgggatggatcaaccccaagaccggccagcccaacaaccccagacagttccagggcagagtgtccctgaccagacacgccagctgggacttcgacaccttcagcttctacatggatctgaaggccctgcggagcgacgataccgccgtgtacttctgcgccagacagagaagcgactactgggatttcgacgtgtggggcagcggcacccaagtgacagtgtctagcgccagcaccaagggacccacgcgtgaggacctgaagaacgtgttcccacctgaggtggccgtgttcgagcctagcgaggccgagatcagccacacccagaaagccaccctcgtgtgcctggctaccggcttctaccccgaccatgtggaactgtcttggtgggtcaacggcaaagaggtgcacagcggcgtgtgtaccgacccccagccactgaaagaacagcccgccctgaacgacagccggtactgcctgagcagcagactgagagtgtccgccaccttctggcagaacccccggaaccacttcagatgccaggtgcagttctacggcctgagcgagaacgacgagtggacccaggacagagccaagcccgtgacccagatcgtgtctgccgaagcctggggcagagccgatgatgtgattaagatccactggcaggaaaagaagtccaacaccatcctgggcagccaggaaggcaacaccatgaagaccaacgacacctacatgaagttcagctggctgaccgtgcccgagaagtccctggacaaagaacacagatgcatcgtgcggcacgaaaacaacaagaacggcgtggaccaggaaatcatcttcccacccatcaagaccgatgtgattacaatggaccccaaggacaactgctccaaggacgccaacgataccctgctgctccagctgaccaacaccagcgcctactacatgtacttgttgctgctgctgaagtccgtggtgtacttcgccatcatcacatgctgcctgctgatggctatggtcaagcggaaggacagccgggga

SEQ ID NO: 6895 - DNA, 3039 bp, synthetic construct
  source 1..3039: mol_type = other DNA
atggccttaccagtgaccgccttgctcctgccgctggccttgctgctccacgccgccaggccggaagtgcagctggttgaatctggcggaggactggttcagcctggcggatctctgagactgtcttgtgccgccagcggcttcagcttcagcgacttttggatgagctgggtccgacaggcccctggcaaaggacttgaatgggtcgccacaatcagccaggccggcagcgagaaggactacgtggactctgtgaagggcagattcaccatcagccgggacaacgccaagaagtccctgtacctccagatgaacagcctgagagccgaggacaccgccgtgtactattgtgcctctggcgtgtacagcttcgactacagaggccagggcaccctggtcacagtctcttctggtaccggcggaggcggatctggcggcggaggtagcggtggcggaggatctgaattccagtctgccctgacacagcctcctagcgcctctggctctcccggccagagcatcaccatcagctgtaccggcaccagcaacaacttcgtgtcctggtatcagcagcacgccggcaaggcccccaagctcgtgatctacgacgtgaacaagcggcccagcggcgtgcccgatagattcagcggcagcaagagcggcaacaccgccagcctgacagtgtctggcctccagaccgatgacgaggccgtgtactactgcggcagcctcgtgggcaactgggacgtgatctttggcggaggcaccaagctgaccgtgctgctcgagatccagaaccctgatcctgccgtgtaccagctgcgggatagcaagagcagcgacaagagcgtgtgtctgttcaccgacttcgacagccagaccaacgtgtcccagagcaaggactccgacgtgtacatcaccgataagtgcgtgctggacatgcggagcatggacttcaagagcaactccgccgtggcctggtccaacaagtccgatttcgcctgcgccaacgccttcaacaacagcattatccccgaggacacattcttcccaagccccgagagcagcgactccaccgaccacgtgaagcccaaagagacagagaacaccaagcagcccagcaagagctgccacaagcccaaggccatcgtgcacaccgagaaagtgaacatgatgagcctgaccgtgctgggcctgcggatgctgttcgccaaaaccgtggccgtgaacttcctgctgaccgccaagctgttcttcctcctcaccgcccgcgccaagagaagcggatctggcgtgaagcagaccctgaatttcgacctgctgaagctggctggcgacgtggaatccaacccaggccctactagtatggactggatttggcgcatccttttccttgtcggcgctgctaccggcgcgcattccgggccccagctccagctgcaagagtctggacctggcctggtcaagcctagcgagacactgagcctgacctgtaccgtgtccggcgatagcatcagcagcggcgattactactggggctggatcagacagcctcctggcaaaggactggaatggatcggccacatctactacagcggcgtgacctactacaaccccagcctgaagtccagagtgaccatcagcgtggacaccagccggaaccagttctccctgaagctgtctagcgtgacagccgccgataccgccgtgtactactgcaccagagaggacagcagcaactggcggagtagaggccagggaacactggtcacagttagctctggatccggcggaggcggaagtggaggcggaggatctggcggcggaggctctttcgaacagccccagctccaggaatctggccccacactggtggaagccagcgagacactgagcctgacctgtgccgtgtccggcgattctaccgccgcctgcaatagcttctggggctgggtgcgccagcctcctggaaagggactggaatgggtgggaagcctgagccactgcgccagctattggaaccggggctggacctaccacaaccccagcctgaagtccagactgaccctggccctggacacccccaagaacctggtgttcctgaagctgaacagcgtgacagccgccgacaccgccacctactactgtgccagatttggcggcgaggtgctgcggtacaccgactggcctaaacctgcctgggtggacctgtggggcagaggaacactcgtgaccgtgtccagcacgcgtgaggacctgaagaacgtgttcccacctgaggtggccgtgttcgagcctagcgaggccgagatcagccacacccagaaagccaccctcgtgtgcctggctaccggcttctaccccgaccatgtggaactgtcttggtgggtcaacggcaaagaggtgcacagcggcgtgtgtaccgacccccagccactgaaagaacagcccgccctgaacgacagccggtactgcctgagcagcagactgagagtgtccgccaccttctggcagaacccccggaaccacttcagatgccaggtgcagttctacggcctgagcgagaacgacgagtggacccaggacagagccaagcccgtgacccagatcgtgtctgccgaagcctggggcagagccgatgatgtgattaagatccactggcaggaaaagaagtccaacaccatcctgggcagccaggaaggcaacaccatgaagaccaacgacacctacatgaagttcagctggctgaccgtgcccgagaagtccctggacaaagaacacagatgcatcgtgcggcacgaaaacaacaagaacggcgtggaccaggaaatcatcttcccacccatcaagaccgatgtgattacaatggaccccaaggacaactgctccaaggacgccaacgataccctgctgctccagctgaccaacaccagcgcctactacatgtacttgttgctgctgctgaagtccgtggtgtacttcgccatcatcacatgctgcctgctgatggctatggtcaagcggaaggacagccgggga

SEQ ID NO: 6896 - DNA, 2994 bp, synthetic construct
  source 1..2994: mol_type = other DNA
atggccttaccagtgaccgccttgctcctgccgctggccttgctgctccacgccgccaggccggaagtgcagctggttgaatctggcggaggactggttcagcctggcggatctctgagactgtcttgtgccgccagcggcttcagcttcagcgacttttggatgagctgggtccgacaggcccctggcaaaggacttgaatgggtcgccacaatcagccaggccggcagcgagaaggactacgtggactctgtgaagggcagattcaccatcagccgggacaacgccaagaagtccctgtacctccagatgaacagcctgagagccgaggacaccgccgtgtactattgtgcctctggcgtgtacagcttcgactacagaggccagggcaccctggtcacagtctcttctggtaccggcggaggcggatctggcggcggaggtagcggtggcggaggatctgaattcgagatcgtgctgacacagagccctggcaccctgagcctgtctccaggcgagacagccatcatcagctgccggacaagccagtacggcagcctggcctggtatcagcagaggccaggacaggcccccagactcgtgatctacagcggcagcacaagagccgccggaatccccgatagattcagcggctccagatggggacccgactacaacctgaccatcagcaacctggaaagcggcgacttcggcgtgtactactgccagcagtacgagttcttcggccagggcaccaaggtgcaggtggacatcaaaagactcgagatccagaaccctgatcctgccgtgtaccagctgcgggatagcaagagcagcgacaagagcgtgtgtctgttcaccgacttcgacagccagaccaacgtgtcccagagcaaggactccgacgtgtacatcaccgataagtgcgtgctggacatgcggagcatggacttcaagagcaactccgccgtggcctggtccaacaagtccgatttcgcctgcgccaacgccttcaacaacagcattatccccgaggacacattcttcccaagccccgagagcagcgactccaccgaccacgtgaagcccaaagagacagagaacaccaagcagcccagcaagagctgccacaagcccaaggccatcgtgcacaccgagaaagtgaacatgatgagcctgaccgtgctgggcctgcggatgctgttcgccaaaaccgtggccgtgaacttcctgctgaccgccaagctgttcttcctcctcaccgcccgcgccaagagaagcggatctggcgtgaagcagaccctgaatttcgacctgctgaagctggctggcgacgtggaatccaacccaggccctactagtatggactggatttggcgcatccttttccttgtcggcgctgctaccggcgcgcattccgggccccagctccagctgcaagagtctggacctggcctggtcaagcctagcgagacactgagcctgacctgtaccgtgtccggcgatagcatcagcagcggcgattactactggggctggatcagacagcctcctggcaaaggactggaatggatcggccacatctactacagcggcgtgacctactacaaccccagcctgaagtccagagtgaccatcagcgtggacaccagccggaaccagttctccctgaagctgtctagcgtgacagccgccgataccgccgtgtactactgcaccagagaggacagcagcaactggcggagtagaggccagggaacactggtcacagttagctctggatccggcggaggcggaagtggaggcggaggatctggcggcggaggctctttcgaacaggtgcagctggtgcagtctggcggccagatgaagaaacccggcgagagcatgagaatcagctgtcgggcctccggctacgagttcatcgactgcaccctgaactggatcagactggcccctggcaagcggcctgagtggatgggatggctgaagcctagaggcggagccgtgaactacgccagacctctccagggcagagtgaccatgaccagggacgtgtacagcgataccgccttcctggaactgcggagcctgaccgtggatgataccgccgtgtacttctgcaccagaggcaagaactgcgattacaactgggacttcgagcactggggcagaggcacccctgtgatcgtgtctagcacgcgtgaggacctgaagaacgtgttcccacctgaggtggccgtgttcgagcctagcgaggccgagatcagccacacccagaaagccaccctcgtgtgcctggctaccggcttctaccccgaccatgtggaactgtcttggtgggtcaacggcaaagaggtgcacagcggcgtgtgtaccgacccccagccactgaaagaacagcccgccctgaacgacagccggtactgcctgagcagcagactgagagtgtccgccaccttctggcagaacccccggaaccacttcagatgccaggtgcagttctacggcctgagcgagaacgacgagtggacccaggacagagccaagcccgtgacccagatcgtgtctgccgaagcctggggcagagccgatgatgtgattaagatccactggcaggaaaagaagtccaacaccatcctgggcagccaggaaggcaacaccatgaagaccaacgacacctacatgaagttcagctggctgaccgtgcccgagaagtccctggacaaagaacacagatgcatcgtgcggcacgaaaacaacaagaacggcgtggaccaggaaatcatcttcccacccatcaagaccgatgtgattacaatggaccccaaggacaactgctccaaggacgccaacgataccctgctgctccagctgaccaacaccagcgcctactacatgtacttgttgctgctgctgaagtccgtggtgtacttcgccatcatcacatgctgcctgctgatggctatggtcaagcggaaggacagccgggga

SEQ ID NO: 6897 - DNA, 3024 bp, synthetic construct
  source 1..3024: mol_type = other DNA
atggccttaccagtgaccgccttgctcctgccgctggccttgctgctccacgccgccaggccggaagtgcagctggttgaatctggcggaggactggttcagcctggcggatctctgagactgtcttgtgccgccagcggcttcagcttcagcgacttttggatgagctgggtccgacaggcccctggcaaaggacttgaatgggtcgccacaatcagccaggccggcagcgagaaggactacgtggactctgtgaagggcagattcaccatcagccgggacaacgccaagaagtccctgtacctccagatgaacagcctgagagccgaggacaccgccgtgtactattgtgcctctggcgtgtacagcttcgactacagaggccagggcaccctggtcacagtctcttctggtaccggcggaggcggatctggcggcggaggtagcggtggcggaggatctgaattcgagctggtgctgacacagagccctggcaccctgtctctgtctgccggcgaaagagccaccctgagctgtagagccagccagagcgtgtcctctggcagcctggcttggtatcagcagaagccaggccaggcccccagactgctgatctacggcgcttctaccagagccaccggcatccccgatagattcagcggctctggctccggcaccgacttcaccctgacaatcggcagactggaacccgaggacctggccgtgtactactgccagcagtacggcaccagcccctacacattcggccagggcaccaagctggaaatcctcgagatccagaaccctgatcctgccgtgtaccagctgcgggatagcaagagcagcgacaagagcgtgtgtctgttcaccgacttcgacagccagaccaacgtgtcccagagcaaggactccgacgtgtacatcaccgataagtgcgtgctggacatgcggagcatggacttcaagagcaactccgccgtggcctggtccaacaagtccgatttcgcctgcgccaacgccttcaacaacagcattatccccgaggacacattcttcccaagccccgagagcagcgactccaccgaccacgtgaagcccaaagagacagagaacaccaagcagcccagcaagagctgccacaagcccaaggccatcgtgcacaccgagaaagtgaacatgatgagcctgaccgtgctgggcctgcggatgctgttcgccaaaaccgtggccgtgaacttcctgctgaccgccaagctgttcttcctcctcaccgcccgcgccaagagaagcggatctggcgtgaagcagaccctgaatttcgacctgctgaagctggctggcgacgtggaatccaacccaggccctactagtatggactggatttggcgcatccttttccttgtcggcgctgctaccggcgcgcattccgggccccagctccagctgcaagagtctggacctggcctggtcaagcctagcgagacactgagcctgacctgtaccgtgtccggcgatagcatcagcagcggcgattactactggggctggatcagacagcctcctggcaaaggactggaatggatcggccacatctactacagcggcgtgacctactacaaccccagcctgaagtccagagtgaccatcagcgtggacaccagccggaaccagttctccctgaagctgtctagcgtgacagccgccgataccgccgtgtactactgcaccagagaggacagcagcaactggcggagtagaggccagggaacactggtcacagttagctctggatccggcggaggcggaagtggaggcggaggatctggcggcggaggctctttcgaactggaacagagcggagccgaagtgaagaaacccggcagcagcgtgcaggtgtcctgcaaagcaagcggcggcaccttctctatgtacggcttcaactgggtgcgccaggctcctggacacggcctggaatggatgggcggcatcatccccatcttcggcacctccaactacgcccagaaattccggggcagagtgaccttcaccgccgaccaggccacaagcaccgcctacatggaactgaccaacctgcggagcgacgacaccgccgtgtattattgcgccagagacttcggccccgactgggaggatggcgacagctacgatggcagcggcagaggcttcttcgacttctggggccagggaacccttgtgaccgtgtcctcaacgcgtgaggacctgaagaacgtgttcccacctgaggtggccgtgttcgagcctagcgaggccgagatcagccacacccagaaagccaccctcgtgtgcctggctaccggcttctaccccgaccatgtggaactgtcttggtgggtcaacggcaaagaggtgcacagcggcgtgtgtaccgacccccagccactgaaagaacagcccgccctgaacgacagccggtactgcctgagcagcagactgagagtgtccgccaccttctggcagaacccccggaaccacttcagatgccaggtgcagttctacggcctgagcgagaacgacgagtggacccaggacagagccaagcccgtgacccagatcgtgtctgccgaagcctggggcagagccgatgatgtgattaagatccactggcaggaaaagaagtccaacaccatcctgggcagccaggaaggcaacaccatgaagaccaacgacacctacatgaagttcagctggctgaccgtgcccgagaagtccctggacaaagaacacagatgcatcgtgcggcacgaaaacaacaagaacggcgtggaccaggaaatcatcttcccacccatcaagaccgatgtgattacaatggaccccaaggacaactgctccaaggacgccaacgataccctgctgctccagctgaccaacaccagcgcctactacatgtacttgttgctgctgctgaagtccgtggtgtacttcgccatcatcacatgctgcctgctgatggctatggtcaagcggaaggacagccgggga

SEQ ID NO: 6898 - DNA, 2964 bp, synthetic construct
  source 1..2964: mol_type = other DNA
atggccttaccagtgaccgccttgctcctgccgctggccttgctgctccacgccgccaggccggaagtgcagctggttgaatctggcggaggactggttcagcctggcggatctctgagactgtcttgtgccgccagcggcttcagcttcagcgacttttggatgagctgggtccgacaggcccctggcaaaggacttgaatgggtcgccacaatcagccaggccggcagcgagaaggactacgtggactctgtgaagggcagattcaccatcagccgggacaacgccaagaagtccctgtacctccagatgaacagcctgagagccgaggacaccgccgtgtactattgtgcctctggcgtgtacagcttcgactacagaggccagggcaccctggtcacagtctcttctggtaccggcggaggcggatctggcggcggaggtagcggtggcggaggatctgaattcgacatccagatgacccagagccccagcagcctgtctgccagcgtgggcgacagagtgaccatcacctgtcaggccagccaggacatcaacaactacctgaactggtatcagcagaagcccggcaaggcccccaagctgctgatctacgacgccagcaatctgcagaccggcgtgcccagcagattttccggctctggcagcggcaccgacttcaccttcaccatcgaggacattgccacctactactgccagcagtacaccttcggccctggcaccaaggtggacatcaaactcgagatccagaaccctgatcctgccgtgtaccagctgcgggatagcaagagcagcgacaagagcgtgtgtctgttcaccgacttcgacagccagaccaacgtgtcccagagcaaggactccgacgtgtacatcaccgataagtgcgtgctggacatgcggagcatggacttcaagagcaactccgccgtggcctggtccaacaagtccgatttcgcctgcgccaacgccttcaacaacagcattatccccgaggacacattcttcccaagccccgagagcagcgactccaccgaccacgtgaagcccaaagagacagagaacaccaagcagcccagcaagagctgccacaagcccaaggccatcgtgcacaccgagaaagtgaacatgatgagcctgaccgtgctgggcctgcggatgctgttcgccaaaaccgtggccgtgaacttcctgctgaccgccaagctgttcttcctcctcaccgcccgcgccaagagaagcggatctggcgtgaagcagaccctgaatttcgacctgctgaagctggctggcgacgtggaatccaacccaggccctactagtatggactggatttggcgcatccttttccttgtcggcgctgctaccggcgcgcattccgggccccagctccagctgcaagagtctggacctggcctggtcaagcctagcgagacactgagcctgacctgtaccgtgtccggcgatagcatcagcagcggcgattactactggggctggatcagacagcctcctggcaaaggactggaatggatcggccacatctactacagcggcgtgacctactacaaccccagcctgaagtccagagtgaccatcagcgtggacaccagccggaaccagttctccctgaagctgtctagcgtgacagccgccgataccgccgtgtactactgcaccagagaggacagcagcaactggcggagtagaggccagggaacactggtcacagttagctctggatccggcggaggcggaagtggaggcggaggatctggcggcggaggctctttcgaagaagtgcaactgctggaatctggcggcggactggtgcagcctggcggatctctgagactgagctgtgccgccagcggcttcacctttagctggtacagcatgacctgggtgcgccaggcccctggcaaaggactggaatgggtgtccagcatcgtgccctggggcgatttcacccagtacgccgatagcgtgaagggccggttcaccatcagccgggacaacagcaagaacaccctgtacctgcagatgaacagcctgcgggccgaggacaccgccgtgtactattgtgccaagggacctggctggggcagcttcgatctgtggggcagaggaacccttgtgaccgtgtccagcacgcgtgaggacctgaagaacgtgttcccacctgaggtggccgtgttcgagcctagcgaggccgagatcagccacacccagaaagccaccctcgtgtgcctggctaccggcttctaccccgaccatgtggaactgtcttggtgggtcaacggcaaagaggtgcacagcggcgtgtgtaccgacccccagccactgaaagaacagcccgccctgaacgacagccggtactgcctgagcagcagactgagagtgtccgccaccttctggcagaacccccggaaccacttcagatgccaggtgcagttctacggcctgagcgagaacgacgagtggacccaggacagagccaagcccgtgacccagatcgtgtctgccgaagcctggggcagagccgatgatgtgattaagatccactggcaggaaaagaagtccaacaccatcctgggcagccaggaaggcaacaccatgaagaccaacgacacctacatgaagttcagctggctgaccgtgcccgagaagtccctggacaaagaacacagatgcatcgtgcggcacgaaaacaacaagaacggcgtggaccaggaaatcatcttcccacccatcaagaccgatgtgattacaatggaccccaaggacaactgctccaaggacgccaacgataccctgctgctccagctgaccaacaccagcgcctactacatgtacttgttgctgctgctgaagtccgtggtgtacttcgccatcatcacatgctgcctgctgatggctatggtcaagcggaaggacagccgggga

SEQ ID NO: 6899 - DNA, 2994 bp, synthetic construct
  source 1..2994: mol_type = other DNA
atggccttaccagtgaccgccttgctcctgccgctggccttgctgctccacgccgccaggccggaagtgcagctggttgaatctggcggaggactggttcagcctggcggatctctgagactgtcttgtgccgccagcggcttcagcttcagcgacttttggatgagctgggtccgacaggcccctggcaaaggacttgaatgggtcgccacaatcagccaggccggcagcgagaaggactacgtggactctgtgaagggcagattcaccatcagccgggacaacgccaagaagtccctgtacctccagatgaacagcctgagagccgaggacaccgccgtgtactattgtgcctctggcgtgtacagcttcgactacagaggccagggcaccctggtcacagtctcttctggtaccggcggaggcggatctggcggcggaggtagcggtggcggaggatctgaattcgacatccagatgacccagagccccagcagcctgtctgccagcgtgggcgacagagtgaccatcacctgtaccgccagcctgagcgtgtccagcacctacctgcactggtatcagcagaagcccggcagcagccccaagctgtggatctacagcaccagcaacctggcctccggcgtgcccagcagattttctggcagcggctctggcaccagctacaccctgaccatcagctccctccagcccgaggacttcgccacctactactgccaccagtaccacagaagccccctgacctttggcggaggcaccaaggtggaaatcaagagactcgagatccagaaccctgatcctgccgtgtaccagctgcgggatagcaagagcagcgacaagagcgtgtgtctgttcaccgacttcgacagccagaccaacgtgtcccagagcaaggactccgacgtgtacatcaccgataagtgcgtgctggacatgcggagcatggacttcaagagcaactccgccgtggcctggtccaacaagtccgatttcgcctgcgccaacgccttcaacaacagcattatccccgaggacacattcttcccaagccccgagagcagcgactccaccgaccacgtgaagcccaaagagacagagaacaccaagcagcccagcaagagctgccacaagcccaaggccatcgtgcacaccgagaaagtgaacatgatgagcctgaccgtgctgggcctgcggatgctgttcgccaaaaccgtggccgtgaacttcctgctgaccgccaagctgttcttcctcctcaccgcccgcgccaagagaagcggatctggcgtgaagcagaccctgaatttcgacctgctgaagctggctggcgacgtggaatccaacccaggccctactagtatggactggatttggcgcatccttttccttgtcggcgctgctaccggcgcgcattccgggccccagctccagctgcaagagtctggacctggcctggtcaagcctagcgagacactgagcctgacctgtaccgtgtccggcgatagcatcagcagcggcgattactactggggctggatcagacagcctcctggcaaaggactggaatggatcggccacatctactacagcggcgtgacctactacaaccccagcctgaagtccagagtgaccatcagcgtggacaccagccggaaccagttctccctgaagctgtctagcgtgacagccgccgataccgccgtgtactactgcaccagagaggacagcagcaactggcggagtagaggccagggaacactggtcacagttagctctggatccggcggaggcggaagtggaggcggaggatctggcggcggaggctctttcgaagaagtgcaactggtggaatctggcggcggactggtgcagcctggcggatctctgagactgagctgtgccgccagcggcttcagcctgaccaaatacggcgtgcactgggtgcgccaggcccctggaaaaggactggaatgggtgggagtgaagtgggctggcggctccaccgactacaacagcgccctgatgagccggttcaccatcagcaaggacaacgccaagaacagcctgtacctccagatgaactccctgcgggccgaggacaccgccgtgtactactgtgccagagatcaccgggacgctatggactactggggccagggaacactcgtgaccgtgtcctctacgcgtgaggacctgaagaacgtgttcccacctgaggtggccgtgttcgagcctagcgaggccgagatcagccacacccagaaagccaccctcgtgtgcctggctaccggcttctaccccgaccatgtggaactgtcttggtgggtcaacggcaaagaggtgcacagcggcgtgtgtaccgacccccagccactgaaagaacagcccgccctgaacgacagccggtactgcctgagcagcagactgagagtgtccgccaccttctggcagaacccccggaaccacttcagatgccaggtgcagttctacggcctgagcgagaacgacgagtggacccaggacagagccaagcccgtgacccagatcgtgtctgccgaagcctggggcagagccgatgatgtgattaagatccactggcaggaaaagaagtccaacaccatcctgggcagccaggaaggcaacaccatgaagaccaacgacacctacatgaagttcagctggctgaccgtgcccgagaagtccctggacaaagaacacagatgcatcgtgcggcacgaaaacaacaagaacggcgtggaccaggaaatcatcttcccacccatcaagaccgatgtgattacaatggaccccaaggacaactgctccaaggacgccaacgataccctgctgctccagctgaccaacaccagcgcctactacatgtacttgttgctgctgctgaagtccgtggtgtacttcgccatcatcacatgctgcctgctgatggctatggtcaagcggaaggacagccgggga

SEQ ID NO: 6900 - DNA, 3006 bp, synthetic construct
  source 1..3006: mol_type = other DNA
atggccttaccagtgaccgccttgctcctgccgctggccttgctgctccacgccgccaggccggaagtgcagctggttgaatctggcggaggactggttcagcctggcggatctctgagactgtcttgtgccgccagcggcttcagcttcagcgacttttggatgagctgggtccgacaggcccctggcaaaggacttgaatgggtcgccacaatcagccaggccggcagcgagaaggactacgtggactctgtgaagggcagattcaccatcagccgggacaacgccaagaagtccctgtacctccagatgaacagcctgagagccgaggacaccgccgtgtactattgtgcctctggcgtgtacagcttcgactacagaggccagggcaccctggtcacagtctcttctggtaccggcggaggcggatctggcggcggaggtagcggtggcggaggatctgaattcgacatccagatgacccagagccccagcagcctgtctgccagcgtgggcgacagagtgaccatcacatgcaaggccagccaggacgtgggaacagccgtggcctggtatcagcagaagcctggcaaggcccccaagctgctgatctacagcgccagctacagatccaccggcgtgcccagcagattttccggctctggcagcggcaccgacttcaccctgaccatctctagcctccagcccgaggacttcgccacctactactgccagcaccactactccgccccctggacatttggcggaggcaccaaggtggaaatcaagctcgagatccagaaccctgatcctgccgtgtaccagctgcgggatagcaagagcagcgacaagagcgtgtgtctgttcaccgacttcgacagccagaccaacgtgtcccagagcaaggactccgacgtgtacatcaccgataagtgcgtgctggacatgcggagcatggacttcaagagcaactccgccgtggcctggtccaacaagtccgatttcgcctgcgccaacgccttcaacaacagcattatccccgaggacacattcttcccaagccccgagagcagcgactccaccgaccacgtgaagcccaaagagacagagaacaccaagcagcccagcaagagctgccacaagcccaaggccatcgtgcacaccgagaaagtgaacatgatgagcctgaccgtgctgggcctgcggatgctgttcgccaaaaccgtggccgtgaacttcctgctgaccgccaagctgttcttcctcctcaccgcccgcgccaagagaagcggatctggcgtgaagcagaccctgaatttcgacctgctgaagctggctggcgacgtggaatccaacccaggccctactagtatggactggatttggcgcatccttttccttgtcggcgctgctaccggcgcgcattccgggccccagctccagctgcaagagtctggacctggcctggtcaagcctagcgagacactgagcctgacctgtaccgtgtccggcgatagcatcagcagcggcgattactactggggctggatcagacagcctcctggcaaaggactggaatggatcggccacatctactacagcggcgtgacctactacaaccccagcctgaagtccagagtgaccatcagcgtggacaccagccggaaccagttctccctgaagctgtctagcgtgacagccgccgataccgccgtgtactactgcaccagagaggacagcagcaactggcggagtagaggccagggaacactggtcacagttagctctggatccggcggaggcggaagtggaggcggaggatctggcggcggaggctctttcgaagaagtgcaactggtggaatcaggcggcggactggtgcagcctggcggatctctgagactgagctgtgccgccagcggcttcaccttcagcagaaacggcatgagctgggtgcgccaggcccctggaaaaggactggaatgggtggcaaccgtgtccagcggcggcagctacatctactacgccgacagcgtgaagggccggttcaccatctccagagacaacgccaagaacagcctgtacctccagatgaactccctgcgggccgaggacaccgccgtgtactattgtgccagacagggcaccaccgccctggctaccagattcttcgatgtgtggggccagggcaccctcgtgaccgtgtcatctacgcgtgaggacctgaagaacgtgttcccacctgaggtggccgtgttcgagcctagcgaggccgagatcagccacacccagaaagccaccctcgtgtgcctggctaccggcttctaccccgaccatgtggaactgtcttggtgggtcaacggcaaagaggtgcacagcggcgtgtgtaccgacccccagccactgaaagaacagcccgccctgaacgacagccggtactgcctgagcagcagactgagagtgtccgccaccttctggcagaacccccggaaccacttcagatgccaggtgcagttctacggcctgagcgagaacgacgagtggacccaggacagagccaagcccgtgacccagatcgtgtctgccgaagcctggggcagagccgatgatgtgattaagatccactggcaggaaaagaagtccaacaccatcctgggcagccaggaaggcaacaccatgaagaccaacgacacctacatgaagttcagctggctgaccgtgcccgagaagtccctggacaaagaacacagatgcatcgtgcggcacgaaaacaacaagaacggcgtggaccaggaaatcatcttcccacccatcaagaccgatgtgattacaatggaccccaaggacaactgctccaaggacgccaacgataccctgctgctccagctgaccaacaccagcgcctactacatgtacttgttgctgctgctgaagtccgtggtgtacttcgccatcatcacatgctgcctgctgatggctatggtcaagcggaaggacagccgggga

SEQ ID NO: 6901 - DNA, 2994 bp, synthetic construct
  source 1..2994: mol_type = other DNA
atggccttaccagtgaccgccttgctcctgccgctggccttgctgctccacgccgccaggccggaagtgcagctggttgaatctggcggaggactggttcagcctggcggatctctgagactgtcttgtgccgccagcggcttcagcttcagcgacttttggatgagctgggtccgacaggcccctggcaaaggacttgaatgggtcgccacaatcagccaggccggcagcgagaaggactacgtggactctgtgaagggcagattcaccatcagccgggacaacgccaagaagtccctgtacctccagatgaacagcctgagagccgaggacaccgccgtgtactattgtgcctctggcgtgtacagcttcgactacagaggccagggcaccctggtcacagtctcttctggtaccggcggaggcggatctggcggcggaggtagcggtggcggaggatctgaattcgacatccagatgacccagagcccccctagcctgtctgcctctgtgggcggcaaagtgaccatcacatgcaaggccagccaggacatcgaccgctacatggcctggtatcaggacaagcccggcaagggacccaagctgctgatccacgataccagcaccctccagcccggcatccccagcagattttctggcagcggctccggcagagactacagcttcagcatcagcaacctggaacccgaggacattgccacctactactgcctccagtacgacaacctgtggaccttcggcggaggcaccaagctggaaatcaagagactcgagatccagaaccctgatcctgccgtgtaccagctgcgggatagcaagagcagcgacaagagcgtgtgtctgttcaccgacttcgacagccagaccaacgtgtcccagagcaaggactccgacgtgtacatcaccgataagtgcgtgctggacatgcggagcatggacttcaagagcaactccgccgtggcctggtccaacaagtccgatttcgcctgcgccaacgccttcaacaacagcattatccccgaggacacattcttcccaagccccgagagcagcgactccaccgaccacgtgaagcccaaagagacagagaacaccaagcagcccagcaagagctgccacaagcccaaggccatcgtgcacaccgagaaagtgaacatgatgagcctgaccgtgctgggcctgcggatgctgttcgccaaaaccgtggccgtgaacttcctgctgaccgccaagctgttcttcctcctcaccgcccgcgccaagagaagcggatctggcgtgaagcagaccctgaatttcgacctgctgaagctggctggcgacgtggaatccaacccaggccctactagtatggactggatttggcgcatccttttccttgtcggcgctgctaccggcgcgcattccgggccccagctccagctgcaagagtctggacctggcctggtcaagcctagcgagacactgagcctgacctgtaccgtgtccggcgatagcatcagcagcggcgattactactggggctggatcagacagcctcctggcaaaggactggaatggatcggccacatctactacagcggcgtgacctactacaaccccagcctgaagtccagagtgaccatcagcgtggacaccagccggaaccagttctccctgaagctgtctagcgtgacagccgccgataccgccgtgtactactgcaccagagaggacagcagcaactggcggagtagaggccagggaacactggtcacagttagctctggatccggcggaggcggaagtggaggcggaggatctggcggcggaggctctttcgaacaggtgcaactggtgcagagcggagccgagcttgtgaagcctggcgcttccgtgaagatgagctgcaaagccagcggctacatcttcaccaactacaacatccactgggtcaagaagtccccaggccagggcctggaatggatcggagccatctaccccggaaacggcgacgccccttacagccagaagttccaggacagagccaccctgaccgccgacaccagcagcagcaccacctacatggaactgagcagcctgaccagcgaggacagcgccgtgtactattgcgtgcgggccaactgggatgtggccttcgcctattggggccagggcacactggtgtccgtgtcctctacgcgtgaggacctgaagaacgtgttcccacctgaggtggccgtgttcgagcctagcgaggccgagatcagccacacccagaaagccaccctcgtgtgcctggctaccggcttctaccccgaccatgtggaactgtcttggtgggtcaacggcaaagaggtgcacagcggcgtgtgtaccgacccccagccactgaaagaacagcccgccctgaacgacagccggtactgcctgagcagcagactgagagtgtccgccaccttctggcagaacccccggaaccacttcagatgccaggtgcagttctacggcctgagcgagaacgacgagtggacccaggacagagccaagcccgtgacccagatcgtgtctgccgaagcctggggcagagccgatgatgtgattaagatccactggcaggaaaagaagtccaacaccatcctgggcagccaggaaggcaacaccatgaagaccaacgacacctacatgaagttcagctggctgaccgtgcccgagaagtccctggacaaagaacacagatgcatcgtgcggcacgaaaacaacaagaacggcgtggaccaggaaatcatcttcccacccatcaagaccgatgtgattacaatggaccccaaggacaactgctccaaggacgccaacgataccctgctgctccagctgaccaacaccagcgcctactacatgtacttgttgctgctgctgaagtccgtggtgtacttcgccatcatcacatgctgcctgctgatggctatggtcaagcggaaggacagccgggga

SEQ ID NO: 6902 - DNA, 2997 bp, synthetic construct
  source 1..2997: mol_type = other DNA
atggccttaccagtgaccgccttgctcctgccgctggccttgctgctccacgccgccaggccggaagtgcagctggttgaatctggcggaggactggttcagcctggcggatctctgagactgtcttgtgccgccagcggcttcagcttcagcgacttttggatgagctgggtccgacaggcccctggcaaaggacttgaatgggtcgccacaatcagccaggccggcagcgagaaggactacgtggactctgtgaagggcagattcaccatcagccgggacaacgccaagaagtccctgtacctccagatgaacagcctgagagccgaggacaccgccgtgtactattgtgcctctggcgtgtacagcttcgactacagaggccagggcaccctggtcacagtctcttctggtaccggcggaggcggatctggcggcggaggtagcggtggcggaggatctgaattcgacatccagatgacccagagccctgccagcctgtctgcctctgtgggcgagacagtgaccatcacctgtcgggtgtccggcaacatccacaactacctggcctggtatcagcagaagcagggcaagagcccccaactgctggtgtacaacgccaagaccctggccgatggcgtgcccagcagattttctggctctggcagcggcacccagtacagcctgaagatcaacagcctccagcccgaggacttcggcagctactactgccagcacttctggtccaacccctacaccttcggcggaggcaccaagctggaaatcaagctcgagatccagaaccctgatcctgccgtgtaccagctgcgggatagcaagagcagcgacaagagcgtgtgtctgttcaccgacttcgacagccagaccaacgtgtcccagagcaaggactccgacgtgtacatcaccgataagtgcgtgctggacatgcggagcatggacttcaagagcaactccgccgtggcctggtccaacaagtccgatttcgcctgcgccaacgccttcaacaacagcattatccccgaggacacattcttcccaagccccgagagcagcgactccaccgaccacgtgaagcccaaagagacagagaacaccaagcagcccagcaagagctgccacaagcccaaggccatcgtgcacaccgagaaagtgaacatgatgagcctgaccgtgctgggcctgcggatgctgttcgccaaaaccgtggccgtgaacttcctgctgaccgccaagctgttcttcctcctcaccgcccgcgccaagagaagcggatctggcgtgaagcagaccctgaatttcgacctgctgaagctggctggcgacgtggaatccaacccaggccctactagtatggactggatttggcgcatccttttccttgtcggcgctgctaccggcgcgcattccgggccccagctccagctgcaagagtctggacctggcctggtcaagcctagcgagacactgagcctgacctgtaccgtgtccggcgatagcatcagcagcggcgattactactggggctggatcagacagcctcctggcaaaggactggaatggatcggccacatctactacagcggcgtgacctactacaaccccagcctgaagtccagagtgaccatcagcgtggacaccagccggaaccagttctccctgaagctgtctagcgtgacagccgccgataccgccgtgtactactgcaccagagaggacagcagcaactggcggagtagaggccagggaacactggtcacagttagctctggatccggcggaggcggaagtggaggcggaggatctggcggcggaggctctttcgaacaggtgcaactccagcagtctggcgcttccgtgaaggtgtcctgcaaggccagcgaactcgtgcggcctggcacaggctacgccttcaccaattacctgatcgagtgggtcaagcagaggcccggacagggcctggaatggatcggagtgattaacccaggcagcggcggcaccaactacaacgagaagttcaagggcaaggccaccctgaccgccgacaagagcagcagcacagcctacatgcaactgagcagcctgaccagcgacgacagcgccgtgtacttctgcgcccggtacagaagctacgactggtacttcgacgtgtggggagccggcaccaccgtgacagtgtcatctacgcgtgaggacctgaagaacgtgttcccacctgaggtggccgtgttcgagcctagcgaggccgagatcagccacacccagaaagccaccctcgtgtgcctggctaccggcttctaccccgaccatgtggaactgtcttggtgggtcaacggcaaagaggtgcacagcggcgtgtgtaccgacccccagccactgaaagaacagcccgccctgaacgacagccggtactgcctgagcagcagactgagagtgtccgccaccttctggcagaacccccggaaccacttcagatgccaggtgcagttctacggcctgagcgagaacgacgagtggacccaggacagagccaagcccgtgacccagatcgtgtctgccgaagcctggggcagagccgatgatgtgattaagatccactggcaggaaaagaagtccaacaccatcctgggcagccaggaaggcaacaccatgaagaccaacgacacctacatgaagttcagctggctgaccgtgcccgagaagtccctggacaaagaacacagatgcatcgtgcggcacgaaaacaacaagaacggcgtggaccaggaaatcatcttcccacccatcaagaccgatgtgattacaatggaccccaaggacaactgctccaaggacgccaacgataccctgctgctccagctgaccaacaccagcgcctactacatgtacttgttgctgctgctgaagtccgtggtgtacttcgccatcatcacatgctgcctgctgatggctatggtcaagcggaaggacagccgggga

SEQ ID NO: 6903 - DNA, 2994 bp, synthetic construct
  source 1..2994: mol_type = other DNA
atggccttaccagtgaccgccttgctcctgccgctggccttgctgctccacgccgccaggccggaagtgcagctggttgaatctggcggaggactggttcagcctggcggatctctgagactgtcttgtgccgccagcggcttcagcttcagcgacttttggatgagctgggtccgacaggcccctggcaaaggacttgaatgggtcgccacaatcagccaggccggcagcgagaaggactacgtggactctgtgaagggcagattcaccatcagccgggacaacgccaagaagtccctgtacctccagatgaacagcctgagagccgaggacaccgccgtgtactattgtgcctctggcgtgtacagcttcgactacagaggccagggcaccctggtcacagtctcttctggtaccggcggaggcggatctggcggcggaggtagcggtggcggaggatctgaattcgacatccagatgacccagagcttcagcagcctgagcgccagcgtgggcgacagagtgaccatcacctgtagagccagccaggacatcagcaactacctgaactggtatcagcagaagcccggcaaggcccccaagctgctgatctactacaccagcagactgcacagcggcgtgcccagcagattttctggcagcggctccggcaccgactacaccctgacaatcagctccctgcagcccgaggacttcgctacctacttctgtcagcaaggcaacaccctgccctggacctttggcggaggcaccaagctggaaatcaagagactcgagatccagaaccctgatcctgccgtgtaccagctgcgggatagcaagagcagcgacaagagcgtgtgtctgttcaccgacttcgacagccagaccaacgtgtcccagagcaaggactccgacgtgtacatcaccgataagtgcgtgctggacatgcggagcatggacttcaagagcaactccgccgtggcctggtccaacaagtccgatttcgcctgcgccaacgccttcaacaacagcattatccccgaggacacattcttcccaagccccgagagcagcgactccaccgaccacgtgaagcccaaagagacagagaacaccaagcagcccagcaagagctgccacaagcccaaggccatcgtgcacaccgagaaagtgaacatgatgagcctgaccgtgctgggcctgcggatgctgttcgccaaaaccgtggccgtgaacttcctgctgaccgccaagctgttcttcctcctcaccgcccgcgccaagagaagcggatctggcgtgaagcagaccctgaatttcgacctgctgaagctggctggcgacgtggaatccaacccaggccctactagtatggactggatttggcgcatccttttccttgtcggcgctgctaccggcgcgcattccgggccccagctccagctgcaagagtctggacctggcctggtcaagcctagcgagacactgagcctgacctgtaccgtgtccggcgatagcatcagcagcggcgattactactggggctggatcagacagcctcctggcaaaggactggaatggatcggccacatctactacagcggcgtgacctactacaaccccagcctgaagtccagagtgaccatcagcgtggacaccagccggaaccagttctccctgaagctgtctagcgtgacagccgccgataccgccgtgtactactgcaccagagaggacagcagcaactggcggagtagaggccagggaacactggtcacagttagctctggatccggcggaggcggaagtggaggcggaggatctggcggcggaggctctttcgaagaagtgcaactggtgcagtccggcggagggctggtgcagagcggaggatctctgagactgagctgcagagccagcggctacaccttcacccggtactggatgctgtgggtgcgccagaggccaggcaagggactggaatgggtggccgagatcaacccccggaacgaccggaccaactacaacgagaagttcaagacccggttcaccatcagcgtggacagaagcaagaacaccctgtacctgcagatggacagcctgcgggccgaggataccgccgtgtacttttgtgctctgggaggcggctacgctatggactactggggccagggaacccttgtgaccgtgtcctctacgcgtgaggacctgaagaacgtgttcccacctgaggtggccgtgttcgagcctagcgaggccgagatcagccacacccagaaagccaccctcgtgtgcctggctaccggcttctaccccgaccatgtggaactgtcttggtgggtcaacggcaaagaggtgcacagcggcgtgtgtaccgacccccagccactgaaagaacagcccgccctgaacgacagccggtactgcctgagcagcagactgagagtgtccgccaccttctggcagaacccccggaaccacttcagatgccaggtgcagttctacggcctgagcgagaacgacgagtggacccaggacagagccaagcccgtgacccagatcgtgtctgccgaagcctggggcagagccgatgatgtgattaagatccactggcaggaaaagaagtccaacaccatcctgggcagccaggaaggcaacaccatgaagaccaacgacacctacatgaagttcagctggctgaccgtgcccgagaagtccctggacaaagaacacagatgcatcgtgcggcacgaaaacaacaagaacggcgtggaccaggaaatcatcttcccacccatcaagaccgatgtgattacaatggaccccaaggacaactgctccaaggacgccaacgataccctgctgctccagctgaccaacaccagcgcctactacatgtacttgttgctgctgctgaagtccgtggtgtacttcgccatcatcacatgctgcctgctgatggctatggtcaagcggaaggacagccgggga

SEQ ID NO: 6904 - DNA, 2997 bp, synthetic construct
  source 1..2997: mol_type = other DNA
atggccttaccagtgaccgccttgctcctgccgctggccttgctgctccacgccgccaggccggaagtgcagctggttgaatctggcggaggactggttcagcctggcggatctctgagactgtcttgtgccgccagcggcttcagcttcagcgacttttggatgagctgggtccgacaggcccctggcaaaggacttgaatgggtcgccacaatcagccaggccggcagcgagaaggactacgtggactctgtgaagggcagattcaccatcagccgggacaacgccaagaagtccctgtacctccagatgaacagcctgagagccgaggacaccgccgtgtactattgtgcctctggcgtgtacagcttcgactacagaggccagggcaccctggtcacagtctcttctggtaccggcggaggcggatctggcggcggaggtagcggtggcggaggatctgaattcgacatccagatgacacagtctccggcgtcactgtccgcctccgtgggggagactgtgactattatttgtagggcatcagttaacatctactcttatttggcctggtaccagcagaagcaaggcaagagtcctcagctgctggtgtataatgcgaagatcctggcagagggcgtgccgagccggttctccggcagcggctcaggtacccaattttccctcaagatcaattcactgcagccagaggactttggcagttactattgtcaacaccactacggcacattcactttcgggtccggtacaaaattggagattaagcgactcgagatccagaaccctgatcctgccgtgtaccagctgcgggatagcaagagcagcgacaagagcgtgtgtctgttcaccgacttcgacagccagaccaacgtgtcccagagcaaggactccgacgtgtacatcaccgataagtgcgtgctggacatgcggagcatggacttcaagagcaactccgccgtggcctggtccaacaagtccgatttcgcctgcgccaacgccttcaacaacagcattatccccgaggacacattcttcccaagccccgagagcagcgactccaccgaccacgtgaagcccaaagagacagagaacaccaagcagcccagcaagagctgccacaagcccaaggccatcgtgcacaccgagaaagtgaacatgatgagcctgaccgtgctgggcctgcggatgctgttcgccaaaaccgtggccgtgaacttcctgctgaccgccaagctgttcttcctcctcaccgcccgcgccaagagaagcggatctggcgtgaagcagaccctgaatttcgacctgctgaagctggctggcgacgtggaatccaacccaggccctactagtatggactggatttggcgcatccttttccttgtcggcgctgctaccggcgcgcattccgggccccagctccagctgcaagagtctggacctggcctggtcaagcctagcgagacactgagcctgacctgtaccgtgtccggcgatagcatcagcagcggcgattactactggggctggatcagacagcctcctggcaaaggactggaatggatcggccacatctactacagcggcgtgacctactacaaccccagcctgaagtccagagtgaccatcagcgtggacaccagccggaaccagttctccctgaagctgtctagcgtgacagccgccgataccgccgtgtactactgcaccagagaggacagcagcaactggcggagtagaggccagggaacactggtcacagttagctctggatccggcggaggcggaagtggaggcggaggatctggcggcggaggctctttcgaacaggtacagttgaaagaaagcgggcctggactggtagcgccttcccaatctctctccatcacgtgcaccatctctggcttctccctgacttcctatggagttcactgggtgaggcagccccccggcaagggactggaatggctggtcgtcatctggtccgacgggtccacaacctacaactccgctctgaaaagtcggctctctatttctaaagataatagcaagagccaggtgtttctgaaaatgaactctctgcagaccgatgatacggccatttactactgcgcttcacactatggctcaaccttggcattcgcttcctggggccacggaacactggtgaccgtttccgcagccacgcgtgaggacctgaagaacgtgttcccacctgaggtggccgtgttcgagcctagcgaggccgagatcagccacacccagaaagccaccctcgtgtgcctggctaccggcttctaccccgaccatgtggaactgtcttggtgggtcaacggcaaagaggtgcacagcggcgtgtgtaccgacccccagccactgaaagaacagcccgccctgaacgacagccggtactgcctgagcagcagactgagagtgtccgccaccttctggcagaacccccggaaccacttcagatgccaggtgcagttctacggcctgagcgagaacgacgagtggacccaggacagagccaagcccgtgacccagatcgtgtctgccgaagcctggggcagagccgatgatgtgattaagatccactggcaggaaaagaagtccaacaccatcctgggcagccaggaaggcaacaccatgaagaccaacgacacctacatgaagttcagctggctgaccgtgcccgagaagtccctggacaaagaacacagatgcatcgtgcggcacgaaaacaacaagaacggcgtggaccaggaaatcatcttcccacccatcaagaccgatgtgattacaatggaccccaaggacaactgctccaaggacgccaacgataccctgctgctccagctgaccaacaccagcgcctactacatgtacttgttgctgctgctgaagtccgtggtgtacttcgccatcatcacatgctgcctgctgatggctatggtcaagcggaaggacagccgggga

SEQ ID NO: 6905 - DNA, 3021 bp, synthetic construct
  source 1..3021: mol_type = other DNA
atggccttaccagtgaccgccttgctcctgccgctggccttgctgctccacgccgccaggccggaagtgcagctggttgaatctggcggaggactggttcagcctggcggatctctgagactgtcttgtgccgccagcggcttcagcttcagcgacttttggatgagctgggtccgacaggcccctggcaaaggacttgaatgggtcgccacaatcagccaggccggcagcgagaaggactacgtggactctgtgaagggcagattcaccatcagccgggacaacgccaagaagtccctgtacctccagatgaacagcctgagagccgaggacaccgccgtgtactattgtgcctctggcgtgtacagcttcgactacagaggccagggcaccctggtcacagtctcttctggtaccggcggaggcggatctggcggcggaggtagcggtggcggaggatctgaattcgacattgtgatgacccagtctcacaaattcatgtccacatcagtaggagacagggtcagcgtcacctgcaaggccagtcagaatgtgggtaataatgtagcctggtatcaacagaaaccagggcaatctcctaaagtactgatttactcggcatcctaccggtacagtggagtccctgatcgcttcacaggcagtggatctgggacagatttcactctcaccatcagtaatgtgcagtctgaagacttggcagagtatttctgtcagcaatataacacctatccattcacgttcggctcggggacaaagttggaaataaaactcgagatccagaaccctgatcctgccgtgtaccagctgcgggatagcaagagcagcgacaagagcgtgtgtctgttcaccgacttcgacagccagaccaacgtgtcccagagcaaggactccgacgtgtacatcaccgataagtgcgtgctggacatgcggagcatggacttcaagagcaactccgccgtggcctggtccaacaagtccgatttcgcctgcgccaacgccttcaacaacagcattatccccgaggacacattcttcccaagccccgagagcagcgactccaccgaccacgtgaagcccaaagagacagagaacaccaagcagcccagcaagagctgccacaagcccaaggccatcgtgcacaccgagaaagtgaacatgatgagcctgaccgtgctgggcctgcggatgctgttcgccaaaaccgtggccgtgaacttcctgctgaccgccaagctgttcttcctcctcaccgcccgcgccaagagaagcggatctggcgtgaagcagaccctgaatttcgacctgctgaagctggctggcgacgtggaatccaacccaggccctactagtatggactggatttggcgcatccttttccttgtcggcgctgctaccggcgcgcattccgggccccagctccagctgcaagagtctggacctggcctggtcaagcctagcgagacactgagcctgacctgtaccgtgtccggcgatagcatcagcagcggcgattactactggggctggatcagacagcctcctggcaaaggactggaatggatcggccacatctactacagcggcgtgacctactacaaccccagcctgaagtccagagtgaccatcagcgtggacaccagccggaaccagttctccctgaagctgtctagcgtgacagccgccgataccgccgtgtactactgcaccagagaggacagcagcaactggcggagtagaggccagggaacactggtcacagttagctctggatccggcggaggcggaagtggaggcggaggatctggcggcggaggctctttcgaagaggtacagctggaggaaagcggtggaggactggtgcaacctggagggtctatgaagctctcttgcgtagcttctgggttcacgttctccaattactggatgaactgggtgcggcagtcccccgagaaaggcctggaatgggtagcagaaattcggttcaagtcccataactatgctacacactttgccgagtctgtcaaaggccggttcactattagtcgagacgacagcaagtcttcagtctacctgcagatgaataacttgcgggcagaggacacaggtatctactactgcaccaggagaatcggcaactccgactatgactggtggtactttgacgtctggggagcaggcaccagcgtgacggtgagttcagcctcaacgcgtgaggacctgaagaacgtgttcccacctgaggtggccgtgttcgagcctagcgaggccgagatcagccacacccagaaagccaccctcgtgtgcctggctaccggcttctaccccgaccatgtggaactgtcttggtgggtcaacggcaaagaggtgcacagcggcgtgtgtaccgacccccagccactgaaagaacagcccgccctgaacgacagccggtactgcctgagcagcagactgagagtgtccgccaccttctggcagaacccccggaaccacttcagatgccaggtgcagttctacggcctgagcgagaacgacgagtggacccaggacagagccaagcccgtgacccagatcgtgtctgccgaagcctggggcagagccgatgatgtgattaagatccactggcaggaaaagaagtccaacaccatcctgggcagccaggaaggcaacaccatgaagaccaacgacacctacatgaagttcagctggctgaccgtgcccgagaagtccctggacaaagaacacagatgcatcgtgcggcacgaaaacaacaagaacggcgtggaccaggaaatcatcttcccacccatcaagaccgatgtgattacaatggaccccaaggacaactgctccaaggacgccaacgataccctgctgctccagctgaccaacaccagcgcctactacatgtacttgttgctgctgctgaagtccgtggtgtacttcgccatcatcacatgctgcctgctgatggctatggtcaagcggaaggacagccgggga

SEQ ID NO: 6906 - DNA, 3000 bp, synthetic construct
  source 1..3000: mol_type = other DNA
atggccttaccagtgaccgccttgctcctgccgctggccttgctgctccacgccgccaggccggaagtgcagctggttgaatctggcggaggactggttcagcctggcggatctctgagactgtcttgtgccgccagcggcttcagcttcagcgacttttggatgagctgggtccgacaggcccctggcaaaggacttgaatgggtcgccacaatcagccaggccggcagcgagaaggactacgtggactctgtgaagggcagattcaccatcagccgggacaacgccaagaagtccctgtacctccagatgaacagcctgagagccgaggacaccgccgtgtactattgtgcctctggcgtgtacagcttcgactacagaggccagggcaccctggtcacagtctcttctggtaccggcggaggcggatctggcggcggaggtagcggtggcggaggatctgaattcgaccagatcgtgctgacccagtcccccgctattatgtccgcatcaccgggcgaaaaagtgacgatctcctgtagcgcttcatctagcgtctcctacatgtattggtatcaacagaaacctgggtctagcccaaagccgtggatctacagaaccagtaaccttgccagtggggtgccagcccgcttcagcggtagtggcagtggaacttcctatagcctcacaataagcaacatggaggctgaagatgccgctgcctattactgccagcagtaccacagttacccaaccacgttcggcgggggaactaagctcgaagtaaaactcgagatccagaaccctgatcctgccgtgtaccagctgcgggatagcaagagcagcgacaagagcgtgtgtctgttcaccgacttcgacagccagaccaacgtgtcccagagcaaggactccgacgtgtacatcaccgataagtgcgtgctggacatgcggagcatggacttcaagagcaactccgccgtggcctggtccaacaagtccgatttcgcctgcgccaacgccttcaacaacagcattatccccgaggacacattcttcccaagccccgagagcagcgactccaccgaccacgtgaagcccaaagagacagagaacaccaagcagcccagcaagagctgccacaagcccaaggccatcgtgcacaccgagaaagtgaacatgatgagcctgaccgtgctgggcctgcggatgctgttcgccaaaaccgtggccgtgaacttcctgctgaccgccaagctgttcttcctcctcaccgcccgcgccaagagaagcggatctggcgtgaagcagaccctgaatttcgacctgctgaagctggctggcgacgtggaatccaacccaggccctactagtatggactggatttggcgcatccttttccttgtcggcgctgctaccggcgcgcattccgggccccagctccagctgcaagagtctggacctggcctggtcaagcctagcgagacactgagcctgacctgtaccgtgtccggcgatagcatcagcagcggcgattactactggggctggatcagacagcctcctggcaaaggactggaatggatcggccacatctactacagcggcgtgacctactacaaccccagcctgaagtccagagtgaccatcagcgtggacaccagccggaaccagttctccctgaagctgtctagcgtgacagccgccgataccgccgtgtactactgcaccagagaggacagcagcaactggcggagtagaggccagggaacactggtcacagttagctctggatccggcggaggcggaagtggaggcggaggatctggcggcggaggctctttcgaagaggtgcagctggtggaatctgggggcggcctggtccaacctaagggatcactcaagctctcttgtgcggccagcggattctctttcaatacctatgctatgaattgggtgagacaggcgcccggaaagggcctcgaatggatagcccatatccggtcaaaatcaaacaatttcgcaacctactatgcggactccgtgaaggaccgattttccatctcccgagatgcctccgagaatattctgttcctgcagatgaataacctcaagacagaggacaccgccatgtactactgtgtgcgccagggcggtgactttcccatggattactgggggcaggggaccagcgtgaccgtgagctctacgcgtgaggacctgaagaacgtgttcccacctgaggtggccgtgttcgagcctagcgaggccgagatcagccacacccagaaagccaccctcgtgtgcctggctaccggcttctaccccgaccatgtggaactgtcttggtgggtcaacggcaaagaggtgcacagcggcgtgtgtaccgacccccagccactgaaagaacagcccgccctgaacgacagccggtactgcctgagcagcagactgagagtgtccgccaccttctggcagaacccccggaaccacttcagatgccaggtgcagttctacggcctgagcgagaacgacgagtggacccaggacagagccaagcccgtgacccagatcgtgtctgccgaagcctggggcagagccgatgatgtgattaagatccactggcaggaaaagaagtccaacaccatcctgggcagccaggaaggcaacaccatgaagaccaacgacacctacatgaagttcagctggctgaccgtgcccgagaagtccctggacaaagaacacagatgcatcgtgcggcacgaaaacaacaagaacggcgtggaccaggaaatcatcttcccacccatcaagaccgatgtgattacaatggaccccaaggacaactgctccaaggacgccaacgataccctgctgctccagctgaccaacaccagcgcctactacatgtacttgttgctgctgctgaagtccgtggtgtacttcgccatcatcacatgctgcctgctgatggctatggtcaagcggaaggacagccgggga

SEQ ID NO: 6907 - DNA, 2997 bp, synthetic construct
  source 1..2997: mol_type = other DNA
atggccttaccagtgaccgccttgctcctgccgctggccttgctgctccacgccgccaggccggaagtgcagctggttgaatctggcggaggactggttcagcctggcggatctctgagactgtcttgtgccgccagcggcttcagcttcagcgacttttggatgagctgggtccgacaggcccctggcaaaggacttgaatgggtcgccacaatcagccaggccggcagcgagaaggactacgtggactctgtgaagggcagattcaccatcagccgggacaacgccaagaagtccctgtacctccagatgaacagcctgagagccgaggacaccgccgtgtactattgtgcctctggcgtgtacagcttcgactacagaggccagggcaccctggtcacagtctcttctggtaccggcggaggcggatctggcggcggaggtagcggtggcggaggatctgaattcgacgacatccagatgacccagagcagcagcagcttcagcgtgagcctgggcgacagagtgaccatcacctgcatggccagcgaggacatctacatcagactggcctggtaccagcagaagcccggcaacgcccccagactgctgatcagcgccgccaccagcctggagaccggcgtgcccagcagattcagcggcagcggcagcggcaaggactacaccctgagcatcaccagcctgcagaccgaggacgtgggcacctactactgccagcagtactggagcagcccctggaccttcggcggcggcaccaagctggagatcaacctcgagatccagaaccctgatcctgccgtgtaccagctgcgggatagcaagagcagcgacaagagcgtgtgtctgttcaccgacttcgacagccagaccaacgtgtcccagagcaaggactccgacgtgtacatcaccgataagtgcgtgctggacatgcggagcatggacttcaagagcaactccgccgtggcctggtccaacaagtccgatttcgcctgcgccaacgccttcaacaacagcattatccccgaggacacattcttcccaagccccgagagcagcgactccaccgaccacgtgaagcccaaagagacagagaacaccaagcagcccagcaagagctgccacaagcccaaggccatcgtgcacaccgagaaagtgaacatgatgagcctgaccgtgctgggcctgcggatgctgttcgccaaaaccgtggccgtgaacttcctgctgaccgccaagctgttcttcctcctcaccgcccgcgccaagagaagcggatctggcgtgaagcagaccctgaatttcgacctgctgaagctggctggcgacgtggaatccaacccaggccctactagtatggactggatttggcgcatccttttccttgtcggcgctgctaccggcgcgcattccgggccccagctccagctgcaagagtctggacctggcctggtcaagcctagcgagacactgagcctgacctgtaccgtgtccggcgatagcatcagcagcggcgattactactggggctggatcagacagcctcctggcaaaggactggaatggatcggccacatctactacagcggcgtgacctactacaaccccagcctgaagtccagagtgaccatcagcgtggacaccagccggaaccagttctccctgaagctgtctagcgtgacagccgccgataccgccgtgtactactgcaccagagaggacagcagcaactggcggagtagaggccagggaacactggtcacagttagctctggatccggcggaggcggaagtggaggcggaggatctggcggcggaggctctttcgaagacgtgcagctgcaggagagcggccccggcctggtgaagcccagccagagcctgagcctgacctgcaccgtgaccggctacagcatcaccagcgactacacctggaactggatcagacagttccccggcaacaagctggagtggatgggctacatcacctacagcggcagcaccagctacaaccccagcctgaagagcagaaacagcatcaccagagacaccagcaagaaccagttcttcctgcagctgaacagcgtgaccaccgaggacaccgccacctactactgcgccagactgggcagaagatacacaatggactactggggccagggcaccagcgtgaccgtgagcagcacgcgtgaggacctgaagaacgtgttcccacctgaggtggccgtgttcgagcctagcgaggccgagatcagccacacccagaaagccaccctcgtgtgcctggctaccggcttctaccccgaccatgtggaactgtcttggtgggtcaacggcaaagaggtgcacagcggcgtgtgtaccgacccccagccactgaaagaacagcccgccctgaacgacagccggtactgcctgagcagcagactgagagtgtccgccaccttctggcagaacccccggaaccacttcagatgccaggtgcagttctacggcctgagcgagaacgacgagtggacccaggacagagccaagcccgtgacccagatcgtgtctgccgaagcctggggcagagccgatgatgtgattaagatccactggcaggaaaagaagtccaacaccatcctgggcagccaggaaggcaacaccatgaagaccaacgacacctacatgaagttcagctggctgaccgtgcccgagaagtccctggacaaagaacacagatgcatcgtgcggcacgaaaacaacaagaacggcgtggaccaggaaatcatcttcccacccatcaagaccgatgtgattacaatggaccccaaggacaactgctccaaggacgccaacgataccctgctgctccagctgaccaacaccagcgcctactacatgtacttgttgctgctgctgaagtccgtggtgtacttcgccatcatcacatgctgcctgctgatggctatggtcaagcggaaggacagccgggga

SEQ ID NO: 6908 - DNA, 3006 bp, synthetic construct
  source 1..3006: mol_type = other DNA
atggccttaccagtgaccgccttgctcctgccgctggccttgctgctccacgccgccaggccggaagtgcagctggttgaatctggcggaggactggttcagcctggcggatctctgagactgtcttgtgccgccagcggcttcagcttcagcgacttttggatgagctgggtccgacaggcccctggcaaaggacttgaatgggtcgccacaatcagccaggccggcagcgagaaggactacgtggactctgtgaagggcagattcaccatcagccgggacaacgccaagaagtccctgtacctccagatgaacagcctgagagccgaggacaccgccgtgtactattgtgcctctggcgtgtacagcttcgactacagaggccagggcaccctggtcacagtctcttctggtaccggcggaggcggatctggcggcggaggtagcggtggcggaggatctgaattcgacgacatccagatgacccagagccccagcagcctgtctgccagcgtgggcgacagagtgaccatcacctgtagagccagccagagcatcagcagctacctgaactggtatcagcagaagcccggcaaggcccccaaactgctgatctacgacgccagcaacctggaaaccggcgtgcccagcagattttccggcagcggctctggcaccgacttcaccttcaccatcagctccctccagcccgaggacattgccacctactactgccagcagtacgacaacctgcccctgacctttggcggaggcaccaaggtggacatcaagagactcgagatccagaaccctgatcctgccgtgtaccagctgcgggatagcaagagcagcgacaagagcgtgtgtctgttcaccgacttcgacagccagaccaacgtgtcccagagcaaggactccgacgtgtacatcaccgataagtgcgtgctggacatgcggagcatggacttcaagagcaactccgccgtggcctggtccaacaagtccgatttcgcctgcgccaacgccttcaacaacagcattatccccgaggacacattcttcccaagccccgagagcagcgactccaccgaccacgtgaagcccaaagagacagagaacaccaagcagcccagcaagagctgccacaagcccaaggccatcgtgcacaccgagaaagtgaacatgatgagcctgaccgtgctgggcctgcggatgctgttcgccaaaaccgtggccgtgaacttcctgctgaccgccaagctgttcttcctcctcaccgcccgcgccaagagaagcggatctggcgtgaagcagaccctgaatttcgacctgctgaagctggctggcgacgtggaatccaacccaggccctactagtatggactggatttggcgcatccttttccttgtcggcgctgctaccggcgcgcattccgggccccagctccagctgcaagagtctggacctggcctggtcaagcctagcgagacactgagcctgacctgtaccgtgtccggcgatagcatcagcagcggcgattactactggggctggatcagacagcctcctggcaaaggactggaatggatcggccacatctactacagcggcgtgacctactacaaccccagcctgaagtccagagtgaccatcagcgtggacaccagccggaaccagttctccctgaagctgtctagcgtgacagccgccgataccgccgtgtactactgcaccagagaggacagcagcaactggcggagtagaggccagggaacactggtcacagttagctctggatccggcggaggcggaagtggaggcggaggatctggcggcggaggctctttcgaacaggtgcaactggtggaatctggcggcggagtggtgcagcctggcagaagcctgagactgagctgtgccgccagcggcttcacctttagcagctacgccatgcactgggtgcgccaggcccctggaaaaggcctggaatgggtggccgtgatctcctacgacggctccaacaagtattacgccgacagcgtgaagggccggttcaccatctccagagacaacagcaagaacaccctgtacctccagatgaacagcctgcgggccgaggacaccgccgtgtactattgtgccagggctcacaacagcagctcttggagcttcgactactggggccagggcaccctcgtgaccgtgtcatctacgcgtgaggacctgaagaacgtgttcccacctgaggtggccgtgttcgagcctagcgaggccgagatcagccacacccagaaagccaccctcgtgtgcctggctaccggcttctaccccgaccatgtggaactgtcttggtgggtcaacggcaaagaggtgcacagcggcgtgtgtaccgacccccagccactgaaagaacagcccgccctgaacgacagccggtactgcctgagcagcagactgagagtgtccgccaccttctggcagaacccccggaaccacttcagatgccaggtgcagttctacggcctgagcgagaacgacgagtggacccaggacagagccaagcccgtgacccagatcgtgtctgccgaagcctggggcagagccgatgatgtgattaagatccactggcaggaaaagaagtccaacaccatcctgggcagccaggaaggcaacaccatgaagaccaacgacacctacatgaagttcagctggctgaccgtgcccgagaagtccctggacaaagaacacagatgcatcgtgcggcacgaaaacaacaagaacggcgtggaccaggaaatcatcttcccacccatcaagaccgatgtgattacaatggaccccaaggacaactgctccaaggacgccaacgataccctgctgctccagctgaccaacaccagcgcctactacatgtacttgttgctgctgctgaagtccgtggtgtacttcgccatcatcacatgctgcctgctgatggctatggtcaagcggaaggacagccgggga

SEQ ID NO: 6909 - DNA, 3033 bp, synthetic construct
  source 1..3033: mol_type = other DNA
atggccttaccagtgaccgccttgctcctgccgctggccttgctgctccacgccgccaggccggaagtgcagctggttgaatctggcggaggactggttcagcctggcggatctctgagactgtcttgtgccgccagcggcttcagcttcagcgacttttggatgagctgggtccgacaggcccctggcaaaggacttgaatgggtcgccacaatcagccaggccggcagcgagaaggactacgtggactctgtgaagggcagattcaccatcagccgggacaacgccaagaagtccctgtacctccagatgaacagcctgagagccgaggacaccgccgtgtactattgtgcctctggcgtgtacagcttcgactacagaggccagggcaccctggtcacagtctcttctggtaccggcggaggcggatctggcggcggaggtagcggtggcggaggatctgaattcgacgacgtcgtgatgacccagagccctctgagcctgcctgtgtccctgggcgatcaggccagcatctcctgcagatccagccagagactggtgcacagcaacggcaacacctacctgcactggtatctgcagaagcccggccagagccccaagctgctgatctaccgggtgtccaacagattccccggcgtgcccgatagattcagcggctctggcagcggcaccgacttcaccctgaagatcagccgggtggaagccgaggacctgggcatctatttctgcagccagagcacccacgtgccctacacctttggcggaggcaccaagctggaaatcaagcggctcgagatccagaaccctgatcctgccgtgtaccagctgcgggatagcaagagcagcgacaagagcgtgtgtctgttcaccgacttcgacagccagaccaacgtgtcccagagcaaggactccgacgtgtacatcaccgataagtgcgtgctggacatgcggagcatggacttcaagagcaactccgccgtggcctggtccaacaagtccgatttcgcctgcgccaacgccttcaacaacagcattatccccgaggacacattcttcccaagccccgagagcagcgactccaccgaccacgtgaagcccaaagagacagagaacaccaagcagcccagcaagagctgccacaagcccaaggccatcgtgcacaccgagaaagtgaacatgatgagcctgaccgtgctgggcctgcggatgctgttcgccaaaaccgtggccgtgaacttcctgctgaccgccaagctgttcttcctcctcaccgcccgcgccaagagaagcggatctggcgtgaagcagaccctgaatttcgacctgctgaagctggctggcgacgtggaatccaacccaggccctactagtatggactggatttggcgcatccttttccttgtcggcgctgctaccggcgcgcattccgggccccagctccagctgcaagagtctggacctggcctggtcaagcctagcgagacactgagcctgacctgtaccgtgtccggcgatagcatcagcagcggcgattactactggggctggatcagacagcctcctggcaaaggactggaatggatcggccacatctactacagcggcgtgacctactacaaccccagcctgaagtccagagtgaccatcagcgtggacaccagccggaaccagttctccctgaagctgtctagcgtgacagccgccgataccgccgtgtactactgcaccagagaggacagcagcaactggcggagtagaggccagggaacactggtcacagttagctctggatccggcggaggcggaagtggaggcggaggatctggcggcggaggctctttcgaagaagtgcggctgcagcagtctggccccgacctgattaagcctggggccagcgtgaagatgagctgcaaggccagcggctacaccttcaccggctacgtgatgcactgggtcaagcagaggccaggccagggcctggaatggatcggcttcatcaacccctacaacgacgacatccagagcaacgagcggttccggggcaaggccaccctgaccagcgataagagcagcaccaccgcctacatggaactgagcagcctgacctccgaggacagcgccgtgtactactgtgctaggggagccggctacaacttcgacggggcctacagattcttcgacttttggggccagggcaccacactgaccgtgtcctctacgcgtgaggacctgaagaacgtgttcccacctgaggtggccgtgttcgagcctagcgaggccgagatcagccacacccagaaagccaccctcgtgtgcctggctaccggcttctaccccgaccatgtggaactgtcttggtgggtcaacggcaaagaggtgcacagcggcgtgtgtaccgacccccagccactgaaagaacagcccgccctgaacgacagccggtactgcctgagcagcagactgagagtgtccgccaccttctggcagaacccccggaaccacttcagatgccaggtgcagttctacggcctgagcgagaacgacgagtggacccaggacagagccaagcccgtgacccagatcgtgtctgccgaagcctggggcagagccgatgatgtgattaagatccactggcaggaaaagaagtccaacaccatcctgggcagccaggaaggcaacaccatgaagaccaacgacacctacatgaagttcagctggctgaccgtgcccgagaagtccctggacaaagaacacagatgcatcgtgcggcacgaaaacaacaagaacggcgtggaccaggaaatcatcttcccacccatcaagaccgatgtgattacaatggaccccaaggacaactgctccaaggacgccaacgataccctgctgctccagctgaccaacaccagcgcctactacatgtacttgttgctgctgctgaagtccgtggtgtacttcgccatcatcacatgctgcctgctgatggctatggtcaagcggaaggacagccgggga

SEQ ID NO: 6910 - DNA, 3006 bp, synthetic construct
  source 1..3006: mol_type = other DNA
atggccttaccagtgaccgccttgctcctgccgctggccttgctgctccacgccgccaggccggaagtgcagctggttgaatctggcggaggactggttcagcctggcggatctctgagactgtcttgtgccgccagcggcttcagcttcagcgacttttggatgagctgggtccgacaggcccctggcaaaggacttgaatgggtcgccacaatcagccaggccggcagcgagaaggactacgtggactctgtgaagggcagattcaccatcagccgggacaacgccaagaagtccctgtacctccagatgaacagcctgagagccgaggacaccgccgtgtactattgtgcctctggcgtgtacagcttcgactacagaggccagggcaccctggtcacagtctcttctggtaccggcggaggcggatctggcggcggaggtagcggtggcggaggatctgaattcgacagctacgagctgacccagcctcctagcgtgtccgtgtctcctggacagaccgccaccatctcttgcagcggcgatcaactgggcgggaagtacggccactggtatcagaagaagcccggccagagccccgtgctggtgctgtaccaggacagaaaacggcctgccggcatccccgagagattcagcggaagcagcagcggcaacaccatcaccctgaccatcagcggcacccaggccgtggatgaggccgactactactgccaggcttgggacaccaatctgggcggcgtgttcggcggaggcaccaaagtgacagtgctgggacagctcgagatccagaaccctgatcctgccgtgtaccagctgcgggatagcaagagcagcgacaagagcgtgtgtctgttcaccgacttcgacagccagaccaacgtgtcccagagcaaggactccgacgtgtacatcaccgataagtgcgtgctggacatgcggagcatggacttcaagagcaactccgccgtggcctggtccaacaagtccgatttcgcctgcgccaacgccttcaacaacagcattatccccgaggacacattcttcccaagccccgagagcagcgactccaccgaccacgtgaagcccaaagagacagagaacaccaagcagcccagcaagagctgccacaagcccaaggccatcgtgcacaccgagaaagtgaacatgatgagcctgaccgtgctgggcctgcggatgctgttcgccaaaaccgtggccgtgaacttcctgctgaccgccaagctgttcttcctcctcaccgcccgcgccaagagaagcggatctggcgtgaagcagaccctgaatttcgacctgctgaagctggctggcgacgtggaatccaacccaggccctactagtatggactggatttggcgcatccttttccttgtcggcgctgctaccggcgcgcattccgggccccagctccagctgcaagagtctggacctggcctggtcaagcctagcgagacactgagcctgacctgtaccgtgtccggcgatagcatcagcagcggcgattactactggggctggatcagacagcctcctggcaaaggactggaatggatcggccacatctactacagcggcgtgacctactacaaccccagcctgaagtccagagtgaccatcagcgtggacaccagccggaaccagttctccctgaagctgtctagcgtgacagccgccgataccgccgtgtactactgcaccagagaggacagcagcaactggcggagtagaggccagggaacactggtcacagttagctctggatccggcggaggcggaagtggaggcggaggatctggcggcggaggctctttcgaacaggtgcaactggtggaaagcggagccgaagtgaagaaacctggggccagcgtgaaggtgtcctgcaaggccagcggctacacctttaccggctactacatgcactgggtgcgccaggctccaggccagggactggaatggatgggccggatcaaccccaatagcggcggcaccaactacgcccagaaattccagggcagagtgaccatgaccagagacaccagcatcagcaccgcctacatggaactgagccggctgagaagcgacgacaccgccgtgtactactgcgccagccctagaggcagaggcagcgccttcgatatttggggccagggcacactcgtgaccgtgtcctctacgcgtgaggacctgaagaacgtgttcccacctgaggtggccgtgttcgagcctagcgaggccgagatcagccacacccagaaagccaccctcgtgtgcctggctaccggcttctaccccgaccatgtggaactgtcttggtgggtcaacggcaaagaggtgcacagcggcgtgtgtaccgacccccagccactgaaagaacagcccgccctgaacgacagccggtactgcctgagcagcagactgagagtgtccgccaccttctggcagaacccccggaaccacttcagatgccaggtgcagttctacggcctgagcgagaacgacgagtggacccaggacagagccaagcccgtgacccagatcgtgtctgccgaagcctggggcagagccgatgatgtgattaagatccactggcaggaaaagaagtccaacaccatcctgggcagccaggaaggcaacaccatgaagaccaacgacacctacatgaagttcagctggctgaccgtgcccgagaagtccctggacaaagaacacagatgcatcgtgcggcacgaaaacaacaagaacggcgtggaccaggaaatcatcttcccacccatcaagaccgatgtgattacaatggaccccaaggacaactgctccaaggacgccaacgataccctgctgctccagctgaccaacaccagcgcctactacatgtacttgttgctgctgctgaagtccgtggtgtacttcgccatcatcacatgctgcctgctgatggctatggtcaagcggaaggacagccgggga

SEQ ID NO: 6911 - DNA, 3015 bp, synthetic construct
  source 1..3015: mol_type = other DNA
atggccttaccagtgaccgccttgctcctgccgctggccttgctgctccacgccgccaggccggaagtgcagctggttgaatctggcggaggactggttcagcctggcggatctctgagactgtcttgtgccgccagcggcttcagcttcagcgacttttggatgagctgggtccgacaggcccctggcaaaggacttgaatgggtcgccacaatcagccaggccggcagcgagaaggactacgtggactctgtgaagggcagattcaccatcagccgggacaacgccaagaagtccctgtacctccagatgaacagcctgagagccgaggacaccgccgtgtactattgtgcctctggcgtgtacagcttcgactacagaggccagggcaccctggtcacagtctcttctggtaccggcggaggcggatctggcggcggaggtagcggtggcggaggatctgaattcgacaacttcatgctgacccagccccacagcgtgtccgagagccctggcaagaccgtgaccatctcctgcaccagaagcagcggctctatcgccagcaaatacgtgcagtggtatcagcagaggcccggcagcagccctaccaccgtgatctacgaggacaaccagaggcctagcggcgtgcccgatagattcagcggcagcatcgacaccagcagcaacagcgccagcctgaccatcagcggcctgagaacagaggacgaggccgactactactgccacagctacgacagcaacaaccactccgtgttcggcggaggcaccaaagtgacagtgctgggacagctcgagatccagaaccctgatcctgccgtgtaccagctgcgggatagcaagagcagcgacaagagcgtgtgtctgttcaccgacttcgacagccagaccaacgtgtcccagagcaaggactccgacgtgtacatcaccgataagtgcgtgctggacatgcggagcatggacttcaagagcaactccgccgtggcctggtccaacaagtccgatttcgcctgcgccaacgccttcaacaacagcattatccccgaggacacattcttcccaagccccgagagcagcgactccaccgaccacgtgaagcccaaagagacagagaacaccaagcagcccagcaagagctgccacaagcccaaggccatcgtgcacaccgagaaagtgaacatgatgagcctgaccgtgctgggcctgcggatgctgttcgccaaaaccgtggccgtgaacttcctgctgaccgccaagctgttcttcctcctcaccgcccgcgccaagagaagcggatctggcgtgaagcagaccctgaatttcgacctgctgaagctggctggcgacgtggaatccaacccaggccctactagtatggactggatttggcgcatccttttccttgtcggcgctgctaccggcgcgcattccgggccccagctccagctgcaagagtctggacctggcctggtcaagcctagcgagacactgagcctgacctgtaccgtgtccggcgatagcatcagcagcggcgattactactggggctggatcagacagcctcctggcaaaggactggaatggatcggccacatctactacagcggcgtgacctactacaaccccagcctgaagtccagagtgaccatcagcgtggacaccagccggaaccagttctccctgaagctgtctagcgtgacagccgccgataccgccgtgtactactgcaccagagaggacagcagcaactggcggagtagaggccagggaacactggtcacagttagctctggatccggcggaggcggaagtggaggcggaggatctggcggcggaggctctttcgaagaagtgcaactggtggaaagcgggggaggcgtggtgcagccaggcggatctctgagactgagctgtgccgccagcggcttcaccttcagcagctacgccatgagctgggtgcgccaggcccctggaaaaggcctggaatgggtgtccgccatctctggctctggcggcagcacctactacgccgatagcgtgaagggccggttcagcatcagccgggacaacagcaagaacaccctgtacctccagatgaacagcctgcgggccgaggacaccgccgtgtactactgtgccagaaccagaagctccggggccttcgacatctggggccagggaacactcgtgaccgtgtcctctacgcgtgaggacctgaagaacgtgttcccacctgaggtggccgtgttcgagcctagcgaggccgagatcagccacacccagaaagccaccctcgtgtgcctggctaccggcttctaccccgaccatgtggaactgtcttggtgggtcaacggcaaagaggtgcacagcggcgtgtgtaccgacccccagccactgaaagaacagcccgccctgaacgacagccggtactgcctgagcagcagactgagagtgtccgccaccttctggcagaacccccggaaccacttcagatgccaggtgcagttctacggcctgagcgagaacgacgagtggacccaggacagagccaagcccgtgacccagatcgtgtctgccgaagcctggggcagagccgatgatgtgattaagatccactggcaggaaaagaagtccaacaccatcctgggcagccaggaaggcaacaccatgaagaccaacgacacctacatgaagttcagctggctgaccgtgcccgagaagtccctggacaaagaacacagatgcatcgtgcggcacgaaaacaacaagaacggcgtggaccaggaaatcatcttcccacccatcaagaccgatgtgattacaatggaccccaaggacaactgctccaaggacgccaacgataccctgctgctccagctgaccaacaccagcgcctactacatgtacttgttgctgctgctgaagtccgtggtgtacttcgccatcatcacatgctgcctgctgatggctatggtcaagcggaaggacagccgggga

SEQ ID NO: 6912 - DNA, 3000 bp, synthetic construct
  source 1..3000: mol_type = other DNA
atggccttaccagtgaccgccttgctcctgccgctggccttgctgctccacgccgccaggccggaagtgcagctggttgaatctggcggaggactggttcagcctggcggatctctgagactgtcttgtgccgccagcggcttcagcttcagcgacttttggatgagctgggtccgacaggcccctggcaaaggacttgaatgggtcgccacaatcagccaggccggcagcgagaaggactacgtggactctgtgaagggcagattcaccatcagccgggacaacgccaagaagtccctgtacctccagatgaacagcctgagagccgaggacaccgccgtgtactattgtgcctctggcgtgtacagcttcgactacagaggccagggcaccctggtcacagtctcttctggtaccggcggaggcggatctggcggcggaggtagcggtggcggaggatctgaattcgacatccagatgaaccagagccccagcagcctgagcgccagcctgggcgataccatcaccatcacctgtcacgccagccagaacatcaacgtgtggctgagctggtatcagcagaagcccggcaacatccccaagctgctgatctacaaggccagcaacctgcacaccggcgtgcccagcagattttctggcagcggctctggcaccggcttcaccattaccatcagctccctccagcccgaggacattgccacctactactgccagcagggccagagctacccctggacatttggcggaggcaccaagctggaaatcaagagactcgagatccagaaccctgatcctgccgtgtaccagctgcgggatagcaagagcagcgacaagagcgtgtgtctgttcaccgacttcgacagccagaccaacgtgtcccagagcaaggactccgacgtgtacatcaccgataagtgcgtgctggacatgcggagcatggacttcaagagcaactccgccgtggcctggtccaacaagtccgatttcgcctgcgccaacgccttcaacaacagcattatccccgaggacacattcttcccaagccccgagagcagcgactccaccgaccacgtgaagcccaaagagacagagaacaccaagcagcccagcaagagctgccacaagcccaaggccatcgtgcacaccgagaaagtgaacatgatgagcctgaccgtgctgggcctgcggatgctgttcgccaaaaccgtggccgtgaacttcctgctgaccgccaagctgttcttcctcctcaccgcccgcgccaagagaagcggatctggcgtgaagcagaccctgaatttcgacctgctgaagctggctggcgacgtggaatccaacccaggccctactagtatggactggatttggcgcatccttttccttgtcggcgctgctaccggcgcgcattccgggccccagctccagctgcaagagtctggacctggcctggtcaagcctagcgagacactgagcctgacctgtaccgtgtccggcgatagcatcagcagcggcgattactactggggctggatcagacagcctcctggcaaaggactggaatggatcggccacatctactacagcggcgtgacctactacaaccccagcctgaagtccagagtgaccatcagcgtggacaccagccggaaccagttctccctgaagctgtctagcgtgacagccgccgataccgccgtgtactactgcaccagagaggacagcagcaactggcggagtagaggccagggaacactggtcacagttagctctggatccggcggaggcggaagtggaggcggaggatctggcggcggaggctctttcgaagaagtgcaactccagcagagcggcccagagcttgtgaagcctggcgcttccgtgaagattagctgcaaagccagcggctacagcttcaccggctacttcatgaactgggtcaagcagagccacggcaagagcctggagtacatcggcagattcaacccctacaacggcgagacactgtacaaccagaagttcaagggcaaggccaccctgaccgtggacaagagcagcagcaccgtgcacatggaactgctgagcgtgaccagcgaggacagcgccgtgtactactgtggcagaagcggcaacgacgacgctatggactattggggccagggcaccagcgtgaccgtgtctagtgctacgcgtgaggacctgaagaacgtgttcccacctgaggtggccgtgttcgagcctagcgaggccgagatcagccacacccagaaagccaccctcgtgtgcctggctaccggcttctaccccgaccatgtggaactgtcttggtgggtcaacggcaaagaggtgcacagcggcgtgtgtaccgacccccagccactgaaagaacagcccgccctgaacgacagccggtactgcctgagcagcagactgagagtgtccgccaccttctggcagaacccccggaaccacttcagatgccaggtgcagttctacggcctgagcgagaacgacgagtggacccaggacagagccaagcccgtgacccagatcgtgtctgccgaagcctggggcagagccgatgatgtgattaagatccactggcaggaaaagaagtccaacaccatcctgggcagccaggaaggcaacaccatgaagaccaacgacacctacatgaagttcagctggctgaccgtgcccgagaagtccctggacaaagaacacagatgcatcgtgcggcacgaaaacaacaagaacggcgtggaccaggaaatcatcttcccacccatcaagaccgatgtgattacaatggaccccaaggacaactgctccaaggacgccaacgataccctgctgctccagctgaccaacaccagcgcctactacatgtacttgttgctgctgctgaagtccgtggtgtacttcgccatcatcacatgctgcctgctgatggctatggtcaagcggaaggacagccgggga

SEQ ID NO: 6913 - DNA, 3003 bp, synthetic construct
  source 1..3003: mol_type = other DNA
atggccttaccagtgaccgccttgctcctgccgctggccttgctgctccacgccgccaggccggaagtgcagctggttgaatctggcggaggactggttcagcctggcggatctctgagactgtcttgtgccgccagcggcttcagcttcagcgacttttggatgagctgggtccgacaggcccctggcaaaggacttgaatgggtcgccacaatcagccaggccggcagcgagaaggactacgtggactctgtgaagggcagattcaccatcagccgggacaacgccaagaagtccctgtacctccagatgaacagcctgagagccgaggacaccgccgtgtactattgtgcctctggcgtgtacagcttcgactacagaggccagggcaccctggtcacagtctcttctggtaccggcggaggcggatctggcggcggaggtagcggtggcggaggatctgaattcgagatcgtgctgacacagagccctgccaccctgtctctgagccctggcgaaagagccaccctgagctgtagagccagccagagcgtgcggagctacctggcctggtatcagcagaagcctggacaggcccccagactgctgatctacgacgccagcaatcgggccacaggcatccccgccagattttctggctctggcagcggcaccgacttcaccctgacaatcagcagcctggaacccgaggacttcgccgtgtactactgccagcagcggagcaactggccccctacctttggacagggcaccaaggtggaaatcaagctcgagatccagaaccctgatcctgccgtgtaccagctgcgggatagcaagagcagcgacaagagcgtgtgtctgttcaccgacttcgacagccagaccaacgtgtcccagagcaaggactccgacgtgtacatcaccgataagtgcgtgctggacatgcggagcatggacttcaagagcaactccgccgtggcctggtccaacaagtccgatttcgcctgcgccaacgccttcaacaacagcattatccccgaggacacattcttcccaagccccgagagcagcgactccaccgaccacgtgaagcccaaagagacagagaacaccaagcagcccagcaagagctgccacaagcccaaggccatcgtgcacaccgagaaagtgaacatgatgagcctgaccgtgctgggcctgcggatgctgttcgccaaaaccgtggccgtgaacttcctgctgaccgccaagctgttcttcctcctcaccgcccgcgccaagagaagcggatctggcgtgaagcagaccctgaatttcgacctgctgaagctggctggcgacgtggaatccaacccaggccctactagtatggactggatttggcgcatccttttccttgtcggcgctgctaccggcgcgcattccgggccccagctccagctgcaagagtctggacctggcctggtcaagcctagcgagacactgagcctgacctgtaccgtgtccggcgatagcatcagcagcggcgattactactggggctggatcagacagcctcctggcaaaggactggaatggatcggccacatctactacagcggcgtgacctactacaaccccagcctgaagtccagagtgaccatcagcgtggacaccagccggaaccagttctccctgaagctgtctagcgtgacagccgccgataccgccgtgtactactgcaccagagaggacagcagcaactggcggagtagaggccagggaacactggtcacagttagctctggatccggcggaggcggaagtggaggcggaggatctggcggcggaggctctttcgaacaactccaggtgcaggaatctggccccggactcgtgaagcccagcgagacactgagcctgacctgtaccgtgtccggcggcagcatcagcaacagctacttctcctggggctggatcagacagccccctggcaagggcctggaatggatcggcagcttctactacggcgagaaaacctactacaaccccagcctgaagtccagagccaccatcagcatcgacaccagcaagagccagttctccctgaagctgagcagcgtgacagccgccgacaccgccgtgtattattgccccagaggccccaccatgatccggggcgtgatcgactcttggggccagggaacactcgtgaccgtgtcctctacgcgtgaggacctgaagaacgtgttcccacctgaggtggccgtgttcgagcctagcgaggccgagatcagccacacccagaaagccaccctcgtgtgcctggctaccggcttctaccccgaccatgtggaactgtcttggtgggtcaacggcaaagaggtgcacagcggcgtgtgtaccgacccccagccactgaaagaacagcccgccctgaacgacagccggtactgcctgagcagcagactgagagtgtccgccaccttctggcagaacccccggaaccacttcagatgccaggtgcagttctacggcctgagcgagaacgacgagtggacccaggacagagccaagcccgtgacccagatcgtgtctgccgaagcctggggcagagccgatgatgtgattaagatccactggcaggaaaagaagtccaacaccatcctgggcagccaggaaggcaacaccatgaagaccaacgacacctacatgaagttcagctggctgaccgtgcccgagaagtccctggacaaagaacacagatgcatcgtgcggcacgaaaacaacaagaacggcgtggaccaggaaatcatcttcccacccatcaagaccgatgtgattacaatggaccccaaggacaactgctccaaggacgccaacgataccctgctgctccagctgaccaacaccagcgcctactacatgtacttgttgctgctgctgaagtccgtggtgtacttcgccatcatcacatgctgcctgctgatggctatggtcaagcggaaggacagccgggga

SEQ ID NO: 6914 - DNA, 3030 bp, synthetic construct
  source 1..3030: mol_type = other DNA
atggccttaccagtgaccgccttgctcctgccgctggccttgctgctccacgccgccaggccggaagtgcagctggttgaatctggcggaggactggttcagcctggcggatctctgagactgtcttgtgccgccagcggcttcagcttcagcgacttttggatgagctgggtccgacaggcccctggcaaaggacttgaatgggtcgccacaatcagccaggccggcagcgagaaggactacgtggactctgtgaagggcagattcaccatcagccgggacaacgccaagaagtccctgtacctccagatgaacagcctgagagccgaggacaccgccgtgtactattgtgcctctggcgtgtacagcttcgactacagaggccagggcaccctggtcacagtctcttctggtaccggcggaggcggatctggcggcggaggtagcggtggcggaggatctgaattcgacatcgtgatgacccagacccccctgagcctgcctgtgacacctggcgagcctgccagcatctcctgcagaagcagcagaagcctgctggacagcgacgacggcaacacctacctggactggtatctgcagaaacccggccagagcccccaactgctgatctacaccctgagctacagagccagcggcgtgcccgatagattttccggctctggcagcggcaccgacttcaccctgaagatcagccgggtggaagccgaggacgtgggcgtgtactactgtatgcagcgggtggaatttcccatcaccttcggccagggcaccagactggaaatcaagagactcgagatccagaaccctgatcctgccgtgtaccagctgcgggatagcaagagcagcgacaagagcgtgtgtctgttcaccgacttcgacagccagaccaacgtgtcccagagcaaggactccgacgtgtacatcaccgataagtgcgtgctggacatgcggagcatggacttcaagagcaactccgccgtggcctggtccaacaagtccgatttcgcctgcgccaacgccttcaacaacagcattatccccgaggacacattcttcccaagccccgagagcagcgactccaccgaccacgtgaagcccaaagagacagagaacaccaagcagcccagcaagagctgccacaagcccaaggccatcgtgcacaccgagaaagtgaacatgatgagcctgaccgtgctgggcctgcggatgctgttcgccaaaaccgtggccgtgaacttcctgctgaccgccaagctgttcttcctcctcaccgcccgcgccaagagaagcggatctggcgtgaagcagaccctgaatttcgacctgctgaagctggctggcgacgtggaatccaacccaggccctactagtatggactggatttggcgcatccttttccttgtcggcgctgctaccggcgcgcattccgggccccagctccagctgcaagagtctggacctggcctggtcaagcctagcgagacactgagcctgacctgtaccgtgtccggcgatagcatcagcagcggcgattactactggggctggatcagacagcctcctggcaaaggactggaatggatcggccacatctactacagcggcgtgacctactacaaccccagcctgaagtccagagtgaccatcagcgtggacaccagccggaaccagttctccctgaagctgtctagcgtgacagccgccgataccgccgtgtactactgcaccagagaggacagcagcaactggcggagtagaggccagggaacactggtcacagttagctctggatccggcggaggcggaagtggaggcggaggatctggcggcggaggctctttcgaacaggtgcaactggtggaatctggcgggggagtggtgcagcctggcagatccctgagactgagctgtgccgccagcggcttcatcttcagcagatacggaatgcactgggtgcgccaggcccctggcaagggactgaaatgggtggccgtgatttggtacgacggcagcaacaagctgtacgccgacagcgtgaagggccggttcaccatcagcagagacaacagcaagaacaccctgtacctgcagatgaacagcctgcgggccgaggacaccgccgtgtactattgcgccagagactactacgacaacagccggcaccactggggcttcgactattggggccagggaacccttgtgaccgtgtcctctacgcgtgaggacctgaagaacgtgttcccacctgaggtggccgtgttcgagcctagcgaggccgagatcagccacacccagaaagccaccctcgtgtgcctggctaccggcttctaccccgaccatgtggaactgtcttggtgggtcaacggcaaagaggtgcacagcggcgtgtgtaccgacccccagccactgaaagaacagcccgccctgaacgacagccggtactgcctgagcagcagactgagagtgtccgccaccttctggcagaacccccggaaccacttcagatgccaggtgcagttctacggcctgagcgagaacgacgagtggacccaggacagagccaagcccgtgacccagatcgtgtctgccgaagcctggggcagagccgatgatgtgattaagatccactggcaggaaaagaagtccaacaccatcctgggcagccaggaaggcaacaccatgaagaccaacgacacctacatgaagttcagctggctgaccgtgcccgagaagtccctggacaaagaacacagatgcatcgtgcggcacgaaaacaacaagaacggcgtggaccaggaaatcatcttcccacccatcaagaccgatgtgattacaatggaccccaaggacaactgctccaaggacgccaacgataccctgctgctccagctgaccaacaccagcgcctactacatgtacttgttgctgctgctgaagtccgtggtgtacttcgccatcatcacatgctgcctgctgatggctatggtcaagcggaaggacagccgggga

SEQ ID NO: 6915 - DNA, 3000 bp, synthetic construct
  source 1..3000: mol_type = other DNA
atggccttaccagtgaccgccttgctcctgccgctggccttgctgctccacgccgccaggccggaagtgcagctggttgaatctggcggaggactggttcagcctggcggatctctgagactgtcttgtgccgccagcggcttcagcttcagcgacttttggatgagctgggtccgacaggcccctggcaaaggacttgaatgggtcgccacaatcagccaggccggcagcgagaaggactacgtggactctgtgaagggcagattcaccatcagccgggacaacgccaagaagtccctgtacctccagatgaacagcctgagagccgaggacaccgccgtgtactattgtgcctctggcgtgtacagcttcgactacagaggccagggcaccctggtcacagtctcttctggtaccggcggaggcggatctggcggcggaggtagcggtggcggaggatctgaattcgagatccagatgacccagagccccagcagcatgtctgccagcctgggcgacaccatcaccatcacatgccaggccacccaggacatcttcaagaacctgaactggtatcagcagaagcccggcaagccccccagcctgctgatctactatgccaccgaactggccgagggcgtgcccagcagattttctggcagcggcagcggctccgactacagcctgaccatcagcaacctggaaagcgaggacttcgccgcctactactgcctccagttcttcgagttcccattcaccttcggctccggcaccaagctggaaatgaagctcgagatccagaaccctgatcctgccgtgtaccagctgcgggatagcaagagcagcgacaagagcgtgtgtctgttcaccgacttcgacagccagaccaacgtgtcccagagcaaggactccgacgtgtacatcaccgataagtgcgtgctggacatgcggagcatggacttcaagagcaactccgccgtggcctggtccaacaagtccgatttcgcctgcgccaacgccttcaacaacagcattatccccgaggacacattcttcccaagccccgagagcagcgactccaccgaccacgtgaagcccaaagagacagagaacaccaagcagcccagcaagagctgccacaagcccaaggccatcgtgcacaccgagaaagtgaacatgatgagcctgaccgtgctgggcctgcggatgctgttcgccaaaaccgtggccgtgaacttcctgctgaccgccaagctgttcttcctcctcaccgcccgcgccaagagaagcggatctggcgtgaagcagaccctgaatttcgacctgctgaagctggctggcgacgtggaatccaacccaggccctactagtatggactggatttggcgcatccttttccttgtcggcgctgctaccggcgcgcattccgggccccagctccagctgcaagagtctggacctggcctggtcaagcctagcgagacactgagcctgacctgtaccgtgtccggcgatagcatcagcagcggcgattactactggggctggatcagacagcctcctggcaaaggactggaatggatcggccacatctactacagcggcgtgacctactacaaccccagcctgaagtccagagtgaccatcagcgtggacaccagccggaaccagttctccctgaagctgtctagcgtgacagccgccgataccgccgtgtactactgcaccagagaggacagcagcaactggcggagtagaggccagggaacactggtcacagttagctctggatccggcggaggcggaagtggaggcggaggatctggcggcggaggctctttcgaacaggtgcaactccagcagtctggcgctgagcttgtgcggcctggcacctctgtgaaggtgtcctgtaaagccagcggctacgtgttcaccaactactggatcgagtggatcaagcagcggccaggccagggcctggaatggatcggcgtgatgaatccaggcagcggcgagacaacctacaacgagaagttcaagggcaaggccaccctgaccgccgacaagagcagcagcacagcctacatgcaactgtcctccctgaccagcgtggacagcgccgtgtacttctgcgccagggaccacgaccgggactactacgctatggactactggggccagggcaccagcgtgaccgtgtcatctacgcgtgaggacctgaagaacgtgttcccacctgaggtggccgtgttcgagcctagcgaggccgagatcagccacacccagaaagccaccctcgtgtgcctggctaccggcttctaccccgaccatgtggaactgtcttggtgggtcaacggcaaagaggtgcacagcggcgtgtgtaccgacccccagccactgaaagaacagcccgccctgaacgacagccggtactgcctgagcagcagactgagagtgtccgccaccttctggcagaacccccggaaccacttcagatgccaggtgcagttctacggcctgagcgagaacgacgagtggacccaggacagagccaagcccgtgacccagatcgtgtctgccgaagcctggggcagagccgatgatgtgattaagatccactggcaggaaaagaagtccaacaccatcctgggcagccaggaaggcaacaccatgaagaccaacgacacctacatgaagttcagctggctgaccgtgcccgagaagtccctggacaaagaacacagatgcatcgtgcggcacgaaaacaacaagaacggcgtggaccaggaaatcatcttcccacccatcaagaccgatgtgattacaatggaccccaaggacaactgctccaaggacgccaacgataccctgctgctccagctgaccaacaccagcgcctactacatgtacttgttgctgctgctgaagtccgtggtgtacttcgccatcatcacatgctgcctgctgatggctatggtcaagcggaaggacagccgggga

SEQ ID NO: 6916 - DNA, 2991 bp, synthetic construct
  source 1..2991: mol_type = other DNA
atggccttaccagtgaccgccttgctcctgccgctggccttgctgctccacgccgccaggccggaagtgcagctggttgaatctggcggaggactggttcagcctggcggatctctgagactgtcttgtgccgccagcggcttcagcttcagcgacttttggatgagctgggtccgacaggcccctggcaaaggacttgaatgggtcgccacaatcagccaggccggcagcgagaaggactacgtggactctgtgaagggcagattcaccatcagccgggacaacgccaagaagtccctgtacctccagatgaacagcctgagagccgaggacaccgccgtgtactattgtgcctctggcgtgtacagcttcgactacagaggccagggcaccctggtcacagtctcttctggtaccggcggaggcggatctggcggcggaggtagcggtggcggaggatctgaattcgacatcctgctgacacagagccccgccatcctgtccgtgtctccaggcgagagagtgtcctttagctgccgggccagccagaacatcggcaccagcatccactggtatcagcagcggaccaacggcagccccagactgctgattaagtacgccagcgagtccgtgtccggcatccccagcagattttctggcagcggctccggcaccgacttcaccctgagcatcaacagcgtggaaagcgaggacattgccgactactactgccagcacaccaatagctggcccaccacctttggcggaggcaccaagctggaaatcaagagactcgagatccagaaccctgatcctgccgtgtaccagctgcgggatagcaagagcagcgacaagagcgtgtgtctgttcaccgacttcgacagccagaccaacgtgtcccagagcaaggactccgacgtgtacatcaccgataagtgcgtgctggacatgcggagcatggacttcaagagcaactccgccgtggcctggtccaacaagtccgatttcgcctgcgccaacgccttcaacaacagcattatccccgaggacacattcttcccaagccccgagagcagcgactccaccgaccacgtgaagcccaaagagacagagaacaccaagcagcccagcaagagctgccacaagcccaaggccatcgtgcacaccgagaaagtgaacatgatgagcctgaccgtgctgggcctgcggatgctgttcgccaaaaccgtggccgtgaacttcctgctgaccgccaagctgttcttcctcctcaccgcccgcgccaagagaagcggatctggcgtgaagcagaccctgaatttcgacctgctgaagctggctggcgacgtggaatccaacccaggccctactagtatggactggatttggcgcatccttttccttgtcggcgctgctaccggcgcgcattccgggccccagctccagctgcaagagtctggacctggcctggtcaagcctagcgagacactgagcctgacctgtaccgtgtccggcgatagcatcagcagcggcgattactactggggctggatcagacagcctcctggcaaaggactggaatggatcggccacatctactacagcggcgtgacctactacaaccccagcctgaagtccagagtgaccatcagcgtggacaccagccggaaccagttctccctgaagctgtctagcgtgacagccgccgataccgccgtgtactactgcaccagagaggacagcagcaactggcggagtagaggccagggaacactggtcacagttagctctggatccggcggaggcggaagtggaggcggaggatctggcggcggaggctctttcgaacaggtgcaactccagcagtccgacgccgagcttgtgaagcctggcgcttccgtgaagattagctgcaaggccagcggctacaccttcaccgaccacgccattcactgggtcaagcagaagcccgagcagggcctggaatggatcggctacttcagccccggcaacggcgacatcaagtacaacgagaagttcaagggcaaggccaccctgaccgccgacaagagcagcagcacagcctacatgcaactgaacagcctgaccagcgaggactccgccgtgtacttctgcaagcggagctacggcaactacgactactggggccagggcaccacactgaccgtgtctagtacgcgtgaggacctgaagaacgtgttcccacctgaggtggccgtgttcgagcctagcgaggccgagatcagccacacccagaaagccaccctcgtgtgcctggctaccggcttctaccccgaccatgtggaactgtcttggtgggtcaacggcaaagaggtgcacagcggcgtgtgtaccgacccccagccactgaaagaacagcccgccctgaacgacagccggtactgcctgagcagcagactgagagtgtccgccaccttctggcagaacccccggaaccacttcagatgccaggtgcagttctacggcctgagcgagaacgacgagtggacccaggacagagccaagcccgtgacccagatcgtgtctgccgaagcctggggcagagccgatgatgtgattaagatccactggcaggaaaagaagtccaacaccatcctgggcagccaggaaggcaacaccatgaagaccaacgacacctacatgaagttcagctggctgaccgtgcccgagaagtccctggacaaagaacacagatgcatcgtgcggcacgaaaacaacaagaacggcgtggaccaggaaatcatcttcccacccatcaagaccgatgtgattacaatggaccccaaggacaactgctccaaggacgccaacgataccctgctgctccagctgaccaacaccagcgcctactacatgtacttgttgctgctgctgaagtccgtggtgtacttcgccatcatcacatgctgcctgctgatggctatggtcaagcggaaggacagccgggga

SEQ ID NO: 6917 - DNA, 3006 bp, synthetic construct
  source 1..3006: mol_type = other DNA
atggccttaccagtgaccgccttgctcctgccgctggccttgctgctccacgccgccaggccggaagtgcagctggttgaatctggcggaggactggttcagcctggcggatctctgagactgtcttgtgccgccagcggcttcagcttcagcgacttttggatgagctgggtccgacaggcccctggcaaaggacttgaatgggtcgccacaatcagccaggccggcagcgagaaggactacgtggactctgtgaagggcagattcaccatcagccgggacaacgccaagaagtccctgtacctccagatgaacagcctgagagccgaggacaccgccgtgtactattgtgcctctggcgtgtacagcttcgactacagaggccagggcaccctggtcacagtctcttctggtaccggcggaggcggatctggcggcggaggtagcggtggcggaggatctgaattcgacatcgtgatgacccagagccccgatagcctggccgtgtctctgggagagagagccaccatcaactgcaagagcagccagagcctgctgaacagcggcgaccagaagaactacctgacctggtatcagcagaagcccggccagccccccaagctgctgatctactgggccagcaccagagaaagcggcgtgcccgatagattcagcggcagcggaagtggcaccgacttcaccctgaccatcagttctcttcaggccgaggacgtggccgtgtactactgccagaacgactacagctaccccctgaccttcggccagggcaccaaggtggaaatcaagctcgagatccagaaccctgatcctgccgtgtaccagctgcgggatagcaagagcagcgacaagagcgtgtgtctgttcaccgacttcgacagccagaccaacgtgtcccagagcaaggactccgacgtgtacatcaccgataagtgcgtgctggacatgcggagcatggacttcaagagcaactccgccgtggcctggtccaacaagtccgatttcgcctgcgccaacgccttcaacaacagcattatccccgaggacacattcttcccaagccccgagagcagcgactccaccgaccacgtgaagcccaaagagacagagaacaccaagcagcccagcaagagctgccacaagcccaaggccatcgtgcacaccgagaaagtgaacatgatgagcctgaccgtgctgggcctgcggatgctgttcgccaaaaccgtggccgtgaacttcctgctgaccgccaagctgttcttcctcctcaccgcccgcgccaagagaagcggatctggcgtgaagcagaccctgaatttcgacctgctgaagctggctggcgacgtggaatccaacccaggccctactagtatggactggatttggcgcatccttttccttgtcggcgctgctaccggcgcgcattccgggccccagctccagctgcaagagtctggacctggcctggtcaagcctagcgagacactgagcctgacctgtaccgtgtccggcgatagcatcagcagcggcgattactactggggctggatcagacagcctcctggcaaaggactggaatggatcggccacatctactacagcggcgtgacctactacaaccccagcctgaagtccagagtgaccatcagcgtggacaccagccggaaccagttctccctgaagctgtctagcgtgacagccgccgataccgccgtgtactactgcaccagagaggacagcagcaactggcggagtagaggccagggaacactggtcacagttagctctggatccggcggaggcggaagtggaggcggaggatctggcggcggaggctctttcgaacaggtgcagctggtgcagtctggggccgaagtgaagaaaaccggcagcagcgtgaaggtgtcctgcaaggccagcggctacacctttaccgaccacgccattcacgtgtggcggcaggctccaggacaggccctggaatggatgggccacttcagccccggcaacaccgacatcaagtacaacgacaagttcaagggcagagtgaccctgaccgtggaccgcagcatgagcaccgcctacatggaactgagcagcctgcggagcgaggacaccgccatgtactattgcaagaccagcaccttctttttcgactactggggccagggaacaatggtcaccgtgtccagcacgcgtgaggacctgaagaacgtgttcccacctgaggtggccgtgttcgagcctagcgaggccgagatcagccacacccagaaagccaccctcgtgtgcctggctaccggcttctaccccgaccatgtggaactgtcttggtgggtcaacggcaaagaggtgcacagcggcgtgtgtaccgacccccagccactgaaagaacagcccgccctgaacgacagccggtactgcctgagcagcagactgagagtgtccgccaccttctggcagaacccccggaaccacttcagatgccaggtgcagttctacggcctgagcgagaacgacgagtggacccaggacagagccaagcccgtgacccagatcgtgtctgccgaagcctggggcagagccgatgatgtgattaagatccactggcaggaaaagaagtccaacaccatcctgggcagccaggaaggcaacaccatgaagaccaacgacacctacatgaagttcagctggctgaccgtgcccgagaagtccctggacaaagaacacagatgcatcgtgcggcacgaaaacaacaagaacggcgtggaccaggaaatcatcttcccacccatcaagaccgatgtgattacaatggaccccaaggacaactgctccaaggacgccaacgataccctgctgctccagctgaccaacaccagcgcctactacatgtacttgttgctgctgctgaagtccgtggtgtacttcgccatcatcacatgctgcctgctgatggctatggtcaagcggaaggacagccgggga

SEQ ID NO: 6918 - DNA, 3003 bp, synthetic construct
  source 1..3003: mol_type = other DNA
atggccttaccagtgaccgccttgctcctgccgctggccttgctgctccacgccgccaggccggaagtgcagctggttgaatctggcggaggactggttcagcctggcggatctctgagactgtcttgtgccgccagcggcttcagcttcagcgacttttggatgagctgggtccgacaggcccctggcaaaggacttgaatgggtcgccacaatcagccaggccggcagcgagaaggactacgtggactctgtgaagggcagattcaccatcagccgggacaacgccaagaagtccctgtacctccagatgaacagcctgagagccgaggacaccgccgtgtactattgtgcctctggcgtgtacagcttcgactacagaggccagggcaccctggtcacagtctcttctggtaccggcggaggcggatctggcggcggaggtagcggtggcggaggatctgaattcgacatccagatgacccagagccccagcagcctgtctgccagcgtgggcgacagagtgaccatcacatgcaaggccagccaggacgtgtccattgccgtggcctggtatcagcagaagcccggcaaggcccccaaggtgctgatctacagcgccagctacagatacaccggcgtgcccgacagattcagcggctctggcagcggcaccgacttcaccttcaccatcagctccctccagcccgaggatattgccgtgtactactgccagcagcactacatcacccccctgacctttggcggaggcaccaaggtggaaatcaagctcgagatccagaaccctgatcctgccgtgtaccagctgcgggatagcaagagcagcgacaagagcgtgtgtctgttcaccgacttcgacagccagaccaacgtgtcccagagcaaggactccgacgtgtacatcaccgataagtgcgtgctggacatgcggagcatggacttcaagagcaactccgccgtggcctggtccaacaagtccgatttcgcctgcgccaacgccttcaacaacagcattatccccgaggacacattcttcccaagccccgagagcagcgactccaccgaccacgtgaagcccaaagagacagagaacaccaagcagcccagcaagagctgccacaagcccaaggccatcgtgcacaccgagaaagtgaacatgatgagcctgaccgtgctgggcctgcggatgctgttcgccaaaaccgtggccgtgaacttcctgctgaccgccaagctgttcttcctcctcaccgcccgcgccaagagaagcggatctggcgtgaagcagaccctgaatttcgacctgctgaagctggctggcgacgtggaatccaacccaggccctactagtatggactggatttggcgcatccttttccttgtcggcgctgctaccggcgcgcattccgggccccagctccagctgcaagagtctggacctggcctggtcaagcctagcgagacactgagcctgacctgtaccgtgtccggcgatagcatcagcagcggcgattactactggggctggatcagacagcctcctggcaaaggactggaatggatcggccacatctactacagcggcgtgacctactacaaccccagcctgaagtccagagtgaccatcagcgtggacaccagccggaaccagttctccctgaagctgtctagcgtgacagccgccgataccgccgtgtactactgcaccagagaggacagcagcaactggcggagtagaggccagggaacactggtcacagttagctctggatccggcggaggcggaagtggaggcggaggatctggcggcggaggctctttcgaacagatccaactggtgcagagcggccacgaagtgaagaaacctggggccagcgtgaaggtgtcctgcaaagccagcggctacacctttaccaactacggcatgaactgggtgcgccaggcccctggacagggcctggaatggatgggctggatcaacaccaagaccggcgagcccacctacgccgaagagttcaagggcagattcgtgttcagcctggaaaccagcgcctccaccgcctacctccagatcagctctctgaaggccgaggacaccgccatgtacttttgcggcagaggcggctacggcagcagctactggtacttcgatgtgtggggccagggcaccaccgtgaccgtgtcatctacgcgtgaggacctgaagaacgtgttcccacctgaggtggccgtgttcgagcctagcgaggccgagatcagccacacccagaaagccaccctcgtgtgcctggctaccggcttctaccccgaccatgtggaactgtcttggtgggtcaacggcaaagaggtgcacagcggcgtgtgtaccgacccccagccactgaaagaacagcccgccctgaacgacagccggtactgcctgagcagcagactgagagtgtccgccaccttctggcagaacccccggaaccacttcagatgccaggtgcagttctacggcctgagcgagaacgacgagtggacccaggacagagccaagcccgtgacccagatcgtgtctgccgaagcctggggcagagccgatgatgtgattaagatccactggcaggaaaagaagtccaacaccatcctgggcagccaggaaggcaacaccatgaagaccaacgacacctacatgaagttcagctggctgaccgtgcccgagaagtccctggacaaagaacacagatgcatcgtgcggcacgaaaacaacaagaacggcgtggaccaggaaatcatcttcccacccatcaagaccgatgtgattacaatggaccccaaggacaactgctccaaggacgccaacgataccctgctgctccagctgaccaacaccagcgcctactacatgtacttgttgctgctgctgaagtccgtggtgtacttcgccatcatcacatgctgcctgctgatggctatggtcaagcggaaggacagccgggga

SEQ ID NO: 6919 - DNA, 3009 bp, synthetic construct
  source 1..3009: mol_type = other DNA
atggccttaccagtgaccgccttgctcctgccgctggccttgctgctccacgccgccaggccggaagtgcagctggttgaatctggcggaggactggttcagcctggcggatctctgagactgtcttgtgccgccagcggcttcagcttcagcgacttttggatgagctgggtccgacaggcccctggcaaaggacttgaatgggtcgccacaatcagccaggccggcagcgagaaggactacgtggactctgtgaagggcagattcaccatcagccgggacaacgccaagaagtccctgtacctccagatgaacagcctgagagccgaggacaccgccgtgtactattgtgcctctggcgtgtacagcttcgactacagaggccagggcaccctggtcacagtctcttctggtaccggcggaggcggatctggcggcggaggtagcggtggcggaggatctgaattcgacatcgtgatgacccagagccccgatagcctggccgtgtctctgggagagagagccaccatcaactgccgggccagcaagagcgtgtccaccagcggctacagctacatgcactggtatcagcagaagcccggccagccccccaagctgctgatctacctggcctccaacctggaaagcggcgtgcccgatagattcagcggcagcggctctggcaccgacttcaccctgaccatcagttctcttcaggccgaggacgtggccgtgtactactgccagcacagcagagagctgccctacaccttcggccagggcaccaagctggaaatcaagctcgagatccagaaccctgatcctgccgtgtaccagctgcgggatagcaagagcagcgacaagagcgtgtgtctgttcaccgacttcgacagccagaccaacgtgtcccagagcaaggactccgacgtgtacatcaccgataagtgcgtgctggacatgcggagcatggacttcaagagcaactccgccgtggcctggtccaacaagtccgatttcgcctgcgccaacgccttcaacaacagcattatccccgaggacacattcttcccaagccccgagagcagcgactccaccgaccacgtgaagcccaaagagacagagaacaccaagcagcccagcaagagctgccacaagcccaaggccatcgtgcacaccgagaaagtgaacatgatgagcctgaccgtgctgggcctgcggatgctgttcgccaaaaccgtggccgtgaacttcctgctgaccgccaagctgttcttcctcctcaccgcccgcgccaagagaagcggatctggcgtgaagcagaccctgaatttcgacctgctgaagctggctggcgacgtggaatccaacccaggccctactagtatggactggatttggcgcatccttttccttgtcggcgctgctaccggcgcgcattccgggccccagctccagctgcaagagtctggacctggcctggtcaagcctagcgagacactgagcctgacctgtaccgtgtccggcgatagcatcagcagcggcgattactactggggctggatcagacagcctcctggcaaaggactggaatggatcggccacatctactacagcggcgtgacctactacaaccccagcctgaagtccagagtgaccatcagcgtggacaccagccggaaccagttctccctgaagctgtctagcgtgacagccgccgataccgccgtgtactactgcaccagagaggacagcagcaactggcggagtagaggccagggaacactggtcacagttagctctggatccggcggaggcggaagtggaggcggaggatctggcggcggaggctctttcgaacaggtgcaactccaggaatctggccctggccttgtgaagcccagcgagacactgagcctgacctgtaccgtgtccggcggcagcatcagctcttacggcgtgcactggattcggcagcctccaggcaagggcctggaatggatcggcgtgatctggacctccggcgtgaccgactacaacagcgccctgatgggcagagtgaccatctccgtggacaccagcaagaaccagttcagcctgaagctgagcagcgtgacagccgccgataccgccgtgtattattgcgccagagatggcgactacgaccgctacacaatggactactggggccagggaacccttgtgaccgtgtcctctacgcgtgaggacctgaagaacgtgttcccacctgaggtggccgtgttcgagcctagcgaggccgagatcagccacacccagaaagccaccctcgtgtgcctggctaccggcttctaccccgaccatgtggaactgtcttggtgggtcaacggcaaagaggtgcacagcggcgtgtgtaccgacccccagccactgaaagaacagcccgccctgaacgacagccggtactgcctgagcagcagactgagagtgtccgccaccttctggcagaacccccggaaccacttcagatgccaggtgcagttctacggcctgagcgagaacgacgagtggacccaggacagagccaagcccgtgacccagatcgtgtctgccgaagcctggggcagagccgatgatgtgattaagatccactggcaggaaaagaagtccaacaccatcctgggcagccaggaaggcaacaccatgaagaccaacgacacctacatgaagttcagctggctgaccgtgcccgagaagtccctggacaaagaacacagatgcatcgtgcggcacgaaaacaacaagaacggcgtggaccaggaaatcatcttcccacccatcaagaccgatgtgattacaatggaccccaaggacaactgctccaaggacgccaacgataccctgctgctccagctgaccaacaccagcgcctactacatgtacttgttgctgctgctgaagtccgtggtgtacttcgccatcatcacatgctgcctgctgatggctatggtcaagcggaaggacagccgggga

SEQ ID NO: 6920 - DNA, 3009 bp, synthetic construct
  source 1..3009: mol_type = other DNA
atggccttaccagtgaccgccttgctcctgccgctggccttgctgctccacgccgccaggccggaagtgcagctggttgaatctggcggaggactggttcagcctggcggatctctgagactgtcttgtgccgccagcggcttcagcttcagcgacttttggatgagctgggtccgacaggcccctggcaaaggacttgaatgggtcgccacaatcagccaggccggcagcgagaaggactacgtggactctgtgaagggcagattcaccatcagccgggacaacgccaagaagtccctgtacctccagatgaacagcctgagagccgaggacaccgccgtgtactattgtgcctctggcgtgtacagcttcgactacagaggccagggcaccctggtcacagtctcttctggtaccggcggaggcggatctggcggcggaggtagcggtggcggaggatctgaattcgacatccagatgacccagagccccagcagcctgtctgccagcgtgggcgacagagtgaccatcacctgtagagccagccagagcatcggcaccagcctgcactggtatcagcagaagcctggcaaggcccccaagctgctgattaagttcgccagcagactgcagagcggcgtgcccagcagattttctggcagcggctccggcaccgacttcaccctgacaatcagctccctgcagcccgaggacttcgccacctactactgccagcagagccccggcttccctccaacctttggacagggcaccaagctggaaatcaagcggctcgagatccagaaccctgatcctgccgtgtaccagctgcgggatagcaagagcagcgacaagagcgtgtgtctgttcaccgacttcgacagccagaccaacgtgtcccagagcaaggactccgacgtgtacatcaccgataagtgcgtgctggacatgcggagcatggacttcaagagcaactccgccgtggcctggtccaacaagtccgatttcgcctgcgccaacgccttcaacaacagcattatccccgaggacacattcttcccaagccccgagagcagcgactccaccgaccacgtgaagcccaaagagacagagaacaccaagcagcccagcaagagctgccacaagcccaaggccatcgtgcacaccgagaaagtgaacatgatgagcctgaccgtgctgggcctgcggatgctgttcgccaaaaccgtggccgtgaacttcctgctgaccgccaagctgttcttcctcctcaccgcccgcgccaagagaagcggatctggcgtgaagcagaccctgaatttcgacctgctgaagctggctggcgacgtggaatccaacccaggccctactagtatggactggatttggcgcatccttttccttgtcggcgctgctaccggcgcgcattccgggccccagctccagctgcaagagtctggacctggcctggtcaagcctagcgagacactgagcctgacctgtaccgtgtccggcgatagcatcagcagcggcgattactactggggctggatcagacagcctcctggcaaaggactggaatggatcggccacatctactacagcggcgtgacctactacaaccccagcctgaagtccagagtgaccatcagcgtggacaccagccggaaccagttctccctgaagctgtctagcgtgacagccgccgataccgccgtgtactactgcaccagagaggacagcagcaactggcggagtagaggccagggaacactggtcacagttagctctggatccggcggaggcggaagtggaggcggaggatctggcggcggaggctctttcgaacaggtgcaactggtggaatctggcggcggacttgtgaagccaggcggcagcctgagactgagctgtgccgccagcggcttcagcatcaccaccagcggctactactggacctggatcagacagttccccggcaagggcctggaatggatgggctacatcggctacaacagcaagacctactacaaccccgccctgaagtcccggatcaccatcagcagagacaacgccaagaacagcctgtacctgcagatgaactccctgagagccgaggataccgccgtgtactactgcgccagatccctgtacggcggctacaaggacgccttcgatagctggggccagggaacccttgtgaccgtgtctagcacgcgtgaggacctgaagaacgtgttcccacctgaggtggccgtgttcgagcctagcgaggccgagatcagccacacccagaaagccaccctcgtgtgcctggctaccggcttctaccccgaccatgtggaactgtcttggtgggtcaacggcaaagaggtgcacagcggcgtgtgtaccgacccccagccactgaaagaacagcccgccctgaacgacagccggtactgcctgagcagcagactgagagtgtccgccaccttctggcagaacccccggaaccacttcagatgccaggtgcagttctacggcctgagcgagaacgacgagtggacccaggacagagccaagcccgtgacccagatcgtgtctgccgaagcctggggcagagccgatgatgtgattaagatccactggcaggaaaagaagtccaacaccatcctgggcagccaggaaggcaacaccatgaagaccaacgacacctacatgaagttcagctggctgaccgtgcccgagaagtccctggacaaagaacacagatgcatcgtgcggcacgaaaacaacaagaacggcgtggaccaggaaatcatcttcccacccatcaagaccgatgtgattacaatggaccccaaggacaactgctccaaggacgccaacgataccctgctgctccagctgaccaacaccagcgcctactacatgtacttgttgctgctgctgaagtccgtggtgtacttcgccatcatcacatgctgcctgctgatggctatggtcaagcggaaggacagccgggga

SEQ ID NO: 6921 - DNA, 3024 bp, synthetic construct
  source 1..3024: mol_type = other DNA
atggccttaccagtgaccgccttgctcctgccgctggccttgctgctccacgccgccaggccggaagtgcagctggttgaatctggcggaggactggttcagcctggcggatctctgagactgtcttgtgccgccagcggcttcagcttcagcgacttttggatgagctgggtccgacaggcccctggcaaaggacttgaatgggtcgccacaatcagccaggccggcagcgagaaggactacgtggactctgtgaagggcagattcaccatcagccgggacaacgccaagaagtccctgtacctccagatgaacagcctgagagccgaggacaccgccgtgtactattgtgcctctggcgtgtacagcttcgactacagaggccagggcaccctggtcacagtctcttctggtaccggcggaggcggatctggcggcggaggtagcggtggcggaggatctgaattcgacgagatcgtgctgacccagagccctctgagcctgcctgtgacacctggcgagcctgccagcatctcctgtagaagcagccagagcctgctgcacagcatcggctacaactacctggactggtatctccagaagcccggccagagcccccaactgctgatctacctgggcagcaacagagccagcggcgtgcccgatagattttccggcagcggctccggcaccgacttcaccctgaagatcagccgggtggaagccgaggacgtgggcgtgtactactgtatgcaggccctccagacccccctgacctttggcggaggcaccaaggtggaaatcaagcggctcgagatccagaaccctgatcctgccgtgtaccagctgcgggatagcaagagcagcgacaagagcgtgtgtctgttcaccgacttcgacagccagaccaacgtgtcccagagcaaggactccgacgtgtacatcaccgataagtgcgtgctggacatgcggagcatggacttcaagagcaactccgccgtggcctggtccaacaagtccgatttcgcctgcgccaacgccttcaacaacagcattatccccgaggacacattcttcccaagccccgagagcagcgactccaccgaccacgtgaagcccaaagagacagagaacaccaagcagcccagcaagagctgccacaagcccaaggccatcgtgcacaccgagaaagtgaacatgatgagcctgaccgtgctgggcctgcggatgctgttcgccaaaaccgtggccgtgaacttcctgctgaccgccaagctgttcttcctcctcaccgcccgcgccaagagaagcggatctggcgtgaagcagaccctgaatttcgacctgctgaagctggctggcgacgtggaatccaacccaggccctactagtatggactggatttggcgcatccttttccttgtcggcgctgctaccggcgcgcattccgggccccagctccagctgcaagagtctggacctggcctggtcaagcctagcgagacactgagcctgacctgtaccgtgtccggcgatagcatcagcagcggcgattactactggggctggatcagacagcctcctggcaaaggactggaatggatcggccacatctactacagcggcgtgacctactacaaccccagcctgaagtccagagtgaccatcagcgtggacaccagccggaaccagttctccctgaagctgtctagcgtgacagccgccgataccgccgtgtactactgcaccagagaggacagcagcaactggcggagtagaggccagggaacactggtcacagttagctctggatccggcggaggcggaagtggaggcggaggatctggcggcggaggctctttcgaagaagtgcaactggtggaaagcggaggcggcgtggtgcagcctggaagaagcctgagactgagctgtgccgccagcggcttcaccttccggtcctacggaatgcactgggtgcgccaggcccctggcaaaggactggaatgggtggccgtgatctcctacgacggctccaacaagtactacaccgacagcgtgaacggcagattcaccatcagcagagacaacagcaagaacaccctgtacctccagatgaacagcctgcgggccgaggacaccgccgtgtactattgtgctagaggcggaggctactacgagacaagcggccctgattactggggccagggcacactcgtgaccgtgtctagtacgcgtgaggacctgaagaacgtgttcccacctgaggtggccgtgttcgagcctagcgaggccgagatcagccacacccagaaagccaccctcgtgtgcctggctaccggcttctaccccgaccatgtggaactgtcttggtgggtcaacggcaaagaggtgcacagcggcgtgtgtaccgacccccagccactgaaagaacagcccgccctgaacgacagccggtactgcctgagcagcagactgagagtgtccgccaccttctggcagaacccccggaaccacttcagatgccaggtgcagttctacggcctgagcgagaacgacgagtggacccaggacagagccaagcccgtgacccagatcgtgtctgccgaagcctggggcagagccgatgatgtgattaagatccactggcaggaaaagaagtccaacaccatcctgggcagccaggaaggcaacaccatgaagaccaacgacacctacatgaagttcagctggctgaccgtgcccgagaagtccctggacaaagaacacagatgcatcgtgcggcacgaaaacaacaagaacggcgtggaccaggaaatcatcttcccacccatcaagaccgatgtgattacaatggaccccaaggacaactgctccaaggacgccaacgataccctgctgctccagctgaccaacaccagcgcctactacatgtacttgttgctgctgctgaagtccgtggtgtacttcgccatcatcacatgctgcctgctgatggctatggtcaagcggaaggacagccgggga

SEQ ID NO: 6922 - DNA, 3018 bp, synthetic construct
  source 1..3018: mol_type = other DNA
atggccttaccagtgaccgccttgctcctgccgctggccttgctgctccacgccgccaggccggaagtgcagctggttgaatctggcggaggactggttcagcctggcggatctctgagactgtcttgtgccgccagcggcttcagcttcagcgacttttggatgagctgggtccgacaggcccctggcaaaggacttgaatgggtcgccacaatcagccaggccggcagcgagaaggactacgtggactctgtgaagggcagattcaccatcagccgggacaacgccaagaagtccctgtacctccagatgaacagcctgagagccgaggacaccgccgtgtactattgtgcctctggcgtgtacagcttcgactacagaggccagggcaccctggtcacagtctcttctggtaccggcggaggcggatctggcggcggaggtagcggtggcggaggatctgaattcgacgacgtcgtgatgacccagagccctctgagcctgcctgtgacacctggcgagcctgccagcatctcctgtagaagcagccagagcctgctgcacagcatcggctacaactacctgcactggtttctccagaagcccggccagagcccccaactgctgatctacctgggcagcaacagagccagcggcgtgcccgatagattttccggcagcggctccggcaccgacttcaccctgaagatcagccgggtggaagccgaggacgtgggcgtgtactactgtatgcaggccctccagacccctcccacctttggacagggcaccagactggaaatcaagcggctcgagatccagaaccctgatcctgccgtgtaccagctgcgggatagcaagagcagcgacaagagcgtgtgtctgttcaccgacttcgacagccagaccaacgtgtcccagagcaaggactccgacgtgtacatcaccgataagtgcgtgctggacatgcggagcatggacttcaagagcaactccgccgtggcctggtccaacaagtccgatttcgcctgcgccaacgccttcaacaacagcattatccccgaggacacattcttcccaagccccgagagcagcgactccaccgaccacgtgaagcccaaagagacagagaacaccaagcagcccagcaagagctgccacaagcccaaggccatcgtgcacaccgagaaagtgaacatgatgagcctgaccgtgctgggcctgcggatgctgttcgccaaaaccgtggccgtgaacttcctgctgaccgccaagctgttcttcctcctcaccgcccgcgccaagagaagcggatctggcgtgaagcagaccctgaatttcgacctgctgaagctggctggcgacgtggaatccaacccaggccctactagtatggactggatttggcgcatccttttccttgtcggcgctgctaccggcgcgcattccgggccccagctccagctgcaagagtctggacctggcctggtcaagcctagcgagacactgagcctgacctgtaccgtgtccggcgatagcatcagcagcggcgattactactggggctggatcagacagcctcctggcaaaggactggaatggatcggccacatctactacagcggcgtgacctactacaaccccagcctgaagtccagagtgaccatcagcgtggacaccagccggaaccagttctccctgaagctgtctagcgtgacagccgccgataccgccgtgtactactgcaccagagaggacagcagcaactggcggagtagaggccagggaacactggtcacagttagctctggatccggcggaggcggaagtggaggcggaggatctggcggcggaggctctttcgaacaactccaactccaggaaagcggccctggcctcgtgaagcctagcggcacactgagcctgacatgtgccgtgtctggcggcagcatcagcagcagcaactggtggtcttgggtgcgccagcctcctggcaagggcctggaatggatcggcgaaatctaccacagcggcagcaccaactacaaccccagcctgaagtccagagtgaccatcagcgtggacaagagcaagaaccagttctccctgaagctgagcagcgtgacagccgccgataccgccgtgtactattgcgtgggcagcccctacggcgactacgtgctggattattggggccagggcaccctcgtgaccgtgtctagtacgcgtgaggacctgaagaacgtgttcccacctgaggtggccgtgttcgagcctagcgaggccgagatcagccacacccagaaagccaccctcgtgtgcctggctaccggcttctaccccgaccatgtggaactgtcttggtgggtcaacggcaaagaggtgcacagcggcgtgtgtaccgacccccagccactgaaagaacagcccgccctgaacgacagccggtactgcctgagcagcagactgagagtgtccgccaccttctggcagaacccccggaaccacttcagatgccaggtgcagttctacggcctgagcgagaacgacgagtggacccaggacagagccaagcccgtgacccagatcgtgtctgccgaagcctggggcagagccgatgatgtgattaagatccactggcaggaaaagaagtccaacaccatcctgggcagccaggaaggcaacaccatgaagaccaacgacacctacatgaagttcagctggctgaccgtgcccgagaagtccctggacaaagaacacagatgcatcgtgcggcacgaaaacaacaagaacggcgtggaccaggaaatcatcttcccacccatcaagaccgatgtgattacaatggaccccaaggacaactgctccaaggacgccaacgataccctgctgctccagctgaccaacaccagcgcctactacatgtacttgttgctgctgctgaagtccgtggtgtacttcgccatcatcacatgctgcctgctgatggctatggtcaagcggaaggacagccgggga

SEQ ID NO: 6923 - DNA, 3012 bp, synthetic construct
  source 1..3012: mol_type = other DNA
atggccttaccagtgaccgccttgctcctgccgctggccttgctgctccacgccgccaggccggaagtgcagctggttgaatctggcggaggactggttcagcctggcggatctctgagactgtcttgtgccgccagcggcttcagcttcagcgacttttggatgagctgggtccgacaggcccctggcaaaggacttgaatgggtcgccacaatcagccaggccggcagcgagaaggactacgtggactctgtgaagggcagattcaccatcagccgggacaacgccaagaagtccctgtacctccagatgaacagcctgagagccgaggacaccgccgtgtactattgtgcctctggcgtgtacagcttcgactacagaggccagggcaccctggtcacagtctcttctggtaccggcggaggcggatctggcggcggaggtagcggtggcggaggatctgaattcgacgagatcgtgctgacacagagccctggcaccctgagcctgtctctgggagagagagccacactgagctgtcgggccagccagtctatcagcagcagcttcctggcctggtatcagcagaagcccggccaggcccctaagctgctgatctacgccgccagcacaagagccaccggcatccccgatagattcagcggctctggcagcggcaccgacttcaccctgaccatcagcagactggaacccgaggacttcgccgtgtactactgccagcagtacggcagaagcctgagcttcggcggaggcaccaaggtggaagtgaagctcgagatccagaaccctgatcctgccgtgtaccagctgcgggatagcaagagcagcgacaagagcgtgtgtctgttcaccgacttcgacagccagaccaacgtgtcccagagcaaggactccgacgtgtacatcaccgataagtgcgtgctggacatgcggagcatggacttcaagagcaactccgccgtggcctggtccaacaagtccgatttcgcctgcgccaacgccttcaacaacagcattatccccgaggacacattcttcccaagccccgagagcagcgactccaccgaccacgtgaagcccaaagagacagagaacaccaagcagcccagcaagagctgccacaagcccaaggccatcgtgcacaccgagaaagtgaacatgatgagcctgaccgtgctgggcctgcggatgctgttcgccaaaaccgtggccgtgaacttcctgctgaccgccaagctgttcttcctcctcaccgcccgcgccaagagaagcggatctggcgtgaagcagaccctgaatttcgacctgctgaagctggctggcgacgtggaatccaacccaggccctactagtatggactggatttggcgcatccttttccttgtcggcgctgctaccggcgcgcattccgggccccagctccagctgcaagagtctggacctggcctggtcaagcctagcgagacactgagcctgacctgtaccgtgtccggcgatagcatcagcagcggcgattactactggggctggatcagacagcctcctggcaaaggactggaatggatcggccacatctactacagcggcgtgacctactacaaccccagcctgaagtccagagtgaccatcagcgtggacaccagccggaaccagttctccctgaagctgtctagcgtgacagccgccgataccgccgtgtactactgcaccagagaggacagcagcaactggcggagtagaggccagggaacactggtcacagttagctctggatccggcggaggcggaagtggaggcggaggatctggcggcggaggctctttcgaacaggtgcaactccagcagtctggccccggactcgtgaagcctagccagacactgagcctgacctgcgccatcagcggcgatagcgtgtccggcaatagcgccacctggaactggatcagacagagcccatctcggggcctggaatggctgggccggacctactaccgcagcaagtggaaccacgactacgccgagagcgtgaagtcccggatcaccatcaaccccgacaccagcaagaaccagttctccttgcaactgaacagcgtgacccccgaggacacagccgtgtattattgcgccagaggcgacagcagctcttggtacgccttcgactattggggccagggcaccctcgtgaccgtgtctagtacgcgtgaggacctgaagaacgtgttcccacctgaggtggccgtgttcgagcctagcgaggccgagatcagccacacccagaaagccaccctcgtgtgcctggctaccggcttctaccccgaccatgtggaactgtcttggtgggtcaacggcaaagaggtgcacagcggcgtgtgtaccgacccccagccactgaaagaacagcccgccctgaacgacagccggtactgcctgagcagcagactgagagtgtccgccaccttctggcagaacccccggaaccacttcagatgccaggtgcagttctacggcctgagcgagaacgacgagtggacccaggacagagccaagcccgtgacccagatcgtgtctgccgaagcctggggcagagccgatgatgtgattaagatccactggcaggaaaagaagtccaacaccatcctgggcagccaggaaggcaacaccatgaagaccaacgacacctacatgaagttcagctggctgaccgtgcccgagaagtccctggacaaagaacacagatgcatcgtgcggcacgaaaacaacaagaacggcgtggaccaggaaatcatcttcccacccatcaagaccgatgtgattacaatggaccccaaggacaactgctccaaggacgccaacgataccctgctgctccagctgaccaacaccagcgcctactacatgtacttgttgctgctgctgaagtccgtggtgtacttcgccatcatcacatgctgcctgctgatggctatggtcaagcggaaggacagccgggga

SEQ ID NO: 6924 - DNA, 3009 bp, synthetic construct
  source 1..3009: mol_type = other DNA
atggccttaccagtgaccgccttgctcctgccgctggccttgctgctccacgccgccaggccggaagtgcagctggttgaatctggcggaggactggttcagcctggcggatctctgagactgtcttgtgccgccagcggcttcagcttcagcgacttttggatgagctgggtccgacaggcccctggcaaaggacttgaatgggtcgccacaatcagccaggccggcagcgagaaggactacgtggactctgtgaagggcagattcaccatcagccgggacaacgccaagaagtccctgtacctccagatgaacagcctgagagccgaggacaccgccgtgtactattgtgcctctggcgtgtacagcttcgactacagaggccagggcaccctggtcacagtctcttctggtaccggcggaggcggatctggcggcggaggtagcggtggcggaggatctgaattcgaccagagcgtcgtgacacagcctcctagcgtgtcagtggcccctggcaagaccgccagaatcacctgtggccggaacaacatcggcagcaagagcgtgcactggtatcagcagaagcccggccaggctcctgtgctggtggtgtacgacgacagcgacagacccagcggcatccccgagagattcagcggcagcaactccggcaataccgccaccctgaccatcagcagagtggaagccggcgacgaggccgactactactgccaagtgtgggacagcagcagcgatcacgtggtgtttggcggaggcaccaagctgacagtgctgggtctcgagatccagaaccctgatcctgccgtgtaccagctgcgggatagcaagagcagcgacaagagcgtgtgtctgttcaccgacttcgacagccagaccaacgtgtcccagagcaaggactccgacgtgtacatcaccgataagtgcgtgctggacatgcggagcatggacttcaagagcaactccgccgtggcctggtccaacaagtccgatttcgcctgcgccaacgccttcaacaacagcattatccccgaggacacattcttcccaagccccgagagcagcgactccaccgaccacgtgaagcccaaagagacagagaacaccaagcagcccagcaagagctgccacaagcccaaggccatcgtgcacaccgagaaagtgaacatgatgagcctgaccgtgctgggcctgcggatgctgttcgccaaaaccgtggccgtgaacttcctgctgaccgccaagctgttcttcctcctcaccgcccgcgccaagagaagcggatctggcgtgaagcagaccctgaatttcgacctgctgaagctggctggcgacgtggaatccaacccaggccctactagtatggactggatttggcgcatccttttccttgtcggcgctgctaccggcgcgcattccgggccccagctccagctgcaagagtctggacctggcctggtcaagcctagcgagacactgagcctgacctgtaccgtgtccggcgatagcatcagcagcggcgattactactggggctggatcagacagcctcctggcaaaggactggaatggatcggccacatctactacagcggcgtgacctactacaaccccagcctgaagtccagagtgaccatcagcgtggacaccagccggaaccagttctccctgaagctgtctagcgtgacagccgccgataccgccgtgtactactgcaccagagaggacagcagcaactggcggagtagaggccagggaacactggtcacagttagctctggatccggcggaggcggaagtggaggcggaggatctggcggcggaggctctttcgaagtgcaactggtgcagtctggcggaggggtcatgcggcctggcggatctctgagactgtcttgtgccgccagcggcttcaccttcgacgactacggcatgagctgggtgcgccaggcccctggaaaaggcctggaatgggtgtccggcatcaactggaatggcggcagcaccggctacgccgattctgtgcggggcagattcaccatcagccgggacaacgccaagaacagcctgtacctgcagatgaactccctgcgggccgaggacaccgccctgtactattgcgccagagagcggggctacggctaccacgaccctcacgattattggggccagggcacccttgttaccgtgtcctctacgcgtgaggacctgaagaacgtgttcccacctgaggtggccgtgttcgagcctagcgaggccgagatcagccacacccagaaagccaccctcgtgtgcctggctaccggcttctaccccgaccatgtggaactgtcttggtgggtcaacggcaaagaggtgcacagcggcgtgtgtaccgacccccagccactgaaagaacagcccgccctgaacgacagccggtactgcctgagcagcagactgagagtgtccgccaccttctggcagaacccccggaaccacttcagatgccaggtgcagttctacggcctgagcgagaacgacgagtggacccaggacagagccaagcccgtgacccagatcgtgtctgccgaagcctggggcagagccgatgatgtgattaagatccactggcaggaaaagaagtccaacaccatcctgggcagccaggaaggcaacaccatgaagaccaacgacacctacatgaagttcagctggctgaccgtgcccgagaagtccctggacaaagaacacagatgcatcgtgcggcacgaaaacaacaagaacggcgtggaccaggaaatcatcttcccacccatcaagaccgatgtgattacaatggaccccaaggacaactgctccaaggacgccaacgataccctgctgctccagctgaccaacaccagcgcctactacatgtacttgttgctgctgctgaagtccgtggtgtacttcgccatcatcacatgctgcctgctgatggctatggtcaagcggaaggacagccgggga

SEQ ID NO: 6925 - DNA, 3048 bp, synthetic construct
  source 1..3048: mol_type = other DNA
atggccttaccagtgaccgccttgctcctgccgctggccttgctgctccacgccgccaggccggaagtgcagctggttgaatctggcggaggactggttcagcctggcggatctctgagactgtcttgtgccgccagcggcttcagcttcagcgacttttggatgagctgggtccgacaggcccctggcaaaggacttgaatgggtcgccacaatcagccaggccggcagcgagaaggactacgtggactctgtgaagggcagattcaccatcagccgggacaacgccaagaagtccctgtacctccagatgaacagcctgagagccgaggacaccgccgtgtactattgtgcctctggcgtgtacagcttcgactacagaggccagggcaccctggtcacagtctcttctggtaccggcggaggcggatctggcggcggaggtagcggtggcggaggatctgaattcgaacagaaactcatcagtgaagaagacctggaattccaggctgtcgtgacacagcctcctagcgcctctggcacaccaggccagagagtgaccatctcctgtagcggcagcagcagcaacatcggcagcaacaccgtgaactggtatcagcaggtgcccggcaccgctcccaagctgctgatctacagcaacaaccagcggcccagcggcgtgcccgatagattttctggcagcaagagcggcaccagcgccagcctggctatctctggactccagtccgaggacgaggccgactactattgcgccgcctgggacgatagcctgaacggctgggtgttcggcggaggcaccaagctgacagtgctgctcgagatccagaaccctgatcctgccgtgtaccagctgcgggatagcaagagcagcgacaagagcgtgtgtctgttcaccgacttcgacagccagaccaacgtgtcccagagcaaggactccgacgtgtacatcaccgataagtgcgtgctggacatgcggagcatggacttcaagagcaactccgccgtggcctggtccaacaagtccgatttcgcctgcgccaacgccttcaacaacagcattatccccgaggacacattcttcccaagccccgagagcagcgactccaccgaccacgtgaagcccaaagagacagagaacaccaagcagcccagcaagagctgccacaagcccaaggccatcgtgcacaccgagaaagtgaacatgatgagcctgaccgtgctgggcctgcggatgctgttcgccaaaaccgtggccgtgaacttcctgctgaccgccaagctgttcttcctcctcaccgcccgcgccaagagaagcggatctggcgtgaagcagaccctgaatttcgacctgctgaagctggctggcgacgtggaatccaacccaggccctactagtatggactggatttggcgcatccttttccttgtcggcgctgctaccggcgcgcattccgggccccagctccagctgcaagagtctggacctggcctggtcaagcctagcgagacactgagcctgacctgtaccgtgtccggcgatagcatcagcagcggcgattactactggggctggatcagacagcctcctggcaaaggactggaatggatcggccacatctactacagcggcgtgacctactacaaccccagcctgaagtccagagtgaccatcagcgtggacaccagccggaaccagttctccctgaagctgtctagcgtgacagccgccgataccgccgtgtactactgcaccagagaggacagcagcaactggcggagtagaggccagggaacactggtcacagttagctctggatccggcggaggcggaagtggaggcggaggatctggcggcggaggctctttcgaacagatgcaactggtgcagagcggagccgaagtgaaagagcctggcgagagcctgcggatctcctgcaagggcagcggctacagcttcaccaatttctggatctcttgggtgcgccagatgcccggcaagggcctggaatggatgggcagagtggaccccggctactcctacagcacctacagccctagcttccagggccacgtgaccatcagcgccgacaagagcaccagcaccgcctacctccagtggaacagcctgaaggccagcgacaccgccatgtactactgcgccagagtgcagtacagcggctattacgattggttcgacccctggggccagggcacactcgtgacagtgtcaagcacgcgtgaggacctgaagaacgtgttcccacctgaggtggccgtgttcgagcctagcgaggccgagatcagccacacccagaaagccaccctcgtgtgcctggctaccggcttctaccccgaccatgtggaactgtcttggtgggtcaacggcaaagaggtgcacagcggcgtgtgtaccgacccccagccactgaaagaacagcccgccctgaacgacagccggtactgcctgagcagcagactgagagtgtccgccaccttctggcagaacccccggaaccacttcagatgccaggtgcagttctacggcctgagcgagaacgacgagtggacccaggacagagccaagcccgtgacccagatcgtgtctgccgaagcctggggcagagccgatgatgtgattaagatccactggcaggaaaagaagtccaacaccatcctgggcagccaggaaggcaacaccatgaagaccaacgacacctacatgaagttcagctggctgaccgtgcccgagaagtccctggacaaagaacacagatgcatcgtgcggcacgaaaacaacaagaacggcgtggaccaggaaatcatcttcccacccatcaagaccgatgtgattacaatggaccccaaggacaactgctccaaggacgccaacgataccctgctgctccagctgaccaacaccagcgcctactacatgtacttgttgctgctgctgaagtccgtggtgtacttcgccatcatcacatgctgcctgctgatggctatggtcaagcggaaggacagccgggga

SEQ ID NO: 6926 - DNA, 3030 bp, synthetic construct
  source 1..3030: mol_type = other DNA
atggccttaccagtgaccgccttgctcctgccgctggccttgctgctccacgccgccaggccggaagtgcagctggttgaatctggcggaggactggttcagcctggcggatctctgagactgtcttgtgccgccagcggcttcagcttcagcgacttttggatgagctgggtccgacaggcccctggcaaaggacttgaatgggtcgccacaatcagccaggccggcagcgagaaggactacgtggactctgtgaagggcagattcaccatcagccgggacaacgccaagaagtccctgtacctccagatgaacagcctgagagccgaggacaccgccgtgtactattgtgcctctggcgtgtacagcttcgactacagaggccagggcaccctggtcacagtctcttctggtaccggcggaggcggatctggcggcggaggtagcggtggcggaggatctgaattcgaacagaaactcatcagtgaagaagacctggaattcgacatccagatgacccagagccccagcacactgagcgccagcgtgggcgacagagtgaccatcacctgtcgggccagccagaacatcaacaagtggctggcctggtatcagcagaggcccggaaaagccccccagctgctgatctacaaggccagcagcctggaaagcggcgtgcccagcagattttctggcagcggctctggcaccgagtacaccctgaccatcagctccctccagcccgacgacttcgccacctactactgccagcagtacaacagctacgccaccttcggccagggcaccaaggtggaaatcaagagactcgagatccagaaccctgatcctgccgtgtaccagctgcgggatagcaagagcagcgacaagagcgtgtgtctgttcaccgacttcgacagccagaccaacgtgtcccagagcaaggactccgacgtgtacatcaccgataagtgcgtgctggacatgcggagcatggacttcaagagcaactccgccgtggcctggtccaacaagtccgatttcgcctgcgccaacgccttcaacaacagcattatccccgaggacacattcttcccaagccccgagagcagcgactccaccgaccacgtgaagcccaaagagacagagaacaccaagcagcccagcaagagctgccacaagcccaaggccatcgtgcacaccgagaaagtgaacatgatgagcctgaccgtgctgggcctgcggatgctgttcgccaaaaccgtggccgtgaacttcctgctgaccgccaagctgttcttcctcctcaccgcccgcgccaagagaagcggatctggcgtgaagcagaccctgaatttcgacctgctgaagctggctggcgacgtggaatccaacccaggccctactagtatggactggatttggcgcatccttttccttgtcggcgctgctaccggcgcgcattccgggccccagctccagctgcaagagtctggacctggcctggtcaagcctagcgagacactgagcctgacctgtaccgtgtccggcgatagcatcagcagcggcgattactactggggctggatcagacagcctcctggcaaaggactggaatggatcggccacatctactacagcggcgtgacctactacaaccccagcctgaagtccagagtgaccatcagcgtggacaccagccggaaccagttctccctgaagctgtctagcgtgacagccgccgataccgccgtgtactactgcaccagagaggacagcagcaactggcggagtagaggccagggaacactggtcacagttagctctggatccggcggaggcggaagtggaggcggaggatctggcggcggaggctctttcgaacaggtgcagctggtgcagtctggggccgaagtgaagaagcctggcgagagcctgaagatcagctgcaagggctccggctacaacttctctaacaagtggatcggctgggtgcgccagctgcctggcagaggactggaatggatcgccatcatctaccccggctacagcgacatcacctacagccccagcttccagggccgcgtgacaatcagcgccgacaccagcatcaacaccgcctacctgcactggcacagcctgaaggccagcgacaccgccatgtactactgcgtgcggcatacagccctggctggcttcgattattggggcctgggcaccctcgtgaccgtgtctagtacgcgtgaggacctgaagaacgtgttcccacctgaggtggccgtgttcgagcctagcgaggccgagatcagccacacccagaaagccaccctcgtgtgcctggctaccggcttctaccccgaccatgtggaactgtcttggtgggtcaacggcaaagaggtgcacagcggcgtgtgtaccgacccccagccactgaaagaacagcccgccctgaacgacagccggtactgcctgagcagcagactgagagtgtccgccaccttctggcagaacccccggaaccacttcagatgccaggtgcagttctacggcctgagcgagaacgacgagtggacccaggacagagccaagcccgtgacccagatcgtgtctgccgaagcctggggcagagccgatgatgtgattaagatccactggcaggaaaagaagtccaacaccatcctgggcagccaggaaggcaacaccatgaagaccaacgacacctacatgaagttcagctggctgaccgtgcccgagaagtccctggacaaagaacacagatgcatcgtgcggcacgaaaacaacaagaacggcgtggaccaggaaatcatcttcccacccatcaagaccgatgtgattacaatggaccccaaggacaactgctccaaggacgccaacgataccctgctgctccagctgaccaacaccagcgcctactacatgtacttgttgctgctgctgaagtccgtggtgtacttcgccatcatcacatgctgcctgctgatggctatggtcaagcggaaggacagccgggga

SEQ ID NO: 6927 - DNA, 3006 bp, synthetic construct
  source 1..3006: mol_type = other DNA
atggccttaccagtgaccgccttgctcctgccgctggccttgctgctccacgccgccaggccggaagtgcagctggttgaatctggcggaggactggttcagcctggcggatctctgagactgtcttgtgccgccagcggcttcagcttcagcgacttttggatgagctgggtccgacaggcccctggcaaaggacttgaatgggtcgccacaatcagccaggccggcagcgagaaggactacgtggactctgtgaagggcagattcaccatcagccgggacaacgccaagaagtccctgtacctccagatgaacagcctgagagccgaggacaccgccgtgtactattgtgcctctggcgtgtacagcttcgactacagaggccagggcaccctggtcacagtctcttctggtaccggcggaggcggatctggcggcggaggtagcggtggcggaggatctgaattcgacatcgtgctgacacagagccctgcttctctggccgtgtctctgggacagagagccaccatcagctgtagagccagcgagagcgtggacaactacggcaacaccttcatgcactggtatcagcagaagcccggccagcctcctaagctgctgatctacagagccagcaacctggaaagcggcatccccgccagattttctggcagcggcagcagaaccgacttcaccctgaccatcaatcccgtggaagccgacgacgtggcaacctactactgccagcagagcaacgaggaccctcctacatttggagccggcaccaagctggaactgaaactcgagatccagaaccctgatcctgccgtgtaccagctgcgggatagcaagagcagcgacaagagcgtgtgtctgttcaccgacttcgacagccagaccaacgtgtcccagagcaaggactccgacgtgtacatcaccgataagtgcgtgctggacatgcggagcatggacttcaagagcaactccgccgtggcctggtccaacaagtccgatttcgcctgcgccaacgccttcaacaacagcattatccccgaggacacattcttcccaagccccgagagcagcgactccaccgaccacgtgaagcccaaagagacagagaacaccaagcagcccagcaagagctgccacaagcccaaggccatcgtgcacaccgagaaagtgaacatgatgagcctgaccgtgctgggcctgcggatgctgttcgccaaaaccgtggccgtgaacttcctgctgaccgccaagctgttcttcctcctcaccgcccgcgccaagagaagcggatctggcgtgaagcagaccctgaatttcgacctgctgaagctggctggcgacgtggaatccaacccaggccctactagtatggactggatttggcgcatccttttccttgtcggcgctgctaccggcgcgcattccgggccccagctccagctgcaagagtctggacctggcctggtcaagcctagcgagacactgagcctgacctgtaccgtgtccggcgatagcatcagcagcggcgattactactggggctggatcagacagcctcctggcaaaggactggaatggatcggccacatctactacagcggcgtgacctactacaaccccagcctgaagtccagagtgaccatcagcgtggacaccagccggaaccagttctccctgaagctgtctagcgtgacagccgccgataccgccgtgtactactgcaccagagaggacagcagcaactggcggagtagaggccagggaacactggtcacagttagctctggatccggcggaggcggaagtggaggcggaggatctggcggcggaggctctttcgaacagattcagctggtgcagtctggccccgagctgaagaaacctggcgagacagtgaagatcagctgcaaggccagcggctacatcttcaccaattacggcatgaactgggtcaagcaggcccctggcaagagcttcaagtggatgggctggatcaacacctacaccggcgagagcacatacagcgccgacttcaagggcagattcgccttcagcctggaaaccagcgccagcacagcctacctgcacatcaacgacctgaagaacgaggacaccgccacctacttttgcgccagaagcggcggctacgaccctatggattattggggccagggcaccagcgtgaccgtttcttctacgcgtgaggacctgaagaacgtgttcccacctgaggtggccgtgttcgagcctagcgaggccgagatcagccacacccagaaagccaccctcgtgtgcctggctaccggcttctaccccgaccatgtggaactgtcttggtgggtcaacggcaaagaggtgcacagcggcgtgtgtaccgacccccagccactgaaagaacagcccgccctgaacgacagccggtactgcctgagcagcagactgagagtgtccgccaccttctggcagaacccccggaaccacttcagatgccaggtgcagttctacggcctgagcgagaacgacgagtggacccaggacagagccaagcccgtgacccagatcgtgtctgccgaagcctggggcagagccgatgatgtgattaagatccactggcaggaaaagaagtccaacaccatcctgggcagccaggaaggcaacaccatgaagaccaacgacacctacatgaagttcagctggctgaccgtgcccgagaagtccctggacaaagaacacagatgcatcgtgcggcacgaaaacaacaagaacggcgtggaccaggaaatcatcttcccacccatcaagaccgatgtgattacaatggaccccaaggacaactgctccaaggacgccaacgataccctgctgctccagctgaccaacaccagcgcctactacatgtacttgttgctgctgctgaagtccgtggtgtacttcgccatcatcacatgctgcctgctgatggctatggtcaagcggaaggacagccgggga

SEQ ID NO: 6928 - DNA, 3003 bp, synthetic construct
  source 1..3003: mol_type = other DNA
atggccttaccagtgaccgccttgctcctgccgctggccttgctgctccacgccgccaggccggaagtgcagctggttgaatctggcggaggactggttcagcctggcggatctctgagactgtcttgtgccgccagcggcttcagcttcagcgacttttggatgagctgggtccgacaggcccctggcaaaggacttgaatgggtcgccacaatcagccaggccggcagcgagaaggactacgtggactctgtgaagggcagattcaccatcagccgggacaacgccaagaagtccctgtacctccagatgaacagcctgagagccgaggacaccgccgtgtactattgtgcctctggcgtgtacagcttcgactacagaggccagggcaccctggtcacagtctcttctggtaccggcggaggcggatctggcggcggaggtagcggtggcggaggatctgaattcgacgagatcgtgctgacacagagccctggcaccctgagcctgtctccaggcgaaagagccacactgagctgtcgggccagccagagcgtgtccaatacctacctggcctggtatcaccagaggcccggacaggctccccggctgctgatctatggcgcttctagcagagccaccggcatccccgatagattcagcggctctggcagcggcaccgacttcgccctgacaatcagctccctggaacccgaggacttcgccgtgtactactgccagcagtacagcaactcctggaccttcggccagggcaccaaggtggaaatcaagagactcgagatccagaaccctgatcctgccgtgtaccagctgcgggatagcaagagcagcgacaagagcgtgtgtctgttcaccgacttcgacagccagaccaacgtgtcccagagcaaggactccgacgtgtacatcaccgataagtgcgtgctggacatgcggagcatggacttcaagagcaactccgccgtggcctggtccaacaagtccgatttcgcctgcgccaacgccttcaacaacagcattatccccgaggacacattcttcccaagccccgagagcagcgactccaccgaccacgtgaagcccaaagagacagagaacaccaagcagcccagcaagagctgccacaagcccaaggccatcgtgcacaccgagaaagtgaacatgatgagcctgaccgtgctgggcctgcggatgctgttcgccaaaaccgtggccgtgaacttcctgctgaccgccaagctgttcttcctcctcaccgcccgcgccaagagaagcggatctggcgtgaagcagaccctgaatttcgacctgctgaagctggctggcgacgtggaatccaacccaggccctactagtatggactggatttggcgcatccttttccttgtcggcgctgctaccggcgcgcattccgggccccagctccagctgcaagagtctggacctggcctggtcaagcctagcgagacactgagcctgacctgtaccgtgtccggcgatagcatcagcagcggcgattactactggggctggatcagacagcctcctggcaaaggactggaatggatcggccacatctactacagcggcgtgacctactacaaccccagcctgaagtccagagtgaccatcagcgtggacaccagccggaaccagttctccctgaagctgtctagcgtgacagccgccgataccgccgtgtactactgcaccagagaggacagcagcaactggcggagtagaggccagggaacactggtcacagttagctctggatccggcggaggcggaagtggaggcggaggatctggcggcggaggctctttcgaacaggtgcaactggtggaatctggcgggggagtggtgcagcctggcagaagcctgagactgtcttgtgccgccagcggcttcaccttcagcagctacgacatgcactgggtgcgccaggcccctggcaaaggactggaatgggtggccgtgatctcctacgacggcaccaacgagtattacgccgacagcgtgaagggccggttcaccatctccagagacaccagcaagaacaccctgtacctccagatgaacagcctgcgggccgaggacacagccgtgtattattgcgccagagagcggtacttcgactggtccttcgactactggggccagggaaccctggtgtccgtgtctagtacgcgtgaggacctgaagaacgtgttcccacctgaggtggccgtgttcgagcctagcgaggccgagatcagccacacccagaaagccaccctcgtgtgcctggctaccggcttctaccccgaccatgtggaactgtcttggtgggtcaacggcaaagaggtgcacagcggcgtgtgtaccgacccccagccactgaaagaacagcccgccctgaacgacagccggtactgcctgagcagcagactgagagtgtccgccaccttctggcagaacccccggaaccacttcagatgccaggtgcagttctacggcctgagcgagaacgacgagtggacccaggacagagccaagcccgtgacccagatcgtgtctgccgaagcctggggcagagccgatgatgtgattaagatccactggcaggaaaagaagtccaacaccatcctgggcagccaggaaggcaacaccatgaagaccaacgacacctacatgaagttcagctggctgaccgtgcccgagaagtccctggacaaagaacacagatgcatcgtgcggcacgaaaacaacaagaacggcgtggaccaggaaatcatcttcccacccatcaagaccgatgtgattacaatggaccccaaggacaactgctccaaggacgccaacgataccctgctgctccagctgaccaacaccagcgcctactacatgtacttgttgctgctgctgaagtccgtggtgtacttcgccatcatcacatgctgcctgctgatggctatggtcaagcggaaggacagccgggga

SEQ ID NO: 6929 - DNA, 3000 bp, synthetic construct
  source 1..3000: mol_type = other DNA
atggccttaccagtgaccgccttgctcctgccgctggccttgctgctccacgccgccaggccggaagtgcagctggttgaatctggcggaggactggttcagcctggcggatctctgagactgtcttgtgccgccagcggcttcagcttcagcgacttttggatgagctgggtccgacaggcccctggcaaaggacttgaatgggtcgccacaatcagccaggccggcagcgagaaggactacgtggactctgtgaagggcagattcaccatcagccgggacaacgccaagaagtccctgtacctccagatgaacagcctgagagccgaggacaccgccgtgtactattgtgcctctggcgtgtacagcttcgactacagaggccagggcaccctggtcacagtctcttctggtaccggcggaggcggatctggcggcggaggtagcggtggcggaggatctgaattcgacgagctgacacaggaccctgctgtgtctgttgccctgggccagacagtgcggattacctgtcaaggcgacagcctgagaagcaactacgccaactggtatcagcagaagcccggacaggctcccgtgctggttatctacggccagaacaacagacccagcggcatccccgatagattcagcggctctagctctggcaataccgccagcctgacaatcactggcgctcaggctgccgatgaggccgactactactgcgatagcagagtgtccaccggcaatcacgtggtgtttggcggcggaacaaagctgacagtgctcggacaactcgagatccagaaccctgatcctgccgtgtaccagctgcgggatagcaagagcagcgacaagagcgtgtgtctgttcaccgacttcgacagccagaccaacgtgtcccagagcaaggactccgacgtgtacatcaccgataagtgcgtgctggacatgcggagcatggacttcaagagcaactccgccgtggcctggtccaacaagtccgatttcgcctgcgccaacgccttcaacaacagcattatccccgaggacacattcttcccaagccccgagagcagcgactccaccgaccacgtgaagcccaaagagacagagaacaccaagcagcccagcaagagctgccacaagcccaaggccatcgtgcacaccgagaaagtgaacatgatgagcctgaccgtgctgggcctgcggatgctgttcgccaaaaccgtggccgtgaacttcctgctgaccgccaagctgttcttcctcctcaccgcccgcgccaagagaagcggatctggcgtgaagcagaccctgaatttcgacctgctgaagctggctggcgacgtggaatccaacccaggccctactagtatggactggatttggcgcatccttttccttgtcggcgctgctaccggcgcgcattccgggccccagctccagctgcaagagtctggacctggcctggtcaagcctagcgagacactgagcctgacctgtaccgtgtccggcgatagcatcagcagcggcgattactactggggctggatcagacagcctcctggcaaaggactggaatggatcggccacatctactacagcggcgtgacctactacaaccccagcctgaagtccagagtgaccatcagcgtggacaccagccggaaccagttctccctgaagctgtctagcgtgacagccgccgataccgccgtgtactactgcaccagagaggacagcagcaactggcggagtagaggccagggaacactggtcacagttagctctggatccggcggaggcggaagtggaggcggaggatctggcggcggaggctctttcgaagaagttcagctggtgcagagcggagccgaagtgaagaaacctggggcctctgtgaaggtgtcctgcaaggcttccggctacacctttaccagctacgccatgcactgggtccgacaggcacctggacaacggcttgaatggatgggctggatcaacgccggcaacggcaacaccaagtacagccagaaattccagggccgcgtgaccatcaccagagatacaagcgccagcaccgcctacatggaactgtctagcctgagatccgaggacaccgccgtgtactactgtgccagagacatcagctacggcagcttcgactattggggccagggcacactggtcaccgttagctctacgcgtgaggacctgaagaacgtgttcccacctgaggtggccgtgttcgagcctagcgaggccgagatcagccacacccagaaagccaccctcgtgtgcctggctaccggcttctaccccgaccatgtggaactgtcttggtgggtcaacggcaaagaggtgcacagcggcgtgtgtaccgacccccagccactgaaagaacagcccgccctgaacgacagccggtactgcctgagcagcagactgagagtgtccgccaccttctggcagaacccccggaaccacttcagatgccaggtgcagttctacggcctgagcgagaacgacgagtggacccaggacagagccaagcccgtgacccagatcgtgtctgccgaagcctggggcagagccgatgatgtgattaagatccactggcaggaaaagaagtccaacaccatcctgggcagccaggaaggcaacaccatgaagaccaacgacacctacatgaagttcagctggctgaccgtgcccgagaagtccctggacaaagaacacagatgcatcgtgcggcacgaaaacaacaagaacggcgtggaccaggaaatcatcttcccacccatcaagaccgatgtgattacaatggaccccaaggacaactgctccaaggacgccaacgataccctgctgctccagctgaccaacaccagcgcctactacatgtacttgttgctgctgctgaagtccgtggtgtacttcgccatcatcacatgctgcctgctgatggctatggtcaagcggaaggacagccgggga

SEQ ID NO: 6930 - DNA, 3006 bp, synthetic construct
  source 1..3006: mol_type = other DNA
atggccttaccagtgaccgccttgctcctgccgctggccttgctgctccacgccgccaggccggaagtgcagctggttgaatctggcggaggactggttcagcctggcggatctctgagactgtcttgtgccgccagcggcttcagcttcagcgacttttggatgagctgggtccgacaggcccctggcaaaggacttgaatgggtcgccacaatcagccaggccggcagcgagaaggactacgtggactctgtgaagggcagattcaccatcagccgggacaacgccaagaagtccctgtacctccagatgaacagcctgagagccgaggacaccgccgtgtactattgtgcctctggcgtgtacagcttcgactacagaggccagggcaccctggtcacagtctcttctggtaccggcggaggcggatctggcggcggaggtagcggtggcggaggatctgaattcgacgacatcgtgctgacacagacaccagccacactgagcgtgacacctggcgattctgtgtccctgagctgtagagccagccagagcatcagcaacaacctgcactggtatcagcagaagtcccacgagagccccagactgctgattaagaacgccagccagtctatcagcggcatccccagcaagtttagcggctctggcagcggcaccgacttcaccctgagaatcaacagcgtggaaaccgaggacttcgggatgtacttctgccagcagagcaatagctggccctacacatttggctccggcaccaagctggaaatcaaactcgagatccagaaccctgatcctgccgtgtaccagctgcgggatagcaagagcagcgacaagagcgtgtgtctgttcaccgacttcgacagccagaccaacgtgtcccagagcaaggactccgacgtgtacatcaccgataagtgcgtgctggacatgcggagcatggacttcaagagcaactccgccgtggcctggtccaacaagtccgatttcgcctgcgccaacgccttcaacaacagcattatccccgaggacacattcttcccaagccccgagagcagcgactccaccgaccacgtgaagcccaaagagacagagaacaccaagcagcccagcaagagctgccacaagcccaaggccatcgtgcacaccgagaaagtgaacatgatgagcctgaccgtgctgggcctgcggatgctgttcgccaaaaccgtggccgtgaacttcctgctgaccgccaagctgttcttcctcctcaccgcccgcgccaagagaagcggatctggcgtgaagcagaccctgaatttcgacctgctgaagctggctggcgacgtggaatccaacccaggccctactagtatggactggatttggcgcatccttttccttgtcggcgctgctaccggcgcgcattccgggccccagctccagctgcaagagtctggacctggcctggtcaagcctagcgagacactgagcctgacctgtaccgtgtccggcgatagcatcagcagcggcgattactactggggctggatcagacagcctcctggcaaaggactggaatggatcggccacatctactacagcggcgtgacctactacaaccccagcctgaagtccagagtgaccatcagcgtggacaccagccggaaccagttctccctgaagctgtctagcgtgacagccgccgataccgccgtgtactactgcaccagagaggacagcagcaactggcggagtagaggccagggaacactggtcacagttagctctggatccggcggaggcggaagtggaggcggaggatctggcggcggaggctctttcgaacaagtgaagctgcaacagagcggacccgagctggttaagccaggcgcttccgtgaagattagctgcaaggccagcggctacagcttcaccggctactacatgcactgggtcaagcagagccacggcaacatcctggactggatcggctacatctacccctacaacggcgtgtccagctacaaccagaagttcaagggcaaagccactctgaccgtggacaagagcagcagcaccgcctacatggaactgagaagcctgaccagcgaggacagcgccgtgtactattgtgccagagagcggggcctgtaccagctcagagcaatggattattggggccagggcaccagcgtgaccgtttcttctacgcgtgaggacctgaagaacgtgttcccacctgaggtggccgtgttcgagcctagcgaggccgagatcagccacacccagaaagccaccctcgtgtgcctggctaccggcttctaccccgaccatgtggaactgtcttggtgggtcaacggcaaagaggtgcacagcggcgtgtgtaccgacccccagccactgaaagaacagcccgccctgaacgacagccggtactgcctgagcagcagactgagagtgtccgccaccttctggcagaacccccggaaccacttcagatgccaggtgcagttctacggcctgagcgagaacgacgagtggacccaggacagagccaagcccgtgacccagatcgtgtctgccgaagcctggggcagagccgatgatgtgattaagatccactggcaggaaaagaagtccaacaccatcctgggcagccaggaaggcaacaccatgaagaccaacgacacctacatgaagttcagctggctgaccgtgcccgagaagtccctggacaaagaacacagatgcatcgtgcggcacgaaaacaacaagaacggcgtggaccaggaaatcatcttcccacccatcaagaccgatgtgattacaatggaccccaaggacaactgctccaaggacgccaacgataccctgctgctccagctgaccaacaccagcgcctactacatgtacttgttgctgctgctgaagtccgtggtgtacttcgccatcatcacatgctgcctgctgatggctatggtcaagcggaaggacagccgggga

SEQ ID NO: 6931 - DNA, 2979 bp, synthetic construct
  source 1..2979: mol_type = other DNA
atggccttaccagtgaccgccttgctcctgccgctggccttgctgctccacgccgccaggccggaagtgcagctggttgaatctggcggaggactggttcagcctggcggatctctgagactgtcttgtgccgccagcggcttcagcttcagcgacttttggatgagctgggtccgacaggcccctggcaaaggacttgaatgggtcgccacaatcagccaggccggcagcgagaaggactacgtggactctgtgaagggcagattcaccatcagccgggacaacgccaagaagtccctgtacctccagatgaacagcctgagagccgaggacaccgccgtgtactattgtgcctctggcgtgtacagcttcgactacagaggccagggcaccctggtcacagtctcttctggtaccggcggaggcggatctggcggcggaggtagcggtggcggaggatctgaattcgacgacatcgtgatgacacagacccctgccatcatgagcgcctctccaggccagaaagtgaccatcacatgtagcgccagcagcagcgtgaactacatgcactggtatcagcagaagctgggcagcagccccaagctgtggatctacgataccagcaaactggcccctggcgtgccagccagattttctggttctggcagcggcaccagctacagcctgacaatcagcagcatggaagccgaggatgccgccagctacttctgccatcagtggtctagctacccctacacctttggctccggcaccaagctggaaatcaaactcgagatccagaaccctgatcctgccgtgtaccagctgcgggatagcaagagcagcgacaagagcgtgtgtctgttcaccgacttcgacagccagaccaacgtgtcccagagcaaggactccgacgtgtacatcaccgataagtgcgtgctggacatgcggagcatggacttcaagagcaactccgccgtggcctggtccaacaagtccgatttcgcctgcgccaacgccttcaacaacagcattatccccgaggacacattcttcccaagccccgagagcagcgactccaccgaccacgtgaagcccaaagagacagagaacaccaagcagcccagcaagagctgccacaagcccaaggccatcgtgcacaccgagaaagtgaacatgatgagcctgaccgtgctgggcctgcggatgctgttcgccaaaaccgtggccgtgaacttcctgctgaccgccaagctgttcttcctcctcaccgcccgcgccaagagaagcggatctggcgtgaagcagaccctgaatttcgacctgctgaagctggctggcgacgtggaatccaacccaggccctactagtatggactggatttggcgcatccttttccttgtcggcgctgctaccggcgcgcattccgggccccagctccagctgcaagagtctggacctggcctggtcaagcctagcgagacactgagcctgacctgtaccgtgtccggcgatagcatcagcagcggcgattactactggggctggatcagacagcctcctggcaaaggactggaatggatcggccacatctactacagcggcgtgacctactacaaccccagcctgaagtccagagtgaccatcagcgtggacaccagccggaaccagttctccctgaagctgtctagcgtgacagccgccgataccgccgtgtactactgcaccagagaggacagcagcaactggcggagtagaggccagggaacactggtcacagttagctctggatccggcggaggcggaagtggaggcggaggatctggcggcggaggctctttcgaagaagttcagctccaagagtctggccccgacctggtcaagcctagccaaagcctgagcctgacctgtaccgtgaccggctacagcatcacaagcggctatggatggcactggatcagacagttccccggcaacaaactggaatggatgggctacatccactacagcggcagcaccacctacaatcccagcctgaagtcccggatcagcatcagcagagacaccagcaagaaccagttcttcctgcaactgaacagcgtgaccaccgaggacaccgccacctactattgtgctcggagcctgagatattggggccagggcacaaccctgaccgtgtcatctacgcgtgaggacctgaagaacgtgttcccacctgaggtggccgtgttcgagcctagcgaggccgagatcagccacacccagaaagccaccctcgtgtgcctggctaccggcttctaccccgaccatgtggaactgtcttggtgggtcaacggcaaagaggtgcacagcggcgtgtgtaccgacccccagccactgaaagaacagcccgccctgaacgacagccggtactgcctgagcagcagactgagagtgtccgccaccttctggcagaacccccggaaccacttcagatgccaggtgcagttctacggcctgagcgagaacgacgagtggacccaggacagagccaagcccgtgacccagatcgtgtctgccgaagcctggggcagagccgatgatgtgattaagatccactggcaggaaaagaagtccaacaccatcctgggcagccaggaaggcaacaccatgaagaccaacgacacctacatgaagttcagctggctgaccgtgcccgagaagtccctggacaaagaacacagatgcatcgtgcggcacgaaaacaacaagaacggcgtggaccaggaaatcatcttcccacccatcaagaccgatgtgattacaatggaccccaaggacaactgctccaaggacgccaacgataccctgctgctccagctgaccaacaccagcgcctactacatgtacttgttgctgctgctgaagtccgtggtgtacttcgccatcatcacatgctgcctgctgatggctatggtcaagcggaaggacagccgggga

SEQ ID NO: 6932 - DNA, 2988 bp, synthetic construct
  source 1..2988: mol_type = other DNA
atggccttaccagtgaccgccttgctcctgccgctggccttgctgctccacgccgccaggccggaagtgcagctggttgaatctggcggaggactggttcagcctggcggatctctgagactgtcttgtgccgccagcggcttcagcttcagcgacttttggatgagctgggtccgacaggcccctggcaaaggacttgaatgggtcgccacaatcagccaggccggcagcgagaaggactacgtggactctgtgaagggcagattcaccatcagccgggacaacgccaagaagtccctgtacctccagatgaacagcctgagagccgaggacaccgccgtgtactattgtgcctctggcgtgtacagcttcgactacagaggccagggcaccctggtcacagtctcttctggtaccggcggaggcggatctggcggcggaggtagcggtggcggaggatctgaattcgacgacatccagatgacacagagccctagcagcctgtctgccagcgtgggagacagagtgaccatcacctgtagcgccaccagcagcatcagctacatgcactggtatcagcagaagcccggcaaggcccctaaaggctggatctacgataccagcaaactggcccacggcgtgcccagcagattttctggttctggcagcggcaccgacttcaccctgacaatatctagcctccagcctgaggacttcgccacctactactgccaccagagaagaagctaccccttcaccttcggccagggcaccaaggtggaaatcaaactcgagatccagaaccctgatcctgccgtgtaccagctgcgggatagcaagagcagcgacaagagcgtgtgtctgttcaccgacttcgacagccagaccaacgtgtcccagagcaaggactccgacgtgtacatcaccgataagtgcgtgctggacatgcggagcatggacttcaagagcaactccgccgtggcctggtccaacaagtccgatttcgcctgcgccaacgccttcaacaacagcattatccccgaggacacattcttcccaagccccgagagcagcgactccaccgaccacgtgaagcccaaagagacagagaacaccaagcagcccagcaagagctgccacaagcccaaggccatcgtgcacaccgagaaagtgaacatgatgagcctgaccgtgctgggcctgcggatgctgttcgccaaaaccgtggccgtgaacttcctgctgaccgccaagctgttcttcctcctcaccgcccgcgccaagagaagcggatctggcgtgaagcagaccctgaatttcgacctgctgaagctggctggcgacgtggaatccaacccaggccctactagtatggactggatttggcgcatccttttccttgtcggcgctgctaccggcgcgcattccgggccccagctccagctgcaagagtctggacctggcctggtcaagcctagcgagacactgagcctgacctgtaccgtgtccggcgatagcatcagcagcggcgattactactggggctggatcagacagcctcctggcaaaggactggaatggatcggccacatctactacagcggcgtgacctactacaaccccagcctgaagtccagagtgaccatcagcgtggacaccagccggaaccagttctccctgaagctgtctagcgtgacagccgccgataccgccgtgtactactgcaccagagaggacagcagcaactggcggagtagaggccagggaacactggtcacagttagctctggatccggcggaggcggaagtggaggcggaggatctggcggcggaggctctttcgaagaagtgcaactggttcagagcggagccgaagtgaagaaacctggggcctctgtgaaggtgtcctgcaaggcttccggctacacctttaccaatttctggattcactgggtccgacaggctccaggccaaggactggaatggatcggagagatcgaccccagcgacagctacaccaactacaaccagaaattcaaaggccgggtcaccatcaccagagacaccagcacaagcaccgcctacctggaactgagcagcctgagaagcgaggacaccgccgtgtactactgcgccagggaaatcaccaccgtggattattggggccagggaaccctggtcaccgtgtcatctacgcgtgaggacctgaagaacgtgttcccacctgaggtggccgtgttcgagcctagcgaggccgagatcagccacacccagaaagccaccctcgtgtgcctggctaccggcttctaccccgaccatgtggaactgtcttggtgggtcaacggcaaagaggtgcacagcggcgtgtgtaccgacccccagccactgaaagaacagcccgccctgaacgacagccggtactgcctgagcagcagactgagagtgtccgccaccttctggcagaacccccggaaccacttcagatgccaggtgcagttctacggcctgagcgagaacgacgagtggacccaggacagagccaagcccgtgacccagatcgtgtctgccgaagcctggggcagagccgatgatgtgattaagatccactggcaggaaaagaagtccaacaccatcctgggcagccaggaaggcaacaccatgaagaccaacgacacctacatgaagttcagctggctgaccgtgcccgagaagtccctggacaaagaacacagatgcatcgtgcggcacgaaaacaacaagaacggcgtggaccaggaaatcatcttcccacccatcaagaccgatgtgattacaatggaccccaaggacaactgctccaaggacgccaacgataccctgctgctccagctgaccaacaccagcgcctactacatgtacttgttgctgctgctgaagtccgtggtgtacttcgccatcatcacatgctgcctgctgatggctatggtcaagcggaaggacagccgggga

SEQ ID NO: 6933 - DNA, 3009 bp, synthetic construct
  source 1..3009: mol_type = other DNA
atggccttaccagtgaccgccttgctcctgccgctggccttgctgctccacgccgccaggccggaagtgcagctggttgaatctggcggaggactggttcagcctggcggatctctgagactgtcttgtgccgccagcggcttcagcttcagcgacttttggatgagctgggtccgacaggcccctggcaaaggacttgaatgggtcgccacaatcagccaggccggcagcgagaaggactacgtggactctgtgaagggcagattcaccatcagccgggacaacgccaagaagtccctgtacctccagatgaacagcctgagagccgaggacaccgccgtgtactattgtgcctctggcgtgtacagcttcgactacagaggccagggcaccctggtcacagtctcttctggtaccggcggaggcggatctggcggcggaggtagcggtggcggaggatctgaattcgacgacatccagatgacacagagccctagcagcctgtctgccagcgtgggagacagagtgaccatcacatgcaaggccagccagggcttcaacaaatacgtggcctggtatcagcagaagcccggcaaggctcctaagctgctgatctactacaccagcacactccagcctggcgtgcccagcagattttctggctctggcagcggcagagactacaccctgacaatatccagcctccagccagaggacttcgccacctactactgtctccagtacggcaacctgctgtacgcctttggacagggcaccaaggtggaaatcaagagactcgagatccagaaccctgatcctgccgtgtaccagctgcgggatagcaagagcagcgacaagagcgtgtgtctgttcaccgacttcgacagccagaccaacgtgtcccagagcaaggactccgacgtgtacatcaccgataagtgcgtgctggacatgcggagcatggacttcaagagcaactccgccgtggcctggtccaacaagtccgatttcgcctgcgccaacgccttcaacaacagcattatccccgaggacacattcttcccaagccccgagagcagcgactccaccgaccacgtgaagcccaaagagacagagaacaccaagcagcccagcaagagctgccacaagcccaaggccatcgtgcacaccgagaaagtgaacatgatgagcctgaccgtgctgggcctgcggatgctgttcgccaaaaccgtggccgtgaacttcctgctgaccgccaagctgttcttcctcctcaccgcccgcgccaagagaagcggatctggcgtgaagcagaccctgaatttcgacctgctgaagctggctggcgacgtggaatccaacccaggccctactagtatggactggatttggcgcatccttttccttgtcggcgctgctaccggcgcgcattccgggccccagctccagctgcaagagtctggacctggcctggtcaagcctagcgagacactgagcctgacctgtaccgtgtccggcgatagcatcagcagcggcgattactactggggctggatcagacagcctcctggcaaaggactggaatggatcggccacatctactacagcggcgtgacctactacaaccccagcctgaagtccagagtgaccatcagcgtggacaccagccggaaccagttctccctgaagctgtctagcgtgacagccgccgataccgccgtgtactactgcaccagagaggacagcagcaactggcggagtagaggccagggaacactggtcacagttagctctggatccggcggaggcggaagtggaggcggaggatctggcggcggaggctctttcgaagaagttcagcttgtgcagagcggagccgaagtgaagaaacctggggcctctgtgaaggtgtcctgcaaagccagcggctacacctttaccagctactggatcggctgggtccgacaggctcctggacaaggactggaatggatcggcgacatctatcccggcggaggctacaccaactacaacgagaagttcaagggccgcgtgacaatcaccagagacacctctacaagcaccgcctacctggaactgagcagcctgagaagcgaggacaccgccgtgtactactgcgccagactggatggcagcagctacagaggcgctatggattcttggggccagggcacactggtcaccgtttcttctacgcgtgaggacctgaagaacgtgttcccacctgaggtggccgtgttcgagcctagcgaggccgagatcagccacacccagaaagccaccctcgtgtgcctggctaccggcttctaccccgaccatgtggaactgtcttggtgggtcaacggcaaagaggtgcacagcggcgtgtgtaccgacccccagccactgaaagaacagcccgccctgaacgacagccggtactgcctgagcagcagactgagagtgtccgccaccttctggcagaacccccggaaccacttcagatgccaggtgcagttctacggcctgagcgagaacgacgagtggacccaggacagagccaagcccgtgacccagatcgtgtctgccgaagcctggggcagagccgatgatgtgattaagatccactggcaggaaaagaagtccaacaccatcctgggcagccaggaaggcaacaccatgaagaccaacgacacctacatgaagttcagctggctgaccgtgcccgagaagtccctggacaaagaacacagatgcatcgtgcggcacgaaaacaacaagaacggcgtggaccaggaaatcatcttcccacccatcaagaccgatgtgattacaatggaccccaaggacaactgctccaaggacgccaacgataccctgctgctccagctgaccaacaccagcgcctactacatgtacttgttgctgctgctgaagtccgtggtgtacttcgccatcatcacatgctgcctgctgatggctatggtcaagcggaaggacagccgggga

SEQ ID NO: 6934 - DNA, 2997 bp, synthetic construct
  source 1..2997: mol_type = other DNA
atggccttaccagtgaccgccttgctcctgccgctggccttgctgctccacgccgccaggccggaagtgcagctggttgaatctggcggaggactggttcagcctggcggatctctgagactgtcttgtgccgccagcggcttcagcttcagcgacttttggatgagctgggtccgacaggcccctggcaaaggacttgaatgggtcgccacaatcagccaggccggcagcgagaaggactacgtggactctgtgaagggcagattcaccatcagccgggacaacgccaagaagtccctgtacctccagatgaacagcctgagagccgaggacaccgccgtgtactattgtgcctctggcgtgtacagcttcgactacagaggccagggcaccctggtcacagtctcttctggtaccggcggaggcggatctggcggcggaggtagcggtggcggaggatctgaattcgacgacatccagatgacacagagccctagcagcctgtctgccagcgtgggagacagagtgaccatcacctgtagagccagccaggacatccggtactacctgaactggtatcagcagaagcccggcaaggcccctaagctgctgatctatgtggcctccagcctccagagcggagtgccttctagattttctggcagcggctccggcaccgagtttaccctgacagtgtctagcttgcagcccgaggacttcgccacctactactgcctgcaagtgtacagcacccctcggacctttggacagggcaccaaggtggaaatcaaactcgagatccagaaccctgatcctgccgtgtaccagctgcgggatagcaagagcagcgacaagagcgtgtgtctgttcaccgacttcgacagccagaccaacgtgtcccagagcaaggactccgacgtgtacatcaccgataagtgcgtgctggacatgcggagcatggacttcaagagcaactccgccgtggcctggtccaacaagtccgatttcgcctgcgccaacgccttcaacaacagcattatccccgaggacacattcttcccaagccccgagagcagcgactccaccgaccacgtgaagcccaaagagacagagaacaccaagcagcccagcaagagctgccacaagcccaaggccatcgtgcacaccgagaaagtgaacatgatgagcctgaccgtgctgggcctgcggatgctgttcgccaaaaccgtggccgtgaacttcctgctgaccgccaagctgttcttcctcctcaccgcccgcgccaagagaagcggatctggcgtgaagcagaccctgaatttcgacctgctgaagctggctggcgacgtggaatccaacccaggccctactagtatggactggatttggcgcatccttttccttgtcggcgctgctaccggcgcgcattccgggccccagctccagctgcaagagtctggacctggcctggtcaagcctagcgagacactgagcctgacctgtaccgtgtccggcgatagcatcagcagcggcgattactactggggctggatcagacagcctcctggcaaaggactggaatggatcggccacatctactacagcggcgtgacctactacaaccccagcctgaagtccagagtgaccatcagcgtggacaccagccggaaccagttctccctgaagctgtctagcgtgacagccgccgataccgccgtgtactactgcaccagagaggacagcagcaactggcggagtagaggccagggaacactggtcacagttagctctggatccggcggaggcggaagtggaggcggaggatctggcggcggaggctctttcgaagaagtgcagcttgttgaatctggcggcggactggctaagcctggcggatctctgagactgtcttgtgccgccagcggcttccggttcaccttcaacaactactacatggactgggtccgacaggcccctggacaaggacttgaatgggtgtccagaatcagcagcagcggcgaccctacttggtacgccgattctgtgaagggcagattcaccatcagcagagagaacgccaagaacaccctgttcctccagatgaactccctgagagccgaggacaccgccgtgtactattgtgcctctctgaccaccggcagcgattcttggggacagggcgtgctggttaccgtgtcatctacgcgtgaggacctgaagaacgtgttcccacctgaggtggccgtgttcgagcctagcgaggccgagatcagccacacccagaaagccaccctcgtgtgcctggctaccggcttctaccccgaccatgtggaactgtcttggtgggtcaacggcaaagaggtgcacagcggcgtgtgtaccgacccccagccactgaaagaacagcccgccctgaacgacagccggtactgcctgagcagcagactgagagtgtccgccaccttctggcagaacccccggaaccacttcagatgccaggtgcagttctacggcctgagcgagaacgacgagtggacccaggacagagccaagcccgtgacccagatcgtgtctgccgaagcctggggcagagccgatgatgtgattaagatccactggcaggaaaagaagtccaacaccatcctgggcagccaggaaggcaacaccatgaagaccaacgacacctacatgaagttcagctggctgaccgtgcccgagaagtccctggacaaagaacacagatgcatcgtgcggcacgaaaacaacaagaacggcgtggaccaggaaatcatcttcccacccatcaagaccgatgtgattacaatggaccccaaggacaactgctccaaggacgccaacgataccctgctgctccagctgaccaacaccagcgcctactacatgtacttgttgctgctgctgaagtccgtggtgtacttcgccatcatcacatgctgcctgctgatggctatggtcaagcggaaggacagccgggga

SEQ ID NO: 6935 - DNA, 2997 bp, synthetic construct
  source 1..2997: mol_type = other DNA
atggccttaccagtgaccgccttgctcctgccgctggccttgctgctccacgccgccaggccggaagtgcagctggttgaatctggcggaggactggttcagcctggcggatctctgagactgtcttgtgccgccagcggcttcagcttcagcgacttttggatgagctgggtccgacaggcccctggcaaaggacttgaatgggtcgccacaatcagccaggccggcagcgagaaggactacgtggactctgtgaagggcagattcaccatcagccgggacaacgccaagaagtccctgtacctccagatgaacagcctgagagccgaggacaccgccgtgtactattgtgcctctggcgtgtacagcttcgactacagaggccagggcaccctggtcacagtctcttctggtaccggcggaggcggatctggcggcggaggtagcggtggcggaggatctgaattcgagatcgtgatgacacagagccccgccacactgagtgtgtctccaggcgaaagagccacactgtcctgtagagccagccagagcgtgtccagaaacctggcctggtatcagcagaagcctggacaggctccccggctgttgatctacggcgcttctacaagagccaccggcattcccgccagattttctggctctggcagcggcaccgagttcaccctgacaatcggaagcctccagagcgaggacttcgccgtgtactactgccagcagtacaagacctggcctcggacctttggacagggcaccaacgtggaaatcaaactcgagatccagaaccctgatcctgccgtgtaccagctgcgggatagcaagagcagcgacaagagcgtgtgtctgttcaccgacttcgacagccagaccaacgtgtcccagagcaaggactccgacgtgtacatcaccgataagtgcgtgctggacatgcggagcatggacttcaagagcaactccgccgtggcctggtccaacaagtccgatttcgcctgcgccaacgccttcaacaacagcattatccccgaggacacattcttcccaagccccgagagcagcgactccaccgaccacgtgaagcccaaagagacagagaacaccaagcagcccagcaagagctgccacaagcccaaggccatcgtgcacaccgagaaagtgaacatgatgagcctgaccgtgctgggcctgcggatgctgttcgccaaaaccgtggccgtgaacttcctgctgaccgccaagctgttcttcctcctcaccgcccgcgccaagagaagcggatctggcgtgaagcagaccctgaatttcgacctgctgaagctggctggcgacgtggaatccaacccaggccctactagtatggactggatttggcgcatccttttccttgtcggcgctgctaccggcgcgcattccgggccccagctccagctgcaagagtctggacctggcctggtcaagcctagcgagacactgagcctgacctgtaccgtgtccggcgatagcatcagcagcggcgattactactggggctggatcagacagcctcctggcaaaggactggaatggatcggccacatctactacagcggcgtgacctactacaaccccagcctgaagtccagagtgaccatcagcgtggacaccagccggaaccagttctccctgaagctgtctagcgtgacagccgccgataccgccgtgtactactgcaccagagaggacagcagcaactggcggagtagaggccagggaacactggtcacagttagctctggatccggcggaggcggaagtggaggcggaggatctggcggcggaggctctttcgaacaagttcagctgcaacaatggggagccggcctgctgaagcctagcgaaacactgtctctgacctgcgccgtgttcggcggctctttcagcggctactactggtcctggatcagacagcctcctggcaaaggactggaatggatcggcgagatcaaccaccggggcaacaccaacgacaaccccagcctgaaaagcagagtgaccatcagcgtggacaccagcaagaaccagttcgccctgaagctgagcagcgtgacagccgctgataccgccgtgtattattgcgccagagagcggggctacacctacggcaatttcgatcactggggccagggcaccctggtcacagtttcttctacgcgtgaggacctgaagaacgtgttcccacctgaggtggccgtgttcgagcctagcgaggccgagatcagccacacccagaaagccaccctcgtgtgcctggctaccggcttctaccccgaccatgtggaactgtcttggtgggtcaacggcaaagaggtgcacagcggcgtgtgtaccgacccccagccactgaaagaacagcccgccctgaacgacagccggtactgcctgagcagcagactgagagtgtccgccaccttctggcagaacccccggaaccacttcagatgccaggtgcagttctacggcctgagcgagaacgacgagtggacccaggacagagccaagcccgtgacccagatcgtgtctgccgaagcctggggcagagccgatgatgtgattaagatccactggcaggaaaagaagtccaacaccatcctgggcagccaggaaggcaacaccatgaagaccaacgacacctacatgaagttcagctggctgaccgtgcccgagaagtccctggacaaagaacacagatgcatcgtgcggcacgaaaacaacaagaacggcgtggaccaggaaatcatcttcccacccatcaagaccgatgtgattacaatggaccccaaggacaactgctccaaggacgccaacgataccctgctgctccagctgaccaacaccagcgcctactacatgtacttgttgctgctgctgaagtccgtggtgtacttcgccatcatcacatgctgcctgctgatggctatggtcaagcggaaggacagccgggga

SEQ ID NO: 6936 - DNA, 3000 bp, synthetic construct
  source 1..3000: mol_type = other DNA
atggccttaccagtgaccgccttgctcctgccgctggccttgctgctccacgccgccaggccggaagtgcagctggttgaatctggcggaggactggttcagcctggcggatctctgagactgtcttgtgccgccagcggcttcagcttcagcgacttttggatgagctgggtccgacaggcccctggcaaaggacttgaatgggtcgccacaatcagccaggccggcagcgagaaggactacgtggactctgtgaagggcagattcaccatcagccgggacaacgccaagaagtccctgtacctccagatgaacagcctgagagccgaggacaccgccgtgtactattgtgcctctggcgtgtacagcttcgactacagaggccagggcaccctggtcacagtctcttctggtaccggcggaggcggatctggcggcggaggtagcggtggcggaggatctgaattcgagatcgtgatgacccctagcagcgccacactgagtgtgtctccaggcgaaagagccacactgtcctgtagagccagccagagcgtgtccagaaacctggcctggtatcagcagaagcctggacaggctccccggctgttgatctacggcgcttctacaagagccaccggcattcccgccagattttctggctctggcagcggcaccgagttcaccctgacaatctctagcctccagagcgaggacttcgccgtgtactactgccaccagtacagcaactggatgtgcagcttcggccagggcaccaagctggaaatcaaactcgagatccagaaccctgatcctgccgtgtaccagctgcgggatagcaagagcagcgacaagagcgtgtgtctgttcaccgacttcgacagccagaccaacgtgtcccagagcaaggactccgacgtgtacatcaccgataagtgcgtgctggacatgcggagcatggacttcaagagcaactccgccgtggcctggtccaacaagtccgatttcgcctgcgccaacgccttcaacaacagcattatccccgaggacacattcttcccaagccccgagagcagcgactccaccgaccacgtgaagcccaaagagacagagaacaccaagcagcccagcaagagctgccacaagcccaaggccatcgtgcacaccgagaaagtgaacatgatgagcctgaccgtgctgggcctgcggatgctgttcgccaaaaccgtggccgtgaacttcctgctgaccgccaagctgttcttcctcctcaccgcccgcgccaagagaagcggatctggcgtgaagcagaccctgaatttcgacctgctgaagctggctggcgacgtggaatccaacccaggccctactagtatggactggatttggcgcatccttttccttgtcggcgctgctaccggcgcgcattccgggccccagctccagctgcaagagtctggacctggcctggtcaagcctagcgagacactgagcctgacctgtaccgtgtccggcgatagcatcagcagcggcgattactactggggctggatcagacagcctcctggcaaaggactggaatggatcggccacatctactacagcggcgtgacctactacaaccccagcctgaagtccagagtgaccatcagcgtggacaccagccggaaccagttctccctgaagctgtctagcgtgacagccgccgataccgccgtgtactactgcaccagagaggacagcagcaactggcggagtagaggccagggaacactggtcacagttagctctggatccggcggaggcggaagtggaggcggaggatctggcggcggaggctctttcgaagaagttcagctccttgagtcaggtggcggcctggttcaacctggcggatctctgagactgagctgtgccgccagcggcttcacctttagcagatacgccatgaactgggtccgacaggcccctggcaaaggactggaatgggtgtccggcatctctggaagcggcggcagaacctactacgccgattctgtgaagggcagattcaccatcagccgggacaacagcaagaacaccctgtacctccagatgaacagcctgagagccgaggacacagccgtgtattattgcgccaaggaccgggacttttggagcggcccttttgactattggggccagggaaccctggtcaccgttagctctacgcgtgaggacctgaagaacgtgttcccacctgaggtggccgtgttcgagcctagcgaggccgagatcagccacacccagaaagccaccctcgtgtgcctggctaccggcttctaccccgaccatgtggaactgtcttggtgggtcaacggcaaagaggtgcacagcggcgtgtgtaccgacccccagccactgaaagaacagcccgccctgaacgacagccggtactgcctgagcagcagactgagagtgtccgccaccttctggcagaacccccggaaccacttcagatgccaggtgcagttctacggcctgagcgagaacgacgagtggacccaggacagagccaagcccgtgacccagatcgtgtctgccgaagcctggggcagagccgatgatgtgattaagatccactggcaggaaaagaagtccaacaccatcctgggcagccaggaaggcaacaccatgaagaccaacgacacctacatgaagttcagctggctgaccgtgcccgagaagtccctggacaaagaacacagatgcatcgtgcggcacgaaaacaacaagaacggcgtggaccaggaaatcatcttcccacccatcaagaccgatgtgattacaatggaccccaaggacaactgctccaaggacgccaacgataccctgctgctccagctgaccaacaccagcgcctactacatgtacttgttgctgctgctgaagtccgtggtgtacttcgccatcatcacatgctgcctgctgatggctatggtcaagcggaaggacagccgggga

SEQ ID NO: 6937 - DNA, 3015 bp, synthetic construct
  source 1..3015: mol_type = other DNA
atggccttaccagtgaccgccttgctcctgccgctggccttgctgctccacgccgccaggccggaagtgcagctggttgaatctggcggaggactggttcagcctggcggatctctgagactgtcttgtgccgccagcggcttcagcttcagcgacttttggatgagctgggtccgacaggcccctggcaaaggacttgaatgggtcgccacaatcagccaggccggcagcgagaaggactacgtggactctgtgaagggcagattcaccatcagccgggacaacgccaagaagtccctgtacctccagatgaacagcctgagagccgaggacaccgccgtgtactattgtgcctctggcgtgtacagcttcgactacagaggccagggcaccctggtcacagtctcttctggtaccggcggaggcggatctggcggcggaggtagcggtggcggaggatctgaattcgacatccagatgacccagagccccagcagcctgtctgccagcgtgggcgacagagtgaccatcacatgcaaggccagcaagaacatcagaagctacctggcctggtatcagcagaagcccggcaaggcccccaagctgctgatctacagcggcagcacactgcacagcggcgtgcccagcagattttccggctctggcagcggcaccgacttcaccctgaccatctctagcctccagcccgaggacttcgccacctactactgccagcagcaccacgagtaccccctgacattcggccagggcaccaaggtggaaatcaagagactcgagatccagaaccctgatcctgccgtgtaccagctgcgggatagcaagagcagcgacaagagcgtgtgtctgttcaccgacttcgacagccagaccaacgtgtcccagagcaaggactccgacgtgtacatcaccgataagtgcgtgctggacatgcggagcatggacttcaagagcaactccgccgtggcctggtccaacaagtccgatttcgcctgcgccaacgccttcaacaacagcattatccccgaggacacattcttcccaagccccgagagcagcgactccaccgaccacgtgaagcccaaagagacagagaacaccaagcagcccagcaagagctgccacaagcccaaggccatcgtgcacaccgagaaagtgaacatgatgagcctgaccgtgctgggcctgcggatgctgttcgccaaaaccgtggccgtgaacttcctgctgaccgccaagctgttcttcctcctcaccgcccgcgccaagagaagcggatctggcgtgaagcagaccctgaatttcgacctgctgaagctggctggcgacgtggaatccaacccaggccctactagtatggactggatttggcgcatccttttccttgtcggcgctgctaccggcgcgcattccgggccccagctccagctgcaagagtctggacctggcctggtcaagcctagcgagacactgagcctgacctgtaccgtgtccggcgatagcatcagcagcggcgattactactggggctggatcagacagcctcctggcaaaggactggaatggatcggccacatctactacagcggcgtgacctactacaaccccagcctgaagtccagagtgaccatcagcgtggacaccagccggaaccagttctccctgaagctgtctagcgtgacagccgccgataccgccgtgtactactgcaccagagaggacagcagcaactggcggagtagaggccagggaacactggtcacagttagctctggatccggcggaggcggaagtggaggcggaggatctggcggcggaggctctttcgaacaggtgcaactccaggaatctggccccggactcgtgaagcccagcgagacactgagcctgacctgtaccgtgtccggctacaccatcaccagcggctacgactggtcctggatcagacagcctcctggcaagggcctggaatggatcggctacatcaactacggcggctccaccaactacaagcccagcctgggaagccgcgtgacaatcagcgtggacacctccaagaaccagttcagcctgaagctgagcagcgtgacagccgccgataccgccgtgtactactgcgcccggtacaacgagtacaagagctacatctacgattggtacttcgacttctggggccagggaaccctcgtgaccgtgtctagtacgcgtgaggacctgaagaacgtgttcccacctgaggtggccgtgttcgagcctagcgaggccgagatcagccacacccagaaagccaccctcgtgtgcctggctaccggcttctaccccgaccatgtggaactgtcttggtgggtcaacggcaaagaggtgcacagcggcgtgtgtaccgacccccagccactgaaagaacagcccgccctgaacgacagccggtactgcctgagcagcagactgagagtgtccgccaccttctggcagaacccccggaaccacttcagatgccaggtgcagttctacggcctgagcgagaacgacgagtggacccaggacagagccaagcccgtgacccagatcgtgtctgccgaagcctggggcagagccgatgatgtgattaagatccactggcaggaaaagaagtccaacaccatcctgggcagccaggaaggcaacaccatgaagaccaacgacacctacatgaagttcagctggctgaccgtgcccgagaagtccctggacaaagaacacagatgcatcgtgcggcacgaaaacaacaagaacggcgtggaccaggaaatcatcttcccacccatcaagaccgatgtgattacaatggaccccaaggacaactgctccaaggacgccaacgataccctgctgctccagctgaccaacaccagcgcctactacatgtacttgttgctgctgctgaagtccgtggtgtacttcgccatcatcacatgctgcctgctgatggctatggtcaagcggaaggacagccgggga

SEQ ID NO: 6938 - DNA, 3021 bp, synthetic construct
  source 1..3021: mol_type = other DNA
atggccttaccagtgaccgccttgctcctgccgctggccttgctgctccacgccgccaggccggaagtgcagctggttgaatctggcggaggactggttcagcctggcggatctctgagactgtcttgtgccgccagcggcttcagcttcagcgacttttggatgagctgggtccgacaggcccctggcaaaggacttgaatgggtcgccacaatcagccaggccggcagcgagaaggactacgtggactctgtgaagggcagattcaccatcagccgggacaacgccaagaagtccctgtacctccagatgaacagcctgagagccgaggacaccgccgtgtactattgtgcctctggcgtgtacagcttcgactacagaggccagggcaccctggtcacagtctcttctggtaccggcggaggcggatctggcggcggaggtagcggtggcggaggatctgaattccagtctgtggtcacacagcctccatccgtgtctgctgcccctggacagaaagtgaccatctcctgtagcggcagcagcagcaacatcggcaacaactacgtgtcctggtatcagcagctccccggcacagctcccaaactgctgatctacgacaacaacaagcggcccagcggcatccccgatagattttctggcagcaagagcggcaccagcgccacactgggaattaccggacttcagacaggcgacgaggccgactactactgtggcacatgggatggcagcctgtacaccatgcttttcggcggaggcaccaagctgacagtgcttctcgagatccagaaccctgatcctgccgtgtaccagctgcgggatagcaagagcagcgacaagagcgtgtgtctgttcaccgacttcgacagccagaccaacgtgtcccagagcaaggactccgacgtgtacatcaccgataagtgcgtgctggacatgcggagcatggacttcaagagcaactccgccgtggcctggtccaacaagtccgatttcgcctgcgccaacgccttcaacaacagcattatccccgaggacacattcttcccaagccccgagagcagcgactccaccgaccacgtgaagcccaaagagacagagaacaccaagcagcccagcaagagctgccacaagcccaaggccatcgtgcacaccgagaaagtgaacatgatgagcctgaccgtgctgggcctgcggatgctgttcgccaaaaccgtggccgtgaacttcctgctgaccgccaagctgttcttcctcctcaccgcccgcgccaagagaagcggatctggcgtgaagcagaccctgaatttcgacctgctgaagctggctggcgacgtggaatccaacccaggccctactagtatggactggatttggcgcatccttttccttgtcggcgctgctaccggcgcgcattccgggccccagctccagctgcaagagtctggacctggcctggtcaagcctagcgagacactgagcctgacctgtaccgtgtccggcgatagcatcagcagcggcgattactactggggctggatcagacagcctcctggcaaaggactggaatggatcggccacatctactacagcggcgtgacctactacaaccccagcctgaagtccagagtgaccatcagcgtggacaccagccggaaccagttctccctgaagctgtctagcgtgacagccgccgataccgccgtgtactactgcaccagagaggacagcagcaactggcggagtagaggccagggaacactggtcacagttagctctggatccggcggaggcggaagtggaggcggaggatctggcggcggaggctctttcgaagaagtgcaactggtggaatctggcggcggactggttaagcctggcggatctctgagactgtcttgtgccgccagcggcttcaccttcagcaatgcctggatgagctgggttcgacaggcccctggaaaaggactggaatgggtcggattcatccggtccaaagcctacggcggcaccacagaatatgccgcctctgtgaagggcagattcaccatcagccgggacgacagcaagtctatcgcctacctccagatgaacaacctgaaaaccgaggacaccgccgtgtactactgcgccagagatggcctgtacagcagctcttggtacgacagcgattactggggccagggcacactggtcacagtgtcatctacgcgtgaggacctgaagaacgtgttcccacctgaggtggccgtgttcgagcctagcgaggccgagatcagccacacccagaaagccaccctcgtgtgcctggctaccggcttctaccccgaccatgtggaactgtcttggtgggtcaacggcaaagaggtgcacagcggcgtgtgtaccgacccccagccactgaaagaacagcccgccctgaacgacagccggtactgcctgagcagcagactgagagtgtccgccaccttctggcagaacccccggaaccacttcagatgccaggtgcagttctacggcctgagcgagaacgacgagtggacccaggacagagccaagcccgtgacccagatcgtgtctgccgaagcctggggcagagccgatgatgtgattaagatccactggcaggaaaagaagtccaacaccatcctgggcagccaggaaggcaacaccatgaagaccaacgacacctacatgaagttcagctggctgaccgtgcccgagaagtccctggacaaagaacacagatgcatcgtgcggcacgaaaacaacaagaacggcgtggaccaggaaatcatcttcccacccatcaagaccgatgtgattacaatggaccccaaggacaactgctccaaggacgccaacgataccctgctgctccagctgaccaacaccagcgcctactacatgtacttgttgctgctgctgaagtccgtggtgtacttcgccatcatcacatgctgcctgctgatggctatggtcaagcggaaggacagccgggga

SEQ ID NO: 6939 - DNA, 3036 bp, synthetic construct
  source 1..3036: mol_type = other DNA
atggccttaccagtgaccgccttgctcctgccgctggccttgctgctccacgccgccaggccggaagtgcagctggttgaatctggcggaggactggttcagcctggcggatctctgagactgtcttgtgccgccagcggcttcagcttcagcgacttttggatgagctgggtccgacaggcccctggcaaaggacttgaatgggtcgccacaatcagccaggccggcagcgagaaggactacgtggactctgtgaagggcagattcaccatcagccgggacaacgccaagaagtccctgtacctccagatgaacagcctgagagccgaggacaccgccgtgtactattgtgcctctggcgtgtacagcttcgactacagaggccagggcaccctggtcacagtctcttctggtaccggcggaggcggatctggcggcggaggtagcggtggcggaggatctgaattccagtctgtgctgacacagcctcctagtgtgtctggcgctcctggacagagagtgaccatctcttgtaccggcagcagcagcaatatcggagccggctatgacgtgcactggtatcagcagctccctggcacagcccctaaactgctgatcttcggcaacagcaacagacccagcggcgtgcccgatagattcagcggctttaagagcggcacaagcgccagcctggctatcactggactgcaagccgaggacgaggccgactacttctgccagagctacgatagcagcctgagcggcagcggagtgtttggcacaggcaccaaagtgacagtgcttggcctcgagatccagaaccctgatcctgccgtgtaccagctgcgggatagcaagagcagcgacaagagcgtgtgtctgttcaccgacttcgacagccagaccaacgtgtcccagagcaaggactccgacgtgtacatcaccgataagtgcgtgctggacatgcggagcatggacttcaagagcaactccgccgtggcctggtccaacaagtccgatttcgcctgcgccaacgccttcaacaacagcattatccccgaggacacattcttcccaagccccgagagcagcgactccaccgaccacgtgaagcccaaagagacagagaacaccaagcagcccagcaagagctgccacaagcccaaggccatcgtgcacaccgagaaagtgaacatgatgagcctgaccgtgctgggcctgcggatgctgttcgccaaaaccgtggccgtgaacttcctgctgaccgccaagctgttcttcctcctcaccgcccgcgccaagagaagcggatctggcgtgaagcagaccctgaatttcgacctgctgaagctggctggcgacgtggaatccaacccaggccctactagtatggactggatttggcgcatccttttccttgtcggcgctgctaccggcgcgcattccgggccccagctccagctgcaagagtctggacctggcctggtcaagcctagcgagacactgagcctgacctgtaccgtgtccggcgatagcatcagcagcggcgattactactggggctggatcagacagcctcctggcaaaggactggaatggatcggccacatctactacagcggcgtgacctactacaaccccagcctgaagtccagagtgaccatcagcgtggacaccagccggaaccagttctccctgaagctgtctagcgtgacagccgccgataccgccgtgtactactgcaccagagaggacagcagcaactggcggagtagaggccagggaacactggtcacagttagctctggatccggcggaggcggaagtggaggcggaggatctggcggcggaggctctttcgaacaaatgcaactggttcaaagcggcggtggcctggtgcaacctggaagaagtctgagactgagctgtgccgccagcggcttcaccttcgatgattacgccatgcactgggtccgacaggcccctggaaaaggactggaatgggtgtccggcatctcctggaatagcggctctatcggctacgccgacagcgtgaagggcagattcaccatcagccgggacaacgccaagaacagcctgtacctccagatgaactccctgagagccgaggatacagccctgtactactgcgccaaggacatccacagcggcagctactacggcctgctgtactacgctatggacgtgtggggccagggcacaaccgtgacagtttcttctacgcgtgaggacctgaagaacgtgttcccacctgaggtggccgtgttcgagcctagcgaggccgagatcagccacacccagaaagccaccctcgtgtgcctggctaccggcttctaccccgaccatgtggaactgtcttggtgggtcaacggcaaagaggtgcacagcggcgtgtgtaccgacccccagccactgaaagaacagcccgccctgaacgacagccggtactgcctgagcagcagactgagagtgtccgccaccttctggcagaacccccggaaccacttcagatgccaggtgcagttctacggcctgagcgagaacgacgagtggacccaggacagagccaagcccgtgacccagatcgtgtctgccgaagcctggggcagagccgatgatgtgattaagatccactggcaggaaaagaagtccaacaccatcctgggcagccaggaaggcaacaccatgaagaccaacgacacctacatgaagttcagctggctgaccgtgcccgagaagtccctggacaaagaacacagatgcatcgtgcggcacgaaaacaacaagaacggcgtggaccaggaaatcatcttcccacccatcaagaccgatgtgattacaatggaccccaaggacaactgctccaaggacgccaacgataccctgctgctccagctgaccaacaccagcgcctactacatgtacttgttgctgctgctgaagtccgtggtgtacttcgccatcatcacatgctgcctgctgatggctatggtcaagcggaaggacagccgggga

SEQ ID NO: 6940 - DNA, 3036 bp, synthetic construct
  source 1..3036: mol_type = other DNA
atggccttaccagtgaccgccttgctcctgccgctggccttgctgctccacgccgccaggccggaagtgcagctggttgaatctggcggaggactggttcagcctggcggatctctgagactgtcttgtgccgccagcggcttcagcttcagcgacttttggatgagctgggtccgacaggcccctggcaaaggacttgaatgggtcgccacaatcagccaggccggcagcgagaaggactacgtggactctgtgaagggcagattcaccatcagccgggacaacgccaagaagtccctgtacctccagatgaacagcctgagagccgaggacaccgccgtgtactattgtgcctctggcgtgtacagcttcgactacagaggccagggcaccctggtcacagtctcttctggtaccggcggaggcggatctggcggcggaggtagcggtggcggaggatctgaattcctgcctgttctgacacagcctccatctgcctctggcacacctggacagagagtgaccatcagctgtagcggcagaagcagcaacatcggcagcaacagcgtgaactggtacagacagcttcctggcgctgcccctaagctgctgatctacagcaacaaccagcggcctcctggcgtgccagtcagattttctggcagcaagagcggcacaagcgccagcctggctatttctggactccagtctgaggacgaggccacctactactgtgccacctgggacgacaacctgaacgtgcactacgtgttcggcaccggcaccaaagtgacagtgcttggaagtagactcgagatccagaaccctgatcctgccgtgtaccagctgcgggatagcaagagcagcgacaagagcgtgtgtctgttcaccgacttcgacagccagaccaacgtgtcccagagcaaggactccgacgtgtacatcaccgataagtgcgtgctggacatgcggagcatggacttcaagagcaactccgccgtggcctggtccaacaagtccgatttcgcctgcgccaacgccttcaacaacagcattatccccgaggacacattcttcccaagccccgagagcagcgactccaccgaccacgtgaagcccaaagagacagagaacaccaagcagcccagcaagagctgccacaagcccaaggccatcgtgcacaccgagaaagtgaacatgatgagcctgaccgtgctgggcctgcggatgctgttcgccaaaaccgtggccgtgaacttcctgctgaccgccaagctgttcttcctcctcaccgcccgcgccaagagaagcggatctggcgtgaagcagaccctgaatttcgacctgctgaagctggctggcgacgtggaatccaacccaggccctactagtatggactggatttggcgcatccttttccttgtcggcgctgctaccggcgcgcattccgggccccagctccagctgcaagagtctggacctggcctggtcaagcctagcgagacactgagcctgacctgtaccgtgtccggcgatagcatcagcagcggcgattactactggggctggatcagacagcctcctggcaaaggactggaatggatcggccacatctactacagcggcgtgacctactacaaccccagcctgaagtccagagtgaccatcagcgtggacaccagccggaaccagttctccctgaagctgtctagcgtgacagccgccgataccgccgtgtactactgcaccagagaggacagcagcaactggcggagtagaggccagggaacactggtcacagttagctctggatccggcggaggcggaagtggaggcggaggatctggcggcggaggctctttcgaacttgaaatggctcaggtgcagctggtgcagagcggagccgaagtgaagaaacctggcagcagcgtgaaggtgtcctgcaaagcttctggcggcaccttcagcagctacgccatctcttgggttcgacaggcccctggacaaggactggaatggatgggcagaatcatccccatcctgggaatcgccaactacgcccagaaattccagggcagagtgacaatcaccgccgacaagagcaccagcaccgcctacatggaactgagcagcctgagaagcgaggacaccgccgtgtactattgtgcaagaggcggctactacagccacgacatgtggagcgaagattggggccagggcacactggtcacagtgtcatctacgcgtgaggacctgaagaacgtgttcccacctgaggtggccgtgttcgagcctagcgaggccgagatcagccacacccagaaagccaccctcgtgtgcctggctaccggcttctaccccgaccatgtggaactgtcttggtgggtcaacggcaaagaggtgcacagcggcgtgtgtaccgacccccagccactgaaagaacagcccgccctgaacgacagccggtactgcctgagcagcagactgagagtgtccgccaccttctggcagaacccccggaaccacttcagatgccaggtgcagttctacggcctgagcgagaacgacgagtggacccaggacagagccaagcccgtgacccagatcgtgtctgccgaagcctggggcagagccgatgatgtgattaagatccactggcaggaaaagaagtccaacaccatcctgggcagccaggaaggcaacaccatgaagaccaacgacacctacatgaagttcagctggctgaccgtgcccgagaagtccctggacaaagaacacagatgcatcgtgcggcacgaaaacaacaagaacggcgtggaccaggaaatcatcttcccacccatcaagaccgatgtgattacaatggaccccaaggacaactgctccaaggacgccaacgataccctgctgctccagctgaccaacaccagcgcctactacatgtacttgttgctgctgctgaagtccgtggtgtacttcgccatcatcacatgctgcctgctgatggctatggtcaagcggaaggacagccgggga

SEQ ID NO: 6941 - DNA, 3018 bp, synthetic construct
  source 1..3018: mol_type = other DNA
atggccttaccagtgaccgccttgctcctgccgctggccttgctgctccacgccgccaggccggaagtgcagctggttgaatctggcggaggactggttcagcctggcggatctctgagactgtcttgtgccgccagcggcttcagcttcagcgacttttggatgagctgggtccgacaggcccctggcaaaggacttgaatgggtcgccacaatcagccaggccggcagcgagaaggactacgtggactctgtgaagggcagattcaccatcagccgggacaacgccaagaagtccctgtacctccagatgaacagcctgagagccgaggacaccgccgtgtactattgtgcctctggcgtgtacagcttcgactacagaggccagggcaccctggtcacagtctcttctggtaccggcggaggcggatctggcggcggaggtagcggtggcggaggatctgaattcgacttcgtgatgacacagagccctgatagcctggccgtgtctctcggcgagcgagtgaccatgagctgcaagtctagccagagcctgctgaacagcggcaaccagaagaactacctgacctggtatcagcagaagcccggccagcctcctaagctgctgatctactgggccagcaccagagaaagcggcgtgcccgatagattttctggctctggcagcggcaccgacttcaccctgacaatttctagcctgcaagccgaggacgtggccgtgtactactgccagaacgactacagctacccctacaccttcggccagggcaccaagctggaaatcaaactcgagatccagaaccctgatcctgccgtgtaccagctgcgggatagcaagagcagcgacaagagcgtgtgtctgttcaccgacttcgacagccagaccaacgtgtcccagagcaaggactccgacgtgtacatcaccgataagtgcgtgctggacatgcggagcatggacttcaagagcaactccgccgtggcctggtccaacaagtccgatttcgcctgcgccaacgccttcaacaacagcattatccccgaggacacattcttcccaagccccgagagcagcgactccaccgaccacgtgaagcccaaagagacagagaacaccaagcagcccagcaagagctgccacaagcccaaggccatcgtgcacaccgagaaagtgaacatgatgagcctgaccgtgctgggcctgcggatgctgttcgccaaaaccgtggccgtgaacttcctgctgaccgccaagctgttcttcctcctcaccgcccgcgccaagagaagcggatctggcgtgaagcagaccctgaatttcgacctgctgaagctggctggcgacgtggaatccaacccaggccctactagtatggactggatttggcgcatccttttccttgtcggcgctgctaccggcgcgcattccgggccccagctccagctgcaagagtctggacctggcctggtcaagcctagcgagacactgagcctgacctgtaccgtgtccggcgatagcatcagcagcggcgattactactggggctggatcagacagcctcctggcaaaggactggaatggatcggccacatctactacagcggcgtgacctactacaaccccagcctgaagtccagagtgaccatcagcgtggacaccagccggaaccagttctccctgaagctgtctagcgtgacagccgccgataccgccgtgtactactgcaccagagaggacagcagcaactggcggagtagaggccagggaacactggtcacagttagctctggatccggcggaggcggaagtggaggcggaggatctggcggcggaggctctttcgaagaagtgcaactggttcagagcggagccgagctgaagaaacctggggccagcgtgaaggtgtcctgtaaagccagcggctacacctttaccgactactacatgaaatgggtccgacaggccccaggccagggactcgaatggatcggcgatattatccccagcaacggggccaccttctacaaccagaaattcaagggccgcgtgaccatcaccgtggacaagagcacaagcaccgcctacatggaactgagcagcctgagaagcgaggacaccgccgtgtattattgcgccagaagccatctgctgcgggccagttggttcgcctattggggacagggaaccctggtcaccgttagctctacgcgtgaggacctgaagaacgtgttcccacctgaggtggccgtgttcgagcctagcgaggccgagatcagccacacccagaaagccaccctcgtgtgcctggctaccggcttctaccccgaccatgtggaactgtcttggtgggtcaacggcaaagaggtgcacagcggcgtgtgtaccgacccccagccactgaaagaacagcccgccctgaacgacagccggtactgcctgagcagcagactgagagtgtccgccaccttctggcagaacccccggaaccacttcagatgccaggtgcagttctacggcctgagcgagaacgacgagtggacccaggacagagccaagcccgtgacccagatcgtgtctgccgaagcctggggcagagccgatgatgtgattaagatccactggcaggaaaagaagtccaacaccatcctgggcagccaggaaggcaacaccatgaagaccaacgacacctacatgaagttcagctggctgaccgtgcccgagaagtccctggacaaagaacacagatgcatcgtgcggcacgaaaacaacaagaacggcgtggaccaggaaatcatcttcccacccatcaagaccgatgtgattacaatggaccccaaggacaactgctccaaggacgccaacgataccctgctgctccagctgaccaacaccagcgcctactacatgtacttgttgctgctgctgaagtccgtggtgtacttcgccatcatcacatgctgcctgctgatggctatggtcaagcggaaggacagccgggga

SEQ ID NO: 6942 - DNA, 3018 bp, synthetic construct
  source 1..3018: mol_type = other DNA
atggccttaccagtgaccgccttgctcctgccgctggccttgctgctccacgccgccaggccggaagtgcagctggttgaatctggcggaggactggttcagcctggcggatctctgagactgtcttgtgccgccagcggcttcagcttcagcgacttttggatgagctgggtccgacaggcccctggcaaaggacttgaatgggtcgccacaatcagccaggccggcagcgagaaggactacgtggactctgtgaagggcagattcaccatcagccgggacaacgccaagaagtccctgtacctccagatgaacagcctgagagccgaggacaccgccgtgtactattgtgcctctggcgtgtacagcttcgactacagaggccagggcaccctggtcacagtctcttctggtaccggcggaggcggatctggcggcggaggtagcggtggcggaggatctgaattcgacttcgtgatgacacagagccctgatagcctggccgtgtctctcggcgagcgagtgaccatgagctgcaagtctagccagagcctgctgaacagcggcaaccagaagaactacctgacctggtatcagcagaagcccggccagcctcctaagctgctgatctactgggccagcaccagagaaagcggcgtgcccgatagattttctggctctggcagcggcaccgacttcaccctgacaatttctagcctgcaagccgaggacgtggccgtgtactactgccagaacgactacagctacccctacaccttcggccagggcaccaagctggaaatcaaactcgagatccagaaccctgatcctgccgtgtaccagctgcgggatagcaagagcagcgacaagagcgtgtgtctgttcaccgacttcgacagccagaccaacgtgtcccagagcaaggactccgacgtgtacatcaccgataagtgcgtgctggacatgcggagcatggacttcaagagcaactccgccgtggcctggtccaacaagtccgatttcgcctgcgccaacgccttcaacaacagcattatccccgaggacacattcttcccaagccccgagagcagcgactccaccgaccacgtgaagcccaaagagacagagaacaccaagcagcccagcaagagctgccacaagcccaaggccatcgtgcacaccgagaaagtgaacatgatgagcctgaccgtgctgggcctgcggatgctgttcgccaaaaccgtggccgtgaacttcctgctgaccgccaagctgttcttcctcctcaccgcccgcgccaagagaagcggatctggcgtgaagcagaccctgaatttcgacctgctgaagctggctggcgacgtggaatccaacccaggccctactagtatggactggatttggcgcatccttttccttgtcggcgctgctaccggcgcgcattccgggccccagctccagctgcaagagtctggacctggcctggtcaagcctagcgagacactgagcctgacctgtaccgtgtccggcgatagcatcagcagcggcgattactactggggctggatcagacagcctcctggcaaaggactggaatggatcggccacatctactacagcggcgtgacctactacaaccccagcctgaagtccagagtgaccatcagcgtggacaccagccggaaccagttctccctgaagctgtctagcgtgacagccgccgataccgccgtgtactactgcaccagagaggacagcagcaactggcggagtagaggccagggaacactggtcacagttagctctggatccggcggaggcggaagtggaggcggaggatctggcggcggaggctctttcgaacaagtgcaactggttcagagcggagccgagctgaagaaacctggggccagcgtgaaggtgtcctgtaaagccagcggctacacctttaccgactactacatgaaatgggtccgacaggccccaggccagggactcgaatggatcggcgatattatccccagcaacggggccaccttctacaaccagaaattcaagggccgcgtgaccatcaccgtggacaagagcacaagcaccgcctacatggaactgagcagcctgagaagcgaggacaccgccgtgtattattgcgccagaagccatctgctgcgggccagttggttcgcctattggggacagggaaccctggtcaccgttagctctacgcgtgaggacctgaagaacgtgttcccacctgaggtggccgtgttcgagcctagcgaggccgagatcagccacacccagaaagccaccctcgtgtgcctggctaccggcttctaccccgaccatgtggaactgtcttggtgggtcaacggcaaagaggtgcacagcggcgtgtgtaccgacccccagccactgaaagaacagcccgccctgaacgacagccggtactgcctgagcagcagactgagagtgtccgccaccttctggcagaacccccggaaccacttcagatgccaggtgcagttctacggcctgagcgagaacgacgagtggacccaggacagagccaagcccgtgacccagatcgtgtctgccgaagcctggggcagagccgatgatgtgattaagatccactggcaggaaaagaagtccaacaccatcctgggcagccaggaaggcaacaccatgaagaccaacgacacctacatgaagttcagctggctgaccgtgcccgagaagtccctggacaaagaacacagatgcatcgtgcggcacgaaaacaacaagaacggcgtggaccaggaaatcatcttcccacccatcaagaccgatgtgattacaatggaccccaaggacaactgctccaaggacgccaacgataccctgctgctccagctgaccaacaccagcgcctactacatgtacttgttgctgctgctgaagtccgtggtgtacttcgccatcatcacatgctgcctgctgatggctatggtcaagcggaaggacagccgggga

SEQ ID NO: 6943 - DNA, 2988 bp, synthetic construct
  source 1..2988: mol_type = other DNA
atggccttaccagtgaccgccttgctcctgccgctggccttgctgctccacgccgccaggccggaagtgcagctggttgaatctggcggaggactggttcagcctggcggatctctgagactgtcttgtgccgccagcggcttcagcttcagcgacttttggatgagctgggtccgacaggcccctggcaaaggacttgaatgggtcgccacaatcagccaggccggcagcgagaaggactacgtggactctgtgaagggcagattcaccatcagccgggacaacgccaagaagtccctgtacctccagatgaacagcctgagagccgaggacaccgccgtgtactattgtgcctctggcgtgtacagcttcgactacagaggccagggcaccctggtcacagtctcttctggtaccggcggaggcggatctggcggcggaggtagcggtggcggaggatctgaattcgacgtgcagatcacacagagccctagctacctggctgcctctcctggcgagacaatcaccatcaactgtcgggccagcaagagcatcagcaaggacctggcctggtatcaagagaagcccggcaagaccaacaagctgctgatctacagcggcagcacactccagtctggcatccccagcagattttccggctctggcagcggcaccgatttcaccctgaccataagcagcctggaacctgaggacttcgccatgtactactgccagcagcacaacaagtacccctacacctttggcggaggcaccaagctggaaatcaagagactcgagatccagaaccctgatcctgccgtgtaccagctgcgggatagcaagagcagcgacaagagcgtgtgtctgttcaccgacttcgacagccagaccaacgtgtcccagagcaaggactccgacgtgtacatcaccgataagtgcgtgctggacatgcggagcatggacttcaagagcaactccgccgtggcctggtccaacaagtccgatttcgcctgcgccaacgccttcaacaacagcattatccccgaggacacattcttcccaagccccgagagcagcgactccaccgaccacgtgaagcccaaagagacagagaacaccaagcagcccagcaagagctgccacaagcccaaggccatcgtgcacaccgagaaagtgaacatgatgagcctgaccgtgctgggcctgcggatgctgttcgccaaaaccgtggccgtgaacttcctgctgaccgccaagctgttcttcctcctcaccgcccgcgccaagagaagcggatctggcgtgaagcagaccctgaatttcgacctgctgaagctggctggcgacgtggaatccaacccaggccctactagtatggactggatttggcgcatccttttccttgtcggcgctgctaccggcgcgcattccgggccccagctccagctgcaagagtctggacctggcctggtcaagcctagcgagacactgagcctgacctgtaccgtgtccggcgatagcatcagcagcggcgattactactggggctggatcagacagcctcctggcaaaggactggaatggatcggccacatctactacagcggcgtgacctactacaaccccagcctgaagtccagagtgaccatcagcgtggacaccagccggaaccagttctccctgaagctgtctagcgtgacagccgccgataccgccgtgtactactgcaccagagaggacagcagcaactggcggagtagaggccagggaacactggtcacagttagctctggatccggcggaggcggaagtggaggcggaggatctggcggcggaggctctttcgaacaagttcaactgcaacagcctggggccgagcttgttagacctggcgcttctgtgaagctgagctgcaaggccagcggctacaccttcaccagctactggatgaactgggtcaagcagcggcctgaccagggcctcgaatggatcggcagaatcgacccctacgacagcgagacacactacaaccagaagttcaaggacaaggccatcctgaccgtggacaagagcagctccaccgcctacatgcaactgagcagcctgacctctgaggatagcgccgtgtactattgcgccagaggcaactgggacgactattggggccagggcacaaccctgacagtgtctagtacgcgtgaggacctgaagaacgtgttcccacctgaggtggccgtgttcgagcctagcgaggccgagatcagccacacccagaaagccaccctcgtgtgcctggctaccggcttctaccccgaccatgtggaactgtcttggtgggtcaacggcaaagaggtgcacagcggcgtgtgtaccgacccccagccactgaaagaacagcccgccctgaacgacagccggtactgcctgagcagcagactgagagtgtccgccaccttctggcagaacccccggaaccacttcagatgccaggtgcagttctacggcctgagcgagaacgacgagtggacccaggacagagccaagcccgtgacccagatcgtgtctgccgaagcctggggcagagccgatgatgtgattaagatccactggcaggaaaagaagtccaacaccatcctgggcagccaggaaggcaacaccatgaagaccaacgacacctacatgaagttcagctggctgaccgtgcccgagaagtccctggacaaagaacacagatgcatcgtgcggcacgaaaacaacaagaacggcgtggaccaggaaatcatcttcccacccatcaagaccgatgtgattacaatggaccccaaggacaactgctccaaggacgccaacgataccctgctgctccagctgaccaacaccagcgcctactacatgtacttgttgctgctgctgaagtccgtggtgtacttcgccatcatcacatgctgcctgctgatggctatggtcaagcggaaggacagccgggga

SEQ ID NO: 6944 - DNA, 2994 bp, synthetic construct
  source 1..2994: mol_type = other DNA
atggccttaccagtgaccgccttgctcctgccgctggccttgctgctccacgccgccaggccggaagtgcagctggttgaatctggcggaggactggttcagcctggcggatctctgagactgtcttgtgccgccagcggcttcagcttcagcgacttttggatgagctgggtccgacaggcccctggcaaaggacttgaatgggtcgccacaatcagccaggccggcagcgagaaggactacgtggactctgtgaagggcagattcaccatcagccgggacaacgccaagaagtccctgtacctccagatgaacagcctgagagccgaggacaccgccgtgtactattgtgcctctggcgtgtacagcttcgactacagaggccagggcaccctggtcacagtctcttctggtaccggcggaggcggatctggcggcggaggtagcggtggcggaggatctgaattcgagatcgtgctgacacagagccctaccagcatgacagcctctccaggcgagcaagtgaccatcacctgtagagccagcagcagcatcaactacatgcactggtatcagcagaagcctggcgcaagccccagaccttggatctacgagacaagcaagctggcctccggcgtgcccgatagattttctggatctgccagcggcaccagctacagcctgaccatcaacaacatggaagccgaggacgccgccacctactactgccagcagtggaattacccctcctggacctttggcggaggcaccaagctggaacttaaactcgagatccagaaccctgatcctgccgtgtaccagctgcgggatagcaagagcagcgacaagagcgtgtgtctgttcaccgacttcgacagccagaccaacgtgtcccagagcaaggactccgacgtgtacatcaccgataagtgcgtgctggacatgcggagcatggacttcaagagcaactccgccgtggcctggtccaacaagtccgatttcgcctgcgccaacgccttcaacaacagcattatccccgaggacacattcttcccaagccccgagagcagcgactccaccgaccacgtgaagcccaaagagacagagaacaccaagcagcccagcaagagctgccacaagcccaaggccatcgtgcacaccgagaaagtgaacatgatgagcctgaccgtgctgggcctgcggatgctgttcgccaaaaccgtggccgtgaacttcctgctgaccgccaagctgttcttcctcctcaccgcccgcgccaagagaagcggatctggcgtgaagcagaccctgaatttcgacctgctgaagctggctggcgacgtggaatccaacccaggccctactagtatggactggatttggcgcatccttttccttgtcggcgctgctaccggcgcgcattccgggccccagctccagctgcaagagtctggacctggcctggtcaagcctagcgagacactgagcctgacctgtaccgtgtccggcgatagcatcagcagcggcgattactactggggctggatcagacagcctcctggcaaaggactggaatggatcggccacatctactacagcggcgtgacctactacaaccccagcctgaagtccagagtgaccatcagcgtggacaccagccggaaccagttctccctgaagctgtctagcgtgacagccgccgataccgccgtgtactactgcaccagagaggacagcagcaactggcggagtagaggccagggaacactggtcacagttagctctggatccggcggaggcggaagtggaggcggaggatctggcggcggaggctctttcgaagaagtgcagctcgttgagtctggtggcggactggttcagcctggaagaagcctgaagctgagctgtgccgccagcggcttcaccttcagcgactacaatatggcctgggtccgacaggcccctaagaaaggactggaatgggtcgccaccatcctgtacgatggcggcagaacctactaccggggcagcgtgaagggcagattcaccatcagcagagacaacgccaagagcaccctgtacctgcggatggactctctgagaagcgaggataccgccacatattactgtgccacacacagccggggcaccgactactttgattattggggccagggcgtgatggttaccgtgtctagtacgcgtgaggacctgaagaacgtgttcccacctgaggtggccgtgttcgagcctagcgaggccgagatcagccacacccagaaagccaccctcgtgtgcctggctaccggcttctaccccgaccatgtggaactgtcttggtgggtcaacggcaaagaggtgcacagcggcgtgtgtaccgacccccagccactgaaagaacagcccgccctgaacgacagccggtactgcctgagcagcagactgagagtgtccgccaccttctggcagaacccccggaaccacttcagatgccaggtgcagttctacggcctgagcgagaacgacgagtggacccaggacagagccaagcccgtgacccagatcgtgtctgccgaagcctggggcagagccgatgatgtgattaagatccactggcaggaaaagaagtccaacaccatcctgggcagccaggaaggcaacaccatgaagaccaacgacacctacatgaagttcagctggctgaccgtgcccgagaagtccctggacaaagaacacagatgcatcgtgcggcacgaaaacaacaagaacggcgtggaccaggaaatcatcttcccacccatcaagaccgatgtgattacaatggaccccaaggacaactgctccaaggacgccaacgataccctgctgctccagctgaccaacaccagcgcctactacatgtacttgttgctgctgctgaagtccgtggtgtacttcgccatcatcacatgctgcctgctgatggctatggtcaagcggaaggacagccgggga

SEQ ID NO: 6945 - DNA, 3021 bp, synthetic construct
  source 1..3021: mol_type = other DNA
atggccttaccagtgaccgccttgctcctgccgctggccttgctgctccacgccgccaggccggaagtgcagctggttgaatctggcggaggactggttcagcctggcggatctctgagactgtcttgtgccgccagcggcttcagcttcagcgacttttggatgagctgggtccgacaggcccctggcaaaggacttgaatgggtcgccacaatcagccaggccggcagcgagaaggactacgtggactctgtgaagggcagattcaccatcagccgggacaacgccaagaagtccctgtacctccagatgaacagcctgagagccgaggacaccgccgtgtactattgtgcctctggcgtgtacagcttcgactacagaggccagggcaccctggtcacagtctcttctggtaccggcggaggcggatctggcggcggaggtagcggtggcggaggatctgaattcgacatcgtgatgacacagagcccttctagcctggccgtgtctgagggcgagacagtgaccatcaactgcaagagcagccagagcttcctgtctagcggcgacggcaagaattacgtggcctggtatcagtacaagcccggacagagccccaagctgctgatctactgggccagcacaagacagagcggcgtgcccgatagattcatcggctctggcagcggcaccgacttcaccctgacaatctctacagtgcaggccgaggacctggctatctactactgccagcagtattacgacacccctctgacctttggctccggcaccaagctggaaatcaaactcgagatccagaaccctgatcctgccgtgtaccagctgcgggatagcaagagcagcgacaagagcgtgtgtctgttcaccgacttcgacagccagaccaacgtgtcccagagcaaggactccgacgtgtacatcaccgataagtgcgtgctggacatgcggagcatggacttcaagagcaactccgccgtggcctggtccaacaagtccgatttcgcctgcgccaacgccttcaacaacagcattatccccgaggacacattcttcccaagccccgagagcagcgactccaccgaccacgtgaagcccaaagagacagagaacaccaagcagcccagcaagagctgccacaagcccaaggccatcgtgcacaccgagaaagtgaacatgatgagcctgaccgtgctgggcctgcggatgctgttcgccaaaaccgtggccgtgaacttcctgctgaccgccaagctgttcttcctcctcaccgcccgcgccaagagaagcggatctggcgtgaagcagaccctgaatttcgacctgctgaagctggctggcgacgtggaatccaacccaggccctactagtatggactggatttggcgcatccttttccttgtcggcgctgctaccggcgcgcattccgggccccagctccagctgcaagagtctggacctggcctggtcaagcctagcgagacactgagcctgacctgtaccgtgtccggcgatagcatcagcagcggcgattactactggggctggatcagacagcctcctggcaaaggactggaatggatcggccacatctactacagcggcgtgacctactacaaccccagcctgaagtccagagtgaccatcagcgtggacaccagccggaaccagttctccctgaagctgtctagcgtgacagccgccgataccgccgtgtactactgcaccagagaggacagcagcaactggcggagtagaggccagggaacactggtcacagttagctctggatccggcggaggcggaagtggaggcggaggatctggcggcggaggctctttcgaagaagtgaagctgcaagagtctggccccagcctggtgcagagtagccaaacactgagcctgacctgtaccgtgtccggctttagcctgaccagctaccacatccactgggtccgacagacccctggcaaaggactggaatggatgggcgtgatgtggagcgacggcgacaccagctataacagcgccctgaagtcccggctgagcatcagcagagatacaagccagagccaggtgttcctgaagatgaacagcctccagaccgaggacaccgccacctactattgtgccagaggctactacagcagctacctgtacctttggttcgcctattggggccagggcaccctggttacagtcagctctacgcgtgaggacctgaagaacgtgttcccacctgaggtggccgtgttcgagcctagcgaggccgagatcagccacacccagaaagccaccctcgtgtgcctggctaccggcttctaccccgaccatgtggaactgtcttggtgggtcaacggcaaagaggtgcacagcggcgtgtgtaccgacccccagccactgaaagaacagcccgccctgaacgacagccggtactgcctgagcagcagactgagagtgtccgccaccttctggcagaacccccggaaccacttcagatgccaggtgcagttctacggcctgagcgagaacgacgagtggacccaggacagagccaagcccgtgacccagatcgtgtctgccgaagcctggggcagagccgatgatgtgattaagatccactggcaggaaaagaagtccaacaccatcctgggcagccaggaaggcaacaccatgaagaccaacgacacctacatgaagttcagctggctgaccgtgcccgagaagtccctggacaaagaacacagatgcatcgtgcggcacgaaaacaacaagaacggcgtggaccaggaaatcatcttcccacccatcaagaccgatgtgattacaatggaccccaaggacaactgctccaaggacgccaacgataccctgctgctccagctgaccaacaccagcgcctactacatgtacttgttgctgctgctgaagtccgtggtgtacttcgccatcatcacatgctgcctgctgatggctatggtcaagcggaaggacagccgggga

SEQ ID NO: 6946 - DNA, 3033 bp, synthetic construct
  source 1..3033: mol_type = other DNA
atggccttaccagtgaccgccttgctcctgccgctggccttgctgctccacgccgccaggccggaagtgcagctggttgaatctggcggaggactggttcagcctggcggatctctgagactgtcttgtgccgccagcggcttcagcttcagcgacttttggatgagctgggtccgacaggcccctggcaaaggacttgaatgggtcgccacaatcagccaggccggcagcgagaaggactacgtggactctgtgaagggcagattcaccatcagccgggacaacgccaagaagtccctgtacctccagatgaacagcctgagagccgaggacaccgccgtgtactattgtgcctctggcgtgtacagcttcgactacagaggccagggcaccctggtcacagtctcttctggtaccggcggaggcggatctggcggcggaggtagcggtggcggaggatctgaattcgacgtgctgatgacccagacacctgtgtctctgccagtgtctctcggaggccaggtgtccatctcctgtagaagcagccagagcctggtgcactccgacggcgatacctacctgcactggtatctccagaagcctggacagagccctcagctcctgatctaccgggtgtccaacagattcagcggcgtgcccgatagattttccggcagcggctctggcaccgacttcaccctgaagatcagcagagtggaacccgaggacctgggcctgtactactgtctccagaccacacacttcccaccttggacctttggcggaggcaccaagctggaaatgaaactcgagatccagaaccctgatcctgccgtgtaccagctgcgggatagcaagagcagcgacaagagcgtgtgtctgttcaccgacttcgacagccagaccaacgtgtcccagagcaaggactccgacgtgtacatcaccgataagtgcgtgctggacatgcggagcatggacttcaagagcaactccgccgtggcctggtccaacaagtccgatttcgcctgcgccaacgccttcaacaacagcattatccccgaggacacattcttcccaagccccgagagcagcgactccaccgaccacgtgaagcccaaagagacagagaacaccaagcagcccagcaagagctgccacaagcccaaggccatcgtgcacaccgagaaagtgaacatgatgagcctgaccgtgctgggcctgcggatgctgttcgccaaaaccgtggccgtgaacttcctgctgaccgccaagctgttcttcctcctcaccgcccgcgccaagagaagcggatctggcgtgaagcagaccctgaatttcgacctgctgaagctggctggcgacgtggaatccaacccaggccctactagtatggactggatttggcgcatccttttccttgtcggcgctgctaccggcgcgcattccgggccccagctccagctgcaagagtctggacctggcctggtcaagcctagcgagacactgagcctgacctgtaccgtgtccggcgatagcatcagcagcggcgattactactggggctggatcagacagcctcctggcaaaggactggaatggatcggccacatctactacagcggcgtgacctactacaaccccagcctgaagtccagagtgaccatcagcgtggacaccagccggaaccagttctccctgaagctgtctagcgtgacagccgccgataccgccgtgtactactgcaccagagaggacagcagcaactggcggagtagaggccagggaacactggtcacagttagctctggatccggcggaggcggaagtggaggcggaggatctggcggcggaggctctttcgaacaggttcagctccagcagtctggacccgagcttagaaggccaggatctagcgtcagactgagctgcaaggccagcggctaccggatcaaggacttcctgatccactggattaagaacagacccgagcacggcctggaatggatcggatggattgaccctgaggacggcgagactaagtacgcccagaagttccagaccaaggccacactgaccgccgacacctctagcaacaccgcctacatgcaactgagcagcctgaccagcgaggacaccgccacctacttttgtgctagatggggcgacgtgtactacggcctgatgagaggccatgtgatggatgcctggggccagggaacaagcgtgacagtctcttctacgcgtgaggacctgaagaacgtgttcccacctgaggtggccgtgttcgagcctagcgaggccgagatcagccacacccagaaagccaccctcgtgtgcctggctaccggcttctaccccgaccatgtggaactgtcttggtgggtcaacggcaaagaggtgcacagcggcgtgtgtaccgacccccagccactgaaagaacagcccgccctgaacgacagccggtactgcctgagcagcagactgagagtgtccgccaccttctggcagaacccccggaaccacttcagatgccaggtgcagttctacggcctgagcgagaacgacgagtggacccaggacagagccaagcccgtgacccagatcgtgtctgccgaagcctggggcagagccgatgatgtgattaagatccactggcaggaaaagaagtccaacaccatcctgggcagccaggaaggcaacaccatgaagaccaacgacacctacatgaagttcagctggctgaccgtgcccgagaagtccctggacaaagaacacagatgcatcgtgcggcacgaaaacaacaagaacggcgtggaccaggaaatcatcttcccacccatcaagaccgatgtgattacaatggaccccaaggacaactgctccaaggacgccaacgataccctgctgctccagctgaccaacaccagcgcctactacatgtacttgttgctgctgctgaagtccgtggtgtacttcgccatcatcacatgctgcctgctgatggctatggtcaagcggaaggacagccgggga

SEQ ID NO: 6947 - DNA, 3018 bp, synthetic construct
  source 1..3018: mol_type = other DNA
atggccttaccagtgaccgccttgctcctgccgctggccttgctgctccacgccgccaggccggaagtgcagctggttgaatctggcggaggactggttcagcctggcggatctctgagactgtcttgtgccgccagcggcttcagcttcagcgacttttggatgagctgggtccgacaggcccctggcaaaggacttgaatgggtcgccacaatcagccaggccggcagcgagaaggactacgtggactctgtgaagggcagattcaccatcagccgggacaacgccaagaagtccctgtacctccagatgaacagcctgagagccgaggacaccgccgtgtactattgtgcctctggcgtgtacagcttcgactacagaggccagggcaccctggtcacagtctcttctggtaccggcggaggcggatctggcggcggaggtagcggtggcggaggatctgaattcgacatcgtgatgacacagagccccgccacactgtcactgtctccaggcgaaagagccacactgagctgtcggagcagcaagagcctccagaacgtgaacggcaacacctacctgtactggttccagcagaagcccggccagtctcctcagctcctgatctacagaatgagcaacctgaacagcggcgtgcccgacagattttctggcagcggaagcggcaccgagttcaccctgaccataagcagcctggaacctgaggacttcgccgtgtactactgtatgcagcacctggaataccccatcaccttcggagccggcaccaagctggaaatcaaactcgagatccagaaccctgatcctgccgtgtaccagctgcgggatagcaagagcagcgacaagagcgtgtgtctgttcaccgacttcgacagccagaccaacgtgtcccagagcaaggactccgacgtgtacatcaccgataagtgcgtgctggacatgcggagcatggacttcaagagcaactccgccgtggcctggtccaacaagtccgatttcgcctgcgccaacgccttcaacaacagcattatccccgaggacacattcttcccaagccccgagagcagcgactccaccgaccacgtgaagcccaaagagacagagaacaccaagcagcccagcaagagctgccacaagcccaaggccatcgtgcacaccgagaaagtgaacatgatgagcctgaccgtgctgggcctgcggatgctgttcgccaaaaccgtggccgtgaacttcctgctgaccgccaagctgttcttcctcctcaccgcccgcgccaagagaagcggatctggcgtgaagcagaccctgaatttcgacctgctgaagctggctggcgacgtggaatccaacccaggccctactagtatggactggatttggcgcatccttttccttgtcggcgctgctaccggcgcgcattccgggccccagctccagctgcaagagtctggacctggcctggtcaagcctagcgagacactgagcctgacctgtaccgtgtccggcgatagcatcagcagcggcgattactactggggctggatcagacagcctcctggcaaaggactggaatggatcggccacatctactacagcggcgtgacctactacaaccccagcctgaagtccagagtgaccatcagcgtggacaccagccggaaccagttctccctgaagctgtctagcgtgacagccgccgataccgccgtgtactactgcaccagagaggacagcagcaactggcggagtagaggccagggaacactggtcacagttagctctggatccggcggaggcggaagtggaggcggaggatctggcggcggaggctctttcgaagaagtgcaactggttgaatctggcggcggactggttaagcctggcggatctctgaagctgagctgtgccgccagcggctacacctttaccagctacgtgatgcactgggtccgacaggcccctggcaaaggacttgagtggatcggctacatcaacccctacaacgatggcaccaagtacaacgagaagttccagggcagagtgaccatcagctccgacaagagcatcagcaccgcctacatggaactgagcagcctgagaagcgaggataccgccatgtactattgcgccagaggcacctactactacggcaccagagtgttcgactactggggccagggaaccctggtcacagtctcttctacgcgtgaggacctgaagaacgtgttcccacctgaggtggccgtgttcgagcctagcgaggccgagatcagccacacccagaaagccaccctcgtgtgcctggctaccggcttctaccccgaccatgtggaactgtcttggtgggtcaacggcaaagaggtgcacagcggcgtgtgtaccgacccccagccactgaaagaacagcccgccctgaacgacagccggtactgcctgagcagcagactgagagtgtccgccaccttctggcagaacccccggaaccacttcagatgccaggtgcagttctacggcctgagcgagaacgacgagtggacccaggacagagccaagcccgtgacccagatcgtgtctgccgaagcctggggcagagccgatgatgtgattaagatccactggcaggaaaagaagtccaacaccatcctgggcagccaggaaggcaacaccatgaagaccaacgacacctacatgaagttcagctggctgaccgtgcccgagaagtccctggacaaagaacacagatgcatcgtgcggcacgaaaacaacaagaacggcgtggaccaggaaatcatcttcccacccatcaagaccgatgtgattacaatggaccccaaggacaactgctccaaggacgccaacgataccctgctgctccagctgaccaacaccagcgcctactacatgtacttgttgctgctgctgaagtccgtggtgtacttcgccatcatcacatgctgcctgctgatggctatggtcaagcggaaggacagccgggga

SEQ ID NO: 6948 - DNA, 3006 bp, synthetic construct
  source 1..3006: mol_type = other DNA
atggccttaccagtgaccgccttgctcctgccgctggccttgctgctccacgccgccaggccggaagtgcagctggttgaatctggcggaggactggttcagcctggcggatctctgagactgtcttgtgccgccagcggcttcagcttcagcgacttttggatgagctgggtccgacaggcccctggcaaaggacttgaatgggtcgccacaatcagccaggccggcagcgagaaggactacgtggactctgtgaagggcagattcaccatcagccgggacaacgccaagaagtccctgtacctccagatgaacagcctgagagccgaggacaccgccgtgtactattgtgcctctggcgtgtacagcttcgactacagaggccagggcaccctggtcacagtctcttctggtaccggcggaggcggatctggcggcggaggtagcggtggcggaggatctgaattcgacatccagatgacacagagccctagcagcctgtctgccagcgtgggagacagagtgaccatcacatgcaaggccagcgaccacatcaacaactggctggcctggtatcagcagaagcctggacaggcccctaagctgctgatctacggcgctaccacactggaaacaggcgtgcccagcagattttctggcagcggctctggcaccgactacaccctgacaatatccagcctccagcctgaggacttcgccacctactactgtcagcagagctggaacaccccttggacattcggccagggcaccaagctggaaatcaagagactcgagatccagaaccctgatcctgccgtgtaccagctgcgggatagcaagagcagcgacaagagcgtgtgtctgttcaccgacttcgacagccagaccaacgtgtcccagagcaaggactccgacgtgtacatcaccgataagtgcgtgctggacatgcggagcatggacttcaagagcaactccgccgtggcctggtccaacaagtccgatttcgcctgcgccaacgccttcaacaacagcattatccccgaggacacattcttcccaagccccgagagcagcgactccaccgaccacgtgaagcccaaagagacagagaacaccaagcagcccagcaagagctgccacaagcccaaggccatcgtgcacaccgagaaagtgaacatgatgagcctgaccgtgctgggcctgcggatgctgttcgccaaaaccgtggccgtgaacttcctgctgaccgccaagctgttcttcctcctcaccgcccgcgccaagagaagcggatctggcgtgaagcagaccctgaatttcgacctgctgaagctggctggcgacgtggaatccaacccaggccctactagtatggactggatttggcgcatccttttccttgtcggcgctgctaccggcgcgcattccgggccccagctccagctgcaagagtctggacctggcctggtcaagcctagcgagacactgagcctgacctgtaccgtgtccggcgatagcatcagcagcggcgattactactggggctggatcagacagcctcctggcaaaggactggaatggatcggccacatctactacagcggcgtgacctactacaaccccagcctgaagtccagagtgaccatcagcgtggacaccagccggaaccagttctccctgaagctgtctagcgtgacagccgccgataccgccgtgtactactgcaccagagaggacagcagcaactggcggagtagaggccagggaacactggtcacagttagctctggatccggcggaggcggaagtggaggcggaggatctggcggcggaggctctttcgaacaagttcagcttcaacagcctggcgctgagctggtcaaacctggcgcttctgtgaagatgagctgcaaagccagcggctacgccttcagcagctactggatcaactggatgaagcagaaacccggccagggactcgaatggatcggccaaatctatcccggcgacggcgacaccaactacaacggcaagttcaagggcagagccacactgaccgccgatacctctagcagcacagcctacatgcagctgagcagcctgaccagcgaagatagcgccgtgtacttctgtgcccggtccatcacaacagtcgtgggctgcgctatggactattggggccagggaacaagcgtgaccgtgtctagtacgcgtgaggacctgaagaacgtgttcccacctgaggtggccgtgttcgagcctagcgaggccgagatcagccacacccagaaagccaccctcgtgtgcctggctaccggcttctaccccgaccatgtggaactgtcttggtgggtcaacggcaaagaggtgcacagcggcgtgtgtaccgacccccagccactgaaagaacagcccgccctgaacgacagccggtactgcctgagcagcagactgagagtgtccgccaccttctggcagaacccccggaaccacttcagatgccaggtgcagttctacggcctgagcgagaacgacgagtggacccaggacagagccaagcccgtgacccagatcgtgtctgccgaagcctggggcagagccgatgatgtgattaagatccactggcaggaaaagaagtccaacaccatcctgggcagccaggaaggcaacaccatgaagaccaacgacacctacatgaagttcagctggctgaccgtgcccgagaagtccctggacaaagaacacagatgcatcgtgcggcacgaaaacaacaagaacggcgtggaccaggaaatcatcttcccacccatcaagaccgatgtgattacaatggaccccaaggacaactgctccaaggacgccaacgataccctgctgctccagctgaccaacaccagcgcctactacatgtacttgttgctgctgctgaagtccgtggtgtacttcgccatcatcacatgctgcctgctgatggctatggtcaagcggaaggacagccgggga

SEQ ID NO: 6949 - DNA, 3012 bp, synthetic construct
  source 1..3012: mol_type = other DNA
atggccttaccagtgaccgccttgctcctgccgctggccttgctgctccacgccgccaggccggaagtgcagctggttgaatctggcggaggactggttcagcctggcggatctctgagactgtcttgtgccgccagcggcttcagcttcagcgacttttggatgagctgggtccgacaggcccctggcaaaggacttgaatgggtcgccacaatcagccaggccggcagcgagaaggactacgtggactctgtgaagggcagattcaccatcagccgggacaacgccaagaagtccctgtacctccagatgaacagcctgagagccgaggacaccgccgtgtactattgtgcctctggcgtgtacagcttcgactacagaggccagggcaccctggtcacagtctcttctggtaccggcggaggcggatctggcggcggaggtagcggtggcggaggatctgaattccagatcgtgctgtctcagtctcctgccatcctgagcgcttccccaggcgagaaagtgaccatgacctgtagagccagcagcagcgtgtcctacatgcactggtatcagcagaagcccggcagcagccctaagccttggatctacgccaccagcaatctggcctctggcgtgccagccagattttctggctctggcagcggcaccagctacagcttcacaatcagcagagtggaagccgaggacgccgccacctactattgtcagcagtggaccttcaatcctcctaccttcggcggaggcacccggctggaaatcaaaagaacagtggctgctctcgagatccagaaccctgatcctgccgtgtaccagctgcgggatagcaagagcagcgacaagagcgtgtgtctgttcaccgacttcgacagccagaccaacgtgtcccagagcaaggactccgacgtgtacatcaccgataagtgcgtgctggacatgcggagcatggacttcaagagcaactccgccgtggcctggtccaacaagtccgatttcgcctgcgccaacgccttcaacaacagcattatccccgaggacacattcttcccaagccccgagagcagcgactccaccgaccacgtgaagcccaaagagacagagaacaccaagcagcccagcaagagctgccacaagcccaaggccatcgtgcacaccgagaaagtgaacatgatgagcctgaccgtgctgggcctgcggatgctgttcgccaaaaccgtggccgtgaacttcctgctgaccgccaagctgttcttcctcctcaccgcccgcgccaagagaagcggatctggcgtgaagcagaccctgaatttcgacctgctgaagctggctggcgacgtggaatccaacccaggccctactagtatggactggatttggcgcatccttttccttgtcggcgctgctaccggcgcgcattccgggccccagctccagctgcaagagtctggacctggcctggtcaagcctagcgagacactgagcctgacctgtaccgtgtccggcgatagcatcagcagcggcgattactactggggctggatcagacagcctcctggcaaaggactggaatggatcggccacatctactacagcggcgtgacctactacaaccccagcctgaagtccagagtgaccatcagcgtggacaccagccggaaccagttctccctgaagctgtctagcgtgacagccgccgataccgccgtgtactactgcaccagagaggacagcagcaactggcggagtagaggccagggaacactggtcacagttagctctggatccggcggaggcggaagtggaggcggaggatctggcggcggaggctctttcgaacaggcttatctgcaacagagcggagccgaactcgtcagacctggcgcttctgtgaagatgagctgcaaggccagcggctacaccttcaccagctataatatgcactgggtcaagcagacccctcggcagggactcgaatggatcggcggaatctatcccggcaacggcgacacctcctacaaccagaagttcaagggcaaagccacactgaccgtgggcaagagcagcagcaccgcctatatgcagctcagcagcctgaccagcgaggacagcgccgtgtacttctgcgccagatacgactacaactacgctatggactactggggccagggcaccagcgtgacagttagctctgccagcacgcgtgaggacctgaagaacgtgttcccacctgaggtggccgtgttcgagcctagcgaggccgagatcagccacacccagaaagccaccctcgtgtgcctggctaccggcttctaccccgaccatgtggaactgtcttggtgggtcaacggcaaagaggtgcacagcggcgtgtgtaccgacccccagccactgaaagaacagcccgccctgaacgacagccggtactgcctgagcagcagactgagagtgtccgccaccttctggcagaacccccggaaccacttcagatgccaggtgcagttctacggcctgagcgagaacgacgagtggacccaggacagagccaagcccgtgacccagatcgtgtctgccgaagcctggggcagagccgatgatgtgattaagatccactggcaggaaaagaagtccaacaccatcctgggcagccaggaaggcaacaccatgaagaccaacgacacctacatgaagttcagctggctgaccgtgcccgagaagtccctggacaaagaacacagatgcatcgtgcggcacgaaaacaacaagaacggcgtggaccaggaaatcatcttcccacccatcaagaccgatgtgattacaatggaccccaaggacaactgctccaaggacgccaacgataccctgctgctccagctgaccaacaccagcgcctactacatgtacttgttgctgctgctgaagtccgtggtgtacttcgccatcatcacatgctgcctgctgatggctatggtcaagcggaaggacagccgggga

SEQ ID NO: 6950 - DNA, 3006 bp, synthetic construct
  source 1..3006: mol_type = other DNA
atggccttaccagtgaccgccttgctcctgccgctggccttgctgctccacgccgccaggccggaagtgcagctggttgaatctggcggaggactggttcagcctggcggatctctgagactgtcttgtgccgccagcggcttcagcttcagcgacttttggatgagctgggtccgacaggcccctggcaaaggacttgaatgggtcgccacaatcagccaggccggcagcgagaaggactacgtggactctgtgaagggcagattcaccatcagccgggacaacgccaagaagtccctgtacctccagatgaacagcctgagagccgaggacaccgccgtgtactattgtgcctctggcgtgtacagcttcgactacagaggccagggcaccctggtcacagtctcttctggtaccggcggaggcggatctggcggcggaggtagcggtggcggaggatctgaattcgagatcgtgctgacacagagccctgccaccctgtctctgagccctggcgaaagagccaccctgagctgtagagccagccagagcgtgtccagctacctggcctggtatcagcagaagcccggccaggctccccggctgctgatctacgatgccagcaatagagccaccggcatccccgccagattttccggctctggcagcggcaccgacttcaccctgaccatcagctccctggaacccgaggacttcgccgtgtactactgccagcagcggagcaactggcccatcacattcggccagggcacccggctggaaatcaaactcgagatccagaaccctgatcctgccgtgtaccagctgcgggatagcaagagcagcgacaagagcgtgtgtctgttcaccgacttcgacagccagaccaacgtgtcccagagcaaggactccgacgtgtacatcaccgataagtgcgtgctggacatgcggagcatggacttcaagagcaactccgccgtggcctggtccaacaagtccgatttcgcctgcgccaacgccttcaacaacagcattatccccgaggacacattcttcccaagccccgagagcagcgactccaccgaccacgtgaagcccaaagagacagagaacaccaagcagcccagcaagagctgccacaagcccaaggccatcgtgcacaccgagaaagtgaacatgatgagcctgaccgtgctgggcctgcggatgctgttcgccaaaaccgtggccgtgaacttcctgctgaccgccaagctgttcttcctcctcaccgcccgcgccaagagaagcggatctggcgtgaagcagaccctgaatttcgacctgctgaagctggctggcgacgtggaatccaacccaggccctactagtatggactggatttggcgcatccttttccttgtcggcgctgctaccggcgcgcattccgggccccagctccagctgcaagagtctggacctggcctggtcaagcctagcgagacactgagcctgacctgtaccgtgtccggcgatagcatcagcagcggcgattactactggggctggatcagacagcctcctggcaaaggactggaatggatcggccacatctactacagcggcgtgacctactacaaccccagcctgaagtccagagtgaccatcagcgtggacaccagccggaaccagttctccctgaagctgtctagcgtgacagccgccgataccgccgtgtactactgcaccagagaggacagcagcaactggcggagtagaggccagggaacactggtcacagttagctctggatccggcggaggcggaagtggaggcggaggatctggcggcggaggctctttcgaagaggtgcagcttgttgagtctggcggaggactggtgcagcccgatagaagcctgagactgtcttgtgccgccagcggcttcaccttccacgattatgccatgcactgggtccgacaggcccctggcaaaggacttgaatgggtgtccaccatctcttggaacagcggcacaatcggctacgccgactctgtgaagggcagattcaccatcagccgggacaacgccaagaacagcctgtacctccagatgaactccctgagagccgaggacacagccctgtactactgcgccaaggacatccagtacggcaactactactacggcatggacgtgtggggccagggcacaacagtgacagtctcttctacgcgtgaggacctgaagaacgtgttcccacctgaggtggccgtgttcgagcctagcgaggccgagatcagccacacccagaaagccaccctcgtgtgcctggctaccggcttctaccccgaccatgtggaactgtcttggtgggtcaacggcaaagaggtgcacagcggcgtgtgtaccgacccccagccactgaaagaacagcccgccctgaacgacagccggtactgcctgagcagcagactgagagtgtccgccaccttctggcagaacccccggaaccacttcagatgccaggtgcagttctacggcctgagcgagaacgacgagtggacccaggacagagccaagcccgtgacccagatcgtgtctgccgaagcctggggcagagccgatgatgtgattaagatccactggcaggaaaagaagtccaacaccatcctgggcagccaggaaggcaacaccatgaagaccaacgacacctacatgaagttcagctggctgaccgtgcccgagaagtccctggacaaagaacacagatgcatcgtgcggcacgaaaacaacaagaacggcgtggaccaggaaatcatcttcccacccatcaagaccgatgtgattacaatggaccccaaggacaactgctccaaggacgccaacgataccctgctgctccagctgaccaacaccagcgcctactacatgtacttgttgctgctgctgaagtccgtggtgtacttcgccatcatcacatgctgcctgctgatggctatggtcaagcggaaggacagccgggga

SEQ ID NO: 6951 - DNA, 2991 bp, synthetic construct
  source 1..2991: mol_type = other DNA
atggccttaccagtgaccgccttgctcctgccgctggccttgctgctccacgccgccaggccggaagtgcagctggttgaatctggcggaggactggttcagcctggcggatctctgagactgtcttgtgccgccagcggcttcagcttcagcgacttttggatgagctgggtccgacaggcccctggcaaaggacttgaatgggtcgccacaatcagccaggccggcagcgagaaggactacgtggactctgtgaagggcagattcaccatcagccgggacaacgccaagaagtccctgtacctccagatgaacagcctgagagccgaggacaccgccgtgtactattgtgcctctggcgtgtacagcttcgactacagaggccagggcaccctggtcacagtctcttctggtaccggcggaggcggatctggcggcggaggtagcggtggcggaggatctgaattcgacatccagatgacacagagccctagcagcctgtctgccagcgtgggagatagagtgaccatcaactgcaaggccagccaggacatcaacagctacctgagctggttccagcagaagcctggcaaggcccctaagacactgatctaccgggccaacagactggtggatggcgtgccaagcagattttctggcagcggcagcggccaggattacaccctgacaatatccagcctccagcctgaggacttcgccacctactactgcctccagtacgacgagttccctctgacctttggcggaggcaccaaggtggaaatcaaactcgagatccagaaccctgatcctgccgtgtaccagctgcgggatagcaagagcagcgacaagagcgtgtgtctgttcaccgacttcgacagccagaccaacgtgtcccagagcaaggactccgacgtgtacatcaccgataagtgcgtgctggacatgcggagcatggacttcaagagcaactccgccgtggcctggtccaacaagtccgatttcgcctgcgccaacgccttcaacaacagcattatccccgaggacacattcttcccaagccccgagagcagcgactccaccgaccacgtgaagcccaaagagacagagaacaccaagcagcccagcaagagctgccacaagcccaaggccatcgtgcacaccgagaaagtgaacatgatgagcctgaccgtgctgggcctgcggatgctgttcgccaaaaccgtggccgtgaacttcctgctgaccgccaagctgttcttcctcctcaccgcccgcgccaagagaagcggatctggcgtgaagcagaccctgaatttcgacctgctgaagctggctggcgacgtggaatccaacccaggccctactagtatggactggatttggcgcatccttttccttgtcggcgctgctaccggcgcgcattccgggccccagctccagctgcaagagtctggacctggcctggtcaagcctagcgagacactgagcctgacctgtaccgtgtccggcgatagcatcagcagcggcgattactactggggctggatcagacagcctcctggcaaaggactggaatggatcggccacatctactacagcggcgtgacctactacaaccccagcctgaagtccagagtgaccatcagcgtggacaccagccggaaccagttctccctgaagctgtctagcgtgacagccgccgataccgccgtgtactactgcaccagagaggacagcagcaactggcggagtagaggccagggaacactggtcacagttagctctggatccggcggaggcggaagtggaggcggaggatctggcggcggaggctctttcgaacaggtgcaactggtgcagtctggggccgaagtgaagaaacctggggcctctgtgaaggtgtcctgcaaagccagcggctacacctttaccaactacgacatcaactgggtccgacaggctccaggccaaggactggaatggatcggctggatctatcctggcgacggcagcaccaagtacaacgagaagttcaaggccaaggccacactgaccgccgataccagcacaagcaccgcctacatggaactgcggagcctgagaagcgacgacaccgccgtgtactattgtgcctccggctacgaggacgctatggactattggggccagggcaccaccgtgacagtgtctagtacgcgtgaggacctgaagaacgtgttcccacctgaggtggccgtgttcgagcctagcgaggccgagatcagccacacccagaaagccaccctcgtgtgcctggctaccggcttctaccccgaccatgtggaactgtcttggtgggtcaacggcaaagaggtgcacagcggcgtgtgtaccgacccccagccactgaaagaacagcccgccctgaacgacagccggtactgcctgagcagcagactgagagtgtccgccaccttctggcagaacccccggaaccacttcagatgccaggtgcagttctacggcctgagcgagaacgacgagtggacccaggacagagccaagcccgtgacccagatcgtgtctgccgaagcctggggcagagccgatgatgtgattaagatccactggcaggaaaagaagtccaacaccatcctgggcagccaggaaggcaacaccatgaagaccaacgacacctacatgaagttcagctggctgaccgtgcccgagaagtccctggacaaagaacacagatgcatcgtgcggcacgaaaacaacaagaacggcgtggaccaggaaatcatcttcccacccatcaagaccgatgtgattacaatggaccccaaggacaactgctccaaggacgccaacgataccctgctgctccagctgaccaacaccagcgcctactacatgtacttgttgctgctgctgaagtccgtggtgtacttcgccatcatcacatgctgcctgctgatggctatggtcaagcggaaggacagccgggga

SEQ ID NO: 6952 - DNA, 2997 bp, synthetic construct
  source 1..2997: mol_type = other DNA
atggccttaccagtgaccgccttgctcctgccgctggccttgctgctccacgccgccaggccggaagtgcagctggttgaatctggcggaggactggttcagcctggcggatctctgagactgtcttgtgccgccagcggcttcagcttcagcgacttttggatgagctgggtccgacaggcccctggcaaaggacttgaatgggtcgccacaatcagccaggccggcagcgagaaggactacgtggactctgtgaagggcagattcaccatcagccgggacaacgccaagaagtccctgtacctccagatgaacagcctgagagccgaggacaccgccgtgtactattgtgcctctggcgtgtacagcttcgactacagaggccagggcaccctggtcacagtctcttctggtaccggcggaggcggatctggcggcggaggtagcggtggcggaggatctgaattcgacatcgtgatgacccagacacctctgagcctgagcgtgacacctggacagcctgccagcattagctgcaagagcagccagtctctgctggacggcgacggcaagacctacctgaattggctgctccagaagcctggacagagccctcagcggctgatctacctggtgtccaagctggatagcggcgtgcccgatagattttctggcagcggctctggcaccgacttcaccctgaagatcagcagagtggaagccgaggacgtgggcgtgtactactgttggcagggcacacacttccccagaacattcggccagggcacaaagctggaaatcaaactcgagatccagaaccctgatcctgccgtgtaccagctgcgggatagcaagagcagcgacaagagcgtgtgtctgttcaccgacttcgacagccagaccaacgtgtcccagagcaaggactccgacgtgtacatcaccgataagtgcgtgctggacatgcggagcatggacttcaagagcaactccgccgtggcctggtccaacaagtccgatttcgcctgcgccaacgccttcaacaacagcattatccccgaggacacattcttcccaagccccgagagcagcgactccaccgaccacgtgaagcccaaagagacagagaacaccaagcagcccagcaagagctgccacaagcccaaggccatcgtgcacaccgagaaagtgaacatgatgagcctgaccgtgctgggcctgcggatgctgttcgccaaaaccgtggccgtgaacttcctgctgaccgccaagctgttcttcctcctcaccgcccgcgccaagagaagcggatctggcgtgaagcagaccctgaatttcgacctgctgaagctggctggcgacgtggaatccaacccaggccctactagtatggactggatttggcgcatccttttccttgtcggcgctgctaccggcgcgcattccgggccccagctccagctgcaagagtctggacctggcctggtcaagcctagcgagacactgagcctgacctgtaccgtgtccggcgatagcatcagcagcggcgattactactggggctggatcagacagcctcctggcaaaggactggaatggatcggccacatctactacagcggcgtgacctactacaaccccagcctgaagtccagagtgaccatcagcgtggacaccagccggaaccagttctccctgaagctgtctagcgtgacagccgccgataccgccgtgtactactgcaccagagaggacagcagcaactggcggagtagaggccagggaacactggtcacagttagctctggatccggcggaggcggaagtggaggcggaggatctggcggcggaggctctttcgaacaagtgcaactggttcagagcggagccgaagtgaagaaacctggggcctctgtgaaggtgtcctgcaaggccagcggctacaccttcaaggacacctacatccactgggtccgacaggcccctggacaaggacttgagtggatgggcagaatcgaccccgccaacggcaacaccaaatacgaccccaagttccagggcagagtgaccatgaccagagacaccagcatcagcaccgcctacatggaactgagccggctgagatccgatgacaccgccgtgtactattgcgctagaagaggcggagtggattggggccagggaacactggttaccgtgtctagtacgcgtgaggacctgaagaacgtgttcccacctgaggtggccgtgttcgagcctagcgaggccgagatcagccacacccagaaagccaccctcgtgtgcctggctaccggcttctaccccgaccatgtggaactgtcttggtgggtcaacggcaaagaggtgcacagcggcgtgtgtaccgacccccagccactgaaagaacagcccgccctgaacgacagccggtactgcctgagcagcagactgagagtgtccgccaccttctggcagaacccccggaaccacttcagatgccaggtgcagttctacggcctgagcgagaacgacgagtggacccaggacagagccaagcccgtgacccagatcgtgtctgccgaagcctggggcagagccgatgatgtgattaagatccactggcaggaaaagaagtccaacaccatcctgggcagccaggaaggcaacaccatgaagaccaacgacacctacatgaagttcagctggctgaccgtgcccgagaagtccctggacaaagaacacagatgcatcgtgcggcacgaaaacaacaagaacggcgtggaccaggaaatcatcttcccacccatcaagaccgatgtgattacaatggaccccaaggacaactgctccaaggacgccaacgataccctgctgctccagctgaccaacaccagcgcctactacatgtacttgttgctgctgctgaagtccgtggtgtacttcgccatcatcacatgctgcctgctgatggctatggtcaagcggaaggacagccgggga

SEQ ID NO: 6953 - DNA, 3000 bp, synthetic construct
  source 1..3000: mol_type = other DNA
atggccttaccagtgaccgccttgctcctgccgctggccttgctgctccacgccgccaggccggaagtgcagctggttgaatctggcggaggactggttcagcctggcggatctctgagactgtcttgtgccgccagcggcttcagcttcagcgacttttggatgagctgggtccgacaggcccctggcaaaggacttgaatgggtcgccacaatcagccaggccggcagcgagaaggactacgtggactctgtgaagggcagattcaccatcagccgggacaacgccaagaagtccctgtacctccagatgaacagcctgagagccgaggacaccgccgtgtactattgtgcctctggcgtgtacagcttcgactacagaggccagggcaccctggtcacagtctcttctggtaccggcggaggcggatctggcggcggaggtagcggtggcggaggatctgaattcgacatccagatgacacagagccctagcagcctgtctgccagcgtgggagacagagtgaccatcacatgcaaggccagccaggatgtgtctacagccgtggcctggttccagcagaagcctggaaaagcccctaagctgctgatctacagccccagctacagatacaccggcgtgcccagcagattttctggcagcggctctggcaccgacttcaccctgacaatatccagcctccagcctgaggacttcacctactactgccagcagctctacagcaccccttacacattcggccagggcaccaaggtggaaatcaaactcgagatccagaaccctgatcctgccgtgtaccagctgcgggatagcaagagcagcgacaagagcgtgtgtctgttcaccgacttcgacagccagaccaacgtgtcccagagcaaggactccgacgtgtacatcaccgataagtgcgtgctggacatgcggagcatggacttcaagagcaactccgccgtggcctggtccaacaagtccgatttcgcctgcgccaacgccttcaacaacagcattatccccgaggacacattcttcccaagccccgagagcagcgactccaccgaccacgtgaagcccaaagagacagagaacaccaagcagcccagcaagagctgccacaagcccaaggccatcgtgcacaccgagaaagtgaacatgatgagcctgaccgtgctgggcctgcggatgctgttcgccaaaaccgtggccgtgaacttcctgctgaccgccaagctgttcttcctcctcaccgcccgcgccaagagaagcggatctggcgtgaagcagaccctgaatttcgacctgctgaagctggctggcgacgtggaatccaacccaggccctactagtatggactggatttggcgcatccttttccttgtcggcgctgctaccggcgcgcattccgggccccagctccagctgcaagagtctggacctggcctggtcaagcctagcgagacactgagcctgacctgtaccgtgtccggcgatagcatcagcagcggcgattactactggggctggatcagacagcctcctggcaaaggactggaatggatcggccacatctactacagcggcgtgacctactacaaccccagcctgaagtccagagtgaccatcagcgtggacaccagccggaaccagttctccctgaagctgtctagcgtgacagccgccgataccgccgtgtactactgcaccagagaggacagcagcaactggcggagtagaggccagggaacactggtcacagttagctctggatccggcggaggcggaagtggaggcggaggatctggcggcggaggctctttcgaagaagtgcaactggttcagagcggagccgaagtgaagaaacctggggcctctgtgaaggtgtcctgcaaagccagcggctacacctttaccgactactacctggacgtggtcgtgcggcaagctcctggacaaggactggaatggatcggcagagtgaacccctacaacggcggcaccatctacaaccagaaattcaagggaagagtgaccctgaccagagacaccagcacctccacagcctacctggaactgagcagcctgagaagcgaagataccgccgtgtactactgcgccagggaccactacagatatgaccctctgctggactactggggccagggaaccctggttacagtgtctagtacgcgtgaggacctgaagaacgtgttcccacctgaggtggccgtgttcgagcctagcgaggccgagatcagccacacccagaaagccaccctcgtgtgcctggctaccggcttctaccccgaccatgtggaactgtcttggtgggtcaacggcaaagaggtgcacagcggcgtgtgtaccgacccccagccactgaaagaacagcccgccctgaacgacagccggtactgcctgagcagcagactgagagtgtccgccaccttctggcagaacccccggaaccacttcagatgccaggtgcagttctacggcctgagcgagaacgacgagtggacccaggacagagccaagcccgtgacccagatcgtgtctgccgaagcctggggcagagccgatgatgtgattaagatccactggcaggaaaagaagtccaacaccatcctgggcagccaggaaggcaacaccatgaagaccaacgacacctacatgaagttcagctggctgaccgtgcccgagaagtccctggacaaagaacacagatgcatcgtgcggcacgaaaacaacaagaacggcgtggaccaggaaatcatcttcccacccatcaagaccgatgtgattacaatggaccccaaggacaactgctccaaggacgccaacgataccctgctgctccagctgaccaacaccagcgcctactacatgtacttgttgctgctgctgaagtccgtggtgtacttcgccatcatcacatgctgcctgctgatggctatggtcaagcggaaggacagccgggga

SEQ ID NO: 6954 - DNA, 3018 bp, synthetic construct
  source 1..3018: mol_type = other DNA
atggccttaccagtgaccgccttgctcctgccgctggccttgctgctccacgccgccaggccggaagtgcagctggttgaatctggcggaggactggttcagcctggcggatctctgagactgtcttgtgccgccagcggcttcagcttcagcgacttttggatgagctgggtccgacaggcccctggcaaaggacttgaatgggtcgccacaatcagccaggccggcagcgagaaggactacgtggactctgtgaagggcagattcaccatcagccgggacaacgccaagaagtccctgtacctccagatgaacagcctgagagccgaggacaccgccgtgtactattgtgcctctggcgtgtacagcttcgactacagaggccagggcaccctggtcacagtctcttctggtaccggcggaggcggatctggcggcggaggtagcggtggcggaggatctgaattcgacatccagatgacacagagccctagcagcctgtctgccagcgtgggagacagagtgaccatcacctgtagagccagccagagcgtgtccaccagcagctacaactacatgcactggtatcagcagaagcccggcaagcctcctaagctgctgattaagtacgccagcaacctggaaagcggcgtgcccagcagattttctggcagcggctctggcaccgacttcaccctgacaatatccagcctccagcctgaggacttcgccacctactactgtcagcactcctgggagatccctctgacattcggccagggcaccaaggtggaaatcaaactcgagatccagaaccctgatcctgccgtgtaccagctgcgggatagcaagagcagcgacaagagcgtgtgtctgttcaccgacttcgacagccagaccaacgtgtcccagagcaaggactccgacgtgtacatcaccgataagtgcgtgctggacatgcggagcatggacttcaagagcaactccgccgtggcctggtccaacaagtccgatttcgcctgcgccaacgccttcaacaacagcattatccccgaggacacattcttcccaagccccgagagcagcgactccaccgaccacgtgaagcccaaagagacagagaacaccaagcagcccagcaagagctgccacaagcccaaggccatcgtgcacaccgagaaagtgaacatgatgagcctgaccgtgctgggcctgcggatgctgttcgccaaaaccgtggccgtgaacttcctgctgaccgccaagctgttcttcctcctcaccgcccgcgccaagagaagcggatctggcgtgaagcagaccctgaatttcgacctgctgaagctggctggcgacgtggaatccaacccaggccctactagtatggactggatttggcgcatccttttccttgtcggcgctgctaccggcgcgcattccgggccccagctccagctgcaagagtctggacctggcctggtcaagcctagcgagacactgagcctgacctgtaccgtgtccggcgatagcatcagcagcggcgattactactggggctggatcagacagcctcctggcaaaggactggaatggatcggccacatctactacagcggcgtgacctactacaaccccagcctgaagtccagagtgaccatcagcgtggacaccagccggaaccagttctccctgaagctgtctagcgtgacagccgccgataccgccgtgtactactgcaccagagaggacagcagcaactggcggagtagaggccagggaacactggtcacagttagctctggatccggcggaggcggaagtggaggcggaggatctggcggcggaggctctttcgaagaagtgcaactggttcagagcggagccgaagtgaagaaacctggggcctctgtgaaggtgtcctgcaaggccagcggctacagcttcaccgactattatatgcactgggtccgacaggctccaggccagggacttgagtggatcggcagaatcaacccctacaacggcgctgccttctacagccagaacttcaaggatagagtgaccctgaccgtggacaccagcaccagcacagcctacctggaactgagcagcctgagaagcgaggacaccgccgtgtactactgcgccattgagagaggcgctgacctggaaggctacgctatggattattggggccagggaaccctggtcaccgtgtcatctacgcgtgaggacctgaagaacgtgttcccacctgaggtggccgtgttcgagcctagcgaggccgagatcagccacacccagaaagccaccctcgtgtgcctggctaccggcttctaccccgaccatgtggaactgtcttggtgggtcaacggcaaagaggtgcacagcggcgtgtgtaccgacccccagccactgaaagaacagcccgccctgaacgacagccggtactgcctgagcagcagactgagagtgtccgccaccttctggcagaacccccggaaccacttcagatgccaggtgcagttctacggcctgagcgagaacgacgagtggacccaggacagagccaagcccgtgacccagatcgtgtctgccgaagcctggggcagagccgatgatgtgattaagatccactggcaggaaaagaagtccaacaccatcctgggcagccaggaaggcaacaccatgaagaccaacgacacctacatgaagttcagctggctgaccgtgcccgagaagtccctggacaaagaacacagatgcatcgtgcggcacgaaaacaacaagaacggcgtggaccaggaaatcatcttcccacccatcaagaccgatgtgattacaatggaccccaaggacaactgctccaaggacgccaacgataccctgctgctccagctgaccaacaccagcgcctactacatgtacttgttgctgctgctgaagtccgtggtgtacttcgccatcatcacatgctgcctgctgatggctatggtcaagcggaaggacagccgggga

SEQ ID NO: 6955 - DNA, 3012 bp, synthetic construct
  source 1..3012: mol_type = other DNA
atggccttaccagtgaccgccttgctcctgccgctggccttgctgctccacgccgccaggccggaagtgcagctggttgaatctggcggaggactggttcagcctggcggatctctgagactgtcttgtgccgccagcggcttcagcttcagcgacttttggatgagctgggtccgacaggcccctggcaaaggacttgaatgggtcgccacaatcagccaggccggcagcgagaaggactacgtggactctgtgaagggcagattcaccatcagccgggacaacgccaagaagtccctgtacctccagatgaacagcctgagagccgaggacaccgccgtgtactattgtgcctctggcgtgtacagcttcgactacagaggccagggcaccctggtcacagtctcttctggtaccggcggaggcggatctggcggcggaggtagcggtggcggaggatctgaattcgagatcgtgctgacacagtctccagccacactgagcgcttctccaggcgagagagtgaccctgacctgtagagccagcagcaacgtgatctccagctacgtgcactggtatcagcagaagcctggcagcagccccagactgtttctgtacagcaccagcaatctggcctccggcgtgccaagcagattttctggctctggcagcggcaccgacttcacctttaccatctctagcctggaagccgaggacgccgccacctactactgtcagcagtacagcggctaccctctgaccttcggccagggcacaagactggaaatcaaactcgagatccagaaccctgatcctgccgtgtaccagctgcgggatagcaagagcagcgacaagagcgtgtgtctgttcaccgacttcgacagccagaccaacgtgtcccagagcaaggactccgacgtgtacatcaccgataagtgcgtgctggacatgcggagcatggacttcaagagcaactccgccgtggcctggtccaacaagtccgatttcgcctgcgccaacgccttcaacaacagcattatccccgaggacacattcttcccaagccccgagagcagcgactccaccgaccacgtgaagcccaaagagacagagaacaccaagcagcccagcaagagctgccacaagcccaaggccatcgtgcacaccgagaaagtgaacatgatgagcctgaccgtgctgggcctgcggatgctgttcgccaaaaccgtggccgtgaacttcctgctgaccgccaagctgttcttcctcctcaccgcccgcgccaagagaagcggatctggcgtgaagcagaccctgaatttcgacctgctgaagctggctggcgacgtggaatccaacccaggccctactagtatggactggatttggcgcatccttttccttgtcggcgctgctaccggcgcgcattccgggccccagctccagctgcaagagtctggacctggcctggtcaagcctagcgagacactgagcctgacctgtaccgtgtccggcgatagcatcagcagcggcgattactactggggctggatcagacagcctcctggcaaaggactggaatggatcggccacatctactacagcggcgtgacctactacaaccccagcctgaagtccagagtgaccatcagcgtggacaccagccggaaccagttctccctgaagctgtctagcgtgacagccgccgataccgccgtgtactactgcaccagagaggacagcagcaactggcggagtagaggccagggaacactggtcacagttagctctggatccggcggaggcggaagtggaggcggaggatctggcggcggaggctctttcgaacaagttcagctgcaagagtctggccctggcctggtcaagcctagcgaaacactgagcctgacctgcgccgtgtctggctactctatcaccagcgcctactattggaactggatcagacagcctcctggcaaaggactggaatggatcggctacatcagctacgacggcagaaacaactacaaccccagcctgaagaaccggatcaccatcaatcccgacaccagcaagaaccagttcagcctccagctgaacagcgtgacccctgaggataccgccgtgtactactgtgccagagaaggcgactacgacgtgggcaactactacgctatggactactggggccagggaaccctggtcacagtctcttctacgcgtgaggacctgaagaacgtgttcccacctgaggtggccgtgttcgagcctagcgaggccgagatcagccacacccagaaagccaccctcgtgtgcctggctaccggcttctaccccgaccatgtggaactgtcttggtgggtcaacggcaaagaggtgcacagcggcgtgtgtaccgacccccagccactgaaagaacagcccgccctgaacgacagccggtactgcctgagcagcagactgagagtgtccgccaccttctggcagaacccccggaaccacttcagatgccaggtgcagttctacggcctgagcgagaacgacgagtggacccaggacagagccaagcccgtgacccagatcgtgtctgccgaagcctggggcagagccgatgatgtgattaagatccactggcaggaaaagaagtccaacaccatcctgggcagccaggaaggcaacaccatgaagaccaacgacacctacatgaagttcagctggctgaccgtgcccgagaagtccctggacaaagaacacagatgcatcgtgcggcacgaaaacaacaagaacggcgtggaccaggaaatcatcttcccacccatcaagaccgatgtgattacaatggaccccaaggacaactgctccaaggacgccaacgataccctgctgctccagctgaccaacaccagcgcctactacatgtacttgttgctgctgctgaagtccgtggtgtacttcgccatcatcacatgctgcctgctgatggctatggtcaagcggaaggacagccgggga

SEQ ID NO: 6956 - DNA, 3012 bp, synthetic construct
  source 1..3012: mol_type = other DNA
atggccttaccagtgaccgccttgctcctgccgctggccttgctgctccacgccgccaggccggaagtgcagctggttgaatctggcggaggactggttcagcctggcggatctctgagactgtcttgtgccgccagcggcttcagcttcagcgacttttggatgagctgggtccgacaggcccctggcaaaggacttgaatgggtcgccacaatcagccaggccggcagcgagaaggactacgtggactctgtgaagggcagattcaccatcagccgggacaacgccaagaagtccctgtacctccagatgaacagcctgagagccgaggacaccgccgtgtactattgtgcctctggcgtgtacagcttcgactacagaggccagggcaccctggtcacagtctcttctggtaccggcggaggcggatctggcggcggaggtagcggtggcggaggatctgaattcgagatcgtgctgacacagtctcccgccacactgtcactgtctccaggcgaaagagccacactgagctgtagagccagcagcaacgtgatctccagctacgtgcactggtatcagcagaagcctggacaggcccctcggctgctgatctacagcacaagcaatctggcctctggcatccccgccagattttctggctctggaagcggcaccgacttcaccctgaccataagcagcctggaacctgaggacttcgccgtgtactactgccagcagtatagcggctaccctctgaccttcggccagggcacaagactggaaatcaaactcgagatccagaaccctgatcctgccgtgtaccagctgcgggatagcaagagcagcgacaagagcgtgtgtctgttcaccgacttcgacagccagaccaacgtgtcccagagcaaggactccgacgtgtacatcaccgataagtgcgtgctggacatgcggagcatggacttcaagagcaactccgccgtggcctggtccaacaagtccgatttcgcctgcgccaacgccttcaacaacagcattatccccgaggacacattcttcccaagccccgagagcagcgactccaccgaccacgtgaagcccaaagagacagagaacaccaagcagcccagcaagagctgccacaagcccaaggccatcgtgcacaccgagaaagtgaacatgatgagcctgaccgtgctgggcctgcggatgctgttcgccaaaaccgtggccgtgaacttcctgctgaccgccaagctgttcttcctcctcaccgcccgcgccaagagaagcggatctggcgtgaagcagaccctgaatttcgacctgctgaagctggctggcgacgtggaatccaacccaggccctactagtatggactggatttggcgcatccttttccttgtcggcgctgctaccggcgcgcattccgggccccagctccagctgcaagagtctggacctggcctggtcaagcctagcgagacactgagcctgacctgtaccgtgtccggcgatagcatcagcagcggcgattactactggggctggatcagacagcctcctggcaaaggactggaatggatcggccacatctactacagcggcgtgacctactacaaccccagcctgaagtccagagtgaccatcagcgtggacaccagccggaaccagttctccctgaagctgtctagcgtgacagccgccgataccgccgtgtactactgcaccagagaggacagcagcaactggcggagtagaggccagggaacactggtcacagttagctctggatccggcggaggcggaagtggaggcggaggatctggcggcggaggctctttcgaagaagtgcaactggtggaaagtggcggcggactggtgcaacctggaagaagcctgagactgtcctgtgccgccagcggctactctatcacaagcgcctactactggaactgggtccgacaggctcctggcaaaggactggaatgggtgtcctacatcagctacgacggcagaaacaactacaaccccagcctgaagaaccgcttcaccatcagccgggacaacgccaagaagtccctgtacctccagatgaacagcctgagagccgaggacacagccctgtactattgcgccaaagagggcgactacgacgtcggcaactactacgctatggactactggggccagggaaccaccgtgactgtctcttctacgcgtgaggacctgaagaacgtgttcccacctgaggtggccgtgttcgagcctagcgaggccgagatcagccacacccagaaagccaccctcgtgtgcctggctaccggcttctaccccgaccatgtggaactgtcttggtgggtcaacggcaaagaggtgcacagcggcgtgtgtaccgacccccagccactgaaagaacagcccgccctgaacgacagccggtactgcctgagcagcagactgagagtgtccgccaccttctggcagaacccccggaaccacttcagatgccaggtgcagttctacggcctgagcgagaacgacgagtggacccaggacagagccaagcccgtgacccagatcgtgtctgccgaagcctggggcagagccgatgatgtgattaagatccactggcaggaaaagaagtccaacaccatcctgggcagccaggaaggcaacaccatgaagaccaacgacacctacatgaagttcagctggctgaccgtgcccgagaagtccctggacaaagaacacagatgcatcgtgcggcacgaaaacaacaagaacggcgtggaccaggaaatcatcttcccacccatcaagaccgatgtgattacaatggaccccaaggacaactgctccaaggacgccaacgataccctgctgctccagctgaccaacaccagcgcctactacatgtacttgttgctgctgctgaagtccgtggtgtacttcgccatcatcacatgctgcctgctgatggctatggtcaagcggaaggacagccgggga

SEQ ID NO: 6957 - DNA, 3009 bp, synthetic construct
  source 1..3009: mol_type = other DNA
atggccttaccagtgaccgccttgctcctgccgctggccttgctgctccacgccgccaggccggaagtgcagctggttgaatctggcggaggactggttcagcctggcggatctctgagactgtcttgtgccgccagcggcttcagcttcagcgacttttggatgagctgggtccgacaggcccctggcaaaggacttgaatgggtcgccacaatcagccaggccggcagcgagaaggactacgtggactctgtgaagggcagattcaccatcagccgggacaacgccaagaagtccctgtacctccagatgaacagcctgagagccgaggacaccgccgtgtactattgtgcctctggcgtgtacagcttcgactacagaggccagggcaccctggtcacagtctcttctggtaccggcggaggcggatctggcggcggaggtagcggtggcggaggatctgaattcgacgtggtcatgacacagaccccactgagcctgcctgtgtctctgggagatcaggccagcatctcctgtagaagcagccagagcctggtgcacagcaacggcaacacctacctgcggtggtatctccagaagcctggacagagccccaaggtgctgatctacaaggtgtccaacagagtgtccggcgtgcccgatagattttctggcagcggctctggcaccgacttcaccctgaagatcaatagagtggaagccgaggacctgggcgtgtacttctgtagccagagcacccatgtgccttggacctttggcggaggcaccaagctggaaatcaagctcgagatccagaaccctgatcctgccgtgtaccagctgcgggatagcaagagcagcgacaagagcgtgtgtctgttcaccgacttcgacagccagaccaacgtgtcccagagcaaggactccgacgtgtacatcaccgataagtgcgtgctggacatgcggagcatggacttcaagagcaactccgccgtggcctggtccaacaagtccgatttcgcctgcgccaacgccttcaacaacagcattatccccgaggacacattcttcccaagccccgagagcagcgactccaccgaccacgtgaagcccaaagagacagagaacaccaagcagcccagcaagagctgccacaagcccaaggccatcgtgcacaccgagaaagtgaacatgatgagcctgaccgtgctgggcctgcggatgctgttcgccaaaaccgtggccgtgaacttcctgctgaccgccaagctgttcttcctcctcaccgcccgcgccaagagaagcggatctggcgtgaagcagaccctgaatttcgacctgctgaagctggctggcgacgtggaatccaacccaggccctactagtatggactggatttggcgcatccttttccttgtcggcgctgctaccggcgcgcattccgggccccagctccagctgcaagagtctggacctggcctggtcaagcctagcgagacactgagcctgacctgtaccgtgtccggcgatagcatcagcagcggcgattactactggggctggatcagacagcctcctggcaaaggactggaatggatcggccacatctactacagcggcgtgacctactacaaccccagcctgaagtccagagtgaccatcagcgtggacaccagccggaaccagttctccctgaagctgtctagcgtgacagccgccgataccgccgtgtactactgcaccagagaggacagcagcaactggcggagtagaggccagggaacactggtcacagttagctctggatccggcggaggcggaagtggaggcggaggatctggcggcggaggctctttcgaaggcgtgaagctggacgagacaggcggaggacttgttcaacctggcggagccatgaagctgagctgtgtgaccagcggctttaccttcggccactactggatgaactgggtccgacagtcccctgagaaaggactggaatgggtcgcccagttcagaaacaagccctacaactacgaaacctactacagcgacagcgtgaagggcagattcaccatcagccgggacgacagcaagtccagcgtgtacctccagatgaacaacctgcgcgtggaagataccggcatctactactgtaccggggccagctacggcatggaatatctcggccagggcaccagcgtgaccgtgtctacaacgcgtgaggacctgaagaacgtgttcccacctgaggtggccgtgttcgagcctagcgaggccgagatcagccacacccagaaagccaccctcgtgtgcctggctaccggcttctaccccgaccatgtggaactgtcttggtgggtcaacggcaaagaggtgcacagcggcgtgtgtaccgacccccagccactgaaagaacagcccgccctgaacgacagccggtactgcctgagcagcagactgagagtgtccgccaccttctggcagaacccccggaaccacttcagatgccaggtgcagttctacggcctgagcgagaacgacgagtggacccaggacagagccaagcccgtgacccagatcgtgtctgccgaagcctggggcagagccgatgatgtgattaagatccactggcaggaaaagaagtccaacaccatcctgggcagccaggaaggcaacaccatgaagaccaacgacacctacatgaagttcagctggctgaccgtgcccgagaagtccctggacaaagaacacagatgcatcgtgcggcacgaaaacaacaagaacggcgtggaccaggaaatcatcttcccacccatcaagaccgatgtgattacaatggaccccaaggacaactgctccaaggacgccaacgataccctgctgctccagctgaccaacaccagcgcctactacatgtacttgttgctgctgctgaagtccgtggtgtacttcgccatcatcacatgctgcctgctgatggctatggtcaagcggaaggacagccgggga

SEQ ID NO: 6958 - DNA, 3027 bp, synthetic construct
  source 1..3027: mol_type = other DNA
atggccttaccagtgaccgccttgctcctgccgctggccttgctgctccacgccgccaggccggaagtgcagctggttgaatctggcggaggactggttcagcctggcggatctctgagactgtcttgtgccgccagcggcttcagcttcagcgacttttggatgagctgggtccgacaggcccctggcaaaggacttgaatgggtcgccacaatcagccaggccggcagcgagaaggactacgtggactctgtgaagggcagattcaccatcagccgggacaacgccaagaagtccctgtacctccagatgaacagcctgagagccgaggacaccgccgtgtactattgtgcctctggcgtgtacagcttcgactacagaggccagggcaccctggtcacagtctcttctggtaccggcggaggcggatctggcggcggaggtagcggtggcggaggatctgaattccaggtgcaactggtggaatctggcggcaatctggttcagcctggcggctctctgagactgtcttgtgccgccagcggcttcaccttcggcagcttttctatgagctgggtccgacaagctcctggcggaggacttgaatgggtggcaggactgtctgccagaagcagcctgacacactacgccgactctgtgaagggcagattcaccatcagccgggacaacgccaagaacagcgtgtacctccagatgaacagcctgagagtggaagataccgccgtgtactactgcgccagaagaagctacgacagcagcggctactggggccacttctacagctacatggatgtgtggggccagggcaccctggttacagtttctctcgagatccagaaccctgatcctgccgtgtaccagctgcgggatagcaagagcagcgacaagagcgtgtgtctgttcaccgacttcgacagccagaccaacgtgtcccagagcaaggactccgacgtgtacatcaccgataagtgcgtgctggacatgcggagcatggacttcaagagcaactccgccgtggcctggtccaacaagtccgatttcgcctgcgccaacgccttcaacaacagcattatccccgaggacacattcttcccaagccccgagagcagcgactccaccgaccacgtgaagcccaaagagacagagaacaccaagcagcccagcaagagctgccacaagcccaaggccatcgtgcacaccgagaaagtgaacatgatgagcctgaccgtgctgggcctgcggatgctgttcgccaaaaccgtggccgtgaacttcctgctgaccgccaagctgttcttcctcctcaccgcccgcgccaagagaagcggatctggcgtgaagcagaccctgaatttcgacctgctgaagctggctggcgacgtggaatccaacccaggccctactagtatggactggatttggcgcatccttttccttgtcggcgctgctaccggcgcgcattccgggccccagctccagctgcaagagtctggacctggcctggtcaagcctagcgagacactgagcctgacctgtaccgtgtccggcgatagcatcagcagcggcgattactactggggctggatcagacagcctcctggcaaaggactggaatggatcggccacatctactacagcggcgtgacctactacaaccccagcctgaagtccagagtgaccatcagcgtggacaccagccggaaccagttctccctgaagctgtctagcgtgacagccgccgataccgccgtgtactactgcaccagagaggacagcagcaactggcggagtagaggccagggaacactggtcacagttagctctggatccggcggaggcggaagtggaggcggaggatctggcggcggaggctctttcgaatctgtgctgacccagcctagctccgtgtctgctgctcctggacagaaagtgaccatctcctgtagcggcagcaccagcaacatcggcaacaactacgtgtcctggtatcagcagcaccccggcaaggcccctaagctgatgatctacgacgtgtccaagaggcccagcggcgtgccagatagattttccggcagcaagagcggcaacagcgccagcctggatattagcggactccagtctgaggacgaggccgactactattgcgccgcctgggatgatagcctgagcgagtttctgtttggcaccggcaccaagctgacagtgcttggaacgcgtgaggacctgaagaacgtgttcccacctgaggtggccgtgttcgagcctagcgaggccgagatcagccacacccagaaagccaccctcgtgtgcctggctaccggcttctaccccgaccatgtggaactgtcttggtgggtcaacggcaaagaggtgcacagcggcgtgtgtaccgacccccagccactgaaagaacagcccgccctgaacgacagccggtactgcctgagcagcagactgagagtgtccgccaccttctggcagaacccccggaaccacttcagatgccaggtgcagttctacggcctgagcgagaacgacgagtggacccaggacagagccaagcccgtgacccagatcgtgtctgccgaagcctggggcagagccgatgatgtgattaagatccactggcaggaaaagaagtccaacaccatcctgggcagccaggaaggcaacaccatgaagaccaacgacacctacatgaagttcagctggctgaccgtgcccgagaagtccctggacaaagaacacagatgcatcgtgcggcacgaaaacaacaagaacggcgtggaccaggaaatcatcttcccacccatcaagaccgatgtgattacaatggaccccaaggacaactgctccaaggacgccaacgataccctgctgctccagctgaccaacaccagcgcctactacatgtacttgttgctgctgctgaagtccgtggtgtacttcgccatcatcacatgctgcctgctgatggctatggtcaagcggaaggacagccgggga

SEQ ID NO: 6959 - DNA, 3012 bp, synthetic construct
  source 1..3012: mol_type = other DNA
atggccttaccagtgaccgccttgctcctgccgctggccttgctgctccacgccgccaggccggaagtgcagctggttgaatctggcggaggactggttcagcctggcggatctctgagactgtcttgtgccgccagcggcttcagcttcagcgacttttggatgagctgggtccgacaggcccctggcaaaggacttgaatgggtcgccacaatcagccaggccggcagcgagaaggactacgtggactctgtgaagggcagattcaccatcagccgggacaacgccaagaagtccctgtacctccagatgaacagcctgagagccgaggacaccgccgtgtactattgtgcctctggcgtgtacagcttcgactacagaggccagggcaccctggtcacagtctcttctggtaccggcggaggcggatctggcggcggaggtagcggtggcggaggatctgaattcgacgtggtcatgacacagagcccttctagcctgtctgccagcgtgggcgacagagtgacaatcacctgtcagagcagcctggacatcagccactacctgaactggtatcagcagaagcccggcaaggcccctaagctgctgatctacgacgccagcaatctggaaaccggcgtgcccagcagattttctggcagcggaagcggcacccacttcaccttcacaatatccagcctccagcctgaggacttcgccacctactactgccagcagtacgacaacctgcctctgacctttggcggaggcaccaagctggaaatcaagagactcgagatccagaaccctgatcctgccgtgtaccagctgcgggatagcaagagcagcgacaagagcgtgtgtctgttcaccgacttcgacagccagaccaacgtgtcccagagcaaggactccgacgtgtacatcaccgataagtgcgtgctggacatgcggagcatggacttcaagagcaactccgccgtggcctggtccaacaagtccgatttcgcctgcgccaacgccttcaacaacagcattatccccgaggacacattcttcccaagccccgagagcagcgactccaccgaccacgtgaagcccaaagagacagagaacaccaagcagcccagcaagagctgccacaagcccaaggccatcgtgcacaccgagaaagtgaacatgatgagcctgaccgtgctgggcctgcggatgctgttcgccaaaaccgtggccgtgaacttcctgctgaccgccaagctgttcttcctcctcaccgcccgcgccaagagaagcggatctggcgtgaagcagaccctgaatttcgacctgctgaagctggctggcgacgtggaatccaacccaggccctactagtatggactggatttggcgcatccttttccttgtcggcgctgctaccggcgcgcattccgggccccagctccagctgcaagagtctggacctggcctggtcaagcctagcgagacactgagcctgacctgtaccgtgtccggcgatagcatcagcagcggcgattactactggggctggatcagacagcctcctggcaaaggactggaatggatcggccacatctactacagcggcgtgacctactacaaccccagcctgaagtccagagtgaccatcagcgtggacaccagccggaaccagttctccctgaagctgtctagcgtgacagccgccgataccgccgtgtactactgcaccagagaggacagcagcaactggcggagtagaggccagggaacactggtcacagttagctctggatccggcggaggcggaagtggaggcggaggatctggcggcggaggctctttcgaacaagttcaactggttcaatcaggcggaggcgtggtgcaacctggtggctctctgagagtgtcttgtgctgcctctggcgtgaccctgagcgactatggaatgcactgggtccgacaggcccctggcaaaggacttgagtgggtcgccttcatcagaaacgacggcagcgacaagtattacgccgacagcgtgaagggcagattcaccatcagccgggacaacagcgagaaaaccgtgtctctccagatgtctagcctgagagccgaggacaccgccgtgtactactgtgccaagaatggcgagagcggccctctggactactggtatctggatctgtggggcagaggcaccctggtcacagtctcttctacgcgtgaggacctgaagaacgtgttcccacctgaggtggccgtgttcgagcctagcgaggccgagatcagccacacccagaaagccaccctcgtgtgcctggctaccggcttctaccccgaccatgtggaactgtcttggtgggtcaacggcaaagaggtgcacagcggcgtgtgtaccgacccccagccactgaaagaacagcccgccctgaacgacagccggtactgcctgagcagcagactgagagtgtccgccaccttctggcagaacccccggaaccacttcagatgccaggtgcagttctacggcctgagcgagaacgacgagtggacccaggacagagccaagcccgtgacccagatcgtgtctgccgaagcctggggcagagccgatgatgtgattaagatccactggcaggaaaagaagtccaacaccatcctgggcagccaggaaggcaacaccatgaagaccaacgacacctacatgaagttcagctggctgaccgtgcccgagaagtccctggacaaagaacacagatgcatcgtgcggcacgaaaacaacaagaacggcgtggaccaggaaatcatcttcccacccatcaagaccgatgtgattacaatggaccccaaggacaactgctccaaggacgccaacgataccctgctgctccagctgaccaacaccagcgcctactacatgtacttgttgctgctgctgaagtccgtggtgtacttcgccatcatcacatgctgcctgctgatggctatggtcaagcggaaggacagccgggga

SEQ ID NO: 6960 - DNA, 3024 bp, synthetic construct
  source 1..3024: mol_type = other DNA
atggccttaccagtgaccgccttgctcctgccgctggccttgctgctccacgccgccaggccggaagtgcagctggttgaatctggcggaggactggttcagcctggcggatctctgagactgtcttgtgccgccagcggcttcagcttcagcgacttttggatgagctgggtccgacaggcccctggcaaaggacttgaatgggtcgccacaatcagccaggccggcagcgagaaggactacgtggactctgtgaagggcagattcaccatcagccgggacaacgccaagaagtccctgtacctccagatgaacagcctgagagccgaggacaccgccgtgtactattgtgcctctggcgtgtacagcttcgactacagaggccagggcaccctggtcacagtctcttctggtaccggcggaggcggatctggcggcggaggtagcggtggcggaggatctgaattcagctacgagctgacacagcctccatccgtgtctggcacacctggacagagagtggctatctcctgtagcggcagcagcagcaacatcggcaccagaatggtcacctggtatcagcacgtgccaggcacagcccctaagctgctgatcttcaacaacaaccagcggcctagcggcgtgcccgatagattttctgccagcaagagcggcacaagcgccagcctggctatcatcggactccagtctgacgacgaggccgactactactgtgccacctgggacgacaacgtgaagtcctacgtgttcggcaccggcaccaaagtgacagtgcttggaagtagactcgagatccagaaccctgatcctgccgtgtaccagctgcgggatagcaagagcagcgacaagagcgtgtgtctgttcaccgacttcgacagccagaccaacgtgtcccagagcaaggactccgacgtgtacatcaccgataagtgcgtgctggacatgcggagcatggacttcaagagcaactccgccgtggcctggtccaacaagtccgatttcgcctgcgccaacgccttcaacaacagcattatccccgaggacacattcttcccaagccccgagagcagcgactccaccgaccacgtgaagcccaaagagacagagaacaccaagcagcccagcaagagctgccacaagcccaaggccatcgtgcacaccgagaaagtgaacatgatgagcctgaccgtgctgggcctgcggatgctgttcgccaaaaccgtggccgtgaacttcctgctgaccgccaagctgttcttcctcctcaccgcccgcgccaagagaagcggatctggcgtgaagcagaccctgaatttcgacctgctgaagctggctggcgacgtggaatccaacccaggccctactagtatggactggatttggcgcatccttttccttgtcggcgctgctaccggcgcgcattccgggccccagctccagctgcaagagtctggacctggcctggtcaagcctagcgagacactgagcctgacctgtaccgtgtccggcgatagcatcagcagcggcgattactactggggctggatcagacagcctcctggcaaaggactggaatggatcggccacatctactacagcggcgtgacctactacaaccccagcctgaagtccagagtgaccatcagcgtggacaccagccggaaccagttctccctgaagctgtctagcgtgacagccgccgataccgccgtgtactactgcaccagagaggacagcagcaactggcggagtagaggccagggaacactggtcacagttagctctggatccggcggaggcggaagtggaggcggaggatctggcggcggaggctctttcgaacttgaaatggcccaggttcagctccagcagtggggagctggactgctgaagcctagcgagacactgagcctgacctgtgctgtgtacggcggcagcttcagcggctactactggtcctggatcagacagcctcctggcaaaggactggaatggatcggcgagatcaaccacagcggctccaccaactacaaccccagcctgaagtccagagtgaccatcagcgtggacaccagcaagaaccagttctccctgaagctgagcagcgtgacagccgctgataccgccgtgtactattgcgctagagcccctcagtcttggtacgtgggagatgtgtggggccagggcacactggttacagtgtcatctacgcgtgaggacctgaagaacgtgttcccacctgaggtggccgtgttcgagcctagcgaggccgagatcagccacacccagaaagccaccctcgtgtgcctggctaccggcttctaccccgaccatgtggaactgtcttggtgggtcaacggcaaagaggtgcacagcggcgtgtgtaccgacccccagccactgaaagaacagcccgccctgaacgacagccggtactgcctgagcagcagactgagagtgtccgccaccttctggcagaacccccggaaccacttcagatgccaggtgcagttctacggcctgagcgagaacgacgagtggacccaggacagagccaagcccgtgacccagatcgtgtctgccgaagcctggggcagagccgatgatgtgattaagatccactggcaggaaaagaagtccaacaccatcctgggcagccaggaaggcaacaccatgaagaccaacgacacctacatgaagttcagctggctgaccgtgcccgagaagtccctggacaaagaacacagatgcatcgtgcggcacgaaaacaacaagaacggcgtggaccaggaaatcatcttcccacccatcaagaccgatgtgattacaatggaccccaaggacaactgctccaaggacgccaacgataccctgctgctccagctgaccaacaccagcgcctactacatgtacttgttgctgctgctgaagtccgtggtgtacttcgccatcatcacatgctgcctgctgatggctatggtcaagcggaaggacagccgggga

SEQ ID NO: 6961 - DNA, 3015 bp, synthetic construct
  source 1..3015: mol_type = other DNA
atggccttaccagtgaccgccttgctcctgccgctggccttgctgctccacgccgccaggccggaagtgcagctggttgaatctggcggaggactggttcagcctggcggatctctgagactgtcttgtgccgccagcggcttcagcttcagcgacttttggatgagctgggtccgacaggcccctggcaaaggacttgaatgggtcgccacaatcagccaggccggcagcgagaaggactacgtggactctgtgaagggcagattcaccatcagccgggacaacgccaagaagtccctgtacctccagatgaacagcctgagagccgaggacaccgccgtgtactattgtgcctctggcgtgtacagcttcgactacagaggccagggcaccctggtcacagtctcttctggtaccggcggaggcggatctggcggcggaggtagcggtggcggaggatctgaattccagtctgtgctgacacagcctcctagcctgtctgtggcccctggaaagacagccagcatcacatgcggcggcaacaacatcggcatgaagtccgtgcactggtatcagcagaggccaggacaggctcctgtgctggtcatctactacgacagcgacagaccctctggcatccccggcagattttccggcagcaactctggcaataccgccacactgaccatctccagagtggaagctggcgacgaggccgactactactgccaagtgtgggataccaccggcgatcaccctggctatgtgtttggcaccggcaccaaagtgacagtgcttctcgagatccagaaccctgatcctgccgtgtaccagctgcgggatagcaagagcagcgacaagagcgtgtgtctgttcaccgacttcgacagccagaccaacgtgtcccagagcaaggactccgacgtgtacatcaccgataagtgcgtgctggacatgcggagcatggacttcaagagcaactccgccgtggcctggtccaacaagtccgatttcgcctgcgccaacgccttcaacaacagcattatccccgaggacacattcttcccaagccccgagagcagcgactccaccgaccacgtgaagcccaaagagacagagaacaccaagcagcccagcaagagctgccacaagcccaaggccatcgtgcacaccgagaaagtgaacatgatgagcctgaccgtgctgggcctgcggatgctgttcgccaaaaccgtggccgtgaacttcctgctgaccgccaagctgttcttcctcctcaccgcccgcgccaagagaagcggatctggcgtgaagcagaccctgaatttcgacctgctgaagctggctggcgacgtggaatccaacccaggccctactagtatggactggatttggcgcatccttttccttgtcggcgctgctaccggcgcgcattccgggccccagctccagctgcaagagtctggacctggcctggtcaagcctagcgagacactgagcctgacctgtaccgtgtccggcgatagcatcagcagcggcgattactactggggctggatcagacagcctcctggcaaaggactggaatggatcggccacatctactacagcggcgtgacctactacaaccccagcctgaagtccagagtgaccatcagcgtggacaccagccggaaccagttctccctgaagctgtctagcgtgacagccgccgataccgccgtgtactactgcaccagagaggacagcagcaactggcggagtagaggccagggaacactggtcacagttagctctggatccggcggaggcggaagtggaggcggaggatctggcggcggaggctctttcgaacaagttcaactggttcagagcggagccgaagtgaagaaacctggcagcagcgtgaaggtgtcctgcaaagcaagcggcggcacctttagcagctacgccatctcttgggtccgacaggcacctggacaaggactggaatggatgggcggcatcatccccatcttcggcacagccaattacgcccagaaattccagggcagagtgaccatcaccgccgacgagtctacaagcaccgcctacatggaactgagcagcctgagaagcgaggacaccgccgtgtactattgtgccagaggcgtgtacggctacagcggctctgccccttatgatgagtggggccagggaaccctggtcaccgtttcttctacgcgtgaggacctgaagaacgtgttcccacctgaggtggccgtgttcgagcctagcgaggccgagatcagccacacccagaaagccaccctcgtgtgcctggctaccggcttctaccccgaccatgtggaactgtcttggtgggtcaacggcaaagaggtgcacagcggcgtgtgtaccgacccccagccactgaaagaacagcccgccctgaacgacagccggtactgcctgagcagcagactgagagtgtccgccaccttctggcagaacccccggaaccacttcagatgccaggtgcagttctacggcctgagcgagaacgacgagtggacccaggacagagccaagcccgtgacccagatcgtgtctgccgaagcctggggcagagccgatgatgtgattaagatccactggcaggaaaagaagtccaacaccatcctgggcagccaggaaggcaacaccatgaagaccaacgacacctacatgaagttcagctggctgaccgtgcccgagaagtccctggacaaagaacacagatgcatcgtgcggcacgaaaacaacaagaacggcgtggaccaggaaatcatcttcccacccatcaagaccgatgtgattacaatggaccccaaggacaactgctccaaggacgccaacgataccctgctgctccagctgaccaacaccagcgcctactacatgtacttgttgctgctgctgaagtccgtggtgtacttcgccatcatcacatgctgcctgctgatggctatggtcaagcggaaggacagccgggga

SEQ ID NO: 6962 - DNA, 3009 bp, synthetic construct
  source 1..3009: mol_type = other DNA
atggccttaccagtgaccgccttgctcctgccgctggccttgctgctccacgccgccaggccggaagtgcagctggttgaatctggcggaggactggttcagcctggcggatctctgagactgtcttgtgccgccagcggcttcagcttcagcgacttttggatgagctgggtccgacaggcccctggcaaaggacttgaatgggtcgccacaatcagccaggccggcagcgagaaggactacgtggactctgtgaagggcagattcaccatcagccgggacaacgccaagaagtccctgtacctccagatgaacagcctgagagccgaggacaccgccgtgtactattgtgcctctggcgtgtacagcttcgactacagaggccagggcaccctggtcacagtctcttctggtaccggcggaggcggatctggcggcggaggtagcggtggcggaggatctgaattcgaggtgcaactggttgagtctggcggaggactggtgcagcctggaagaagcctgagactgtcttgtgccgccagcggcttcaccttcgacgattatgccatgcactgggtccgacaggcccctggcaaaggacttgaatgggtgtccggcatctcctggaacagcggctctatcggctacgccgattccgtgaagggcagattcaccatcagccgggacaacgccaagaacagcctgtacctccagatgaactccctgagagccgaggacacagccctgtactactgcgccaaagacaaaggcggaggctactacgacttttggagcggcagcgattattggggccagggcacactggtcacagtgtctagcctcgagatccagaaccctgatcctgccgtgtaccagctgcgggatagcaagagcagcgacaagagcgtgtgtctgttcaccgacttcgacagccagaccaacgtgtcccagagcaaggactccgacgtgtacatcaccgataagtgcgtgctggacatgcggagcatggacttcaagagcaactccgccgtggcctggtccaacaagtccgatttcgcctgcgccaacgccttcaacaacagcattatccccgaggacacattcttcccaagccccgagagcagcgactccaccgaccacgtgaagcccaaagagacagagaacaccaagcagcccagcaagagctgccacaagcccaaggccatcgtgcacaccgagaaagtgaacatgatgagcctgaccgtgctgggcctgcggatgctgttcgccaaaaccgtggccgtgaacttcctgctgaccgccaagctgttcttcctcctcaccgcccgcgccaagagaagcggatctggcgtgaagcagaccctgaatttcgacctgctgaagctggctggcgacgtggaatccaacccaggccctactagtatggactggatttggcgcatccttttccttgtcggcgctgctaccggcgcgcattccgggccccagctccagctgcaagagtctggacctggcctggtcaagcctagcgagacactgagcctgacctgtaccgtgtccggcgatagcatcagcagcggcgattactactggggctggatcagacagcctcctggcaaaggactggaatggatcggccacatctactacagcggcgtgacctactacaaccccagcctgaagtccagagtgaccatcagcgtggacaccagccggaaccagttctccctgaagctgtctagcgtgacagccgccgataccgccgtgtactactgcaccagagaggacagcagcaactggcggagtagaggccagggaacactggtcacagttagctctggatccggcggaggcggaagtggaggcggaggatctggcggcggaggctctttcgaatcttctgagctgacacaggaccctgccgtgtctgttgctctgggccagacagtgcggattacctgtcagggcgatagcctgagaagctactacgcctcctggtatcagcagaagccaggccaggctcctgtgctggtcatctacggcaagaacaacagacccagcggcatccccgatagattcagcggaagcagctctggcaataccgccagcctgacaattactggcgctcaggccgaggacgaggccgactactactgcaacagcagagatagcagcggctgggttttcggcggaggcacaaaactgacagtgctgacgcgtgaggacctgaagaacgtgttcccacctgaggtggccgtgttcgagcctagcgaggccgagatcagccacacccagaaagccaccctcgtgtgcctggctaccggcttctaccccgaccatgtggaactgtcttggtgggtcaacggcaaagaggtgcacagcggcgtgtgtaccgacccccagccactgaaagaacagcccgccctgaacgacagccggtactgcctgagcagcagactgagagtgtccgccaccttctggcagaacccccggaaccacttcagatgccaggtgcagttctacggcctgagcgagaacgacgagtggacccaggacagagccaagcccgtgacccagatcgtgtctgccgaagcctggggcagagccgatgatgtgattaagatccactggcaggaaaagaagtccaacaccatcctgggcagccaggaaggcaacaccatgaagaccaacgacacctacatgaagttcagctggctgaccgtgcccgagaagtccctggacaaagaacacagatgcatcgtgcggcacgaaaacaacaagaacggcgtggaccaggaaatcatcttcccacccatcaagaccgatgtgattacaatggaccccaaggacaactgctccaaggacgccaacgataccctgctgctccagctgaccaacaccagcgcctactacatgtacttgttgctgctgctgaagtccgtggtgtacttcgccatcatcacatgctgcctgctgatggctatggtcaagcggaaggacagccgggga

SEQ ID NO: 6963 - DNA, 3036 bp, synthetic construct
  source 1..3036: mol_type = other DNA
atggccttaccagtgaccgccttgctcctgccgctggccttgctgctccacgccgccaggccggaagtgcagctggttgaatctggcggaggactggttcagcctggcggatctctgagactgtcttgtgccgccagcggcttcagcttcagcgacttttggatgagctgggtccgacaggcccctggcaaaggacttgaatgggtcgccacaatcagccaggccggcagcgagaaggactacgtggactctgtgaagggcagattcaccatcagccgggacaacgccaagaagtccctgtacctccagatgaacagcctgagagccgaggacaccgccgtgtactattgtgcctctggcgtgtacagcttcgactacagaggccagggcaccctggtcacagtctcttctggtaccggcggaggcggatctggcggcggaggtagcggtggcggaggatctgaattcgaagtgcagctccagcagtctggacctggcctggttaagcctagccagacactgagcctgacctgtgccatcagcggcgatagcgtgctgagcaacagcgacacctggaactggatcagacagagccctagcagaggactggaatggctgggcagaacctaccacagaagcacttggtacgacgactacgccagctctgtgcggggcagagtgtccatcaatgtggacaccagcaagaaccagtacagcctgcaactgaacgccgtgacacctgaggataccggcgtgtactactgcgccagagacagactccaggacggcaactcttggagcgacgcctttgatgtgtggggccagggcacaatggtcaccgtttctagcctcgagatccagaaccctgatcctgccgtgtaccagctgcgggatagcaagagcagcgacaagagcgtgtgtctgttcaccgacttcgacagccagaccaacgtgtcccagagcaaggactccgacgtgtacatcaccgataagtgcgtgctggacatgcggagcatggacttcaagagcaactccgccgtggcctggtccaacaagtccgatttcgcctgcgccaacgccttcaacaacagcattatccccgaggacacattcttcccaagccccgagagcagcgactccaccgaccacgtgaagcccaaagagacagagaacaccaagcagcccagcaagagctgccacaagcccaaggccatcgtgcacaccgagaaagtgaacatgatgagcctgaccgtgctgggcctgcggatgctgttcgccaaaaccgtggccgtgaacttcctgctgaccgccaagctgttcttcctcctcaccgcccgcgccaagagaagcggatctggcgtgaagcagaccctgaatttcgacctgctgaagctggctggcgacgtggaatccaacccaggccctactagtatggactggatttggcgcatccttttccttgtcggcgctgctaccggcgcgcattccgggccccagctccagctgcaagagtctggacctggcctggtcaagcctagcgagacactgagcctgacctgtaccgtgtccggcgatagcatcagcagcggcgattactactggggctggatcagacagcctcctggcaaaggactggaatggatcggccacatctactacagcggcgtgacctactacaaccccagcctgaagtccagagtgaccatcagcgtggacaccagccggaaccagttctccctgaagctgtctagcgtgacagccgccgataccgccgtgtactactgcaccagagaggacagcagcaactggcggagtagaggccagggaacactggtcacagttagctctggatccggcggaggcggaagtggaggcggaggatctggcggcggaggctctttcgaacaatctgctctgacacagcctgccagcgtgtcaggatctcctggacagagcatcaccatctcttgcaccggcaccagctctgatgtcggcggctacaattacgtgtcctggtatcagcagcaccccggcaaggcccctaagctgatgatctacgacgtgtccaacagacccagcggcgtgtccaatagattctccggcagcaagagcggcaacaccgccagcctgacaatttctggactgcaagccgaggacgaggccgactactactgtagcagctacaccagcagcagcacactggtgtacgtgttcggcacaggcaccaaagtgaccgtgcttacgcgtgaggacctgaagaacgtgttcccacctgaggtggccgtgttcgagcctagcgaggccgagatcagccacacccagaaagccaccctcgtgtgcctggctaccggcttctaccccgaccatgtggaactgtcttggtgggtcaacggcaaagaggtgcacagcggcgtgtgtaccgacccccagccactgaaagaacagcccgccctgaacgacagccggtactgcctgagcagcagactgagagtgtccgccaccttctggcagaacccccggaaccacttcagatgccaggtgcagttctacggcctgagcgagaacgacgagtggacccaggacagagccaagcccgtgacccagatcgtgtctgccgaagcctggggcagagccgatgatgtgattaagatccactggcaggaaaagaagtccaacaccatcctgggcagccaggaaggcaacaccatgaagaccaacgacacctacatgaagttcagctggctgaccgtgcccgagaagtccctggacaaagaacacagatgcatcgtgcggcacgaaaacaacaagaacggcgtggaccaggaaatcatcttcccacccatcaagaccgatgtgattacaatggaccccaaggacaactgctccaaggacgccaacgataccctgctgctccagctgaccaacaccagcgcctactacatgtacttgttgctgctgctgaagtccgtggtgtacttcgccatcatcacatgctgcctgctgatggctatggtcaagcggaaggacagccgggga

SEQ ID NO: 6964 - DNA, 2970 bp, synthetic construct
  source 1..2970: mol_type = other DNA
atggccttaccagtgaccgccttgctcctgccgctggccttgctgctccacgccgccaggccggaagtgcagctggttgaatctggcggaggactggttcagcctggcggatctctgagactgtcttgtgccgccagcggcttcagcttcagcgacttttggatgagctgggtccgacaggcccctggcaaaggacttgaatgggtcgccacaatcagccaggccggcagcgagaaggactacgtggactctgtgaagggcagattcaccatcagccgggacaacgccaagaagtccctgtacctccagatgaacagcctgagagccgaggacaccgccgtgtactattgtgcctctggcgtgtacagcttcgactacagaggccagggcaccctggtcacagtctcttctggtaccggcggaggcggatctggcggcggaggtagcggtggcggaggatctgaattccaggtgcaactggttcagtctggggccgaagtgaagaaacctggggcctctgtgaaggtgtcctgcaaggcttccggctacacctttaccagctacgacatcaactgggtccgacaggccacaggccaaggactggaatggatgggctggatgaaccccaacagcggcaataccggctacgcccagaaattccagggcagagtgaccatgaccagaaacaccagcatcagcaccgcctacatggaactgagcagcctgagaagcgaggacaccgccgtgtactattgcgccagaggcgacagcaccaaggtggaaatcaaactcgagatccagaaccctgatcctgccgtgtaccagctgcgggatagcaagagcagcgacaagagcgtgtgtctgttcaccgacttcgacagccagaccaacgtgtcccagagcaaggactccgacgtgtacatcaccgataagtgcgtgctggacatgcggagcatggacttcaagagcaactccgccgtggcctggtccaacaagtccgatttcgcctgcgccaacgccttcaacaacagcattatccccgaggacacattcttcccaagccccgagagcagcgactccaccgaccacgtgaagcccaaagagacagagaacaccaagcagcccagcaagagctgccacaagcccaaggccatcgtgcacaccgagaaagtgaacatgatgagcctgaccgtgctgggcctgcggatgctgttcgccaaaaccgtggccgtgaacttcctgctgaccgccaagctgttcttcctcctcaccgcccgcgccaagagaagcggatctggcgtgaagcagaccctgaatttcgacctgctgaagctggctggcgacgtggaatccaacccaggccctactagtatggactggatttggcgcatccttttccttgtcggcgctgctaccggcgcgcattccgggccccagctccagctgcaagagtctggacctggcctggtcaagcctagcgagacactgagcctgacctgtaccgtgtccggcgatagcatcagcagcggcgattactactggggctggatcagacagcctcctggcaaaggactggaatggatcggccacatctactacagcggcgtgacctactacaaccccagcctgaagtccagagtgaccatcagcgtggacaccagccggaaccagttctccctgaagctgtctagcgtgacagccgccgataccgccgtgtactactgcaccagagaggacagcagcaactggcggagtagaggccagggaacactggtcacagttagctctggatccggcggaggcggaagtggaggcggaggatctggcggcggaggctctttcgaacaatctgtgctgacccagcctagatccgtgtctggctctcctggacagagcgtgaccatctcttgtaccggcaccagctctgatgtcggcggctacaattacgtgtcctggtatcagcagcaccccggcgaagcccctaagctgattatctacgacgccgacaagcggcccagcggcatcagcaatagattcagctctggcaagagcggcaacaccgccagcctgacaatcagcggactccaggtggaagatgaggccgactactactgctgctcctatgccggcggaagcacctgggttttcggaggcggtacaaaagtgaccgtgctgacgcgtgaggacctgaagaacgtgttcccacctgaggtggccgtgttcgagcctagcgaggccgagatcagccacacccagaaagccaccctcgtgtgcctggctaccggcttctaccccgaccatgtggaactgtcttggtgggtcaacggcaaagaggtgcacagcggcgtgtgtaccgacccccagccactgaaagaacagcccgccctgaacgacagccggtactgcctgagcagcagactgagagtgtccgccaccttctggcagaacccccggaaccacttcagatgccaggtgcagttctacggcctgagcgagaacgacgagtggacccaggacagagccaagcccgtgacccagatcgtgtctgccgaagcctggggcagagccgatgatgtgattaagatccactggcaggaaaagaagtccaacaccatcctgggcagccaggaaggcaacaccatgaagaccaacgacacctacatgaagttcagctggctgaccgtgcccgagaagtccctggacaaagaacacagatgcatcgtgcggcacgaaaacaacaagaacggcgtggaccaggaaatcatcttcccacccatcaagaccgatgtgattacaatggaccccaaggacaactgctccaaggacgccaacgataccctgctgctccagctgaccaacaccagcgcctactacatgtacttgttgctgctgctgaagtccgtggtgtacttcgccatcatcacatgctgcctgctgatggctatggtcaagcggaaggacagccgggga

SEQ ID NO: 6965 - DNA, 3036 bp, synthetic construct
  source 1..3036: mol_type = other DNA
atggccttaccagtgaccgccttgctcctgccgctggccttgctgctccacgccgccaggccggaagtgcagctggttgaatctggcggaggactggttcagcctggcggatctctgagactgtcttgtgccgccagcggcttcagcttcagcgacttttggatgagctgggtccgacaggcccctggcaaaggacttgaatgggtcgccacaatcagccaggccggcagcgagaaggactacgtggactctgtgaagggcagattcaccatcagccgggacaacgccaagaagtccctgtacctccagatgaacagcctgagagccgaggacaccgccgtgtactattgtgcctctggcgtgtacagcttcgactacagaggccagggcaccctggtcacagtctcttctggtaccggcggaggcggatctggcggcggaggtagcggtggcggaggatctgaattcgaagtgcagctccagcagtctggacctggcctggttaagcctagccagacactgagcctgacctgtgccatcagcggcgatagcgtgtcctctaatagcgccgcctggaactggatcagacagagccctagcagaggactggaatggctgggcagaacctactaccgcagcaagtggtacagcgactacgccgtgtccgtgaagtcccggatcaccatcaatcccgacaccagcaagaaccagttcagcctgcaactgaacagcgtgacccctgaggataccgccgtgtactactgcgccagagatccctacgacttttggagcggctaccccgacgcctttgacatctggggacagggcacaatggtcaccgtttctagcctcgagatccagaaccctgatcctgccgtgtaccagctgcgggatagcaagagcagcgacaagagcgtgtgtctgttcaccgacttcgacagccagaccaacgtgtcccagagcaaggactccgacgtgtacatcaccgataagtgcgtgctggacatgcggagcatggacttcaagagcaactccgccgtggcctggtccaacaagtccgatttcgcctgcgccaacgccttcaacaacagcattatccccgaggacacattcttcccaagccccgagagcagcgactccaccgaccacgtgaagcccaaagagacagagaacaccaagcagcccagcaagagctgccacaagcccaaggccatcgtgcacaccgagaaagtgaacatgatgagcctgaccgtgctgggcctgcggatgctgttcgccaaaaccgtggccgtgaacttcctgctgaccgccaagctgttcttcctcctcaccgcccgcgccaagagaagcggatctggcgtgaagcagaccctgaatttcgacctgctgaagctggctggcgacgtggaatccaacccaggccctactagtatggactggatttggcgcatccttttccttgtcggcgctgctaccggcgcgcattccgggccccagctccagctgcaagagtctggacctggcctggtcaagcctagcgagacactgagcctgacctgtaccgtgtccggcgatagcatcagcagcggcgattactactggggctggatcagacagcctcctggcaaaggactggaatggatcggccacatctactacagcggcgtgacctactacaaccccagcctgaagtccagagtgaccatcagcgtggacaccagccggaaccagttctccctgaagctgtctagcgtgacagccgccgataccgccgtgtactactgcaccagagaggacagcagcaactggcggagtagaggccagggaacactggtcacagttagctctggatccggcggaggcggaagtggaggcggaggatctggcggcggaggctctttcgaacaatctgctctgacacagcctgccagcgtgtcaggatctcctggacagagcatcaccatctcttgcaccggcaccagctctgatgtcggcggctacaattacgtgtcctggtatcagcagcaccccggcaaggcccctaaagtgattatcagcgaagtgaacaacagacccagcggcgtgtcccacagattcagcggctctaagtctggcaacaccgccagcctgacaatctctggactgcaagccgaggacgaggccgactacttctgtagcagctacaccagcggcagaaccctgtacgtgttcggcacaggcagcaaagtgacagtgctgggaacgcgtgaggacctgaagaacgtgttcccacctgaggtggccgtgttcgagcctagcgaggccgagatcagccacacccagaaagccaccctcgtgtgcctggctaccggcttctaccccgaccatgtggaactgtcttggtgggtcaacggcaaagaggtgcacagcggcgtgtgtaccgacccccagccactgaaagaacagcccgccctgaacgacagccggtactgcctgagcagcagactgagagtgtccgccaccttctggcagaacccccggaaccacttcagatgccaggtgcagttctacggcctgagcgagaacgacgagtggacccaggacagagccaagcccgtgacccagatcgtgtctgccgaagcctggggcagagccgatgatgtgattaagatccactggcaggaaaagaagtccaacaccatcctgggcagccaggaaggcaacaccatgaagaccaacgacacctacatgaagttcagctggctgaccgtgcccgagaagtccctggacaaagaacacagatgcatcgtgcggcacgaaaacaacaagaacggcgtggaccaggaaatcatcttcccacccatcaagaccgatgtgattacaatggaccccaaggacaactgctccaaggacgccaacgataccctgctgctccagctgaccaacaccagcgcctactacatgtacttgttgctgctgctgaagtccgtggtgtacttcgccatcatcacatgctgcctgctgatggctatggtcaagcggaaggacagccgggga

SEQ ID NO: 6966 - DNA, 3033 bp, synthetic construct
  source 1..3033: mol_type = other DNA
atggccttaccagtgaccgccttgctcctgccgctggccttgctgctccacgccgccaggccggaagtgcagctggttgaatctggcggaggactggttcagcctggcggatctctgagactgtcttgtgccgccagcggcttcagcttcagcgacttttggatgagctgggtccgacaggcccctggcaaaggacttgaatgggtcgccacaatcagccaggccggcagcgagaaggactacgtggactctgtgaagggcagattcaccatcagccgggacaacgccaagaagtccctgtacctccagatgaacagcctgagagccgaggacaccgccgtgtactattgtgcctctggcgtgtacagcttcgactacagaggccagggcaccctggtcacagtctcttctggtaccggcggaggcggatctggcggcggaggtagcggtggcggaggatctgaattccaatctgctctgacacagcctgccagcgcctctggatctcctggacagagcgtgaccatctcctgtaccggcacctcttctgatgtcggcggctacaactacgtgtcctggtatcagcagcaccccggcaaggcccctaagctgatgatctacgacgtgtccaacagacccagcggcgtgtccaatagattctccggcagcaagagcggcaacaccgccagcctgacaatttctggactgcaagccgaggacgaggccgactactactgtagcagctacaccagcagcagcacactgtacgtgttcggcacaggcacccagctcacagttcttctcgagatccagaaccctgatcctgccgtgtaccagctgcgggatagcaagagcagcgacaagagcgtgtgtctgttcaccgacttcgacagccagaccaacgtgtcccagagcaaggactccgacgtgtacatcaccgataagtgcgtgctggacatgcggagcatggacttcaagagcaactccgccgtggcctggtccaacaagtccgatttcgcctgcgccaacgccttcaacaacagcattatccccgaggacacattcttcccaagccccgagagcagcgactccaccgaccacgtgaagcccaaagagacagagaacaccaagcagcccagcaagagctgccacaagcccaaggccatcgtgcacaccgagaaagtgaacatgatgagcctgaccgtgctgggcctgcggatgctgttcgccaaaaccgtggccgtgaacttcctgctgaccgccaagctgttcttcctcctcaccgcccgcgccaagagaagcggatctggcgtgaagcagaccctgaatttcgacctgctgaagctggctggcgacgtggaatccaacccaggccctactagtatggactggatttggcgcatccttttccttgtcggcgctgctaccggcgcgcattccgggccccagctccagctgcaagagtctggacctggcctggtcaagcctagcgagacactgagcctgacctgtaccgtgtccggcgatagcatcagcagcggcgattactactggggctggatcagacagcctcctggcaaaggactggaatggatcggccacatctactacagcggcgtgacctactacaaccccagcctgaagtccagagtgaccatcagcgtggacaccagccggaaccagttctccctgaagctgtctagcgtgacagccgccgataccgccgtgtactactgcaccagagaggacagcagcaactggcggagtagaggccagggaacactggtcacagttagctctggatccggcggaggcggaagtggaggcggaggatctggcggcggaggctctttcgaagaagtgcagctccagcagtctggacctggcctggttaagcctagccagacactgagcctgacctgtgccatcagcggcgattccatgctgagcaacagcgacacctggaactggatcagacagagccccagcagaggcctggaatggctgggcagaacataccacagaagcacttggtacgacgactacgccagctctgtgcggggcagagtgtccatcaatgtggacaccagcaagaaccagtacagcctgcaactgaacgccgtgacacctgaggataccggcgtgtactactgtgccagagtgcggctccaggacggcaattcttggagcgacgcctttgatgtgtggggccagggcacaatggtcaccgtttctagcacgcgtgaggacctgaagaacgtgttcccacctgaggtggccgtgttcgagcctagcgaggccgagatcagccacacccagaaagccaccctcgtgtgcctggctaccggcttctaccccgaccatgtggaactgtcttggtgggtcaacggcaaagaggtgcacagcggcgtgtgtaccgacccccagccactgaaagaacagcccgccctgaacgacagccggtactgcctgagcagcagactgagagtgtccgccaccttctggcagaacccccggaaccacttcagatgccaggtgcagttctacggcctgagcgagaacgacgagtggacccaggacagagccaagcccgtgacccagatcgtgtctgccgaagcctggggcagagccgatgatgtgattaagatccactggcaggaaaagaagtccaacaccatcctgggcagccaggaaggcaacaccatgaagaccaacgacacctacatgaagttcagctggctgaccgtgcccgagaagtccctggacaaagaacacagatgcatcgtgcggcacgaaaacaacaagaacggcgtggaccaggaaatcatcttcccacccatcaagaccgatgtgattacaatggaccccaaggacaactgctccaaggacgccaacgataccctgctgctccagctgaccaacaccagcgcctactacatgtacttgttgctgctgctgaagtccgtggtgtacttcgccatcatcacatgctgcctgctgatggctatggtcaagcggaaggacagccgggga

SEQ ID NO: 6967 - DNA, 3033 bp, synthetic construct
  source 1..3033: mol_type = other DNA
atggccttaccagtgaccgccttgctcctgccgctggccttgctgctccacgccgccaggccggaagtgcagctggttgaatctggcggaggactggttcagcctggcggatctctgagactgtcttgtgccgccagcggcttcagcttcagcgacttttggatgagctgggtccgacaggcccctggcaaaggacttgaatgggtcgccacaatcagccaggccggcagcgagaaggactacgtggactctgtgaagggcagattcaccatcagccgggacaacgccaagaagtccctgtacctccagatgaacagcctgagagccgaggacaccgccgtgtactattgtgcctctggcgtgtacagcttcgactacagaggccagggcaccctggtcacagtctcttctggtaccggcggaggcggatctggcggcggaggtagcggtggcggaggatctgaattcgacgtgatgctgacccagacaccactgagcctgcctgtgtctctgggcgatcaggccagcatctcctgtagaagcagccagagcatcctgcacagcaccggcgatacctacctggaatggtatctccagaagcctggacagagccccaagctgctgattaacaaggtgtccaaccggctgagcggcgtgcccgatagattttctggcagcggctctggcaccgacttcaccctgaagatcagcagagtggaagccgaggacctgggcgtgtactactgcttccaaggcagccatgttccttggacctttggcggaggcaccaagctggaaatcaagagagctgacgccgctcctaccgtgtccatctttcctctcgagatccagaaccctgatcctgccgtgtaccagctgcgggatagcaagagcagcgacaagagcgtgtgtctgttcaccgacttcgacagccagaccaacgtgtcccagagcaaggactccgacgtgtacatcaccgataagtgcgtgctggacatgcggagcatggacttcaagagcaactccgccgtggcctggtccaacaagtccgatttcgcctgcgccaacgccttcaacaacagcattatccccgaggacacattcttcccaagccccgagagcagcgactccaccgaccacgtgaagcccaaagagacagagaacaccaagcagcccagcaagagctgccacaagcccaaggccatcgtgcacaccgagaaagtgaacatgatgagcctgaccgtgctgggcctgcggatgctgttcgccaaaaccgtggccgtgaacttcctgctgaccgccaagctgttcttcctcctcaccgcccgcgccaagagaagcggatctggcgtgaagcagaccctgaatttcgacctgctgaagctggctggcgacgtggaatccaacccaggccctactagtatggactggatttggcgcatccttttccttgtcggcgctgctaccggcgcgcattccgggccccagctccagctgcaagagtctggacctggcctggtcaagcctagcgagacactgagcctgacctgtaccgtgtccggcgatagcatcagcagcggcgattactactggggctggatcagacagcctcctggcaaaggactggaatggatcggccacatctactacagcggcgtgacctactacaaccccagcctgaagtccagagtgaccatcagcgtggacaccagccggaaccagttctccctgaagctgtctagcgtgacagccgccgataccgccgtgtactactgcaccagagaggacagcagcaactggcggagtagaggccagggaacactggtcacagttagctctggatccggcggaggcggaagtggaggcggaggatctggcggcggaggctctttcgaacaagtgaagctccagcagagcggccctagccttgtgaaacctggcgcttccgtgaagatgagctgcaaggccagcggctacaccttcaccgatttctacatgaaatgggtcaagcagagccacggcaagtctctggaatggatcggcgacatcaaccccaacatcggagacaccttctacaaccagaagttcaagggcaaagccacactgaccgtggacaagagcagcagcaccgcctacatgcagctcaacagcctgaccagcgaggacagcgccgtgtacttttgttccgtgggctacttcgacgtgtggggagccggaacaaccgtgacagtctcttctacgcgtgaggacctgaagaacgtgttcccacctgaggtggccgtgttcgagcctagcgaggccgagatcagccacacccagaaagccaccctcgtgtgcctggctaccggcttctaccccgaccatgtggaactgtcttggtgggtcaacggcaaagaggtgcacagcggcgtgtgtaccgacccccagccactgaaagaacagcccgccctgaacgacagccggtactgcctgagcagcagactgagagtgtccgccaccttctggcagaacccccggaaccacttcagatgccaggtgcagttctacggcctgagcgagaacgacgagtggacccaggacagagccaagcccgtgacccagatcgtgtctgccgaagcctggggcagagccgatgatgtgattaagatccactggcaggaaaagaagtccaacaccatcctgggcagccaggaaggcaacaccatgaagaccaacgacacctacatgaagttcagctggctgaccgtgcccgagaagtccctggacaaagaacacagatgcatcgtgcggcacgaaaacaacaagaacggcgtggaccaggaaatcatcttcccacccatcaagaccgatgtgattacaatggaccccaaggacaactgctccaaggacgccaacgataccctgctgctccagctgaccaacaccagcgcctactacatgtacttgttgctgctgctgaagtccgtggtgtacttcgccatcatcacatgctgcctgctgatggctatggtcaagcggaaggacagccgggga

SEQ ID NO: 6968 - DNA, 3021 bp, synthetic construct
  source 1..3021: mol_type = other DNA
atggccttaccagtgaccgccttgctcctgccgctggccttgctgctccacgccgccaggccggaagtgcagctggttgaatctggcggaggactggttcagcctggcggatctctgagactgtcttgtgccgccagcggcttcagcttcagcgacttttggatgagctgggtccgacaggcccctggcaaaggacttgaatgggtcgccacaatcagccaggccggcagcgagaaggactacgtggactctgtgaagggcagattcaccatcagccgggacaacgccaagaagtccctgtacctccagatgaacagcctgagagccgaggacaccgccgtgtactattgtgcctctggcgtgtacagcttcgactacagaggccagggcaccctggtcacagtctcttctggtaccggcggaggcggatctggcggcggaggtagcggtggcggaggatctgaattcgagatcgtgctgacacagtctcccgccacactgtcactgtctccaggcgaaagagccacactgagctgtagagccagccagagcgtgtccatctacctggcctggtatcagcagaagcctggacaggctccccggctgctgatctacgatgccagcaatagagccacaggcatccccgccagattttctggctctggcagcggcaccgatttcaccctgaccataagcagcctggaacctgaggacttcgccgtgtactactgccagcagagaagcaactggcctcctttcacattcggccctggcaccaaggtggacatcaaactcgagatccagaaccctgatcctgccgtgtaccagctgcgggatagcaagagcagcgacaagagcgtgtgtctgttcaccgacttcgacagccagaccaacgtgtcccagagcaaggactccgacgtgtacatcaccgataagtgcgtgctggacatgcggagcatggacttcaagagcaactccgccgtggcctggtccaacaagtccgatttcgcctgcgccaacgccttcaacaacagcattatccccgaggacacattcttcccaagccccgagagcagcgactccaccgaccacgtgaagcccaaagagacagagaacaccaagcagcccagcaagagctgccacaagcccaaggccatcgtgcacaccgagaaagtgaacatgatgagcctgaccgtgctgggcctgcggatgctgttcgccaaaaccgtggccgtgaacttcctgctgaccgccaagctgttcttcctcctcaccgcccgcgccaagagaagcggatctggcgtgaagcagaccctgaatttcgacctgctgaagctggctggcgacgtggaatccaacccaggccctactagtatggactggatttggcgcatccttttccttgtcggcgctgctaccggcgcgcattccgggccccagctccagctgcaagagtctggacctggcctggtcaagcctagcgagacactgagcctgacctgtaccgtgtccggcgatagcatcagcagcggcgattactactggggctggatcagacagcctcctggcaaaggactggaatggatcggccacatctactacagcggcgtgacctactacaaccccagcctgaagtccagagtgaccatcagcgtggacaccagccggaaccagttctccctgaagctgtctagcgtgacagccgccgataccgccgtgtactactgcaccagagaggacagcagcaactggcggagtagaggccagggaacactggtcacagttagctctggatccggcggaggcggaagtggaggcggaggatctggcggcggaggctctttcgaacaggtgcagcttgttgaaagcggaggcggagttgtgcagcctggcagaagtctgagactgtcttgtgccgccagcggcttcaccttcagcagctatggaatgcactgggtccgacaggcccctggcaaaggacttgaatgggttgccgtgatctgggacgacggcagcaacaagtattacgtggacagcgtgaagggcagattcaccatcagccgggacaacagcaagaacaccctgtacctccagatgaacagcctgagagccgaggacacagccgtgtattattgcgccagagatgactactacggcagcggctccttcaacagctactatggcacagacgtgtggggccagggcacaacagttaccgttagctctacgcgtgaggacctgaagaacgtgttcccacctgaggtggccgtgttcgagcctagcgaggccgagatcagccacacccagaaagccaccctcgtgtgcctggctaccggcttctaccccgaccatgtggaactgtcttggtgggtcaacggcaaagaggtgcacagcggcgtgtgtaccgacccccagccactgaaagaacagcccgccctgaacgacagccggtactgcctgagcagcagactgagagtgtccgccaccttctggcagaacccccggaaccacttcagatgccaggtgcagttctacggcctgagcgagaacgacgagtggacccaggacagagccaagcccgtgacccagatcgtgtctgccgaagcctggggcagagccgatgatgtgattaagatccactggcaggaaaagaagtccaacaccatcctgggcagccaggaaggcaacaccatgaagaccaacgacacctacatgaagttcagctggctgaccgtgcccgagaagtccctggacaaagaacacagatgcatcgtgcggcacgaaaacaacaagaacggcgtggaccaggaaatcatcttcccacccatcaagaccgatgtgattacaatggaccccaaggacaactgctccaaggacgccaacgataccctgctgctccagctgaccaacaccagcgcctactacatgtacttgttgctgctgctgaagtccgtggtgtacttcgccatcatcacatgctgcctgctgatggctatggtcaagcggaaggacagccgggga

SEQ ID NO: 6969 - DNA, 2976 bp, synthetic construct
  source 1..2976: mol_type = other DNA
atggccttaccagtgaccgccttgctcctgccgctggccttgctgctccacgccgccaggccggaagtgcagctggttgaatctggcggaggactggttcagcctggcggatctctgagactgtcttgtgccgccagcggcttcagcttcagcgacttttggatgagctgggtccgacaggcccctggcaaaggacttgaatgggtcgccacaatcagccaggccggcagcgagaaggactacgtggactctgtgaagggcagattcaccatcagccgggacaacgccaagaagtccctgtacctccagatgaacagcctgagagccgaggacaccgccgtgtactattgtgcctctggcgtgtacagcttcgactacagaggccagggcaccctggtcacagtctcttctggtaccggcggaggcggatctggcggcggaggtagcggtggcggaggatctgaattcgacatccagatgacacagagccctagcagcctgtctgccagcgtgggagacagagtgaccatcacctgtagagccagccagggcatctcttcttggctggcctggtatcagcagaagcccgagaaggcccctaagagcctgatctatgccgccagctctctccagagcggagtgcctagcagattttctggcagcggctccggcaccgatttcaccctgacaatatccagcctccagcctgaggacttcgccacctactactgccagcagtacaacagctacccctacaccttcggccagggcaccaagctggaaatcaaactcgagatccagaaccctgatcctgccgtgtaccagctgcgggatagcaagagcagcgacaagagcgtgtgtctgttcaccgacttcgacagccagaccaacgtgtcccagagcaaggactccgacgtgtacatcaccgataagtgcgtgctggacatgcggagcatggacttcaagagcaactccgccgtggcctggtccaacaagtccgatttcgcctgcgccaacgccttcaacaacagcattatccccgaggacacattcttcccaagccccgagagcagcgactccaccgaccacgtgaagcccaaagagacagagaacaccaagcagcccagcaagagctgccacaagcccaaggccatcgtgcacaccgagaaagtgaacatgatgagcctgaccgtgctgggcctgcggatgctgttcgccaaaaccgtggccgtgaacttcctgctgaccgccaagctgttcttcctcctcaccgcccgcgccaagagaagcggatctggcgtgaagcagaccctgaatttcgacctgctgaagctggctggcgacgtggaatccaacccaggccctactagtatggactggatttggcgcatccttttccttgtcggcgctgctaccggcgcgcattccgggccccagctccagctgcaagagtctggacctggcctggtcaagcctagcgagacactgagcctgacctgtaccgtgtccggcgatagcatcagcagcggcgattactactggggctggatcagacagcctcctggcaaaggactggaatggatcggccacatctactacagcggcgtgacctactacaaccccagcctgaagtccagagtgaccatcagcgtggacaccagccggaaccagttctccctgaagctgtctagcgtgacagccgccgataccgccgtgtactactgcaccagagaggacagcagcaactggcggagtagaggccagggaacactggtcacagttagctctggatccggcggaggcggaagtggaggcggaggatctggcggcggaggctctttcgaagaagtgcaactggttcaatctggcggcggactggttcatccaggcggttctctgagactgagctgtgccggctctggcttcaccttcagcacctacctgatgtactgggtccgacaggcccctggcaagacactggaatgggtgtccgctattggcagcggaggcgatacctactacgccgactctgtgaagggcagattcaccatcagccgggacaacgccaagaacagcctgtacctccagatgaactccctgagagccgaggacatggccgtgtactactgtgccagaggactcggctattggggccagggaacactggtcacagtgtcctctacgcgtgaggacctgaagaacgtgttcccacctgaggtggccgtgttcgagcctagcgaggccgagatcagccacacccagaaagccaccctcgtgtgcctggctaccggcttctaccccgaccatgtggaactgtcttggtgggtcaacggcaaagaggtgcacagcggcgtgtgtaccgacccccagccactgaaagaacagcccgccctgaacgacagccggtactgcctgagcagcagactgagagtgtccgccaccttctggcagaacccccggaaccacttcagatgccaggtgcagttctacggcctgagcgagaacgacgagtggacccaggacagagccaagcccgtgacccagatcgtgtctgccgaagcctggggcagagccgatgatgtgattaagatccactggcaggaaaagaagtccaacaccatcctgggcagccaggaaggcaacaccatgaagaccaacgacacctacatgaagttcagctggctgaccgtgcccgagaagtccctggacaaagaacacagatgcatcgtgcggcacgaaaacaacaagaacggcgtggaccaggaaatcatcttcccacccatcaagaccgatgtgattacaatggaccccaaggacaactgctccaaggacgccaacgataccctgctgctccagctgaccaacaccagcgcctactacatgtacttgttgctgctgctgaagtccgtggtgtacttcgccatcatcacatgctgcctgctgatggctatggtcaagcggaaggacagccgggga

SEQ ID NO: 6970 - DNA, 3033 bp, synthetic construct
  source 1..3033: mol_type = other DNA
atggccttaccagtgaccgccttgctcctgccgctggccttgctgctccacgccgccaggccggaagtgcagctggttgaatctggcggaggactggttcagcctggcggatctctgagactgtcttgtgccgccagcggcttcagcttcagcgacttttggatgagctgggtccgacaggcccctggcaaaggacttgaatgggtcgccacaatcagccaggccggcagcgagaaggactacgtggactctgtgaagggcagattcaccatcagccgggacaacgccaagaagtccctgtacctccagatgaacagcctgagagccgaggacaccgccgtgtactattgtgcctctggcgtgtacagcttcgactacagaggccagggcaccctggtcacagtctcttctggtaccggcggaggcggatctggcggcggaggtagcggtggcggaggatctgaattcctgcctgttctgacacagcctccatccgtgtctgtggcccctggaaagaccgccagaatcacatgcggcggcaacaacatcggcagcaagagcgtgcactggtatcagcagaagcctggacaggctcctgtgctggtggtgtacgacgacagcgatagacctagcggcatccccgagagattcagcggcagcaattccggcaataccgccacactgaccatcagcagagtggaagctggcgacgaggccgactactactgccaagtgtgggacagcagcagcgactacgtggtgtttggcggcggaacaaagctgacagtgcttctcgagatccagaaccctgatcctgccgtgtaccagctgcgggatagcaagagcagcgacaagagcgtgtgtctgttcaccgacttcgacagccagaccaacgtgtcccagagcaaggactccgacgtgtacatcaccgataagtgcgtgctggacatgcggagcatggacttcaagagcaactccgccgtggcctggtccaacaagtccgatttcgcctgcgccaacgccttcaacaacagcattatccccgaggacacattcttcccaagccccgagagcagcgactccaccgaccacgtgaagcccaaagagacagagaacaccaagcagcccagcaagagctgccacaagcccaaggccatcgtgcacaccgagaaagtgaacatgatgagcctgaccgtgctgggcctgcggatgctgttcgccaaaaccgtggccgtgaacttcctgctgaccgccaagctgttcttcctcctcaccgcccgcgccaagagaagcggatctggcgtgaagcagaccctgaatttcgacctgctgaagctggctggcgacgtggaatccaacccaggccctactagtatggactggatttggcgcatccttttccttgtcggcgctgctaccggcgcgcattccgggccccagctccagctgcaagagtctggacctggcctggtcaagcctagcgagacactgagcctgacctgtaccgtgtccggcgatagcatcagcagcggcgattactactggggctggatcagacagcctcctggcaaaggactggaatggatcggccacatctactacagcggcgtgacctactacaaccccagcctgaagtccagagtgaccatcagcgtggacaccagccggaaccagttctccctgaagctgtctagcgtgacagccgccgataccgccgtgtactactgcaccagagaggacagcagcaactggcggagtagaggccagggaacactggtcacagttagctctggatccggcggaggcggaagtggaggcggaggatctggcggcggaggctctttcgaagaagttcaactggtgcagagcggagccgaagtgaagaagccaggcgagagcctgaagattagctgcaaaggcagcggctacagcttcaccagctactggatcggctgggtccgacagatgcctggcaaaggactggaatggatgggcatcatctaccccggcgacagcgacaccagatacagccctagctttcagggccaagtgaccatctccgccgacaagagcatcagcacagcctacctccagtggtcctctctgaaggccagcgataccgccatgtactactgcgccagacaagtctggggatggcaaggcggcatgtaccccaggtctaactggtggtacaacctggactcttggggccagggcacactggtcacagtctcttctacgcgtgaggacctgaagaacgtgttcccacctgaggtggccgtgttcgagcctagcgaggccgagatcagccacacccagaaagccaccctcgtgtgcctggctaccggcttctaccccgaccatgtggaactgtcttggtgggtcaacggcaaagaggtgcacagcggcgtgtgtaccgacccccagccactgaaagaacagcccgccctgaacgacagccggtactgcctgagcagcagactgagagtgtccgccaccttctggcagaacccccggaaccacttcagatgccaggtgcagttctacggcctgagcgagaacgacgagtggacccaggacagagccaagcccgtgacccagatcgtgtctgccgaagcctggggcagagccgatgatgtgattaagatccactggcaggaaaagaagtccaacaccatcctgggcagccaggaaggcaacaccatgaagaccaacgacacctacatgaagttcagctggctgaccgtgcccgagaagtccctggacaaagaacacagatgcatcgtgcggcacgaaaacaacaagaacggcgtggaccaggaaatcatcttcccacccatcaagaccgatgtgattacaatggaccccaaggacaactgctccaaggacgccaacgataccctgctgctccagctgaccaacaccagcgcctactacatgtacttgttgctgctgctgaagtccgtggtgtacttcgccatcatcacatgctgcctgctgatggctatggtcaagcggaaggacagccgggga

SEQ ID NO: 6971 - DNA, 3012 bp, synthetic construct
  source 1..3012: mol_type = other DNA
atggccttaccagtgaccgccttgctcctgccgctggccttgctgctccacgccgccaggccggaagtgcagctggttgaatctggcggaggactggttcagcctggcggatctctgagactgtcttgtgccgccagcggcttcagcttcagcgacttttggatgagctgggtccgacaggcccctggcaaaggacttgaatgggtcgccacaatcagccaggccggcagcgagaaggactacgtggactctgtgaagggcagattcaccatcagccgggacaacgccaagaagtccctgtacctccagatgaacagcctgagagccgaggacaccgccgtgtactattgtgcctctggcgtgtacagcttcgactacagaggccagggcaccctggtcacagtctcttctggtaccggcggaggcggatctggcggcggaggtagcggtggcggaggatctgaattcgagctggtcatgacacagagccctgcttctctggccgtgtcactgggacagagagccaccatctcttgcagagccagcgagagcgtggacagctacggcaagagcttcatgcactggtatcagctcaagcccggccagcctcctaagctgctgatctacagagcctccaacctggaaagcggcgtgccagccagattttctggcagcggcagcagaaccgacttcaccctgaccattgatcccgtggaagccgatgatgccgccacctactactgccagcagaacaacgaggacccctggacatttggcggaggcaccaagctggaaatcaaactcgagatccagaaccctgatcctgccgtgtaccagctgcgggatagcaagagcagcgacaagagcgtgtgtctgttcaccgacttcgacagccagaccaacgtgtcccagagcaaggactccgacgtgtacatcaccgataagtgcgtgctggacatgcggagcatggacttcaagagcaactccgccgtggcctggtccaacaagtccgatttcgcctgcgccaacgccttcaacaacagcattatccccgaggacacattcttcccaagccccgagagcagcgactccaccgaccacgtgaagcccaaagagacagagaacaccaagcagcccagcaagagctgccacaagcccaaggccatcgtgcacaccgagaaagtgaacatgatgagcctgaccgtgctgggcctgcggatgctgttcgccaaaaccgtggccgtgaacttcctgctgaccgccaagctgttcttcctcctcaccgcccgcgccaagagaagcggatctggcgtgaagcagaccctgaatttcgacctgctgaagctggctggcgacgtggaatccaacccaggccctactagtatggactggatttggcgcatccttttccttgtcggcgctgctaccggcgcgcattccgggccccagctccagctgcaagagtctggacctggcctggtcaagcctagcgagacactgagcctgacctgtaccgtgtccggcgatagcatcagcagcggcgattactactggggctggatcagacagcctcctggcaaaggactggaatggatcggccacatctactacagcggcgtgacctactacaaccccagcctgaagtccagagtgaccatcagcgtggacaccagccggaaccagttctccctgaagctgtctagcgtgacagccgccgataccgccgtgtactactgcaccagagaggacagcagcaactggcggagtagaggccagggaacactggtcacagttagctctggatccggcggaggcggaagtggaggcggaggatctggcggcggaggctctttcgaagaagtgcagctcgaacagtctggccccgagcttgtgaaacctggcgcttccgtgaagatgagctgcaaggccagcggctacaccttcaccaactactacatgaaatgggtcaagcagagccacggcaagtccctggaatggatcggcgatctgaaccccaacaacggcgacaccttctacaaccagaagttcaagggcaaagccacactgaccgtggacaagagcagcaacaccgcctacatgcagctcaactccctgaccagcgaggacagcgccgtgtactactgtgccagaaccggcagatacgaagagaacgctatggactactggggccagggcacaagcgtgacagtctcttctacgcgtgaggacctgaagaacgtgttcccacctgaggtggccgtgttcgagcctagcgaggccgagatcagccacacccagaaagccaccctcgtgtgcctggctaccggcttctaccccgaccatgtggaactgtcttggtgggtcaacggcaaagaggtgcacagcggcgtgtgtaccgacccccagccactgaaagaacagcccgccctgaacgacagccggtactgcctgagcagcagactgagagtgtccgccaccttctggcagaacccccggaaccacttcagatgccaggtgcagttctacggcctgagcgagaacgacgagtggacccaggacagagccaagcccgtgacccagatcgtgtctgccgaagcctggggcagagccgatgatgtgattaagatccactggcaggaaaagaagtccaacaccatcctgggcagccaggaaggcaacaccatgaagaccaacgacacctacatgaagttcagctggctgaccgtgcccgagaagtccctggacaaagaacacagatgcatcgtgcggcacgaaaacaacaagaacggcgtggaccaggaaatcatcttcccacccatcaagaccgatgtgattacaatggaccccaaggacaactgctccaaggacgccaacgataccctgctgctccagctgaccaacaccagcgcctactacatgtacttgttgctgctgctgaagtccgtggtgtacttcgccatcatcacatgctgcctgctgatggctatggtcaagcggaaggacagccgggga

SEQ ID NO: 6972 - DNA, 2994 bp, synthetic construct
  source 1..2994: mol_type = other DNA
atggccttaccagtgaccgccttgctcctgccgctggccttgctgctccacgccgccaggccggaagtgcagctggttgaatctggcggaggactggttcagcctggcggatctctgagactgtcttgtgccgccagcggcttcagcttcagcgacttttggatgagctgggtccgacaggcccctggcaaaggacttgaatgggtcgccacaatcagccaggccggcagcgagaaggactacgtggactctgtgaagggcagattcaccatcagccgggacaacgccaagaagtccctgtacctccagatgaacagcctgagagccgaggacaccgccgtgtactattgtgcctctggcgtgtacagcttcgactacagaggccagggcaccctggtcacagtctcttctggtaccggcggaggcggatctggcggcggaggtagcggtggcggaggatctgaattcgacgtggtcatgacacagagcccttctagcctgtctgccagcgtgggcgacagagtgaccatcacctgtatggcctccgaggacatctacatccggctggcctggtatcagcagaagcctggaaacgcccctaagctgctgatctacgccgccacctctctggaaacaggcgtgccaagcagattttccggcagcggctctggcaccgatttcaccctgacaatatccagcctccagcctgaggacttcgccacctactactgccagcagtattggagcagcccctggacatttggcggaggcaccaaggtggaaatcaaactcgagatccagaaccctgatcctgccgtgtaccagctgcgggatagcaagagcagcgacaagagcgtgtgtctgttcaccgacttcgacagccagaccaacgtgtcccagagcaaggactccgacgtgtacatcaccgataagtgcgtgctggacatgcggagcatggacttcaagagcaactccgccgtggcctggtccaacaagtccgatttcgcctgcgccaacgccttcaacaacagcattatccccgaggacacattcttcccaagccccgagagcagcgactccaccgaccacgtgaagcccaaagagacagagaacaccaagcagcccagcaagagctgccacaagcccaaggccatcgtgcacaccgagaaagtgaacatgatgagcctgaccgtgctgggcctgcggatgctgttcgccaaaaccgtggccgtgaacttcctgctgaccgccaagctgttcttcctcctcaccgcccgcgccaagagaagcggatctggcgtgaagcagaccctgaatttcgacctgctgaagctggctggcgacgtggaatccaacccaggccctactagtatggactggatttggcgcatccttttccttgtcggcgctgctaccggcgcgcattccgggccccagctccagctgcaagagtctggacctggcctggtcaagcctagcgagacactgagcctgacctgtaccgtgtccggcgatagcatcagcagcggcgattactactggggctggatcagacagcctcctggcaaaggactggaatggatcggccacatctactacagcggcgtgacctactacaaccccagcctgaagtccagagtgaccatcagcgtggacaccagccggaaccagttctccctgaagctgtctagcgtgacagccgccgataccgccgtgtactactgcaccagagaggacagcagcaactggcggagtagaggccagggaacactggtcacagttagctctggatccggcggaggcggaagtggaggcggaggatctggcggcggaggctctttcgaacaggttcagctgcaagagtctggccccggactggtcaagcctagccaaacactgagcctgacctgtaccgtgtccggctacagcatcaccagcgactacacctggaactggatcagacagcctcctggcaacggactggaatggatcggctacatcacctacagcggcagcaccagctacaaccccagcctgaaaagccgggtgctgatctccgtggacaccagcaagaatcaggtgtccctgaagctgagcagcgtgacagccgctgataccgccgtgtactactgtgccagactggggagaagatacacaatggactactggggccagggcaccaccgtgacagtttcttctacgcgtgaggacctgaagaacgtgttcccacctgaggtggccgtgttcgagcctagcgaggccgagatcagccacacccagaaagccaccctcgtgtgcctggctaccggcttctaccccgaccatgtggaactgtcttggtgggtcaacggcaaagaggtgcacagcggcgtgtgtaccgacccccagccactgaaagaacagcccgccctgaacgacagccggtactgcctgagcagcagactgagagtgtccgccaccttctggcagaacccccggaaccacttcagatgccaggtgcagttctacggcctgagcgagaacgacgagtggacccaggacagagccaagcccgtgacccagatcgtgtctgccgaagcctggggcagagccgatgatgtgattaagatccactggcaggaaaagaagtccaacaccatcctgggcagccaggaaggcaacaccatgaagaccaacgacacctacatgaagttcagctggctgaccgtgcccgagaagtccctggacaaagaacacagatgcatcgtgcggcacgaaaacaacaagaacggcgtggaccaggaaatcatcttcccacccatcaagaccgatgtgattacaatggaccccaaggacaactgctccaaggacgccaacgataccctgctgctccagctgaccaacaccagcgcctactacatgtacttgttgctgctgctgaagtccgtggtgtacttcgccatcatcacatgctgcctgctgatggctatggtcaagcggaaggacagccgggga

SEQ ID NO: 6973 - DNA, 3006 bp, synthetic construct
  source 1..3006: mol_type = other DNA
atggccttaccagtgaccgccttgctcctgccgctggccttgctgctccacgccgccaggccggaagtgcagctggttgaatctggcggaggactggttcagcctggcggatctctgagactgtcttgtgccgccagcggcttcagcttcagcgacttttggatgagctgggtccgacaggcccctggcaaaggacttgaatgggtcgccacaatcagccaggccggcagcgagaaggactacgtggactctgtgaagggcagattcaccatcagccgggacaacgccaagaagtccctgtacctccagatgaacagcctgagagccgaggacaccgccgtgtactattgtgcctctggcgtgtacagcttcgactacagaggccagggcaccctggtcacagtctcttctggtaccggcggaggcggatctggcggcggaggtagcggtggcggaggatctgaattcgatattgtgctgactcagagccctgccactctgagccttagtccaggcgacagagctaccatctcctgtagggcctctgaatccgtgaccattctgggctctcatctcatatattggtatcaacaaaagccgggccagcctccacggctgctcattcaactggcctctaacgtgcagaccggcgtgccagctagattttctggctctggctcccggaccgactttacactgacaatcagctccgtggaacccgaagattttgccgtctattattgcctccagtccaggaccattcctcggacattcggccagggaacaaaactcgaaatcaagcggctcgagatccagaaccctgatcctgccgtgtaccagctgcgggatagcaagagcagcgacaagagcgtgtgtctgttcaccgacttcgacagccagaccaacgtgtcccagagcaaggactccgacgtgtacatcaccgataagtgcgtgctggacatgcggagcatggacttcaagagcaactccgccgtggcctggtccaacaagtccgatttcgcctgcgccaacgccttcaacaacagcattatccccgaggacacattcttcccaagccccgagagcagcgactccaccgaccacgtgaagcccaaagagacagagaacaccaagcagcccagcaagagctgccacaagcccaaggccatcgtgcacaccgagaaagtgaacatgatgagcctgaccgtgctgggcctgcggatgctgttcgccaaaaccgtggccgtgaacttcctgctgaccgccaagctgttcttcctcctcaccgcccgcgccaagagaagcggatctggcgtgaagcagaccctgaatttcgacctgctgaagctggctggcgacgtggaatccaacccaggccctactagtatggactggatttggcgcatccttttccttgtcggcgctgctaccggcgcgcattccgggccccagctccagctgcaagagtctggacctggcctggtcaagcctagcgagacactgagcctgacctgtaccgtgtccggcgatagcatcagcagcggcgattactactggggctggatcagacagcctcctggcaaaggactggaatggatcggccacatctactacagcggcgtgacctactacaaccccagcctgaagtccagagtgaccatcagcgtggacaccagccggaaccagttctccctgaagctgtctagcgtgacagccgccgataccgccgtgtactactgcaccagagaggacagcagcaactggcggagtagaggccagggaacactggtcacagttagctctggatccggcggaggcggaagtggaggcggaggatctggcggcggaggctctttcgaacaggtgcagctcgttcagagtggccccgaagtgaaaaagccaggcgagtccgtgaagatttcctgcaaagcctccggctacacattccggcactactctatgaattgggtcaagcaggccccaggccagggccttaagtggatgggacgcatcaataccgagtccggcgtgccaatctacgccgatgacttcaaaggccggttcagcttcaccgtggatacctctgcctccaccgcctacctggaaatcagcagcctgaccagcgaggatacagctgtgtacttctgtagcaacgattacctctacagcctggatttctggggacagggaaccacactgaccgtgtctagcacgcgtgaggacctgaagaacgtgttcccacctgaggtggccgtgttcgagcctagcgaggccgagatcagccacacccagaaagccaccctcgtgtgcctggctaccggcttctaccccgaccatgtggaactgtcttggtgggtcaacggcaaagaggtgcacagcggcgtgtgtaccgacccccagccactgaaagaacagcccgccctgaacgacagccggtactgcctgagcagcagactgagagtgtccgccaccttctggcagaacccccggaaccacttcagatgccaggtgcagttctacggcctgagcgagaacgacgagtggacccaggacagagccaagcccgtgacccagatcgtgtctgccgaagcctggggcagagccgatgatgtgattaagatccactggcaggaaaagaagtccaacaccatcctgggcagccaggaaggcaacaccatgaagaccaacgacacctacatgaagttcagctggctgaccgtgcccgagaagtccctggacaaagaacacagatgcatcgtgcggcacgaaaacaacaagaacggcgtggaccaggaaatcatcttcccacccatcaagaccgatgtgattacaatggaccccaaggacaactgctccaaggacgccaacgataccctgctgctccagctgaccaacaccagcgcctactacatgtacttgttgctgctgctgaagtccgtggtgtacttcgccatcatcacatgctgcctgctgatggctatggtcaagcggaaggacagccgggga

SEQ ID NO: 6974 - DNA, 3006 bp, synthetic construct
  source 1..3006: mol_type = other DNA
atggccttaccagtgaccgccttgctcctgccgctggccttgctgctccacgccgccaggccggaagtgcagctggttgaatctggcggaggactggttcagcctggcggatctctgagactgtcttgtgccgccagcggcttcagcttcagcgacttttggatgagctgggtccgacaggcccctggcaaaggacttgaatgggtcgccacaatcagccaggccggcagcgagaaggactacgtggactctgtgaagggcagattcaccatcagccgggacaacgccaagaagtccctgtacctccagatgaacagcctgagagccgaggacaccgccgtgtactattgtgcctctggcgtgtacagcttcgactacagaggccagggcaccctggtcacagtctcttctggtaccggcggaggcggatctggcggcggaggtagcggtggcggaggatctgaattcgacatcgtgctgacacagtctcccgccacactgtcactgagccctggcgatagagccacactgagctgtagagccagcgagagcgtgacaatcctgggcagccacctgatctactggtatcagcagaagcccggacaggcccctagactgctgattcagctcgccagcaatgtgcagacaggcatccctgccagattttccggcagcggcagcagaaccgatttcaccctgaccataagcagcctggaacctgaggacttcgccgtgtactactgcctccagagccggacaatccccagaacctttggacagggcaccaagctggaaatcaagagactcgagatccagaaccctgatcctgccgtgtaccagctgcgggatagcaagagcagcgacaagagcgtgtgtctgttcaccgacttcgacagccagaccaacgtgtcccagagcaaggactccgacgtgtacatcaccgataagtgcgtgctggacatgcggagcatggacttcaagagcaactccgccgtggcctggtccaacaagtccgatttcgcctgcgccaacgccttcaacaacagcattatccccgaggacacattcttcccaagccccgagagcagcgactccaccgaccacgtgaagcccaaagagacagagaacaccaagcagcccagcaagagctgccacaagcccaaggccatcgtgcacaccgagaaagtgaacatgatgagcctgaccgtgctgggcctgcggatgctgttcgccaaaaccgtggccgtgaacttcctgctgaccgccaagctgttcttcctcctcaccgcccgcgccaagagaagcggatctggcgtgaagcagaccctgaatttcgacctgctgaagctggctggcgacgtggaatccaacccaggccctactagtatggactggatttggcgcatccttttccttgtcggcgctgctaccggcgcgcattccgggccccagctccagctgcaagagtctggacctggcctggtcaagcctagcgagacactgagcctgacctgtaccgtgtccggcgatagcatcagcagcggcgattactactggggctggatcagacagcctcctggcaaaggactggaatggatcggccacatctactacagcggcgtgacctactacaaccccagcctgaagtccagagtgaccatcagcgtggacaccagccggaaccagttctccctgaagctgtctagcgtgacagccgccgataccgccgtgtactactgcaccagagaggacagcagcaactggcggagtagaggccagggaacactggtcacagttagctctggatccggcggaggcggaagtggaggcggaggatctggcggcggaggctctttcgaacaggttcagctggtgcagtctggcagcgagctgaagaaacctggcgagagcgtgaagatcagctgcaaggccagcggctacaccttcacacactacagcatgaactgggtccgacaggcccctggacaaggactggaatggatgggcagaatcaacaccgagacaggcgagcccctgtacgccgacgatttcaagggcagattcgtgttcagcctggacaccagcgccagcacagcctatctccagatcagctctctgaaggccgaggacaccgccgtgtactactgctccaacgactacctgtactccctggactattggggccagggcacactggtcacagtgtctagtacgcgtgaggacctgaagaacgtgttcccacctgaggtggccgtgttcgagcctagcgaggccgagatcagccacacccagaaagccaccctcgtgtgcctggctaccggcttctaccccgaccatgtggaactgtcttggtgggtcaacggcaaagaggtgcacagcggcgtgtgtaccgacccccagccactgaaagaacagcccgccctgaacgacagccggtactgcctgagcagcagactgagagtgtccgccaccttctggcagaacccccggaaccacttcagatgccaggtgcagttctacggcctgagcgagaacgacgagtggacccaggacagagccaagcccgtgacccagatcgtgtctgccgaagcctggggcagagccgatgatgtgattaagatccactggcaggaaaagaagtccaacaccatcctgggcagccaggaaggcaacaccatgaagaccaacgacacctacatgaagttcagctggctgaccgtgcccgagaagtccctggacaaagaacacagatgcatcgtgcggcacgaaaacaacaagaacggcgtggaccaggaaatcatcttcccacccatcaagaccgatgtgattacaatggaccccaaggacaactgctccaaggacgccaacgataccctgctgctccagctgaccaacaccagcgcctactacatgtacttgttgctgctgctgaagtccgtggtgtacttcgccatcatcacatgctgcctgctgatggctatggtcaagcggaaggacagccgggga

SEQ ID NO: 6975 - DNA, 3009 bp, synthetic construct
  source 1..3009: mol_type = other DNA
atggccttaccagtgaccgccttgctcctgccgctggccttgctgctccacgccgccaggccggaagtgcagctggttgaatctggcggaggactggttcagcctggcggatctctgagactgtcttgtgccgccagcggcttcagcttcagcgacttttggatgagctgggtccgacaggcccctggcaaaggacttgaatgggtcgccacaatcagccaggccggcagcgagaaggactacgtggactctgtgaagggcagattcaccatcagccgggacaacgccaagaagtccctgtacctccagatgaacagcctgagagccgaggacaccgccgtgtactattgtgcctctggcgtgtacagcttcgactacagaggccagggcaccctggtcacagtctcttctggtaccggcggaggcggatctggcggcggaggtagcggtggcggaggatctgaattcgacatccagctgactcagagccctagctttctgagcgccagcgtgggcgacagagtgaccattacatgtagagccagccagggcatcagcaccgacctgaactggtatcagcagaagcctggcaaggcccctaagctgctgatctacgccgccagcaatctggaaagcggcgtgccaagcagattttccggctctggcagcggcaccgagttcaccctgacaatatctagcctccagcctgaggacttcgccacctactactgccagcagagctacaactggccctacacctttggcggaggcaccaaggtggaaatcaagagactcgagatccagaaccctgatcctgccgtgtaccagctgcgggatagcaagagcagcgacaagagcgtgtgtctgttcaccgacttcgacagccagaccaacgtgtcccagagcaaggactccgacgtgtacatcaccgataagtgcgtgctggacatgcggagcatggacttcaagagcaactccgccgtggcctggtccaacaagtccgatttcgcctgcgccaacgccttcaacaacagcattatccccgaggacacattcttcccaagccccgagagcagcgactccaccgaccacgtgaagcccaaagagacagagaacaccaagcagcccagcaagagctgccacaagcccaaggccatcgtgcacaccgagaaagtgaacatgatgagcctgaccgtgctgggcctgcggatgctgttcgccaaaaccgtggccgtgaacttcctgctgaccgccaagctgttcttcctcctcaccgcccgcgccaagagaagcggatctggcgtgaagcagaccctgaatttcgacctgctgaagctggctggcgacgtggaatccaacccaggccctactagtatggactggatttggcgcatccttttccttgtcggcgctgctaccggcgcgcattccgggccccagctccagctgcaagagtctggacctggcctggtcaagcctagcgagacactgagcctgacctgtaccgtgtccggcgatagcatcagcagcggcgattactactggggctggatcagacagcctcctggcaaaggactggaatggatcggccacatctactacagcggcgtgacctactacaaccccagcctgaagtccagagtgaccatcagcgtggacaccagccggaaccagttctccctgaagctgtctagcgtgacagccgccgataccgccgtgtactactgcaccagagaggacagcagcaactggcggagtagaggccagggaacactggtcacagttagctctggatccggcggaggcggaagtggaggcggaggatctggcggcggaggctctttcgaagaagttcagctggttgaatcaggcggaggactcgtgaaacctggcggctctctgagactgtcttgtgccgccagcggcttcaccttcagcaacttcgagatgaactgggtccgacaggccccaggcaaaggactggaatgggtgtccggcatcagctccaatggccggtacatcaactacgccgacagcgtgaagggcagattcaccatcagccgggacaacgccaagaacagcctgtacctccagatgaactccctgagagccgaggacaccgccgtgtactattgtgccagagtggtggacttcgaccaggactacaacggcttcgactattggggccagggcaccctggttaccgttagctctacgcgtgaggacctgaagaacgtgttcccacctgaggtggccgtgttcgagcctagcgaggccgagatcagccacacccagaaagccaccctcgtgtgcctggctaccggcttctaccccgaccatgtggaactgtcttggtgggtcaacggcaaagaggtgcacagcggcgtgtgtaccgacccccagccactgaaagaacagcccgccctgaacgacagccggtactgcctgagcagcagactgagagtgtccgccaccttctggcagaacccccggaaccacttcagatgccaggtgcagttctacggcctgagcgagaacgacgagtggacccaggacagagccaagcccgtgacccagatcgtgtctgccgaagcctggggcagagccgatgatgtgattaagatccactggcaggaaaagaagtccaacaccatcctgggcagccaggaaggcaacaccatgaagaccaacgacacctacatgaagttcagctggctgaccgtgcccgagaagtccctggacaaagaacacagatgcatcgtgcggcacgaaaacaacaagaacggcgtggaccaggaaatcatcttcccacccatcaagaccgatgtgattacaatggaccccaaggacaactgctccaaggacgccaacgataccctgctgctccagctgaccaacaccagcgcctactacatgtacttgttgctgctgctgaagtccgtggtgtacttcgccatcatcacatgctgcctgctgatggctatggtcaagcggaaggacagccgggga

SEQ ID NO: 6976 - DNA, 3003 bp, synthetic construct
  source 1..3003: mol_type = other DNA
atggccttaccagtgaccgccttgctcctgccgctggccttgctgctccacgccgccaggccggaagtgcagctggttgaatctggcggaggactggttcagcctggcggatctctgagactgtcttgtgccgccagcggcttcagcttcagcgacttttggatgagctgggtccgacaggcccctggcaaaggacttgaatgggtcgccacaatcagccaggccggcagcgagaaggactacgtggactctgtgaagggcagattcaccatcagccgggacaacgccaagaagtccctgtacctccagatgaacagcctgagagccgaggacaccgccgtgtactattgtgcctctggcgtgtacagcttcgactacagaggccagggcaccctggtcacagtctcttctggtaccggcggaggcggatctggcggcggaggtagcggtggcggaggatctgaattcgacatccaactgactcagagccccagctttctgagcgcctctgtgggcgacagagtgaccatcacatgtagtctcagcctgggcatcagcacatggcgggattggtttccgccgaggcttggcaggggccttgagccgctgacctacgccgccagcacactgcaaagcggagtgcctagcagattttccggcagcggctctggcaccgagttcaccctgacaatatccagcctccagcctgaggacttcgccacctactactgccagcagctcaacagctaccctctgacctttggcggaggcaccaaggtggaaatcaagagactcgagatccagaaccctgatcctgccgtgtaccagctgcgggatagcaagagcagcgacaagagcgtgtgtctgttcaccgacttcgacagccagaccaacgtgtcccagagcaaggactccgacgtgtacatcaccgataagtgcgtgctggacatgcggagcatggacttcaagagcaactccgccgtggcctggtccaacaagtccgatttcgcctgcgccaacgccttcaacaacagcattatccccgaggacacattcttcccaagccccgagagcagcgactccaccgaccacgtgaagcccaaagagacagagaacaccaagcagcccagcaagagctgccacaagcccaaggccatcgtgcacaccgagaaagtgaacatgatgagcctgaccgtgctgggcctgcggatgctgttcgccaaaaccgtggccgtgaacttcctgctgaccgccaagctgttcttcctcctcaccgcccgcgccaagagaagcggatctggcgtgaagcagaccctgaatttcgacctgctgaagctggctggcgacgtggaatccaacccaggccctactagtatggactggatttggcgcatccttttccttgtcggcgctgctaccggcgcgcattccgggccccagctccagctgcaagagtctggacctggcctggtcaagcctagcgagacactgagcctgacctgtaccgtgtccggcgatagcatcagcagcggcgattactactggggctggatcagacagcctcctggcaaaggactggaatggatcggccacatctactacagcggcgtgacctactacaaccccagcctgaagtccagagtgaccatcagcgtggacaccagccggaaccagttctccctgaagctgtctagcgtgacagccgccgataccgccgtgtactactgcaccagagaggacagcagcaactggcggagtagaggccagggaacactggtcacagttagctctggatccggcggaggcggaagtggaggcggaggatctggcggcggaggctctttcgaagaagttcaactggttgagtctggtggcggcctggttaagcctggcggatctctgagactgagctgtgccgccagcggcttcacctttagcacatacggcatgagctgggtccgacaggcccctggaaaaggacttgagtgggtcgcctacatcaacaacggctccggctacatctactacgccgacagcgtgaagggcagattcaccatcagccgggacaacgccaagaacagcctgtacctccagatgaactccctgagagccgaggacaccgccgtgtactattgtgccagaggacagtggtggagcggcggagactttgattattggggccagggcaccctggtcaccgtttcttctacgcgtgaggacctgaagaacgtgttcccacctgaggtggccgtgttcgagcctagcgaggccgagatcagccacacccagaaagccaccctcgtgtgcctggctaccggcttctaccccgaccatgtggaactgtcttggtgggtcaacggcaaagaggtgcacagcggcgtgtgtaccgacccccagccactgaaagaacagcccgccctgaacgacagccggtactgcctgagcagcagactgagagtgtccgccaccttctggcagaacccccggaaccacttcagatgccaggtgcagttctacggcctgagcgagaacgacgagtggacccaggacagagccaagcccgtgacccagatcgtgtctgccgaagcctggggcagagccgatgatgtgattaagatccactggcaggaaaagaagtccaacaccatcctgggcagccaggaaggcaacaccatgaagaccaacgacacctacatgaagttcagctggctgaccgtgcccgagaagtccctggacaaagaacacagatgcatcgtgcggcacgaaaacaacaagaacggcgtggaccaggaaatcatcttcccacccatcaagaccgatgtgattacaatggaccccaaggacaactgctccaaggacgccaacgataccctgctgctccagctgaccaacaccagcgcctactacatgtacttgttgctgctgctgaagtccgtggtgtacttcgccatcatcacatgctgcctgctgatggctatggtcaagcggaaggacagccgggga

SEQ ID NO: 6977 - DNA, 3006 bp, synthetic construct
  source 1..3006: mol_type = other DNA
atggccttaccagtgaccgccttgctcctgccgctggccttgctgctccacgccgccaggccggaagtgcagctggttgaatctggcggaggactggttcagcctggcggatctctgagactgtcttgtgccgccagcggcttcagcttcagcgacttttggatgagctgggtccgacaggcccctggcaaaggacttgaatgggtcgccacaatcagccaggccggcagcgagaaggactacgtggactctgtgaagggcagattcaccatcagccgggacaacgccaagaagtccctgtacctccagatgaacagcctgagagccgaggacaccgccgtgtactattgtgcctctggcgtgtacagcttcgactacagaggccagggcaccctggtcacagtctcttctggtaccggcggaggcggatctggcggcggaggtagcggtggcggaggatctgaattcgagatcgtgctgacacagtctcccgccacactgtcactgtctccaggcgaaagagccacactgagctgtagcgccagcagcagcgtgtcctacatgtactggtatcagcagaagcccggacaggcccctagactgctgatctacagaaccagcaacctggcctctggcatccccgccagattttctggctctggcagcggcaccgatttcaccctgaccataagcagcctggaacctgaggacttcgccgtgtactactgccagcagtaccacagctaccccaccacctttggacagggcaccaaggtggaaatcaagcggacagttctcgagatccagaaccctgatcctgccgtgtaccagctgcgggatagcaagagcagcgacaagagcgtgtgtctgttcaccgacttcgacagccagaccaacgtgtcccagagcaaggactccgacgtgtacatcaccgataagtgcgtgctggacatgcggagcatggacttcaagagcaactccgccgtggcctggtccaacaagtccgatttcgcctgcgccaacgccttcaacaacagcattatccccgaggacacattcttcccaagccccgagagcagcgactccaccgaccacgtgaagcccaaagagacagagaacaccaagcagcccagcaagagctgccacaagcccaaggccatcgtgcacaccgagaaagtgaacatgatgagcctgaccgtgctgggcctgcggatgctgttcgccaaaaccgtggccgtgaacttcctgctgaccgccaagctgttcttcctcctcaccgcccgcgccaagagaagcggatctggcgtgaagcagaccctgaatttcgacctgctgaagctggctggcgacgtggaatccaacccaggccctactagtatggactggatttggcgcatccttttccttgtcggcgctgctaccggcgcgcattccgggccccagctccagctgcaagagtctggacctggcctggtcaagcctagcgagacactgagcctgacctgtaccgtgtccggcgatagcatcagcagcggcgattactactggggctggatcagacagcctcctggcaaaggactggaatggatcggccacatctactacagcggcgtgacctactacaaccccagcctgaagtccagagtgaccatcagcgtggacaccagccggaaccagttctccctgaagctgtctagcgtgacagccgccgataccgccgtgtactactgcaccagagaggacagcagcaactggcggagtagaggccagggaacactggtcacagttagctctggatccggcggaggcggaagtggaggcggaggatctggcggcggaggctctttcgaagaagtgcagctggttgaatcaggtggcggcctggttcaacctggcggatctctgagactgtcttgtgccgccagcggcttcagcttcaacacctacgccatgaactgggtccgacaggctcctggcaaaggactggaatgggtgtcccacatcagaagcaagagcaacaacttcgccacctactacgccgacagcgtgaaggacagattcaccatcagccgggacaacgccaagaacagcctgtacctccagatgaactccctgagagccgaggacaccgccgtgtattattgcgccagacaaggcggcgacttccctatggattattggggccagggcaccctggtcaccgtttcttctacgcgtgaggacctgaagaacgtgttcccacctgaggtggccgtgttcgagcctagcgaggccgagatcagccacacccagaaagccaccctcgtgtgcctggctaccggcttctaccccgaccatgtggaactgtcttggtgggtcaacggcaaagaggtgcacagcggcgtgtgtaccgacccccagccactgaaagaacagcccgccctgaacgacagccggtactgcctgagcagcagactgagagtgtccgccaccttctggcagaacccccggaaccacttcagatgccaggtgcagttctacggcctgagcgagaacgacgagtggacccaggacagagccaagcccgtgacccagatcgtgtctgccgaagcctggggcagagccgatgatgtgattaagatccactggcaggaaaagaagtccaacaccatcctgggcagccaggaaggcaacaccatgaagaccaacgacacctacatgaagttcagctggctgaccgtgcccgagaagtccctggacaaagaacacagatgcatcgtgcggcacgaaaacaacaagaacggcgtggaccaggaaatcatcttcccacccatcaagaccgatgtgattacaatggaccccaaggacaactgctccaaggacgccaacgataccctgctgctccagctgaccaacaccagcgcctactacatgtacttgttgctgctgctgaagtccgtggtgtacttcgccatcatcacatgctgcctgctgatggctatggtcaagcggaaggacagccgggga

SEQ ID NO: 6978 - DNA, 2994 bp, synthetic construct
  source 1..2994: mol_type = other DNA
atggccttaccagtgaccgccttgctcctgccgctggccttgctgctccacgccgccaggccggaagtgcagctggttgaatctggcggaggactggttcagcctggcggatctctgagactgtcttgtgccgccagcggcttcagcttcagcgacttttggatgagctgggtccgacaggcccctggcaaaggacttgaatgggtcgccacaatcagccaggccggcagcgagaaggactacgtggactctgtgaagggcagattcaccatcagccgggacaacgccaagaagtccctgtacctccagatgaacagcctgagagccgaggacaccgccgtgtactattgtgcctctggcgtgtacagcttcgactacagaggccagggcaccctggtcacagtctcttctggtaccggcggaggcggatctggcggcggaggtagcggtggcggaggatctgaattcgacgtggtcatgacacagagcccttctagcctgtctgccagcgtgggcgacagagtgaccatcacctgtaaagccagcgaggacatctacatccggctggcctggtatcagcagaagcctggaaaggcccctaagctgctgatctacgccgccacctctctggaaacaggcgtgccaagcagattttccggcagcggctctggcaccgatttcaccctgacaatatccagcctccagcctgaggacttcgccacctactactgccagcagtattggaccacaccttggacctttggcggaggcaccaaggtggaaatcaaactcgagatccagaaccctgatcctgccgtgtaccagctgcgggatagcaagagcagcgacaagagcgtgtgtctgttcaccgacttcgacagccagaccaacgtgtcccagagcaaggactccgacgtgtacatcaccgataagtgcgtgctggacatgcggagcatggacttcaagagcaactccgccgtggcctggtccaacaagtccgatttcgcctgcgccaacgccttcaacaacagcattatccccgaggacacattcttcccaagccccgagagcagcgactccaccgaccacgtgaagcccaaagagacagagaacaccaagcagcccagcaagagctgccacaagcccaaggccatcgtgcacaccgagaaagtgaacatgatgagcctgaccgtgctgggcctgcggatgctgttcgccaaaaccgtggccgtgaacttcctgctgaccgccaagctgttcttcctcctcaccgcccgcgccaagagaagcggatctggcgtgaagcagaccctgaatttcgacctgctgaagctggctggcgacgtggaatccaacccaggccctactagtatggactggatttggcgcatccttttccttgtcggcgctgctaccggcgcgcattccgggccccagctccagctgcaagagtctggacctggcctggtcaagcctagcgagacactgagcctgacctgtaccgtgtccggcgatagcatcagcagcggcgattactactggggctggatcagacagcctcctggcaaaggactggaatggatcggccacatctactacagcggcgtgacctactacaaccccagcctgaagtccagagtgaccatcagcgtggacaccagccggaaccagttctccctgaagctgtctagcgtgacagccgccgataccgccgtgtactactgcaccagagaggacagcagcaactggcggagtagaggccagggaacactggtcacagttagctctggatccggcggaggcggaagtggaggcggaggatctggcggcggaggctctttcgaacaggtgcagctccaagagtctggccctggactggtcaagcctagccagacactgagcctgacctgtaccgtgtccggctacagcatcaccatcgactacacctggaactggatcagacagcctcctggcaaaggactggaatggatcggctacatcacctacagcggcagcaccgactacaaccccagcctgaaaagccgggtgctgatctccgtggacaccagcaagaatcaggtgtccctgaagctgagcagcgtgacagccgctgataccgccgtgtactactgtgccagactgggcagaagatacgccctggattattggggccagggcaccaccgtgacagtgtcatctacgcgtgaggacctgaagaacgtgttcccacctgaggtggccgtgttcgagcctagcgaggccgagatcagccacacccagaaagccaccctcgtgtgcctggctaccggcttctaccccgaccatgtggaactgtcttggtgggtcaacggcaaagaggtgcacagcggcgtgtgtaccgacccccagccactgaaagaacagcccgccctgaacgacagccggtactgcctgagcagcagactgagagtgtccgccaccttctggcagaacccccggaaccacttcagatgccaggtgcagttctacggcctgagcgagaacgacgagtggacccaggacagagccaagcccgtgacccagatcgtgtctgccgaagcctggggcagagccgatgatgtgattaagatccactggcaggaaaagaagtccaacaccatcctgggcagccaggaaggcaacaccatgaagaccaacgacacctacatgaagttcagctggctgaccgtgcccgagaagtccctggacaaagaacacagatgcatcgtgcggcacgaaaacaacaagaacggcgtggaccaggaaatcatcttcccacccatcaagaccgatgtgattacaatggaccccaaggacaactgctccaaggacgccaacgataccctgctgctccagctgaccaacaccagcgcctactacatgtacttgttgctgctgctgaagtccgtggtgtacttcgccatcatcacatgctgcctgctgatggctatggtcaagcggaaggacagccgggga

SEQ ID NO: 6979 - DNA, 3006 bp, synthetic construct
  source 1..3006: mol_type = other DNA
atggccttaccagtgaccgccttgctcctgccgctggccttgctgctccacgccgccaggccggaagtgcagctggttgaatctggcggaggactggttcagcctggcggatctctgagactgtcttgtgccgccagcggcttcagcttcagcgacttttggatgagctgggtccgacaggcccctggcaaaggacttgaatgggtcgccacaatcagccaggccggcagcgagaaggactacgtggactctgtgaagggcagattcaccatcagccgggacaacgccaagaagtccctgtacctccagatgaacagcctgagagccgaggacaccgccgtgtactattgtgcctctggcgtgtacagcttcgactacagaggccagggcaccctggtcacagtctcttctggtaccggcggaggcggatctggcggcggaggtagcggtggcggaggatctgaattcgacatccagatgacccagaccacaagcagcctgtctgccagcctgggcgacagagtgaccatctcttgtagagccagccaggacatcagcaactacctgaactggtatcagcagaaacccgacggcaccgtgaagctgctgatctactacaccagcatcctgcacagcggcgtgcccagcagattttctggctctggcagcggcaccgactacagcctgaccatcagcaatctggaacaagaggacttcgctacctacttctgccagcaaggcaacaccctgccttggacatttggcggaggcaccaagctggaaatcaaagctctcgagatccagaaccctgatcctgccgtgtaccagctgcgggatagcaagagcagcgacaagagcgtgtgtctgttcaccgacttcgacagccagaccaacgtgtcccagagcaaggactccgacgtgtacatcaccgataagtgcgtgctggacatgcggagcatggacttcaagagcaactccgccgtggcctggtccaacaagtccgatttcgcctgcgccaacgccttcaacaacagcattatccccgaggacacattcttcccaagccccgagagcagcgactccaccgaccacgtgaagcccaaagagacagagaacaccaagcagcccagcaagagctgccacaagcccaaggccatcgtgcacaccgagaaagtgaacatgatgagcctgaccgtgctgggcctgcggatgctgttcgccaaaaccgtggccgtgaacttcctgctgaccgccaagctgttcttcctcctcaccgcccgcgccaagagaagcggatctggcgtgaagcagaccctgaatttcgacctgctgaagctggctggcgacgtggaatccaacccaggccctactagtatggactggatttggcgcatccttttccttgtcggcgctgctaccggcgcgcattccgggccccagctccagctgcaagagtctggacctggcctggtcaagcctagcgagacactgagcctgacctgtaccgtgtccggcgatagcatcagcagcggcgattactactggggctggatcagacagcctcctggcaaaggactggaatggatcggccacatctactacagcggcgtgacctactacaaccccagcctgaagtccagagtgaccatcagcgtggacaccagccggaaccagttctccctgaagctgtctagcgtgacagccgccgataccgccgtgtactactgcaccagagaggacagcagcaactggcggagtagaggccagggaacactggtcacagttagctctggatccggcggaggcggaagtggaggcggaggatctggcggcggaggctctttcgaagtgcaactggttgaatctggcggcggactggttaagcctggcggatctctgaagctgagctgtgccgcctctggcttcgccttcagcatctacgatatgagctgggtccgacagacccctgagaagagactggaatgggtcgcctacatctctagcggcggagggacctactatcccgacacagtgaagggcagattcaccatctccagagacaacgccaagaacaccctgtacctccagatgagcagcctgaagtccgaggacaccgccatgtactactgcgccagacacagcggctatggcacacattggggagtgctgtttgcctactggggccagggaacactggtcacagtttctgctacgcgtgaggacctgaagaacgtgttcccacctgaggtggccgtgttcgagcctagcgaggccgagatcagccacacccagaaagccaccctcgtgtgcctggctaccggcttctaccccgaccatgtggaactgtcttggtgggtcaacggcaaagaggtgcacagcggcgtgtgtaccgacccccagccactgaaagaacagcccgccctgaacgacagccggtactgcctgagcagcagactgagagtgtccgccaccttctggcagaacccccggaaccacttcagatgccaggtgcagttctacggcctgagcgagaacgacgagtggacccaggacagagccaagcccgtgacccagatcgtgtctgccgaagcctggggcagagccgatgatgtgattaagatccactggcaggaaaagaagtccaacaccatcctgggcagccaggaaggcaacaccatgaagaccaacgacacctacatgaagttcagctggctgaccgtgcccgagaagtccctggacaaagaacacagatgcatcgtgcggcacgaaaacaacaagaacggcgtggaccaggaaatcatcttcccacccatcaagaccgatgtgattacaatggaccccaaggacaactgctccaaggacgccaacgataccctgctgctccagctgaccaacaccagcgcctactacatgtacttgttgctgctgctgaagtccgtggtgtacttcgccatcatcacatgctgcctgctgatggctatggtcaagcggaaggacagccgggga

SEQ ID NO: 6980 - DNA, 3039 bp, synthetic construct
  source 1..3039: mol_type = other DNA
atggccttaccagtgaccgccttgctcctgccgctggccttgctgctccacgccgccaggccggaagtgcagctggttgaatctggcggaggactggttcagcctggcggatctctgagactgtcttgtgccgccagcggcttcagcttcagcgacttttggatgagctgggtccgacaggcccctggcaaaggacttgaatgggtcgccacaatcagccaggccggcagcgagaaggactacgtggactctgtgaagggcagattcaccatcagccgggacaacgccaagaagtccctgtacctccagatgaacagcctgagagccgaggacaccgccgtgtactattgtgcctctggcgtgtacagcttcgactacagaggccagggcaccctggtcacagtctcttctggtaccggcggaggcggatctggcggcggaggtagcggtggcggaggatctgaattcgacatcgtgatgacacagagccctgatagcctggccgtgtctctgggagagagagccaccatcaactgcaagagcagccagagcctgctgtacagaagcaaccagaagaactacctggcctggtatcagcagaagcccggccagcctcctaagctgctgatctactgggccagcaccagagaaagcggcgtgcccgatagattttctggctctggcagcggcaccgacttcaccctgacaatttctagcctgcaagccgaggacgtggccgtgtactactgccagcagtattacaactaccccagaaccttcggccagggcaccaaggtggaaatcaagagaacagttctcgagatccagaaccctgatcctgccgtgtaccagctgcgggatagcaagagcagcgacaagagcgtgtgtctgttcaccgacttcgacagccagaccaacgtgtcccagagcaaggactccgacgtgtacatcaccgataagtgcgtgctggacatgcggagcatggacttcaagagcaactccgccgtggcctggtccaacaagtccgatttcgcctgcgccaacgccttcaacaacagcattatccccgaggacacattcttcccaagccccgagagcagcgactccaccgaccacgtgaagcccaaagagacagagaacaccaagcagcccagcaagagctgccacaagcccaaggccatcgtgcacaccgagaaagtgaacatgatgagcctgaccgtgctgggcctgcggatgctgttcgccaaaaccgtggccgtgaacttcctgctgaccgccaagctgttcttcctcctcaccgcccgcgccaagagaagcggatctggcgtgaagcagaccctgaatttcgacctgctgaagctggctggcgacgtggaatccaacccaggccctactagtatggactggatttggcgcatccttttccttgtcggcgctgctaccggcgcgcattccgggccccagctccagctgcaagagtctggacctggcctggtcaagcctagcgagacactgagcctgacctgtaccgtgtccggcgatagcatcagcagcggcgattactactggggctggatcagacagcctcctggcaaaggactggaatggatcggccacatctactacagcggcgtgacctactacaaccccagcctgaagtccagagtgaccatcagcgtggacaccagccggaaccagttctccctgaagctgtctagcgtgacagccgccgataccgccgtgtactactgcaccagagaggacagcagcaactggcggagtagaggccagggaacactggtcacagttagctctggatccggcggaggcggaagtggaggcggaggatctggcggcggaggctctttcgaagaagttcagctgcttgaatcaggcggcggactggttcaacctggcggatctctgagactgagctgtgccgccagcggctacagcatcacaagcgactatgcctggaactgggtccgacaggcccctggcaaaggactggaatgggtgtcctacatcagcaacagcggcagcaccagctacaaccccagcctgaagtcccggttcaccatcagcagagacaacagcaagaacaccctgtacctccagatgaacagcctgagagctgaggacaccgccgtgtattattgcgccaaagagcggaactacgactacgacgattactactacgctatggactactggggccagggaaccctggtcacagtctcttctacgcgtgaggacctgaagaacgtgttcccacctgaggtggccgtgttcgagcctagcgaggccgagatcagccacacccagaaagccaccctcgtgtgcctggctaccggcttctaccccgaccatgtggaactgtcttggtgggtcaacggcaaagaggtgcacagcggcgtgtgtaccgacccccagccactgaaagaacagcccgccctgaacgacagccggtactgcctgagcagcagactgagagtgtccgccaccttctggcagaacccccggaaccacttcagatgccaggtgcagttctacggcctgagcgagaacgacgagtggacccaggacagagccaagcccgtgacccagatcgtgtctgccgaagcctggggcagagccgatgatgtgattaagatccactggcaggaaaagaagtccaacaccatcctgggcagccaggaaggcaacaccatgaagaccaacgacacctacatgaagttcagctggctgaccgtgcccgagaagtccctggacaaagaacacagatgcatcgtgcggcacgaaaacaacaagaacggcgtggaccaggaaatcatcttcccacccatcaagaccgatgtgattacaatggaccccaaggacaactgctccaaggacgccaacgataccctgctgctccagctgaccaacaccagcgcctactacatgtacttgttgctgctgctgaagtccgtggtgtacttcgccatcatcacatgctgcctgctgatggctatggtcaagcggaaggacagccgggga

SEQ ID NO: 6981 - DNA, 3018 bp, synthetic construct
  source 1..3018: mol_type = other DNA
atggccttaccagtgaccgccttgctcctgccgctggccttgctgctccacgccgccaggccggaagtgcagctggttgaatctggcggaggactggttcagcctggcggatctctgagactgtcttgtgccgccagcggcttcagcttcagcgacttttggatgagctgggtccgacaggcccctggcaaaggacttgaatgggtcgccacaatcagccaggccggcagcgagaaggactacgtggactctgtgaagggcagattcaccatcagccgggacaacgccaagaagtccctgtacctccagatgaacagcctgagagccgaggacaccgccgtgtactattgtgcctctggcgtgtacagcttcgactacagaggccagggcaccctggtcacagtctcttctggtaccggcggaggcggatctggcggcggaggtagcggtggcggaggatctgaattcgacgtggtcatgacacagagccctctgagcctgcctgtgacacttggacagcctgccagcatcagctgtagaagcagccagagcctgctgcacagcagcggcaatacctacctggaatggtatcagcagaggcccggacagagccccagacctctgatctacaagatcagcacccggttcagcggcgtgcccgatagattttctggctctggcagcggcaccgacttcaccctgaagattagcagagtggaagccgaggacgtgggcgtgtactactgcttccaaggcagccacgtgccatacacctttggcggcggaacaaaggtggaaatcaagagactcgagatccagaaccctgatcctgccgtgtaccagctgcgggatagcaagagcagcgacaagagcgtgtgtctgttcaccgacttcgacagccagaccaacgtgtcccagagcaaggactccgacgtgtacatcaccgataagtgcgtgctggacatgcggagcatggacttcaagagcaactccgccgtggcctggtccaacaagtccgatttcgcctgcgccaacgccttcaacaacagcattatccccgaggacacattcttcccaagccccgagagcagcgactccaccgaccacgtgaagcccaaagagacagagaacaccaagcagcccagcaagagctgccacaagcccaaggccatcgtgcacaccgagaaagtgaacatgatgagcctgaccgtgctgggcctgcggatgctgttcgccaaaaccgtggccgtgaacttcctgctgaccgccaagctgttcttcctcctcaccgcccgcgccaagagaagcggatctggcgtgaagcagaccctgaatttcgacctgctgaagctggctggcgacgtggaatccaacccaggccctactagtatggactggatttggcgcatccttttccttgtcggcgctgctaccggcgcgcattccgggccccagctccagctgcaagagtctggacctggcctggtcaagcctagcgagacactgagcctgacctgtaccgtgtccggcgatagcatcagcagcggcgattactactggggctggatcagacagcctcctggcaaaggactggaatggatcggccacatctactacagcggcgtgacctactacaaccccagcctgaagtccagagtgaccatcagcgtggacaccagccggaaccagttctccctgaagctgtctagcgtgacagccgccgataccgccgtgtactactgcaccagagaggacagcagcaactggcggagtagaggccagggaacactggtcacagttagctctggatccggcggaggcggaagtggaggcggaggatctggcggcggaggctctttcgaacaagttcagctggttcagagcggagccgaagtgaagaaacctggggcctctgtgaaggtgtcctgcaaagcctctggcctgaccatcgaggactactacatgcactgggtccgacaggcccctggacaaggacttgaatggatgggctggatcgaccccgagaacggcgatacagagtacggccctaagttccagggcagagtgaccatgaccagagacaccagcatcaacaccgcctacatggaactgagccggctgagatccgatgacaccgccgtgtactattgcgccgtgcacaatgcccactacggcacttggtttgcctattggggccagggcacactggtcaccgttagctctacgcgtgaggacctgaagaacgtgttcccacctgaggtggccgtgttcgagcctagcgaggccgagatcagccacacccagaaagccaccctcgtgtgcctggctaccggcttctaccccgaccatgtggaactgtcttggtgggtcaacggcaaagaggtgcacagcggcgtgtgtaccgacccccagccactgaaagaacagcccgccctgaacgacagccggtactgcctgagcagcagactgagagtgtccgccaccttctggcagaacccccggaaccacttcagatgccaggtgcagttctacggcctgagcgagaacgacgagtggacccaggacagagccaagcccgtgacccagatcgtgtctgccgaagcctggggcagagccgatgatgtgattaagatccactggcaggaaaagaagtccaacaccatcctgggcagccaggaaggcaacaccatgaagaccaacgacacctacatgaagttcagctggctgaccgtgcccgagaagtccctggacaaagaacacagatgcatcgtgcggcacgaaaacaacaagaacggcgtggaccaggaaatcatcttcccacccatcaagaccgatgtgattacaatggaccccaaggacaactgctccaaggacgccaacgataccctgctgctccagctgaccaacaccagcgcctactacatgtacttgttgctgctgctgaagtccgtggtgtacttcgccatcatcacatgctgcctgctgatggctatggtcaagcggaaggacagccgggga

SEQ ID NO: 6982 - DNA, 2994 bp, synthetic construct
  source 1..2994: mol_type = other DNA
atggccttaccagtgaccgccttgctcctgccgctggccttgctgctccacgccgccaggccggaagtgcagctggttgaatctggcggaggactggttcagcctggcggatctctgagactgtcttgtgccgccagcggcttcagcttcagcgacttttggatgagctgggtccgacaggcccctggcaaaggacttgaatgggtcgccacaatcagccaggccggcagcgagaaggactacgtggactctgtgaagggcagattcaccatcagccgggacaacgccaagaagtccctgtacctccagatgaacagcctgagagccgaggacaccgccgtgtactattgtgcctctggcgtgtacagcttcgactacagaggccagggcaccctggtcacagtctcttctggtaccggcggaggcggatctggcggcggaggtagcggtggcggaggatctgaattcgacatccagatgacacagagccctagcagcctgtctgccagcgtgggagacagagtgaccatcacctgtagagccagcgagaacatctacagcaacctggcctggtatcagcagaagcctggcaaggcccctaagctgctgatctacgccgccaccaatctggctgatggcgtgccaagcagattttccggctctggcagcggcaccgatttcaccctgacaatatccagcctccagcctgaggacttcgccacctactactgccagcacttttggggcacccctacattcggccagggcaccaaggtggaaatcaagagaacagttctcgagatccagaaccctgatcctgccgtgtaccagctgcgggatagcaagagcagcgacaagagcgtgtgtctgttcaccgacttcgacagccagaccaacgtgtcccagagcaaggactccgacgtgtacatcaccgataagtgcgtgctggacatgcggagcatggacttcaagagcaactccgccgtggcctggtccaacaagtccgatttcgcctgcgccaacgccttcaacaacagcattatccccgaggacacattcttcccaagccccgagagcagcgactccaccgaccacgtgaagcccaaagagacagagaacaccaagcagcccagcaagagctgccacaagcccaaggccatcgtgcacaccgagaaagtgaacatgatgagcctgaccgtgctgggcctgcggatgctgttcgccaaaaccgtggccgtgaacttcctgctgaccgccaagctgttcttcctcctcaccgcccgcgccaagagaagcggatctggcgtgaagcagaccctgaatttcgacctgctgaagctggctggcgacgtggaatccaacccaggccctactagtatggactggatttggcgcatccttttccttgtcggcgctgctaccggcgcgcattccgggccccagctccagctgcaagagtctggacctggcctggtcaagcctagcgagacactgagcctgacctgtaccgtgtccggcgatagcatcagcagcggcgattactactggggctggatcagacagcctcctggcaaaggactggaatggatcggccacatctactacagcggcgtgacctactacaaccccagcctgaagtccagagtgaccatcagcgtggacaccagccggaaccagttctccctgaagctgtctagcgtgacagccgccgataccgccgtgtactactgcaccagagaggacagcagcaactggcggagtagaggccagggaacactggtcacagttagctctggatccggcggaggcggaagtggaggcggaggatctggcggcggaggctctttcgaagaagtgcagctggttgaatcaggtggcggcctggttcaacctggcggatctctgagactgagctgtgccgcctctggcttcagcctgacaaattacggcgtgcactgggtccgacaggcccctggaaaaggactggaatgggtgtccgtgatttggagcggcggcagcaccgattacaacgccgccttcatcagccggttcaccatcagcgccgacaccagcaagaataccgcctacctccagatgaactccctgagagccgaggacaccgccgtgtactattgcgccagagaactgatccacgctatggacaactggggccagggaaccctggtcacagtctcttctacgcgtgaggacctgaagaacgtgttcccacctgaggtggccgtgttcgagcctagcgaggccgagatcagccacacccagaaagccaccctcgtgtgcctggctaccggcttctaccccgaccatgtggaactgtcttggtgggtcaacggcaaagaggtgcacagcggcgtgtgtaccgacccccagccactgaaagaacagcccgccctgaacgacagccggtactgcctgagcagcagactgagagtgtccgccaccttctggcagaacccccggaaccacttcagatgccaggtgcagttctacggcctgagcgagaacgacgagtggacccaggacagagccaagcccgtgacccagatcgtgtctgccgaagcctggggcagagccgatgatgtgattaagatccactggcaggaaaagaagtccaacaccatcctgggcagccaggaaggcaacaccatgaagaccaacgacacctacatgaagttcagctggctgaccgtgcccgagaagtccctggacaaagaacacagatgcatcgtgcggcacgaaaacaacaagaacggcgtggaccaggaaatcatcttcccacccatcaagaccgatgtgattacaatggaccccaaggacaactgctccaaggacgccaacgataccctgctgctccagctgaccaacaccagcgcctactacatgtacttgttgctgctgctgaagtccgtggtgtacttcgccatcatcacatgctgcctgctgatggctatggtcaagcggaaggacagccgggga

SEQ ID NO: 6983 - DNA, 3015 bp, synthetic construct
  source 1..3015: mol_type = other DNA
atggccttaccagtgaccgccttgctcctgccgctggccttgctgctccacgccgccaggccggaagtgcagctggttgaatctggcggaggactggttcagcctggcggatctctgagactgtcttgtgccgccagcggcttcagcttcagcgacttttggatgagctgggtccgacaggcccctggcaaaggacttgaatgggtcgccacaatcagccaggccggcagcgagaaggactacgtggactctgtgaagggcagattcaccatcagccgggacaacgccaagaagtccctgtacctccagatgaacagcctgagagccgaggacaccgccgtgtactattgtgcctctggcgtgtacagcttcgactacagaggccagggcaccctggtcacagtctcttctggtaccggcggaggcggatctggcggcggaggtagcggtggcggaggatctgaattcgacttcgtgatgacacagagccctctgagcctgcctgtgacacctggcgaacctgccagcatcagctgtagaagcagccagagcatcgtgcacagcaacggcaacacctacctggaatggtatctccagaagcctggacagagcccacagctgctgatctacaaggtgtccaacagattcagcggcgtgcccgacagattttctggcagcggctctggcaccgacttcaccctgaagattagcagagtggaagccgaggacgtgggcgtgtactactgcttccaaggctctcacgtgcccctgacctttggacagggcaccaagctggaaatcaagagactcgagatccagaaccctgatcctgccgtgtaccagctgcgggatagcaagagcagcgacaagagcgtgtgtctgttcaccgacttcgacagccagaccaacgtgtcccagagcaaggactccgacgtgtacatcaccgataagtgcgtgctggacatgcggagcatggacttcaagagcaactccgccgtggcctggtccaacaagtccgatttcgcctgcgccaacgccttcaacaacagcattatccccgaggacacattcttcccaagccccgagagcagcgactccaccgaccacgtgaagcccaaagagacagagaacaccaagcagcccagcaagagctgccacaagcccaaggccatcgtgcacaccgagaaagtgaacatgatgagcctgaccgtgctgggcctgcggatgctgttcgccaaaaccgtggccgtgaacttcctgctgaccgccaagctgttcttcctcctcaccgcccgcgccaagagaagcggatctggcgtgaagcagaccctgaatttcgacctgctgaagctggctggcgacgtggaatccaacccaggccctactagtatggactggatttggcgcatccttttccttgtcggcgctgctaccggcgcgcattccgggccccagctccagctgcaagagtctggacctggcctggtcaagcctagcgagacactgagcctgacctgtaccgtgtccggcgatagcatcagcagcggcgattactactggggctggatcagacagcctcctggcaaaggactggaatggatcggccacatctactacagcggcgtgacctactacaaccccagcctgaagtccagagtgaccatcagcgtggacaccagccggaaccagttctccctgaagctgtctagcgtgacagccgccgataccgccgtgtactactgcaccagagaggacagcagcaactggcggagtagaggccagggaacactggtcacagttagctctggatccggcggaggcggaagtggaggcggaggatctggcggcggaggctctttcgaagaagtgcagctggttgaaagcggagccgaagtgaagaaacctggggcctctgtgaaggtgtcctgcaaggccagcggctacacctttaccagctactggattcactgggtccgacaggcccctggacaaggacttgagtggatgggcgagaacgacccctccaacggcaggaccaactacaacgagaagttcaagaaccgcgtgaccctgaccgtggacaccagcatctctaccgcctacatggaactgagccggctgagatccgatgacaccgccgtgtactattgcgccagaggacccaactacttttacagcatggactactggggccagggcacaatggtcaccgttagctctacgcgtgaggacctgaagaacgtgttcccacctgaggtggccgtgttcgagcctagcgaggccgagatcagccacacccagaaagccaccctcgtgtgcctggctaccggcttctaccccgaccatgtggaactgtcttggtgggtcaacggcaaagaggtgcacagcggcgtgtgtaccgacccccagccactgaaagaacagcccgccctgaacgacagccggtactgcctgagcagcagactgagagtgtccgccaccttctggcagaacccccggaaccacttcagatgccaggtgcagttctacggcctgagcgagaacgacgagtggacccaggacagagccaagcccgtgacccagatcgtgtctgccgaagcctggggcagagccgatgatgtgattaagatccactggcaggaaaagaagtccaacaccatcctgggcagccaggaaggcaacaccatgaagaccaacgacacctacatgaagttcagctggctgaccgtgcccgagaagtccctggacaaagaacacagatgcatcgtgcggcacgaaaacaacaagaacggcgtggaccaggaaatcatcttcccacccatcaagaccgatgtgattacaatggaccccaaggacaactgctccaaggacgccaacgataccctgctgctccagctgaccaacaccagcgcctactacatgtacttgttgctgctgctgaagtccgtggtgtacttcgccatcatcacatgctgcctgctgatggctatggtcaagcggaaggacagccgggga

SEQ ID NO: 6984 - DNA, 2994 bp, synthetic construct
  source 1..2994: mol_type = other DNA
atggccttaccagtgaccgccttgctcctgccgctggccttgctgctccacgccgccaggccggaagtgcagctggttgaatctggcggaggactggttcagcctggcggatctctgagactgtcttgtgccgccagcggcttcagcttcagcgacttttggatgagctgggtccgacaggcccctggcaaaggacttgaatgggtcgccacaatcagccaggccggcagcgagaaggactacgtggactctgtgaagggcagattcaccatcagccgggacaacgccaagaagtccctgtacctccagatgaacagcctgagagccgaggacaccgccgtgtactattgtgcctctggcgtgtacagcttcgactacagaggccagggcaccctggtcacagtctcttctggtaccggcggaggcggatctggcggcggaggtagcggtggcggaggatctgaattcgacatccagctgactcagagccctagctttctgagcgccagcgtgggcgacagagtgaccatcacatgtagcgccagatccagcatcagcttcatgtactggtatcagcagaagcccggcaaggcccctaagctgctgatctacgacaccagcaatctggcctctggcgtgcccagcagattttctggaagcggcagcggcaccgagttcaccctgacaatctctagcctggaagccgaggatgccgccacctactattgccagcagtggtccagctatcccctgacatttggacagggcaccaagctggaaatcaaactcgagatccagaaccctgatcctgccgtgtaccagctgcgggatagcaagagcagcgacaagagcgtgtgtctgttcaccgacttcgacagccagaccaacgtgtcccagagcaaggactccgacgtgtacatcaccgataagtgcgtgctggacatgcggagcatggacttcaagagcaactccgccgtggcctggtccaacaagtccgatttcgcctgcgccaacgccttcaacaacagcattatccccgaggacacattcttcccaagccccgagagcagcgactccaccgaccacgtgaagcccaaagagacagagaacaccaagcagcccagcaagagctgccacaagcccaaggccatcgtgcacaccgagaaagtgaacatgatgagcctgaccgtgctgggcctgcggatgctgttcgccaaaaccgtggccgtgaacttcctgctgaccgccaagctgttcttcctcctcaccgcccgcgccaagagaagcggatctggcgtgaagcagaccctgaatttcgacctgctgaagctggctggcgacgtggaatccaacccaggccctactagtatggactggatttggcgcatccttttccttgtcggcgctgctaccggcgcgcattccgggccccagctccagctgcaagagtctggacctggcctggtcaagcctagcgagacactgagcctgacctgtaccgtgtccggcgatagcatcagcagcggcgattactactggggctggatcagacagcctcctggcaaaggactggaatggatcggccacatctactacagcggcgtgacctactacaaccccagcctgaagtccagagtgaccatcagcgtggacaccagccggaaccagttctccctgaagctgtctagcgtgacagccgccgataccgccgtgtactactgcaccagagaggacagcagcaactggcggagtagaggccagggaacactggtcacagttagctctggatccggcggaggcggaagtggaggcggaggatctggcggcggaggctctttcgaacaggttcagctggttcagtctggggccgaagtgaagaaacctggggcctctgtgaaggtgtcctgcaaggcttccggctacacctttaccggctcttggatgaactgggtccgacaggctcctggacagggactcgaatggatcggcagaatctatcctggcgacggcgagacaaactacaacggcaagttcaaggaccgcgtgacaatcaccgccgacaagagcacaagcaccgcctacatggaactgagcagcctgcggagcgaagataccgccgtgtactactgcgcccggatctacggcaacaacgtgtacttcgatgtgtggggccagggcacaaccgtgacagtctcttctacgcgtgaggacctgaagaacgtgttcccacctgaggtggccgtgttcgagcctagcgaggccgagatcagccacacccagaaagccaccctcgtgtgcctggctaccggcttctaccccgaccatgtggaactgtcttggtgggtcaacggcaaagaggtgcacagcggcgtgtgtaccgacccccagccactgaaagaacagcccgccctgaacgacagccggtactgcctgagcagcagactgagagtgtccgccaccttctggcagaacccccggaaccacttcagatgccaggtgcagttctacggcctgagcgagaacgacgagtggacccaggacagagccaagcccgtgacccagatcgtgtctgccgaagcctggggcagagccgatgatgtgattaagatccactggcaggaaaagaagtccaacaccatcctgggcagccaggaaggcaacaccatgaagaccaacgacacctacatgaagttcagctggctgaccgtgcccgagaagtccctggacaaagaacacagatgcatcgtgcggcacgaaaacaacaagaacggcgtggaccaggaaatcatcttcccacccatcaagaccgatgtgattacaatggaccccaaggacaactgctccaaggacgccaacgataccctgctgctccagctgaccaacaccagcgcctactacatgtacttgttgctgctgctgaagtccgtggtgtacttcgccatcatcacatgctgcctgctgatggctatggtcaagcggaaggacagccgggga

SEQ ID NO: 6985 - DNA, 3018 bp, synthetic construct
  source 1..3018: mol_type = other DNA
atggccttaccagtgaccgccttgctcctgccgctggccttgctgctccacgccgccaggccggaagtgcagctggttgaatctggcggaggactggttcagcctggcggatctctgagactgtcttgtgccgccagcggcttcagcttcagcgacttttggatgagctgggtccgacaggcccctggcaaaggacttgaatgggtcgccacaatcagccaggccggcagcgagaaggactacgtggactctgtgaagggcagattcaccatcagccgggacaacgccaagaagtccctgtacctccagatgaacagcctgagagccgaggacaccgccgtgtactattgtgcctctggcgtgtacagcttcgactacagaggccagggcaccctggtcacagtctcttctggtaccggcggaggcggatctggcggcggaggtagcggtggcggaggatctgaattccagctggtgctgacacagtctccaagcgcctctgccagcctgggatctagcgtgaagctgacctgtacactgagcagcggccacaagaccgacaccatcgactggtatcagcagcagcctggcaaggcccctagatacctgatgaagctggaaggcagcggcagctacaacaaaggctctggcgtgcccgatagattcagcggcagttcttctggcgctgattggtatctgaccatcagcagcctccagagcgaggacgaggccgattactactgcggcacagactaccccggcaactacctgtttggcggcggaacacagctgacagtgcttggcctcgagatccagaaccctgatcctgccgtgtaccagctgcgggatagcaagagcagcgacaagagcgtgtgtctgttcaccgacttcgacagccagaccaacgtgtcccagagcaaggactccgacgtgtacatcaccgataagtgcgtgctggacatgcggagcatggacttcaagagcaactccgccgtggcctggtccaacaagtccgatttcgcctgcgccaacgccttcaacaacagcattatccccgaggacacattcttcccaagccccgagagcagcgactccaccgaccacgtgaagcccaaagagacagagaacaccaagcagcccagcaagagctgccacaagcccaaggccatcgtgcacaccgagaaagtgaacatgatgagcctgaccgtgctgggcctgcggatgctgttcgccaaaaccgtggccgtgaacttcctgctgaccgccaagctgttcttcctcctcaccgcccgcgccaagagaagcggatctggcgtgaagcagaccctgaatttcgacctgctgaagctggctggcgacgtggaatccaacccaggccctactagtatggactggatttggcgcatccttttccttgtcggcgctgctaccggcgcgcattccgggccccagctccagctgcaagagtctggacctggcctggtcaagcctagcgagacactgagcctgacctgtaccgtgtccggcgatagcatcagcagcggcgattactactggggctggatcagacagcctcctggcaaaggactggaatggatcggccacatctactacagcggcgtgacctactacaaccccagcctgaagtccagagtgaccatcagcgtggacaccagccggaaccagttctccctgaagctgtctagcgtgacagccgccgataccgccgtgtactactgcaccagagaggacagcagcaactggcggagtagaggccagggaacactggtcacagttagctctggatccggcggaggcggaagtggaggcggaggatctggcggcggaggctctttcgaacaagaacagctggttgaaagcggcggaggactggttcaacctggcggttctctgagactgagctgtgccgccagcggcttcaccttcagcgactactacatgagctggatcagacaggccccaggcaaaggactggaatgggtcgccacaatctaccccagcagcggcaagacctactacgccgattctgccaagggcagactgaccatctccagcgacaacgccaaggacagcctgtacctccagatgaacagcctgagagccgaggacaccgccgtgtactactgcaccagagatagctacgccgacgacgccgctctgtttgacatttggggccagggcaccaccgtgaccgtttcttctacgcgtgaggacctgaagaacgtgttcccacctgaggtggccgtgttcgagcctagcgaggccgagatcagccacacccagaaagccaccctcgtgtgcctggctaccggcttctaccccgaccatgtggaactgtcttggtgggtcaacggcaaagaggtgcacagcggcgtgtgtaccgacccccagccactgaaagaacagcccgccctgaacgacagccggtactgcctgagcagcagactgagagtgtccgccaccttctggcagaacccccggaaccacttcagatgccaggtgcagttctacggcctgagcgagaacgacgagtggacccaggacagagccaagcccgtgacccagatcgtgtctgccgaagcctggggcagagccgatgatgtgattaagatccactggcaggaaaagaagtccaacaccatcctgggcagccaggaaggcaacaccatgaagaccaacgacacctacatgaagttcagctggctgaccgtgcccgagaagtccctggacaaagaacacagatgcatcgtgcggcacgaaaacaacaagaacggcgtggaccaggaaatcatcttcccacccatcaagaccgatgtgattacaatggaccccaaggacaactgctccaaggacgccaacgataccctgctgctccagctgaccaacaccagcgcctactacatgtacttgttgctgctgctgaagtccgtggtgtacttcgccatcatcacatgctgcctgctgatggctatggtcaagcggaaggacagccgggga

SEQ ID NO: 6986 - DNA, 2994 bp, synthetic construct; identical to SEQ ID NO: 6982
  source 1..2994: mol_type = other DNA

SEQ ID NO: 6987 - DNA, 3015 bp, synthetic construct; identical to SEQ ID NO: 6983
  source 1..3015: mol_type = other DNA

SEQ ID NO: 6988 - DNA, 2994 bp, synthetic construct; identical to SEQ ID NO: 6984
  source 1..2994: mol_type = other DNA

SEQ ID NO: 6989 - DNA, 3018 bp, synthetic construct; identical to SEQ ID NO: 6985
  source 1..3018: mol_type = other DNA

SEQ ID NO: 6990 - DNA, 3015 bp, synthetic construct
  source 1..3015: mol_type = other DNA
atggccttaccagtgaccgccttgctcctgccgctggccttgctgctccacgccgccaggccggaagtgcagctggttgaatctggcggaggactggttcagcctggcggatctctgagactgtcttgtgccgccagcggcttcagcttcagcgacttttggatgagctgggtccgacaggcccctggcaaaggacttgaatgggtcgccacaatcagccaggccggcagcgagaaggactacgtggactctgtgaagggcagattcaccatcagccgggacaacgccaagaagtccctgtacctccagatgaacagcctgagagccgaggacaccgccgtgtactattgtgcctctggcgtgtacagcttcgactacagaggccagggcaccctggtcacagtctcttctggtaccggcggaggcggatctggcggcggaggtagcggtggcggaggatctgaattcgatatccagctcactcaaagcccctctagtctctctgcctcagtgggggatcgggtcagttttacttgtcaagcttcacaggatatcaacaacttccttaattggtatcagcagaagccaggaaaagcacccaagctgctcatctatgatgcctcaaatttggagacgggtgttcccagtcgattctctgggtcagggtccgggaccgactttacgtttacgatctcctctctgcagcccgaagacatcgccacatactattgtcaacagtacggcaacttgcctttcacatttgggggcgggactaaggttgaaatcaagaggctcgagatccagaaccctgatcctgccgtgtaccagctgcgggatagcaagagcagcgacaagagcgtgtgtctgttcaccgacttcgacagccagaccaacgtgtcccagagcaaggactccgacgtgtacatcaccgataagtgcgtgctggacatgcggagcatggacttcaagagcaactccgccgtggcctggtccaacaagtccgatttcgcctgcgccaacgccttcaacaacagcattatccccgaggacacattcttcccaagccccgagagcagcgactccaccgaccacgtgaagcccaaagagacagagaacaccaagcagcccagcaagagctgccacaagcccaaggccatcgtgcacaccgagaaagtgaacatgatgagcctgaccgtgctgggcctgcggatgctgttcgccaaaaccgtggccgtgaacttcctgctgaccgccaagctgttcttcctcctcaccgcccgcgccaagagaagcggatctggcgtgaagcagaccctgaatttcgacctgctgaagctggctggcgacgtggaatccaacccaggccctactagtatggactggatttggcgcatccttttccttgtcggcgctgctaccggcgcgcattccgggccccagctccagctgcaagagtctggacctggcctggtcaagcctagcgagacactgagcctgacctgtaccgtgtccggcgatagcatcagcagcggcgattactactggggctggatcagacagcctcctggcaaaggactggaatggatcggccacatctactacagcggcgtgacctactacaaccccagcctgaagtccagagtgaccatcagcgtggacaccagccggaaccagttctccctgaagctgtctagcgtgacagccgccgataccgccgtgtactactgcaccagagaggacagcagcaactggcggagtagaggccagggaacactggtcacagttagctctggatccggcggaggcggaagtggaggcggaggatctggcggcggaggctctttcgaacaggtacagctgcaggaatctgggcccggacttgtcaagccaagtcagacactttctcttacatgtaccgtgagcggcggaagtataagcagtggaggcttttactggtcttggatacggcagcacccaggcaaaggcttggagtggattggatacattcatcattcaggatctacacactataatccatcccttaagtcccgggtcaccattagcattgatacgtctaagaatctgttcagtctcaggctgtcctccgtcactgctgccgacacagccgtgtactactgcgcctccttggtttactgcggaggcgactgttatagcggctttgattattgggggcaggggaccctcgtaaccgtgagctctacgcgtgaggacctgaagaacgtgttcccacctgaggtggccgtgttcgagcctagcgaggccgagatcagccacacccagaaagccaccctcgtgtgcctggctaccggcttctaccccgaccatgtggaactgtcttggtgggtcaacggcaaagaggtgcacagcggcgtgtgtaccgacccccagccactgaaagaacagcccgccctgaacgacagccggtactgcctgagcagcagactgagagtgtccgccaccttctggcagaacccccggaaccacttcagatgccaggtgcagttctacggcctgagcgagaacgacgagtggacccaggacagagccaagcccgtgacccagatcgtgtctgccgaagcctggggcagagccgatgatgtgattaagatccactggcaggaaaagaagtccaacaccatcctgggcagccaggaaggcaacaccatgaagaccaacgacacctacatgaagttcagctggctgaccgtgcccgagaagtccctggacaaagaacacagatgcatcgtgcggcacgaaaacaacaagaacggcgtggaccaggaaatcatcttcccacccatcaagaccgatgtgattacaatggaccccaaggacaactgctccaaggacgccaacgataccctgctgctccagctgaccaacaccagcgcctactacatgtacttgttgctgctgctgaagtccgtggtgtacttcgccatcatcacatgctgcctgctgatggctatggtcaagcggaaggacagccgggga

SEQ ID NO: 6991 - DNA, 3003 bp, synthetic construct
  source 1..3003: mol_type = other DNA
atggccttaccagtgaccgccttgctcctgccgctggccttgctgctccacgccgccaggccggaagtgcagctggttgaatctggcggaggactggttcagcctggcggatctctgagactgtcttgtgccgccagcggcttcagcttcagcgacttttggatgagctgggtccgacaggcccctggcaaaggacttgaatgggtcgccacaatcagccaggccggcagcgagaaggactacgtggactctgtgaagggcagattcaccatcagccgggacaacgccaagaagtccctgtacctccagatgaacagcctgagagccgaggacaccgccgtgtactattgtgcctctggcgtgtacagcttcgactacagaggccagggcaccctggtcacagtctcttctggtaccggcggaggcggatctggcggcggaggtagcggtggcggaggatctgaattcgacattcagatgacacagagccctagcagcctgagcgcctctgtgggagacagagtgaccatcacatgcaagagcagccagagcgtgctgtactccagcaatcagaagaactacctggcctggttccagcagaagcctggcaaggctcctaagctgctgatctactgggccagcaccagagaaagcggcgtgccaagcagattttctggcagcggctctggcaccgacttcaccctgacaatatccagcctccagcctgaggacttcgccacctacttttgccaccagtacctgagcagctacacattcggacagggcaccaaggtggaaatcaagcggctcgagatccagaaccctgatcctgccgtgtaccagctgcgggatagcaagagcagcgacaagagcgtgtgtctgttcaccgacttcgacagccagaccaacgtgtcccagagcaaggactccgacgtgtacatcaccgataagtgcgtgctggacatgcggagcatggacttcaagagcaactccgccgtggcctggtccaacaagtccgatttcgcctgcgccaacgccttcaacaacagcattatccccgaggacacattcttcccaagccccgagagcagcgactccaccgaccacgtgaagcccaaagagacagagaacaccaagcagcccagcaagagctgccacaagcccaaggccatcgtgcacaccgagaaagtgaacatgatgagcctgaccgtgctgggcctgcggatgctgttcgccaaaaccgtggccgtgaacttcctgctgaccgccaagctgttcttcctcctcaccgcccgcgccaagagaagcggatctggcgtgaagcagaccctgaatttcgacctgctgaagctggctggcgacgtggaatccaacccaggccctactagtatggactggatttggcgcatccttttccttgtcggcgctgctaccggcgcgcattccgggccccagctccagctgcaagagtctggacctggcctggtcaagcctagcgagacactgagcctgacctgtaccgtgtccggcgatagcatcagcagcggcgattactactggggctggatcagacagcctcctggcaaaggactggaatggatcggccacatctactacagcggcgtgacctactacaaccccagcctgaagtccagagtgaccatcagcgtggacaccagccggaaccagttctccctgaagctgtctagcgtgacagccgccgataccgccgtgtactactgcaccagagaggacagcagcaactggcggagtagaggccagggaacactggtcacagttagctctggatccggcggaggcggaagtggaggcggaggatctggcggcggaggctctttcgaagaggtgcagctggttgaatctggcggaggactggttcagcctggcggatctctgagactgtcttgtgccgccagcggctacaccttcaccacctattggatgcactgggtccgacaggcccctggcaaaggacttgagtgggtcggatatatcaggcccagcaccggctacacagagtacaaccagaagttcaaggaccgcttcaccatcagcgccgacaccagcaagaataccgcctacctccagatgaacagcctgagagccgaggacaccgccgtgtactactgtgccagatccagatggctgctggactattggggccagggcacactggttacagtttctacgcgtgaggacctgaagaacgtgttcccacctgaggtggccgtgttcgagcctagcgaggccgagatcagccacacccagaaagccaccctcgtgtgcctggctaccggcttctaccccgaccatgtggaactgtcttggtgggtcaacggcaaagaggtgcacagcggcgtgtgtaccgacccccagccactgaaagaacagcccgccctgaacgacagccggtactgcctgagcagcagactgagagtgtccgccaccttctggcagaacccccggaaccacttcagatgccaggtgcagttctacggcctgagcgagaacgacgagtggacccaggacagagccaagcccgtgacccagatcgtgtctgccgaagcctggggcagagccgatgatgtgattaagatccactggcaggaaaagaagtccaacaccatcctgggcagccaggaaggcaacaccatgaagaccaacgacacctacatgaagttcagctggctgaccgtgcccgagaagtccctggacaaagaacacagatgcatcgtgcggcacgaaaacaacaagaacggcgtggaccaggaaatcatcttcccacccatcaagaccgatgtgattacaatggaccccaaggacaactgctccaaggacgccaacgataccctgctgctccagctgaccaacaccagcgcctactacatgtacttgttgctgctgctgaagtccgtggtgtacttcgccatcatcacatgctgcctgctgatggctatggtcaagcggaaggacagccgggga

SEQ ID NO: 6992 - DNA, 2994 bp, synthetic construct
  source 1..2994: mol_type = other DNA
atggccttaccagtgaccgccttgctcctgccgctggccttgctgctccacgccgccaggccggaagtgcagctggttgaatctggcggaggactggttcagcctggcggatctctgagactgtcttgtgccgccagcggcttcagcttcagcgacttttggatgagctgggtccgacaggcccctggcaaaggacttgaatgggtcgccacaatcagccaggccggcagcgagaaggactacgtggactctgtgaagggcagattcaccatcagccgggacaacgccaagaagtccctgtacctccagatgaacagcctgagagccgaggacaccgccgtgtactattgtgcctctggcgtgtacagcttcgactacagaggccagggcaccctggtcacagtctcttctggtaccggcggaggcggatctggcggcggaggtagcggtggcggaggatctgaattcgacatccagatgacacagagccctagcagcctgtctgccagcgtgggagacagagtgaccatcacctgtagagccagccaggacatcagcaactacctgaactggtatcagcagaagcccggcaaggcccctaagctgctgatctactacaccagcagactgcacagcggcgtgcccagcagattttctggctctggcagcggcaccgacttcaccctgacaatatctagcctccagcctgaggacttcgccacctactattgccagcagggcaacaccctgccttacacatttggacagggcaccaaggtggaaatcaagagactcgagatccagaaccctgatcctgccgtgtaccagctgcgggatagcaagagcagcgacaagagcgtgtgtctgttcaccgacttcgacagccagaccaacgtgtcccagagcaaggactccgacgtgtacatcaccgataagtgcgtgctggacatgcggagcatggacttcaagagcaactccgccgtggcctggtccaacaagtccgatttcgcctgcgccaacgccttcaacaacagcattatccccgaggacacattcttcccaagccccgagagcagcgactccaccgaccacgtgaagcccaaagagacagagaacaccaagcagcccagcaagagctgccacaagcccaaggccatcgtgcacaccgagaaagtgaacatgatgagcctgaccgtgctgggcctgcggatgctgttcgccaaaaccgtggccgtgaacttcctgctgaccgccaagctgttcttcctcctcaccgcccgcgccaagagaagcggatctggcgtgaagcagaccctgaatttcgacctgctgaagctggctggcgacgtggaatccaacccaggccctactagtatggactggatttggcgcatccttttccttgtcggcgctgctaccggcgcgcattccgggccccagctccagctgcaagagtctggacctggcctggtcaagcctagcgagacactgagcctgacctgtaccgtgtccggcgatagcatcagcagcggcgattactactggggctggatcagacagcctcctggcaaaggactggaatggatcggccacatctactacagcggcgtgacctactacaaccccagcctgaagtccagagtgaccatcagcgtggacaccagccggaaccagttctccctgaagctgtctagcgtgacagccgccgataccgccgtgtactactgcaccagagaggacagcagcaactggcggagtagaggccagggaacactggtcacagttagctctggatccggcggaggcggaagtggaggcggaggatctggcggcggaggctctttcgaagaagtgcagctggttgaatcaggtggcggcctggttcaacctggcggatctctgagactgagctgtgccgccagcggcttcaccttcagcgactactttatgagctgggtccgacaggcccctggcaaaggacttgaatgggtcgccaccatcagcaatggcggcacctacacttactaccccgacagcgtgaagggcagattcaccatctccagagacaacagcaagaacaccctgtacctccagatgaactccctgagagccgaggacaccgccgtgtactactgcgccagattcgacggctacatcttcgactattggggccagggcaccctggtcacagtctcttctacgcgtgaggacctgaagaacgtgttcccacctgaggtggccgtgttcgagcctagcgaggccgagatcagccacacccagaaagccaccctcgtgtgcctggctaccggcttctaccccgaccatgtggaactgtcttggtgggtcaacggcaaagaggtgcacagcggcgtgtgtaccgacccccagccactgaaagaacagcccgccctgaacgacagccggtactgcctgagcagcagactgagagtgtccgccaccttctggcagaacccccggaaccacttcagatgccaggtgcagttctacggcctgagcgagaacgacgagtggacccaggacagagccaagcccgtgacccagatcgtgtctgccgaagcctggggcagagccgatgatgtgattaagatccactggcaggaaaagaagtccaacaccatcctgggcagccaggaaggcaacaccatgaagaccaacgacacctacatgaagttcagctggctgaccgtgcccgagaagtccctggacaaagaacacagatgcatcgtgcggcacgaaaacaacaagaacggcgtggaccaggaaatcatcttcccacccatcaagaccgatgtgattacaatggaccccaaggacaactgctccaaggacgccaacgataccctgctgctccagctgaccaacaccagcgcctactacatgtacttgttgctgctgctgaagtccgtggtgtacttcgccatcatcacatgctgcctgctgatggctatggtcaagcggaaggacagccgggga

SEQ ID NO: 6993 - DNA, 2388 bp, synthetic construct
  source 1..2388: mol_type = other DNA
atggccttaccagtgaccgccttgctcctgccgctggccttgctgctccacgccgccaggccggacatccagatgacacagagccctagcagcctgtctgccagcgtgggagacagagtgaccatcacatgcaaggccagcgaccacatcaacaactggctggcctggtatcagcagaagcctggacaggcccctaagctgctgatctacggcgctaccacactggaaacaggcgtgcccagcagattttctggcagcggctctggcaccgactacaccctgacaatatccagcctccagcctgaggacttcgccacctactactgtcagcagagctggaacaccccttggacattcggccagggcaccaagctggaaatcaagagactcgaggacctgaagaacgtgttcccacctgaggtggccgtgttcgagcctagcgaggccgagatcagccacacccagaaagccaccctcgtgtgcctggctaccggcttctaccccgaccatgtggaactgtcttggtgggtcaacggcaaagaggtgcacagcggcgtgtgtaccgacccccagccactgaaagaacagcccgccctgaacgacagccggtactgcctgagcagcagactgagagtgtccgccaccttctggcagaacccccggaaccacttcagatgccaggtgcagttctacggcctgagcgagaacgacgagtggacccaggacagagccaagcccgtgacccagatcgtgtctgccgaagcctggggcagagccgatgatgtgattaagatccactggcaggaaaagaagtccaacaccatcctgggcagccaggaaggcaacaccatgaagaccaacgacacctacatgaagttcagctggctgaccgtgcccgagaagtccctggacaaagaacacagatgcatcgtgcggcacgaaaacaacaagaacggcgtggaccaggaaatcatcttcccacccatcaagaccgatgtgattacaatggaccccaaggacaactgctccaaggacgccaacgataccctgctgctccagctgaccaacaccagcgcctactacatgtacttgttgctgctgctgaagtccgtggtgtacttcgccatcatcacatgctgcctgctgatggctatggtcaagcggaaggacagccggggaagggccaagcgatctggatctggagcaacaaacttctcactactcaaacaagcaggtgacgtggaggagaatcccgggcctactagtatggactggatttggcgcatccttttccttgtcggcgctgctaccggcgcccattccgggcccatggaccccgacctggaaatcagagccgccttcctgcggcagagaaacacagccctgagaacagaggtggccgagctggaacaagaggtgcagcggctggaaaacgaggtgtcccagtacgagacaagatacggccctctcggaggcggaaaaggatccggcggcggaggatctggcggaggcggatctgggggcggaggctctttcgaacaagttcagcttcaacagcctggcgctgagctggtcaaacctggcgcttctgtgaagatgagctgcaaagccagcggctacgccttcagcagctactggatcaactggatgaagcagaaacccggccagggactcgaatggatcggccaaatctatcccggcgacggcgacaccaactacaacggcaagttcaagggcagagccacactgaccgccgatacctctagcagcacagcctacatgcagctgagcagcctgaccagcgaagatagcgccgtgtacttctgtgcccggtccatcacaacagtcgtgggctgcgctatggactattggggccagggaacaagcgtgaccgtgtctagtacgcgtatccagaaccctgatcctgccgtgtaccagctgcgggatagcaagagcagcgacaagagcgtgtgtctgttcaccgacttcgacagccagaccaacgtgtcccagagcaaggactccgacgtgtacatcaccgataagtgcgtgctggacatgcggagcatggacttcaagagcaactccgccgtggcctggtccaacaagtccgatttcgcctgcgccaacgccttcaacaacagcattatccccgaggacacattcttcccaagccccgagagcagcgactccaccgaccacgtgaagcccaaagagacagagaacaccaagcagcccagcaagagctgccacaagcccaaggccatcgtgcacaccgagaaagtgaacatgatgagcctgaccgtgctgggcctgcggatgctgttcgccaaaaccgtggccgtgaacttcctgctgaccgccaagctgttcttcctcctcaccgcc

SEQ ID NO: 6994 - DNA, 2400 bp, synthetic construct
  source 1..2400: mol_type = other DNA
atggccttaccagtgaccgccttgctcctgccgctggccttgctgctccacgccgccaggccggacatccagatgacacagagccctagcagcctgtctgccagcgtgggagacagagtgaccatcacatgcaaggccagcgaccacatcaacaactggctggcctggtatcagcagaagcctggacaggcccctaagctgctgatctacggcgctaccacactggaaacaggcgtgcccagcagattttctggcagcggctctggcaccgactacaccctgacaatatccagcctccagcctgaggacttcgccacctactactgtcagcagagctggaacaccccttggacattcggccagggcaccaagctggaaatcaagagactcgagatccagaaccctgatcctgccgtgtaccagctgcgggatagcaagagcagcgacaagagcgtgtgtctgttcaccgacttcgacagccagaccaacgtgtcccagagcaaggactccgacgtgtacatcaccgataagtgcgtgctggacatgcggagcatggacttcaagagcaactccgccgtggcctggtccaacaagtccgatttcgcctgcgccaacgccttcaacaacagcattatccccgaggacacattcttcccaagccccgagagcagcgactccaccgaccacgtgaagcccaaagagacagagaacaccaagcagcccagcaagagctgccacaagcccaaggccatcgtgcacaccgagaaagtgaacatgatgagcctgaccgtgctgggcctgcggatgctgttcgccaaaaccgtggccgtgaacttcctgctgaccgccaagctgttcttcctcctcaccgcccgcgccaagagaagcggatctggcgtgaagcagaccctgaatttcgacctgctgaagctggctggcgacgtggaatccaacccaggccctactagtatggactggatttggcgcatccttttccttgtcggcgctgctaccggcgcccattccgggcccatggaccccgacctggaaatcagagccgccttcctgcggcagagaaacacagccctgagaacagaggtggccgagctggaacaagaggtgcagcggctggaaaacgaggtgtcccagtacgagacaagatacggccctctcggaggcggaaaaggatccggcggcggaggatctggcggaggcggatctgggggcggaggctctttcgaacaagttcagcttcaacagcctggcgctgagctggtcaaacctggcgcttctgtgaagatgagctgcaaagccagcggctacgccttcagcagctactggatcaactggatgaagcagaaacccggccagggactcgaatggatcggccaaatctatcccggcgacggcgacaccaactacaacggcaagttcaagggcagagccacactgaccgccgatacctctagcagcacagcctacatgcagctgagcagcctgaccagcgaagatagcgccgtgtacttctgtgcccggtccatcacaacagtcgtgggctgcgctatggactattggggccagggaacaagcgtgaccgtgtctagtacgcgtgaggacctgaagaacgtgttcccacctgaggtggccgtgttcgagcctagcgaggccgagatcagccacacccagaaagccaccctcgtgtgcctggctaccggcttctaccccgaccatgtggaactgtcttggtgggtcaacggcaaagaggtgcacagcggcgtgtgtaccgacccccagccactgaaagaacagcccgccctgaacgacagccggtactgcctgagcagcagactgagagtgtccgccaccttctggcagaacccccggaaccacttcagatgccaggtgcagttctacggcctgagcgagaacgacgagtggacccaggacagagccaagcccgtgacccagatcgtgtctgccgaagcctggggcagagccgatgatgtgattaagatccactggcaggaaaagaagtccaacaccatcctgggcagccaggaaggcaacaccatgaagaccaacgacacctacatgaagttcagctggctgaccgtgcccgagaagtccctggacaaagaacacagatgcatcgtgcggcacgaaaacaacaagaacggcgtggaccaggaaatcatcttcccacccatcaagaccgatgtgattacaatggaccccaaggacaactgctccaaggacgccaacgataccctgctgctccagctgaccaacaccagcgcctactacatgtacttgttgctgctgctgaagtccgtggtgtacttcgccatcatcacatgctgcctgctgatggctatggtcaagcggaaggacagccgggga

SEQ ID NO: 6995 - DNA, 2319 bp, synthetic construct
  source 1..2319: mol_type = other DNA
atggccttaccagtgaccgccttgctcctgccgctggccttgctgctccacgccgccaggccggacatccagatgacacagagccctagcagcctgtctgccagcgtgggagacagagtgaccatcacatgcaaggccagcgaccacatcaacaactggctggcctggtatcagcagaagcctggacaggcccctaagctgctgatctacggcgctaccacactggaaacaggcgtgcccagcagattttctggcagcggctctggcaccgactacaccctgacaatatccagcctccagcctgaggacttcgccacctactactgtcagcagagctggaacaccccttggacattcggccagggcaccaagctggaaatcaagagactcgaggacctgaagaacgtgttcccacctgaggtggccgtgttcgagcctagcgaggccgagatcagccacacccagaaagccaccctcgtgtgcctggctaccggcttctaccccgaccatgtggaactgtcttggtgggtcaacggcaaagaggtgcacagcggcgtgtgtaccgacccccagccactgaaagaacagcccgccctgaacgacagccggtactgcctgagcagcagactgagagtgtccgccaccttctggcagaacccccggaaccacttcagatgccaggtgcagttctacggcctgagcgagaacgacgagtggacccaggacagagccaagcccgtgacccagatcgtgtctgccgaagcctggggcagagccgatgatgtgattaagatccactggcaggaaaagaagtccaacaccatcctgggcagccaggaaggcaacaccatgaagaccaacgacacctacatgaagttcagctggctgaccgtgcccgagaagtccctggacaaagaacacagatgcatcgtgcggcacgaaaacaacaagaacggcgtggaccaggaaatcatcttcccacccatcaagaccgatgtgattacaatggaccccaaggacaactgctccaaggacgccaacgataccctgctgctccagctgaccaacaccagcgcctactacatgtacttgttgctgctgctgaagtccgtggtgtacttcgccatcatcacatgctgcctgctgatggctatggtcaagcggaaggacagccggggaagggccaagcgatctggatctggagcaacaaacttctcactactcaaacaagcaggtgacgtggaggagaatcccgggcctactagtatggactggatttggcgcatccttttccttgtcggcgctgctaccggcgcccattccgggcccgaagttgctgccctcgagaaggaggtagcagctttggaaaaagaagtcgcagcccttgagaaagaagttgcggctctggagaagggatccggcggcggaggatctggcggaggcggatctgggggcggaggctctttcgaacaagttcagcttcaacagcctggcgctgagctggtcaaacctggcgcttctgtgaagatgagctgcaaagccagcggctacgccttcagcagctactggatcaactggatgaagcagaaacccggccagggactcgaatggatcggccaaatctatcccggcgacggcgacaccaactacaacggcaagttcaagggcagagccacactgaccgccgatacctctagcagcacagcctacatgcagctgagcagcctgaccagcgaagatagcgccgtgtacttctgtgcccggtccatcacaacagtcgtgggctgcgctatggactattggggccagggaacaagcgtgaccgtgtctagtacgcgtatccagaaccctgatcctgccgtgtaccagctgcgggatagcaagagcagcgacaagagcgtgtgtctgttcaccgacttcgacagccagaccaacgtgtcccagagcaaggactccgacgtgtacatcaccgataagtgcgtgctggacatgcggagcatggacttcaagagcaactccgccgtggcctggtccaacaagtccgatttcgcctgcgccaacgccttcaacaacagcattatccccgaggacacattcttcccaagccccgagagcagcgactccaccgaccacgtgaagcccaaagagacagagaacaccaagcagcccagcaagagctgccacaagcccaaggccatcgtgcacaccgagaaagtgaacatgatgagcctgaccgtgctgggcctgcggatgctgttcgccaaaaccgtggccgtgaacttcctgctgaccgccaagctgttcttcctcctcaccgcc

SEQ ID NO: 6996 - DNA, 2331 bp, synthetic construct
  source 1..2331: mol_type = other DNA
atggccttaccagtgaccgccttgctcctgccgctggccttgctgctccacgccgccaggccggacatccagatgacacagagccctagcagcctgtctgccagcgtgggagacagagtgaccatcacatgcaaggccagcgaccacatcaacaactggctggcctggtatcagcagaagcctggacaggcccctaagctgctgatctacggcgctaccacactggaaacaggcgtgcccagcagattttctggcagcggctctggcaccgactacaccctgacaatatccagcctccagcctgaggacttcgccacctactactgtcagcagagctggaacaccccttggacattcggccagggcaccaagctggaaatcaagagactcgagatccagaaccctgatcctgccgtgtaccagctgcgggatagcaagagcagcgacaagagcgtgtgtctgttcaccgacttcgacagccagaccaacgtgtcccagagcaaggactccgacgtgtacatcaccgataagtgcgtgctggacatgcggagcatggacttcaagagcaactccgccgtggcctggtccaacaagtccgatttcgcctgcgccaacgccttcaacaacagcattatccccgaggacacattcttcccaagccccgagagcagcgactccaccgaccacgtgaagcccaaagagacagagaacaccaagcagcccagcaagagctgccacaagcccaaggccatcgtgcacaccgagaaagtgaacatgatgagcctgaccgtgctgggcctgcggatgctgttcgccaaaaccgtggccgtgaacttcctgctgaccgccaagctgttcttcctcctcaccgcccgcgccaagagaagcggatctggcgtgaagcagaccctgaatttcgacctgctgaagctggctggcgacgtggaatccaacccaggccctactagtatggactggatttggcgcatccttttccttgtcggcgctgctaccggcgcccattccgggcccgaagttgctgccctcgagaaggaggtagcagctttggaaaaagaagtcgcagcccttgagaaagaagttgcggctctggagaagggatccggcggcggaggatctggcggaggcggatctgggggcggaggctctttcgaacaagttcagcttcaacagcctggcgctgagctggtcaaacctggcgcttctgtgaagatgagctgcaaagccagcggctacgccttcagcagctactggatcaactggatgaagcagaaacccggccagggactcgaatggatcggccaaatctatcccggcgacggcgacaccaactacaacggcaagttcaagggcagagccacactgaccgccgatacctctagcagcacagcctacatgcagctgagcagcctgaccagcgaagatagcgccgtgtacttctgtgcccggtccatcacaacagtcgtgggctgcgctatggactattggggccagggaacaagcgtgaccgtgtctagtacgcgtgaggacctgaagaacgtgttcccacctgaggtggccgtgttcgagcctagcgaggccgagatcagccacacccagaaagccaccctcgtgtgcctggctaccggcttctaccccgaccatgtggaactgtcttggtgggtcaacggcaaagaggtgcacagcggcgtgtgtaccgacccccagccactgaaagaacagcccgccctgaacgacagccggtactgcctgagcagcagactgagagtgtccgccaccttctggcagaacccccggaaccacttcagatgccaggtgcagttctacggcctgagcgagaacgacgagtggacccaggacagagccaagcccgtgacccagatcgtgtctgccgaagcctggggcagagccgatgatgtgattaagatccactggcaggaaaagaagtccaacaccatcctgggcagccaggaaggcaacaccatgaagaccaacgacacctacatgaagttcagctggctgaccgtgcccgagaagtccctggacaaagaacacagatgcatcgtgcggcacgaaaacaacaagaacggcgtggaccaggaaatcatcttcccacccatcaagaccgatgtgattacaatggaccccaaggacaactgctccaaggacgccaacgataccctgctgctccagctgaccaacaccagcgcctactacatgtacttgttgctgctgctgaagtccgtggtgtacttcgccatcatcacatgctgcctgctgatggctatggtcaagcggaaggacagccgggga

SEQ ID NO: 6997 - DNA, 2319 bp, synthetic construct; identical to SEQ ID NO: 6995
  source 1..2319: mol_type = other DNA

SEQ ID NO: 6998 - DNA, 2331 bp, synthetic construct; identical to SEQ ID NO: 6996
  source 1..2331: mol_type = other DNA

SEQ ID NO: 6999 - DNA, 2589 bp, synthetic construct
  source 1..2589: mol_type = other DNA
atggccttaccagtgaccgccttgctcctgccgctggccttgctgctccacgccgccaggccggacatccagatgacacagagccctagcagcctgtctgccagcgtgggagacagagtgaccatcacatgcaaggccagcgaccacatcaacaactggctggcctggtatcagcagaagcctggacaggcccctaagctgctgatctacggcgctaccacactggaaacaggcgtgcccagcagattttctggcagcggctctggcaccgactacaccctgacaatatccagcctccagcctgaggacttcgccacctactactgtcagcagagctggaacaccccttggacattcggccagggcaccaagctggaaatcaagagactcgaggacctgaagaacgtgttcccacctgaggtggccgtgttcgagcctagcgaggccgagatcagccacacccagaaagccaccctcgtgtgcctggctaccggcttctaccccgaccatgtggaactgtcttggtgggtcaacggcaaagaggtgcacagcggcgtgtgtaccgacccccagccactgaaagaacagcccgccctgaacgacagccggtactgcctgagcagcagactgagagtgtccgccaccttctggcagaacccccggaaccacttcagatgccaggtgcagttctacggcctgagcgagaacgacgagtggacccaggacagagccaagcccgtgacccagatcgtgtctgccgaagcctggggcagagccgatgatgtgattaagatccactggcaggaaaagaagtccaacaccatcctgggcagccaggaaggcaacaccatgaagaccaacgacacctacatgaagttcagctggctgaccgtgcccgagaagtccctggacaaagaacacagatgcatcgtgcggcacgaaaacaacaagaacggcgtggaccaggaaatcatcttcccacccatcaagaccgatgtgattacaatggaccccaaggacaactgctccaaggacgccaacgataccctgctgctccagctgaccaacaccagcgcctactacatgtacttgttgctgctgctgaagtccgtggtgtacttcgccatcatcacatgctgcctgctgatggctatggtcaagcggaaggacagccggggaagggccaagcgatctggatctggagcaacaaacttctcactactcaaacaagcaggtgacgtggaggagaatcccgggcctactagtatggactggatttggcgcatccttttccttgtcggcgctgctaccggcgcccattccgggccccaggttcagctgcaagagtctggcggaggacttgctcaagctggcggaagcctgagactgtcttgtgccgcctctggcagaaccttcagcatgggctggtttagacaggcccctggcaaagagagagagttcgtcgccgccatcacatacagcggcggcagcccttactacgcctcttctgtcagaggccggttcaccatcagccgggacaacgccaagaacaccgtgtacctccagatgaacagcctgaagccagaggacaccgccgtgtactactgtgccgccaatccaacctacggcagcgactggaatgccgagaattggggccagggcacccaagtgacagtgtctagtggatccggcggcggaggatctggcggaggcggatctgggggcggaggctctttcgaacaagttcagcttcaacagcctggcgctgagctggtcaaacctggcgcttctgtgaagatgagctgcaaagccagcggctacgccttcagcagctactggatcaactggatgaagcagaaacccggccagggactcgaatggatcggccaaatctatcccggcgacggcgacaccaactacaacggcaagttcaagggcagagccacactgaccgccgatacctctagcagcacagcctacatgcagctgagcagcctgaccagcgaagatagcgccgtgtacttctgtgcccggtccatcacaacagtcgtgggctgcgctatggactattggggccagggaacaagcgtgaccgtgtctagtacgcgtatccagaaccctgatcctgccgtgtaccagctgcgggatagcaagagcagcgacaagagcgtgtgtctgttcaccgacttcgacagccagaccaacgtgtcccagagcaaggactccgacgtgtacatcaccgataagtgcgtgctggacatgcggagcatggacttcaagagcaactccgccgtggcctggtccaacaagtccgatttcgcctgcgccaacgccttcaacaacagcattatccccgaggacacattcttcccaagccccgagagcagcgactccaccgaccacgtgaagcccaaagagacagagaacaccaagcagcccagcaagagctgccacaagcccaaggccatcgtgcacaccgagaaagtgaacatgatgagcctgaccgtgctgggcctgcggatgctgttcgccaaaaccgtggccgtgaacttcctgctgaccgccaagctgttcttcctcctcaccgcc

SEQ ID NO: 7000 - DNA, 2601 bp, synthetic construct
  source 1..2601: mol_type = other DNA
atggccttaccagtgaccgccttgctcctgccgctggccttgctgctccacgccgccaggccggacatccagatgacacagagccctagcagcctgtctgccagcgtgggagacagagtgaccatcacatgcaaggccagcgaccacatcaacaactggctggcctggtatcagcagaagcctggacaggcccctaagctgctgatctacggcgctaccacactggaaacaggcgtgcccagcagattttctggcagcggctctggcaccgactacaccctgacaatatccagcctccagcctgaggacttcgccacctactactgtcagcagagctggaacaccccttggacattcggccagggcaccaagctggaaatcaagagactcgagatccagaaccctgatcctgccgtgtaccagctgcgggatagcaagagcagcgacaagagcgtgtgtctgttcaccgacttcgacagccagaccaacgtgtcccagagcaaggactccgacgtgtacatcaccgataagtgcgtgctggacatgcggagcatggacttcaagagcaactccgccgtggcctggtccaacaagtccgatttcgcctgcgccaacgccttcaacaacagcattatccccgaggacacattcttcccaagccccgagagcagcgactccaccgaccacgtgaagcccaaagagacagagaacaccaagcagcccagcaagagctgccacaagcccaaggccatcgtgcacaccgagaaagtgaacatgatgagcctgaccgtgctgggcctgcggatgctgttcgccaaaaccgtggccgtgaacttcctgctgaccgccaagctgttcttcctcctcaccgcccgcgccaagagaagcggatctggcgtgaagcagaccctgaatttcgacctgctgaagctggctggcgacgtggaatccaacccaggccctactagtatggactggatttggcgcatccttttccttgtcggcgctgctaccggcgcccattccgggccccaggttcagctgcaagagtctggcggaggacttgctcaagctggcggaagcctgagactgtcttgtgccgcctctggcagaaccttcagcatgggctggtttagacaggcccctggcaaagagagagagttcgtcgccgccatcacatacagcggcggcagcccttactacgcctcttctgtcagaggccggttcaccatcagccgggacaacgccaagaacaccgtgtacctccagatgaacagcctgaagccagaggacaccgccgtgtactactgtgccgccaatccaacctacggcagcgactggaatgccgagaattggggccagggcacccaagtgacagtgtctagtggatccggcggcggaggatctggcggaggcggatctgggggcggaggctctttcgaacaagttcagcttcaacagcctggcgctgagctggtcaaacctggcgcttctgtgaagatgagctgcaaagccagcggctacgccttcagcagctactggatcaactggatgaagcagaaacccggccagggactcgaatggatcggccaaatctatcccggcgacggcgacaccaactacaacggcaagttcaagggcagagccacactgaccgccgatacctctagcagcacagcctacatgcagctgagcagcctgaccagcgaagatagcgccgtgtacttctgtgcccggtccatcacaacagtcgtgggctgcgctatggactattggggccagggaacaagcgtgaccgtgtctagtacgcgtgaggacctgaagaacgtgttcccacctgaggtggccgtgttcgagcctagcgaggccgagatcagccacacccagaaagccaccctcgtgtgcctggctaccggcttctaccccgaccatgtggaactgtcttggtgggtcaacggcaaagaggtgcacagcggcgtgtgtaccgacccccagccactgaaagaacagcccgccctgaacgacagccggtactgcctgagcagcagactgagagtgtccgccaccttctggcagaacccccggaaccacttcagatgccaggtgcagttctacggcctgagcgagaacgacgagtggacccaggacagagccaagcccgtgacccagatcgtgtctgccgaagcctggggcagagccgatgatgtgattaagatccactggcaggaaaagaagtccaacaccatcctgggcagccaggaaggcaacaccatgaagaccaacgacacctacatgaagttcagctggctgaccgtgcccgagaagtccctggacaaagaacacagatgcatcgtgcggcacgaaaacaacaagaacggcgtggaccaggaaatcatcttcccacccatcaagaccgatgtgattacaatggaccccaaggacaactgctccaaggacgccaacgataccctgctgctccagctgaccaacaccagcgcctactacatgtacttgttgctgctgctgaagtccgtggtgtacttcgccatcatcacatgctgcctgctgatggctatggtcaagcggaaggacagccgggga

SEQ ID NO: 7001 - DNA, 2607 bp, synthetic construct
  source 1..2607: mol_type = other DNA
atggccttaccagtgaccgccttgctcctgccgctggccttgctgctccacgccgccaggccggaagtgcaactggtggaatctggaggctctctggtgcagccagggggaagcctgagactgtcttgtgccgcttccggcttcaccttcgacgactacgccatgagctgggtgcgccaggtgccaggcaaaggcctggaatgggtgtccagcatcaactggagcggcacccacaccgattacgccgactccgtgaaaggcagattcacaatcagcagaaacaacgccaacaataccctgtacctgcagatgaactccctgaagtctgaggatacagcagtgtattattgcgccaagaactggcgggacgccggcaccacttggtttgagaaaagcggctctgccggacagggaacccaagtgacagtgtcctccggtaccggcggaggcggatctggcggcggaggtagcggtggcggaggatctgaattcgacatccagatgacacagagccctagcagcctgtctgccagcgtgggagacagagtgaccatcacatgcaaggccagcgaccacatcaacaactggctggcctggtatcagcagaagcctggacaggcccctaagctgctgatctacggcgctaccacactggaaacaggcgtgcccagcagattttctggcagcggctctggcaccgactacaccctgacaatatccagcctccagcctgaggacttcgccacctactactgtcagcagagctggaacaccccttggacattcggccagggcaccaagctggaaatcaagagactcgaggacctgaagaacgtgttcccacctgaggtggccgtgttcgagcctagcgaggccgagatcagccacacccagaaagccaccctcgtgtgcctggctaccggcttctaccccgaccatgtggaactgtcttggtgggtcaacggcaaagaggtgcacagcggcgtgtgtaccgacccccagccactgaaagaacagcccgccctgaacgacagccggtactgcctgagcagcagactgagagtgtccgccaccttctggcagaacccccggaaccacttcagatgccaggtgcagttctacggcctgagcgagaacgacgagtggacccaggacagagccaagcccgtgacccagatcgtgtctgccgaagcctggggcagagccgatgatgtgattaagatccactggcaggaaaagaagtccaacaccatcctgggcagccaggaaggcaacaccatgaagaccaacgacacctacatgaagttcagctggctgaccgtgcccgagaagtccctggacaaagaacacagatgcatcgtgcggcacgaaaacaacaagaacggcgtggaccaggaaatcatcttcccacccatcaagaccgatgtgattacaatggaccccaaggacaactgctccaaggacgccaacgataccctgctgctccagctgaccaacaccagcgcctactacatgtacttgttgctgctgctgaagtccgtggtgtacttcgccatcatcacatgctgcctgctgatggctatggtcaagcggaaggacagccggggaagggccaagcgatctggatctggagcaacaaacttctcactactcaaacaagcaggtgacgtggaggagaatcccgggcctactagtatggactggatttggcgcatccttttccttgtcggcgctgctaccggcgcgcattccttcgaacaagttcagcttcaacagcctggcgctgagctggtcaaacctggcgcttctgtgaagatgagctgcaaagccagcggctacgccttcagcagctactggatcaactggatgaagcagaaacccggccagggactcgaatggatcggccaaatctatcccggcgacggcgacaccaactacaacggcaagttcaagggcagagccacactgaccgccgatacctctagcagcacagcctacatgcagctgagcagcctgaccagcgaagatagcgccgtgtacttctgtgcccggtccatcacaacagtcgtgggctgcgctatggactattggggccagggaacaagcgtgaccgtgtctagtacgcgtatccagaaccctgatcctgccgtgtaccagctgcgggatagcaagagcagcgacaagagcgtgtgtctgttcaccgacttcgacagccagaccaacgtgtcccagagcaaggactccgacgtgtacatcaccgataagtgcgtgctggacatgcggagcatggacttcaagagcaactccgccgtggcctggtccaacaagtccgatttcgcctgcgccaacgccttcaacaacagcattatccccgaggacacattcttcccaagccccgagagcagcgactccaccgaccacgtgaagcccaaagagacagagaacaccaagcagcccagcaagagctgccacaagcccaaggccatcgtgcacaccgagaaagtgaacatgatgagcctgaccgtgctgggcctgcggatgctgttcgccaaaaccgtggccgtgaacttcctgctgaccgccaagctgttcttcctcctcaccgcc

SEQ ID NO: 7002 - DNA, 2619 bp, synthetic construct
  source 1..2619: mol_type = other DNA
atggccttaccagtgaccgccttgctcctgccgctggccttgctgctccacgccgccaggccggaagtgcaactggtggaatctggaggctctctggtgcagccagggggaagcctgagactgtcttgtgccgcttccggcttcaccttcgacgactacgccatgagctgggtgcgccaggtgccaggcaaaggcctggaatgggtgtccagcatcaactggagcggcacccacaccgattacgccgactccgtgaaaggcagattcacaatcagcagaaacaacgccaacaataccctgtacctgcagatgaactccctgaagtctgaggatacagcagtgtattattgcgccaagaactggcgggacgccggcaccacttggtttgagaaaagcggctctgccggacagggaacccaagtgacagtgtcctccggtaccggcggaggcggatctggcggcggaggtagcggtggcggaggatctgaattcgacatccagatgacacagagccctagcagcctgtctgccagcgtgggagacagagtgaccatcacatgcaaggccagcgaccacatcaacaactggctggcctggtatcagcagaagcctggacaggcccctaagctgctgatctacggcgctaccacactggaaacaggcgtgcccagcagattttctggcagcggctctggcaccgactacaccctgacaatatccagcctccagcctgaggacttcgccacctactactgtcagcagagctggaacaccccttggacattcggccagggcaccaagctggaaatcaagagactcgagatccagaaccctgatcctgccgtgtaccagctgcgggatagcaagagcagcgacaagagcgtgtgtctgttcaccgacttcgacagccagaccaacgtgtcccagagcaaggactccgacgtgtacatcaccgataagtgcgtgctggacatgcggagcatggacttcaagagcaactccgccgtggcctggtccaacaagtccgatttcgcctgcgccaacgccttcaacaacagcattatccccgaggacacattcttcccaagccccgagagcagcgactccaccgaccacgtgaagcccaaagagacagagaacaccaagcagcccagcaagagctgccacaagcccaaggccatcgtgcacaccgagaaagtgaacatgatgagcctgaccgtgctgggcctgcggatgctgttcgccaaaaccgtggccgtgaacttcctgctgaccgccaagctgttcttcctcctcaccgcccgcgccaagagaagcggatctggcgtgaagcagaccctgaatttcgacctgctgaagctggctggcgacgtggaatccaacccaggccctactagtatggactggatttggcgcatccttttccttgtcggcgctgctaccggcgcgcattccttcgaacaagttcagcttcaacagcctggcgctgagctggtcaaacctggcgcttctgtgaagatgagctgcaaagccagcggctacgccttcagcagctactggatcaactggatgaagcagaaacccggccagggactcgaatggatcggccaaatctatcccggcgacggcgacaccaactacaacggcaagttcaagggcagagccacactgaccgccgatacctctagcagcacagcctacatgcagctgagcagcctgaccagcgaagatagcgccgtgtacttctgtgcccggtccatcacaacagtcgtgggctgcgctatggactattggggccagggaacaagcgtgaccgtgtctagtacgcgtgaggacctgaagaacgtgttcccacctgaggtggccgtgttcgagcctagcgaggccgagatcagccacacccagaaagccaccctcgtgtgcctggctaccggcttctaccccgaccatgtggaactgtcttggtgggtcaacggcaaagaggtgcacagcggcgtgtgtaccgacccccagccactgaaagaacagcccgccctgaacgacagccggtactgcctgagcagcagactgagagtgtccgccaccttctggcagaacccccggaaccacttcagatgccaggtgcagttctacggcctgagcgagaacgacgagtggacccaggacagagccaagcccgtgacccagatcgtgtctgccgaagcctggggcagagccgatgatgtgattaagatccactggcaggaaaagaagtccaacaccatcctgggcagccaggaaggcaacaccatgaagaccaacgacacctacatgaagttcagctggctgaccgtgcccgagaagtccctggacaaagaacacagatgcatcgtgcggcacgaaaacaacaagaacggcgtggaccaggaaatcatcttcccacccatcaagaccgatgtgattacaatggaccccaaggacaactgctccaaggacgccaacgataccctgctgctccagctgaccaacaccagcgcctactacatgtacttgttgctgctgctgaagtccgtggtgtacttcgccatcatcacatgctgcctgctgatggctatggtcaagcggaaggacagccgggga

SEQ ID NO: 7003 - DNA, 2601 bp, synthetic construct
  source 1..2601: mol_type = other DNA
atggccttaccagtgaccgccttgctcctgccgctggccttgctgctccacgccgccaggccggaagttcagctgcttgagtctggcggaggactggttcaacctggcggaagcctgagactgtcttgtgccgccagcggcttcatcttcagcagctacgccatgagctgggtccgacaggctcctggaaagggccaagaatgggtttccggcgttagcggcacaggcgtgaacacctactacgccgatagcgtgaagggcagattcaccatcagccgggacaacagcaagaacaccctgtacctccagatgaacagcctgagagccgaggacaccgccgtgtactattgtgcctctggcaaaggctgggacagcggctcttggtacgaggactatagaggccagggcaccctggtcacagtttcttcaggtaccggcggaggcggatctggcggcggaggtagcggtggcggaggatctgaattcgacatccagatgacacagagccctagcagcctgtctgccagcgtgggagacagagtgaccatcacatgcaaggccagcgaccacatcaacaactggctggcctggtatcagcagaagcctggacaggcccctaagctgctgatctacggcgctaccacactggaaacaggcgtgcccagcagattttctggcagcggctctggcaccgactacaccctgacaatatccagcctccagcctgaggacttcgccacctactactgtcagcagagctggaacaccccttggacattcggccagggcaccaagctggaaatcaagagactcgaggacctgaagaacgtgttcccacctgaggtggccgtgttcgagcctagcgaggccgagatcagccacacccagaaagccaccctcgtgtgcctggctaccggcttctaccccgaccatgtggaactgtcttggtgggtcaacggcaaagaggtgcacagcggcgtgtgtaccgacccccagccactgaaagaacagcccgccctgaacgacagccggtactgcctgagcagcagactgagagtgtccgccaccttctggcagaacccccggaaccacttcagatgccaggtgcagttctacggcctgagcgagaacgacgagtggacccaggacagagccaagcccgtgacccagatcgtgtctgccgaagcctggggcagagccgatgatgtgattaagatccactggcaggaaaagaagtccaacaccatcctgggcagccaggaaggcaacaccatgaagaccaacgacacctacatgaagttcagctggctgaccgtgcccgagaagtccctggacaaagaacacagatgcatcgtgcggcacgaaaacaacaagaacggcgtggaccaggaaatcatcttcccacccatcaagaccgatgtgattacaatggaccccaaggacaactgctccaaggacgccaacgataccctgctgctccagctgaccaacaccagcgcctactacatgtacttgttgctgctgctgaagtccgtggtgtacttcgccatcatcacatgctgcctgctgatggctatggtcaagcggaaggacagccggggaagggccaagcgatctggatctggagcaacaaacttctcactactcaaacaagcaggtgacgtggaggagaatcccgggcctactagtatggactggatttggcgcatccttttccttgtcggcgctgctaccggcgcgcattccttcgaacaagttcagcttcaacagcctggcgctgagctggtcaaacctggcgcttctgtgaagatgagctgcaaagccagcggctacgccttcagcagctactggatcaactggatgaagcagaaacccggccagggactcgaatggatcggccaaatctatcccggcgacggcgacaccaactacaacggcaagttcaagggcagagccacactgaccgccgatacctctagcagcacagcctacatgcagctgagcagcctgaccagcgaagatagcgccgtgtacttctgtgcccggtccatcacaacagtcgtgggctgcgctatggactattggggccagggaacaagcgtgaccgtgtctagtacgcgtatccagaaccctgatcctgccgtgtaccagctgcgggatagcaagagcagcgacaagagcgtgtgtctgttcaccgacttcgacagccagaccaacgtgtcccagagcaaggactccgacgtgtacatcaccgataagtgcgtgctggacatgcggagcatggacttcaagagcaactccgccgtggcctggtccaacaagtccgatttcgcctgcgccaacgccttcaacaacagcattatccccgaggacacattcttcccaagccccgagagcagcgactccaccgaccacgtgaagcccaaagagacagagaacaccaagcagcccagcaagagctgccacaagcccaaggccatcgtgcacaccgagaaagtgaacatgatgagcctgaccgtgctgggcctgcggatgctgttcgccaaaaccgtggccgtgaacttcctgctgaccgccaagctgttcttcctcctcaccgcc

SEQ ID NO: 7004 - DNA, 2613 bp, synthetic construct
  source 1..2613: mol_type = other DNA
atggccttaccagtgaccgccttgctcctgccgctggccttgctgctccacgccgccaggccggaagttcagctgcttgagtctggcggaggactggttcaacctggcggaagcctgagactgtcttgtgccgccagcggcttcatcttcagcagctacgccatgagctgggtccgacaggctcctggaaagggccaagaatgggtttccggcgttagcggcacaggcgtgaacacctactacgccgatagcgtgaagggcagattcaccatcagccgggacaacagcaagaacaccctgtacctccagatgaacagcctgagagccgaggacaccgccgtgtactattgtgcctctggcaaaggctgggacagcggctcttggtacgaggactatagaggccagggcaccctggtcacagtttcttcaggtaccggcggaggcggatctggcggcggaggtagcggtggcggaggatctgaattcgacatccagatgacacagagccctagcagcctgtctgccagcgtgggagacagagtgaccatcacatgcaaggccagcgaccacatcaacaactggctggcctggtatcagcagaagcctggacaggcccctaagctgctgatctacggcgctaccacactggaaacaggcgtgcccagcagattttctggcagcggctctggcaccgactacaccctgacaatatccagcctccagcctgaggacttcgccacctactactgtcagcagagctggaacaccccttggacattcggccagggcaccaagctggaaatcaagagactcgagatccagaaccctgatcctgccgtgtaccagctgcgggatagcaagagcagcgacaagagcgtgtgtctgttcaccgacttcgacagccagaccaacgtgtcccagagcaaggactccgacgtgtacatcaccgataagtgcgtgctggacatgcggagcatggacttcaagagcaactccgccgtggcctggtccaacaagtccgatttcgcctgcgccaacgccttcaacaacagcattatccccgaggacacattcttcccaagccccgagagcagcgactccaccgaccacgtgaagcccaaagagacagagaacaccaagcagcccagcaagagctgccacaagcccaaggccatcgtgcacaccgagaaagtgaacatgatgagcctgaccgtgctgggcctgcggatgctgttcgccaaaaccgtggccgtgaacttcctgctgaccgccaagctgttcttcctcctcaccgcccgcgccaagagaagcggatctggcgtgaagcagaccctgaatttcgacctgctgaagctggctggcgacgtggaatccaacccaggccctactagtatggactggatttggcgcatccttttccttgtcggcgctgctaccggcgcgcattccttcgaacaagttcagcttcaacagcctggcgctgagctggtcaaacctggcgcttctgtgaagatgagctgcaaagccagcggctacgccttcagcagctactggatcaactggatgaagcagaaacccggccagggactcgaatggatcggccaaatctatcccggcgacggcgacaccaactacaacggcaagttcaagggcagagccacactgaccgccgatacctctagcagcacagcctacatgcagctgagcagcctgaccagcgaagatagcgccgtgtacttctgtgcccggtccatcacaacagtcgtgggctgcgctatggactattggggccagggaacaagcgtgaccgtgtctagtacgcgtgaggacctgaagaacgtgttcccacctgaggtggccgtgttcgagcctagcgaggccgagatcagccacacccagaaagccaccctcgtgtgcctggctaccggcttctaccccgaccatgtggaactgtcttggtgggtcaacggcaaagaggtgcacagcggcgtgtgtaccgacccccagccactgaaagaacagcccgccctgaacgacagccggtactgcctgagcagcagactgagagtgtccgccaccttctggcagaacccccggaaccacttcagatgccaggtgcagttctacggcctgagcgagaacgacgagtggacccaggacagagccaagcccgtgacccagatcgtgtctgccgaagcctggggcagagccgatgatgtgattaagatccactggcaggaaaagaagtccaacaccatcctgggcagccaggaaggcaacaccatgaagaccaacgacacctacatgaagttcagctggctgaccgtgcccgagaagtccctggacaaagaacacagatgcatcgtgcggcacgaaaacaacaagaacggcgtggaccaggaaatcatcttcccacccatcaagaccgatgtgattacaatggaccccaaggacaactgctccaaggacgccaacgataccctgctgctccagctgaccaacaccagcgcctactacatgtacttgttgctgctgctgaagtccgtggtgtacttcgccatcatcacatgctgcctgctgatggctatggtcaagcggaaggacagccgggga

SEQ ID NO: 7005 - DNA, 2505 bp, synthetic construct
  source 1..2505: mol_type = other DNA
atggccttaccagtgaccgccttgctcctgccgctggccttgctgctccacgccgccaggccgatgctgcccgctcctaagaatctggtggtgtccagaatcaccgaggacagcgccagactgtcttggacagctcctgatgccgccttcgacagcttccccatccggtacatcgagacactgatctggggcgaagccatctggctggatgtgcctggaagcgagagaagctacgacctgaccggactgaagcctggcacagagtatgccgtggtcatcaccggcgtgaaaggcggcagattctctagccctctggtggcctctttcaccaccggtaccggcggaggcggatctggcggcggaggtagcggtggcggaggatctgaattcgacatccagatgacacagagccctagcagcctgtctgccagcgtgggagacagagtgaccatcacatgcaaggccagcgaccacatcaacaactggctggcctggtatcagcagaagcctggacaggcccctaagctgctgatctacggcgctaccacactggaaacaggcgtgcccagcagattttctggcagcggctctggcaccgactacaccctgacaatatccagcctccagcctgaggacttcgccacctactactgtcagcagagctggaacaccccttggacattcggccagggcaccaagctggaaatcaagagactcgaggacctgaagaacgtgttcccacctgaggtggccgtgttcgagcctagcgaggccgagatcagccacacccagaaagccaccctcgtgtgcctggctaccggcttctaccccgaccatgtggaactgtcttggtgggtcaacggcaaagaggtgcacagcggcgtgtgtaccgacccccagccactgaaagaacagcccgccctgaacgacagccggtactgcctgagcagcagactgagagtgtccgccaccttctggcagaacccccggaaccacttcagatgccaggtgcagttctacggcctgagcgagaacgacgagtggacccaggacagagccaagcccgtgacccagatcgtgtctgccgaagcctggggcagagccgatgatgtgattaagatccactggcaggaaaagaagtccaacaccatcctgggcagccaggaaggcaacaccatgaagaccaacgacacctacatgaagttcagctggctgaccgtgcccgagaagtccctggacaaagaacacagatgcatcgtgcggcacgaaaacaacaagaacggcgtggaccaggaaatcatcttcccacccatcaagaccgatgtgattacaatggaccccaaggacaactgctccaaggacgccaacgataccctgctgctccagctgaccaacaccagcgcctactacatgtacttgttgctgctgctgaagtccgtggtgtacttcgccatcatcacatgctgcctgctgatggctatggtcaagcggaaggacagccggggaagggccaagcgatctggatctggagcaacaaacttctcactactcaaacaagcaggtgacgtggaggagaatcccgggcctactagtatggactggatttggcgcatccttttccttgtcggcgctgctaccggcgcgcattccttcgaacaagttcagcttcaacagcctggcgctgagctggtcaaacctggcgcttctgtgaagatgagctgcaaagccagcggctacgccttcagcagctactggatcaactggatgaagcagaaacccggccagggactcgaatggatcggccaaatctatcccggcgacggcgacaccaactacaacggcaagttcaagggcagagccacactgaccgccgatacctctagcagcacagcctacatgcagctgagcagcctgaccagcgaagatagcgccgtgtacttctgtgcccggtccatcacaacagtcgtgggctgcgctatggactattggggccagggaacaagcgtgaccgtgtctagtacgcgtatccagaaccctgatcctgccgtgtaccagctgcgggatagcaagagcagcgacaagagcgtgtgtctgttcaccgacttcgacagccagaccaacgtgtcccagagcaaggactccgacgtgtacatcaccgataagtgcgtgctggacatgcggagcatggacttcaagagcaactccgccgtggcctggtccaacaagtccgatttcgcctgcgccaacgccttcaacaacagcattatccccgaggacacattcttcccaagccccgagagcagcgactccaccgaccacgtgaagcccaaagagacagagaacaccaagcagcccagcaagagctgccacaagcccaaggccatcgtgcacaccgagaaagtgaacatgatgagcctgaccgtgctgggcctgcggatgctgttcgccaaaaccgtggccgtgaacttcctgctgaccgccaagctgttcttcctcctcaccgcc

SEQ ID NO: 7006 - DNA, 2517 bp, synthetic construct
  source 1..2517: mol_type = other DNA
atggccttaccagtgaccgccttgctcctgccgctggccttgctgctccacgccgccaggccgatgctgcccgctcctaagaatctggtggtgtccagaatcaccgaggacagcgccagactgtcttggacagctcctgatgccgccttcgacagcttccccatccggtacatcgagacactgatctggggcgaagccatctggctggatgtgcctggaagcgagagaagctacgacctgaccggactgaagcctggcacagagtatgccgtggtcatcaccggcgtgaaaggcggcagattctctagccctctggtggcctctttcaccaccggtaccggcggaggcggatctggcggcggaggtagcggtggcggaggatctgaattcgacatccagatgacacagagccctagcagcctgtctgccagcgtgggagacagagtgaccatcacatgcaaggccagcgaccacatcaacaactggctggcctggtatcagcagaagcctggacaggcccctaagctgctgatctacggcgctaccacactggaaacaggcgtgcccagcagattttctggcagcggctctggcaccgactacaccctgacaatatccagcctccagcctgaggacttcgccacctactactgtcagcagagctggaacaccccttggacattcggccagggcaccaagctggaaatcaagagactcgagatccagaaccctgatcctgccgtgtaccagctgcgggatagcaagagcagcgacaagagcgtgtgtctgttcaccgacttcgacagccagaccaacgtgtcccagagcaaggactccgacgtgtacatcaccgataagtgcgtgctggacatgcggagcatggacttcaagagcaactccgccgtggcctggtccaacaagtccgatttcgcctgcgccaacgccttcaacaacagcattatccccgaggacacattcttcccaagccccgagagcagcgactccaccgaccacgtgaagcccaaagagacagagaacaccaagcagcccagcaagagctgccacaagcccaaggccatcgtgcacaccgagaaagtgaacatgatgagcctgaccgtgctgggcctgcggatgctgttcgccaaaaccgtggccgtgaacttcctgctgaccgccaagctgttcttcctcctcaccgcccgcgccaagagaagcggatctggcgtgaagcagaccctgaatttcgacctgctgaagctggctggcgacgtggaatccaacccaggccctactagtatggactggatttggcgcatccttttccttgtcggcgctgctaccggcgcgcattccttcgaacaagttcagcttcaacagcctggcgctgagctggtcaaacctggcgcttctgtgaagatgagctgcaaagccagcggctacgccttcagcagctactggatcaactggatgaagcagaaacccggccagggactcgaatggatcggccaaatctatcccggcgacggcgacaccaactacaacggcaagttcaagggcagagccacactgaccgccgatacctctagcagcacagcctacatgcagctgagcagcctgaccagcgaagatagcgccgtgtacttctgtgcccggtccatcacaacagtcgtgggctgcgctatggactattggggccagggaacaagcgtgaccgtgtctagtacgcgtgaggacctgaagaacgtgttcccacctgaggtggccgtgttcgagcctagcgaggccgagatcagccacacccagaaagccaccctcgtgtgcctggctaccggcttctaccccgaccatgtggaactgtcttggtgggtcaacggcaaagaggtgcacagcggcgtgtgtaccgacccccagccactgaaagaacagcccgccctgaacgacagccggtactgcctgagcagcagactgagagtgtccgccaccttctggcagaacccccggaaccacttcagatgccaggtgcagttctacggcctgagcgagaacgacgagtggacccaggacagagccaagcccgtgacccagatcgtgtctgccgaagcctggggcagagccgatgatgtgattaagatccactggcaggaaaagaagtccaacaccatcctgggcagccaggaaggcaacaccatgaagaccaacgacacctacatgaagttcagctggctgaccgtgcccgagaagtccctggacaaagaacacagatgcatcgtgcggcacgaaaacaacaagaacggcgtggaccaggaaatcatcttcccacccatcaagaccgatgtgattacaatggaccccaaggacaactgctccaaggacgccaacgataccctgctgctccagctgaccaacaccagcgcctactacatgtacttgttgctgctgctgaagtccgtggtgtacttcgccatcatcacatgctgcctgctgatggctatggtcaagcggaaggacagccgggga

SEQ ID NO: 7007 - DNA, 2592 bp, synthetic construct
  source 1..2592: mol_type = other DNA
atggccttaccagtgaccgccttgctcctgccgctggccttgctgctccacgccgccaggccggaggtgcagctggttgaatctggcggaggactggttcagcctggcggatctctgagactgtcttgtgccgccagcggcttcaacatcaaggatacctgtatcggctgggttcgcagagcccctggcaaagaggaagaactggtcgccaaaatctgcaagtacagcggccacaccagatacgccgacagcgtgaagggcagattcaccatcagcgccgacaccagcaagaacaccgcctacctccagatgaacagcctgagagccgaggacaccgccgtgtactattgtgccgctgtgtccgtcagagatgggcactacaattactggggccagggcaccaccgtgaccgtttcttcaggtaccggcggaggcggatctggcggcggaggtagcggtggcggaggatctgaattcgacatccagatgacacagagccctagcagcctgtctgccagcgtgggagacagagtgaccatcacatgcaaggccagcgaccacatcaacaactggctggcctggtatcagcagaagcctggacaggcccctaagctgctgatctacggcgctaccacactggaaacaggcgtgcccagcagattttctggcagcggctctggcaccgactacaccctgacaatatccagcctccagcctgaggacttcgccacctactactgtcagcagagctggaacaccccttggacattcggccagggcaccaagctggaaatcaagagactcgaggacctgaagaacgtgttcccacctgaggtggccgtgttcgagcctagcgaggccgagatcagccacacccagaaagccaccctcgtgtgcctggctaccggcttctaccccgaccatgtggaactgtcttggtgggtcaacggcaaagaggtgcacagcggcgtgtgtaccgacccccagccactgaaagaacagcccgccctgaacgacagccggtactgcctgagcagcagactgagagtgtccgccaccttctggcagaacccccggaaccacttcagatgccaggtgcagttctacggcctgagcgagaacgacgagtggacccaggacagagccaagcccgtgacccagatcgtgtctgccgaagcctggggcagagccgatgatgtgattaagatccactggcaggaaaagaagtccaacaccatcctgggcagccaggaaggcaacaccatgaagaccaacgacacctacatgaagttcagctggctgaccgtgcccgagaagtccctggacaaagaacacagatgcatcgtgcggcacgaaaacaacaagaacggcgtggaccaggaaatcatcttcccacccatcaagaccgatgtgattacaatggaccccaaggacaactgctccaaggacgccaacgataccctgctgctccagctgaccaacaccagcgcctactacatgtacttgttgctgctgctgaagtccgtggtgtacttcgccatcatcacatgctgcctgctgatggctatggtcaagcggaaggacagccggggaagggccaagcgatctggatctggagcaacaaacttctcactactcaaacaagcaggtgacgtggaggagaatcccgggcctactagtatggactggatttggcgcatccttttccttgtcggcgctgctaccggcgcgcattccttcgaacaagttcagcttcaacagcctggcgctgagctggtcaaacctggcgcttctgtgaagatgagctgcaaagccagcggctacgccttcagcagctactggatcaactggatgaagcagaaacccggccagggactcgaatggatcggccaaatctatcccggcgacggcgacaccaactacaacggcaagttcaagggcagagccacactgaccgccgatacctctagcagcacagcctacatgcagctgagcagcctgaccagcgaagatagcgccgtgtacttctgtgcccggtccatcacaacagtcgtgggctgcgctatggactattggggccagggaacaagcgtgaccgtgtctagtacgcgtatccagaaccctgatcctgccgtgtaccagctgcgggatagcaagagcagcgacaagagcgtgtgtctgttcaccgacttcgacagccagaccaacgtgtcccagagcaaggactccgacgtgtacatcaccgataagtgcgtgctggacatgcggagcatggacttcaagagcaactccgccgtggcctggtccaacaagtccgatttcgcctgcgccaacgccttcaacaacagcattatccccgaggacacattcttcccaagccccgagagcagcgactccaccgaccacgtgaagcccaaagagacagagaacaccaagcagcccagcaagagctgccacaagcccaaggccatcgtgcacaccgagaaagtgaacatgatgagcctgaccgtgctgggcctgcggatgctgttcgccaaaaccgtggccgtgaacttcctgctgaccgccaagctgttcttcctcctcaccgcc

SEQ ID NO: 7008 - DNA, 2604 bp, synthetic construct
  source 1..2604: mol_type = other DNA
atggccttaccagtgaccgccttgctcctgccgctggccttgctgctccacgccgccaggccggaggtgcagctggttgaatctggcggaggactggttcagcctggcggatctctgagactgtcttgtgccgccagcggcttcaacatcaaggatacctgtatcggctgggttcgcagagcccctggcaaagaggaagaactggtcgccaaaatctgcaagtacagcggccacaccagatacgccgacagcgtgaagggcagattcaccatcagcgccgacaccagcaagaacaccgcctacctccagatgaacagcctgagagccgaggacaccgccgtgtactattgtgccgctgtgtccgtcagagatgggcactacaattactggggccagggcaccaccgtgaccgtttcttcaggtaccggcggaggcggatctggcggcggaggtagcggtggcggaggatctgaattcgacatccagatgacacagagccctagcagcctgtctgccagcgtgggagacagagtgaccatcacatgcaaggccagcgaccacatcaacaactggctggcctggtatcagcagaagcctggacaggcccctaagctgctgatctacggcgctaccacactggaaacaggcgtgcccagcagattttctggcagcggctctggcaccgactacaccctgacaatatccagcctccagcctgaggacttcgccacctactactgtcagcagagctggaacaccccttggacattcggccagggcaccaagctggaaatcaagagactcgagatccagaaccctgatcctgccgtgtaccagctgcgggatagcaagagcagcgacaagagcgtgtgtctgttcaccgacttcgacagccagaccaacgtgtcccagagcaaggactccgacgtgtacatcaccgataagtgcgtgctggacatgcggagcatggacttcaagagcaactccgccgtggcctggtccaacaagtccgatttcgcctgcgccaacgccttcaacaacagcattatccccgaggacacattcttcccaagccccgagagcagcgactccaccgaccacgtgaagcccaaagagacagagaacaccaagcagcccagcaagagctgccacaagcccaaggccatcgtgcacaccgagaaagtgaacatgatgagcctgaccgtgctgggcctgcggatgctgttcgccaaaaccgtggccgtgaacttcctgctgaccgccaagctgttcttcctcctcaccgcccgcgccaagagaagcggatctggcgtgaagcagaccctgaatttcgacctgctgaagctggctggcgacgtggaatccaacccaggccctactagtatggactggatttggcgcatccttttccttgtcggcgctgctaccggcgcgcattccttcgaacaagttcagcttcaacagcctggcgctgagctggtcaaacctggcgcttctgtgaagatgagctgcaaagccagcggctacgccttcagcagctactggatcaactggatgaagcagaaacccggccagggactcgaatggatcggccaaatctatcccggcgacggcgacaccaactacaacggcaagttcaagggcagagccacactgaccgccgatacctctagcagcacagcctacatgcagctgagcagcctgaccagcgaagatagcgccgtgtacttctgtgcccggtccatcacaacagtcgtgggctgcgctatggactattggggccagggaacaagcgtgaccgtgtctagtacgcgtgaggacctgaagaacgtgttcccacctgaggtggccgtgttcgagcctagcgaggccgagatcagccacacccagaaagccaccctcgtgtgcctggctaccggcttctaccccgaccatgtggaactgtcttggtgggtcaacggcaaagaggtgcacagcggcgtgtgtaccgacccccagccactgaaagaacagcccgccctgaacgacagccggtactgcctgagcagcagactgagagtgtccgccaccttctggcagaacccccggaaccacttcagatgccaggtgcagttctacggcctgagcgagaacgacgagtggacccaggacagagccaagcccgtgacccagatcgtgtctgccgaagcctggggcagagccgatgatgtgattaagatccactggcaggaaaagaagtccaacaccatcctgggcagccaggaaggcaacaccatgaagaccaacgacacctacatgaagttcagctggctgaccgtgcccgagaagtccctggacaaagaacacagatgcatcgtgcggcacgaaaacaacaagaacggcgtggaccaggaaatcatcttcccacccatcaagaccgatgtgattacaatggaccccaaggacaactgctccaaggacgccaacgataccctgctgctccagctgaccaacaccagcgcctactacatgtacttgttgctgctgctgaagtccgtggtgtacttcgccatcatcacatgctgcctgctgatggctatggtcaagcggaaggacagccgggga

SEQ ID NO: 7009 - DNA, 2223 bp, synthetic construct
  source 1..2223: mol_type = other DNA
atggccttaccagtgaccgccttgctcctgccgctggccttgctgctccacgccgccaggccgcagctccagctgcaagagtctggacctggcctggtcaagcctagcgagacactgagcctgacctgtaccgtgtccggcgatagcatcagcagcggcgattactactggggctggatcagacagcctcctggcaaaggactggaatggatcggccacatctactacagcggcgtgacctactacaaccccagcctgaagtccagagtgaccatcagcgtggacaccagccggaaccagttctccctgaagctgtctagcgtgacagccgccgataccgccgtgtactactgcaccagagaggacagcagcaactggcggagtagaggccagggaacactggtcacagttagctctctcgaggacctgaagaacgtgttcccacctgaggtggccgtgttcgagcctagcgaggccgagatcagccacacccagaaagccaccctcgtgtgcctggctaccggcttctaccccgaccatgtggaactgtcttggtgggtcaacggcaaagaggtgcacagcggcgtgtgtaccgacccccagccactgaaagaacagcccgccctgaacgacagccggtactgcctgagcagcagactgagagtgtccgccaccttctggcagaacccccggaaccacttcagatgccaggtgcagttctacggcctgagcgagaacgacgagtggacccaggacagagccaagcccgtgacccagatcgtgtctgccgaagcctggggcagagccgatgatgtgattaagatccactggcaggaaaagaagtccaacaccatcctgggcagccaggaaggcaacaccatgaagaccaacgacacctacatgaagttcagctggctgaccgtgcccgagaagtccctggacaaagaacacagatgcatcgtgcggcacgaaaacaacaagaacggcgtggaccaggaaatcatcttcccacccatcaagaccgatgtgattacaatggaccccaaggacaactgctccaaggacgccaacgataccctgctgctccagctgaccaacaccagcgcctactacatgtacttgttgctgctgctgaagtccgtggtgtacttcgccatcatcacatgctgcctgctgatggctatggtcaagcggaaggacagccggggaagggccaagcgatctggatctggagcaacaaacttctcactactcaaacaagcaggtgacgtggaggagaatcccgggcctactagtatggactggatttggcgcatccttttccttgtcggcgctgctaccggcgcgcattccttcgaagttcagttggtagagtctggaggcggagtggtacaaccggggcggtctcttagacttagttgcgcagcaagcggtttctctttctctggctatgggatgcactgggtgagacaggcccctgggaaaggactggagtgggtggcctacatttcatacgacgggagtaataaatactatgcagactccgttaagggcaggttcacgatctctcgggacaattccaagaatacattgtatcttcagatgaatagtctccgagctgaagacacggcggtttactactgcgctaaagacccggcctggggacttcgacttggagagagttctagctacgattttgacatttggggacaagggacaatggtcactgtctcaagtacgcgtatccagaaccctgatcctgccgtgtaccagctgcgggatagcaagagcagcgacaagagcgtgtgtctgttcaccgacttcgacagccagaccaacgtgtcccagagcaaggactccgacgtgtacatcaccgataagtgcgtgctggacatgcggagcatggacttcaagagcaactccgccgtggcctggtccaacaagtccgatttcgcctgcgccaacgccttcaacaacagcattatccccgaggacacattcttcccaagccccgagagcagcgactccaccgaccacgtgaagcccaaagagacagagaacaccaagcagcccagcaagagctgccacaagcccaaggccatcgtgcacaccgagaaagtgaacatgatgagcctgaccgtgctgggcctgcggatgctgttcgccaaaaccgtggccgtgaacttcctgctgaccgccaagctgttcttcctcctcaccgcc

SEQ ID NO: 7010 - DNA, 2235 bp, synthetic construct
  source 1..2235: mol_type = other DNA
atggccttaccagtgaccgccttgctcctgccgctggccttgctgctccacgccgccaggccgcagctccagctgcaagagtctggacctggcctggtcaagcctagcgagacactgagcctgacctgtaccgtgtccggcgatagcatcagcagcggcgattactactggggctggatcagacagcctcctggcaaaggactggaatggatcggccacatctactacagcggcgtgacctactacaaccccagcctgaagtccagagtgaccatcagcgtggacaccagccggaaccagttctccctgaagctgtctagcgtgacagccgccgataccgccgtgtactactgcaccagagaggacagcagcaactggcggagtagaggccagggaacactggtcacagttagctctctcgagatccagaaccctgatcctgccgtgtaccagctgcgggatagcaagagcagcgacaagagcgtgtgtctgttcaccgacttcgacagccagaccaacgtgtcccagagcaaggactccgacgtgtacatcaccgataagtgcgtgctggacatgcggagcatggacttcaagagcaactccgccgtggcctggtccaacaagtccgatttcgcctgcgccaacgccttcaacaacagcattatccccgaggacacattcttcccaagccccgagagcagcgactccaccgaccacgtgaagcccaaagagacagagaacaccaagcagcccagcaagagctgccacaagcccaaggccatcgtgcacaccgagaaagtgaacatgatgagcctgaccgtgctgggcctgcggatgctgttcgccaaaaccgtggccgtgaacttcctgctgaccgccaagctgttcttcctcctcaccgcccgcgccaagagaagcggatctggcgtgaagcagaccctgaatttcgacctgctgaagctggctggcgacgtggaatccaacccaggccctactagtatggactggatttggcgcatccttttccttgtcggcgctgctaccggcgcgcattccttcgaagttcagttggtagagtctggaggcggagtggtacaaccggggcggtctcttagacttagttgcgcagcaagcggtttctctttctctggctatgggatgcactgggtgagacaggcccctgggaaaggactggagtgggtggcctacatttcatacgacgggagtaataaatactatgcagactccgttaagggcaggttcacgatctctcgggacaattccaagaatacattgtatcttcagatgaatagtctccgagctgaagacacggcggtttactactgcgctaaagacccggcctggggacttcgacttggagagagttctagctacgattttgacatttggggacaagggacaatggtcactgtctcaagtacgcgtgaggacctgaagaacgtgttcccacctgaggtggccgtgttcgagcctagcgaggccgagatcagccacacccagaaagccaccctcgtgtgcctggctaccggcttctaccccgaccatgtggaactgtcttggtgggtcaacggcaaagaggtgcacagcggcgtgtgtaccgacccccagccactgaaagaacagcccgccctgaacgacagccggtactgcctgagcagcagactgagagtgtccgccaccttctggcagaacccccggaaccacttcagatgccaggtgcagttctacggcctgagcgagaacgacgagtggacccaggacagagccaagcccgtgacccagatcgtgtctgccgaagcctggggcagagccgatgatgtgattaagatccactggcaggaaaagaagtccaacaccatcctgggcagccaggaaggcaacaccatgaagaccaacgacacctacatgaagttcagctggctgaccgtgcccgagaagtccctggacaaagaacacagatgcatcgtgcggcacgaaaacaacaagaacggcgtggaccaggaaatcatcttcccacccatcaagaccgatgtgattacaatggaccccaaggacaactgctccaaggacgccaacgataccctgctgctccagctgaccaacaccagcgcctactacatgtacttgttgctgctgctgaagtccgtggtgtacttcgccatcatcacatgctgcctgctgatggctatggtcaagcggaaggacagccgggga

SEQ ID NO: 7011 - DNA, 2190 bp, synthetic construct
  source 1..2190: mol_type = other DNA
atggccttaccagtgaccgccttgctcctgccgctggccttgctgctccacgccgccaggccgcagctccagctgcaagagtctggacctggcctggtcaagcctagcgagacactgagcctgacctgtaccgtgtccggcgatagcatcagcagcggcgattactactggggctggatcagacagcctcctggcaaaggactggaatggatcggccacatctactacagcggcgtgacctactacaaccccagcctgaagtccagagtgaccatcagcgtggacaccagccggaaccagttctccctgaagctgtctagcgtgacagccgccgataccgccgtgtactactgcaccagagaggacagcagcaactggcggagtagaggccagggaacactggtcacagttagctctctcgaggacctgaagaacgtgttcccacctgaggtggccgtgttcgagcctagcgaggccgagatcagccacacccagaaagccaccctcgtgtgcctggctaccggcttctaccccgaccatgtggaactgtcttggtgggtcaacggcaaagaggtgcacagcggcgtgtgtaccgacccccagccactgaaagaacagcccgccctgaacgacagccggtactgcctgagcagcagactgagagtgtccgccaccttctggcagaacccccggaaccacttcagatgccaggtgcagttctacggcctgagcgagaacgacgagtggacccaggacagagccaagcccgtgacccagatcgtgtctgccgaagcctggggcagagccgatgatgtgattaagatccactggcaggaaaagaagtccaacaccatcctgggcagccaggaaggcaacaccatgaagaccaacgacacctacatgaagttcagctggctgaccgtgcccgagaagtccctggacaaagaacacagatgcatcgtgcggcacgaaaacaacaagaacggcgtggaccaggaaatcatcttcccacccatcaagaccgatgtgattacaatggaccccaaggacaactgctccaaggacgccaacgataccctgctgctccagctgaccaacaccagcgcctactacatgtacttgttgctgctgctgaagtccgtggtgtacttcgccatcatcacatgctgcctgctgatggctatggtcaagcggaaggacagccggggaagggccaagcgatctggatctggagcaacaaacttctcactactcaaacaagcaggtgacgtggaggagaatcccgggcctactagtatggactggatttggcgcatccttttccttgtcggcgctgctaccggcgcgcattccttcgaagtgcagctggttgaatctggcggaggactggttcagcctggcggatctctgagactgtcttgtgccgccagcggcttcagcttcagcgacttttggatgagctgggtccgacaggcccctggcaaaggacttgaatgggtcgccacaatcagccaggccggcagcgagaaggactacgtggactctgtgaagggcagattcaccatcagccgggacaacgccaagaagtccctgtacctccagatgaacagcctgagagccgaggacaccgccgtgtactattgtgcctctggcgtgtacagcttcgactacagaggccagggcaccctggtcacagtctcttctacgcgtatccagaaccctgatcctgccgtgtaccagctgcgggatagcaagagcagcgacaagagcgtgtgtctgttcaccgacttcgacagccagaccaacgtgtcccagagcaaggactccgacgtgtacatcaccgataagtgcgtgctggacatgcggagcatggacttcaagagcaactccgccgtggcctggtccaacaagtccgatttcgcctgcgccaacgccttcaacaacagcattatccccgaggacacattcttcccaagccccgagagcagcgactccaccgaccacgtgaagcccaaagagacagagaacaccaagcagcccagcaagagctgccacaagcccaaggccatcgtgcacaccgagaaagtgaacatgatgagcctgaccgtgctgggcctgcggatgctgttcgccaaaaccgtggccgtgaacttcctgctgaccgccaagctgttcttcctcctcaccgcc

SEQ ID NO: 7012 - DNA, 2202 bp, synthetic construct
  source 1..2202: mol_type = other DNA
atggccttaccagtgaccgccttgctcctgccgctggccttgctgctccacgccgccaggccgcagctccagctgcaagagtctggacctggcctggtcaagcctagcgagacactgagcctgacctgtaccgtgtccggcgatagcatcagcagcggcgattactactggggctggatcagacagcctcctggcaaaggactggaatggatcggccacatctactacagcggcgtgacctactacaaccccagcctgaagtccagagtgaccatcagcgtggacaccagccggaaccagttctccctgaagctgtctagcgtgacagccgccgataccgccgtgtactactgcaccagagaggacagcagcaactggcggagtagaggccagggaacactggtcacagttagctctctcgagatccagaaccctgatcctgccgtgtaccagctgcgggatagcaagagcagcgacaagagcgtgtgtctgttcaccgacttcgacagccagaccaacgtgtcccagagcaaggactccgacgtgtacatcaccgataagtgcgtgctggacatgcggagcatggacttcaagagcaactccgccgtggcctggtccaacaagtccgatttcgcctgcgccaacgccttcaacaacagcattatccccgaggacacattcttcccaagccccgagagcagcgactccaccgaccacgtgaagcccaaagagacagagaacaccaagcagcccagcaagagctgccacaagcccaaggccatcgtgcacaccgagaaagtgaacatgatgagcctgaccgtgctgggcctgcggatgctgttcgccaaaaccgtggccgtgaacttcctgctgaccgccaagctgttcttcctcctcaccgcccgcgccaagagaagcggatctggcgtgaagcagaccctgaatttcgacctgctgaagctggctggcgacgtggaatccaacccaggccctactagtatggactggatttggcgcatccttttccttgtcggcgctgctaccggcgcgcattccttcgaagtgcagctggttgaatctggcggaggactggttcagcctggcggatctctgagactgtcttgtgccgccagcggcttcagcttcagcgacttttggatgagctgggtccgacaggcccctggcaaaggacttgaatgggtcgccacaatcagccaggccggcagcgagaaggactacgtggactctgtgaagggcagattcaccatcagccgggacaacgccaagaagtccctgtacctccagatgaacagcctgagagccgaggacaccgccgtgtactattgtgcctctggcgtgtacagcttcgactacagaggccagggcaccctggtcacagtctcttctacgcgtgaggacctgaagaacgtgttcccacctgaggtggccgtgttcgagcctagcgaggccgagatcagccacacccagaaagccaccctcgtgtgcctggctaccggcttctaccccgaccatgtggaactgtcttggtgggtcaacggcaaagaggtgcacagcggcgtgtgtaccgacccccagccactgaaagaacagcccgccctgaacgacagccggtactgcctgagcagcagactgagagtgtccgccaccttctggcagaacccccggaaccacttcagatgccaggtgcagttctacggcctgagcgagaacgacgagtggacccaggacagagccaagcccgtgacccagatcgtgtctgccgaagcctggggcagagccgatgatgtgattaagatccactggcaggaaaagaagtccaacaccatcctgggcagccaggaaggcaacaccatgaagaccaacgacacctacatgaagttcagctggctgaccgtgcccgagaagtccctggacaaagaacacagatgcatcgtgcggcacgaaaacaacaagaacggcgtggaccaggaaatcatcttcccacccatcaagaccgatgtgattacaatggaccccaaggacaactgctccaaggacgccaacgataccctgctgctccagctgaccaacaccagcgcctactacatgtacttgttgctgctgctgaagtccgtggtgtacttcgccatcatcacatgctgcctgctgatggctatggtcaagcggaaggacagccgggga

SEQ ID NO: 7013 - DNA, 2196 bp, synthetic construct
  source 1..2196: mol_type = other DNA
atggccttaccagtgaccgccttgctcctgccgctggccttgctgctccacgccgccaggccgcagctccagctgcaagagtctggacctggcctggtcaagcctagcgagacactgagcctgacctgtaccgtgtccggcgatagcatcagcagcggcgattactactggggctggatcagacagcctcctggcaaaggactggaatggatcggccacatctactacagcggcgtgacctactacaaccccagcctgaagtccagagtgaccatcagcgtggacaccagccggaaccagttctccctgaagctgtctagcgtgacagccgccgataccgccgtgtactactgcaccagagaggacagcagcaactggcggagtagaggccagggaacactggtcacagttagctctctcgaggacctgaagaacgtgttcccacctgaggtggccgtgttcgagcctagcgaggccgagatcagccacacccagaaagccaccctcgtgtgcctggctaccggcttctaccccgaccatgtggaactgtcttggtgggtcaacggcaaagaggtgcacagcggcgtgtgtaccgacccccagccactgaaagaacagcccgccctgaacgacagccggtactgcctgagcagcagactgagagtgtccgccaccttctggcagaacccccggaaccacttcagatgccaggtgcagttctacggcctgagcgagaacgacgagtggacccaggacagagccaagcccgtgacccagatcgtgtctgccgaagcctggggcagagccgatgatgtgattaagatccactggcaggaaaagaagtccaacaccatcctgggcagccaggaaggcaacaccatgaagaccaacgacacctacatgaagttcagctggctgaccgtgcccgagaagtccctggacaaagaacacagatgcatcgtgcggcacgaaaacaacaagaacggcgtggaccaggaaatcatcttcccacccatcaagaccgatgtgattacaatggaccccaaggacaactgctccaaggacgccaacgataccctgctgctccagctgaccaacaccagcgcctactacatgtacttgttgctgctgctgaagtccgtggtgtacttcgccatcatcacatgctgcctgctgatggctatggtcaagcggaaggacagccggggaagggccaagcgatctggatctggagcaacaaacttctcactactcaaacaagcaggtgacgtggaggagaatcccgggcctactagtatggactggatttggcgcatccttttccttgtcggcgctgctaccggcgcgcattccttccaggtgcagctggttgaatctggcggaggactggttcagcctggcggatctctgagactgtcttgtgccgccagcggcttcaccttcaccaatcacgccatgagctgggtccgacaggcccctggaaaaggactggaactggtgtctagcatcagcggcaacggcagaaccacctactacgccgatagcgtgaagggcagattcaccatcagccgggacatcagcaagaacaccctggacctccagatgaacagcctgagagccgaggataccgccgtgtactactgtgccaaggatggcggagagacactggtggatagcagaggccagggcacactggtcacagtgtcatctacgcgtatccagaaccctgatcctgccgtgtaccagctgcgggatagcaagagcagcgacaagagcgtgtgtctgttcaccgacttcgacagccagaccaacgtgtcccagagcaaggactccgacgtgtacatcaccgataagtgcgtgctggacatgcggagcatggacttcaagagcaactccgccgtggcctggtccaacaagtccgatttcgcctgcgccaacgccttcaacaacagcattatccccgaggacacattcttcccaagccccgagagcagcgactccaccgaccacgtgaagcccaaagagacagagaacaccaagcagcccagcaagagctgccacaagcccaaggccatcgtgcacaccgagaaagtgaacatgatgagcctgaccgtgctgggcctgcggatgctgttcgccaaaaccgtggccgtgaacttcctgctgaccgccaagctgttcttcctcctcaccgcc

SEQ ID NO: 7014 - DNA, 2208 bp, synthetic construct
  source 1..2208: mol_type = other DNA
atggccttaccagtgaccgccttgctcctgccgctggccttgctgctccacgccgccaggccgcagctccagctgcaagagtctggacctggcctggtcaagcctagcgagacactgagcctgacctgtaccgtgtccggcgatagcatcagcagcggcgattactactggggctggatcagacagcctcctggcaaaggactggaatggatcggccacatctactacagcggcgtgacctactacaaccccagcctgaagtccagagtgaccatcagcgtggacaccagccggaaccagttctccctgaagctgtctagcgtgacagccgccgataccgccgtgtactactgcaccagagaggacagcagcaactggcggagtagaggccagggaacactggtcacagttagctctctcgagatccagaaccctgatcctgccgtgtaccagctgcgggatagcaagagcagcgacaagagcgtgtgtctgttcaccgacttcgacagccagaccaacgtgtcccagagcaaggactccgacgtgtacatcaccgataagtgcgtgctggacatgcggagcatggacttcaagagcaactccgccgtggcctggtccaacaagtccgatttcgcctgcgccaacgccttcaacaacagcattatccccgaggacacattcttcccaagccccgagagcagcgactccaccgaccacgtgaagcccaaagagacagagaacaccaagcagcccagcaagagctgccacaagcccaaggccatcgtgcacaccgagaaagtgaacatgatgagcctgaccgtgctgggcctgcggatgctgttcgccaaaaccgtggccgtgaacttcctgctgaccgccaagctgttcttcctcctcaccgcccgcgccaagagaagcggatctggcgtgaagcagaccctgaatttcgacctgctgaagctggctggcgacgtggaatccaacccaggccctactagtatggactggatttggcgcatccttttccttgtcggcgctgctaccggcgcgcattccttccaggtgcagctggttgaatctggcggaggactggttcagcctggcggatctctgagactgtcttgtgccgccagcggcttcaccttcaccaatcacgccatgagctgggtccgacaggcccctggaaaaggactggaactggtgtctagcatcagcggcaacggcagaaccacctactacgccgatagcgtgaagggcagattcaccatcagccgggacatcagcaagaacaccctggacctccagatgaacagcctgagagccgaggataccgccgtgtactactgtgccaaggatggcggagagacactggtggatagcagaggccagggcacactggtcacagtgtcatctacgcgtgaggacctgaagaacgtgttcccacctgaggtggccgtgttcgagcctagcgaggccgagatcagccacacccagaaagccaccctcgtgtgcctggctaccggcttctaccccgaccatgtggaactgtcttggtgggtcaacggcaaagaggtgcacagcggcgtgtgtaccgacccccagccactgaaagaacagcccgccctgaacgacagccggtactgcctgagcagcagactgagagtgtccgccaccttctggcagaacccccggaaccacttcagatgccaggtgcagttctacggcctgagcgagaacgacgagtggacccaggacagagccaagcccgtgacccagatcgtgtctgccgaagcctggggcagagccgatgatgtgattaagatccactggcaggaaaagaagtccaacaccatcctgggcagccaggaaggcaacaccatgaagaccaacgacacctacatgaagttcagctggctgaccgtgcccgagaagtccctggacaaagaacacagatgcatcgtgcggcacgaaaacaacaagaacggcgtggaccaggaaatcatcttcccacccatcaagaccgatgtgattacaatggaccccaaggacaactgctccaaggacgccaacgataccctgctgctccagctgaccaacaccagcgcctactacatgtacttgttgctgctgctgaagtccgtggtgtacttcgccatcatcacatgctgcctgctgatggctatggtcaagcggaaggacagccgggga

SEQ ID NO: 7015 - DNA, 2193 bp, synthetic construct
  source 1..2193: mol_type = other DNA
atggccttaccagtgaccgccttgctcctgccgctggccttgctgctccacgccgccaggccggaagtgcagctgcttgaaagtggcggcggactgattcagcctggcggatctctgagactgagctgtgccgccagcggcttcaccttttctagccacgccatgacctgggtccgacaggcacctggaaaagggcttgaatgggtgtccgccatcagcggctctggcgattacacacactacgccgacagcgtgaagggcagattcaccatcagcagagacaacagcaagaacaccgtgtacctccagatgaacagcctgagagccgaggacagcgccgtgtattattgcgccaaggatgaggatggcggcagcctgcttggacacagaggacaaggcaccctggtcaccgtttcttccctcgaggacctgaagaacgtgttcccacctgaggtggccgtgttcgagcctagcgaggccgagatcagccacacccagaaagccaccctcgtgtgcctggctaccggcttctaccccgaccatgtggaactgtcttggtgggtcaacggcaaagaggtgcacagcggcgtgtgtaccgacccccagccactgaaagaacagcccgccctgaacgacagccggtactgcctgagcagcagactgagagtgtccgccaccttctggcagaacccccggaaccacttcagatgccaggtgcagttctacggcctgagcgagaacgacgagtggacccaggacagagccaagcccgtgacccagatcgtgtctgccgaagcctggggcagagccgatgatgtgattaagatccactggcaggaaaagaagtccaacaccatcctgggcagccaggaaggcaacaccatgaagaccaacgacacctacatgaagttcagctggctgaccgtgcccgagaagtccctggacaaagaacacagatgcatcgtgcggcacgaaaacaacaagaacggcgtggaccaggaaatcatcttcccacccatcaagaccgatgtgattacaatggaccccaaggacaactgctccaaggacgccaacgataccctgctgctccagctgaccaacaccagcgcctactacatgtacttgttgctgctgctgaagtccgtggtgtacttcgccatcatcacatgctgcctgctgatggctatggtcaagcggaaggacagccggggaagggccaagcgatctggatctggagcaacaaacttctcactactcaaacaagcaggtgacgtggaggagaatcccgggcctactagtatggactggatttggcgcatccttttccttgtcggcgctgctaccggcgcgcattccttcgaagtgcagctggttgaatctggcggaggactggttcagcctggcggatctctgagactgtcttgtgccgccagcggcttcagcttcagcgacttttggatgagctgggtccgacaggcccctggcaaaggacttgaatgggtcgccacaatcagccaggccggcagcgagaaggactacgtggactctgtgaagggcagattcaccatcagccgggacaacgccaagaagtccctgtacctccagatgaacagcctgagagccgaggacaccgccgtgtactattgtgcctctggcgtgtacagcttcgactacagaggccagggcaccctggtcacagtctcttctacgcgtatccagaaccctgatcctgccgtgtaccagctgcgggatagcaagagcagcgacaagagcgtgtgtctgttcaccgacttcgacagccagaccaacgtgtcccagagcaaggactccgacgtgtacatcaccgataagtgcgtgctggacatgcggagcatggacttcaagagcaactccgccgtggcctggtccaacaagtccgatttcgcctgcgccaacgccttcaacaacagcattatccccgaggacacattcttcccaagccccgagagcagcgactccaccgaccacgtgaagcccaaagagacagagaacaccaagcagcccagcaagagctgccacaagcccaaggccatcgtgcacaccgagaaagtgaacatgatgagcctgaccgtgctgggcctgcggatgctgttcgccaaaaccgtggccgtgaacttcctgctgaccgccaagctgttcttcctcctcaccgcc

SEQ ID NO: 7016 - DNA, 2205 bp, synthetic construct
  source 1..2205: mol_type = other DNA
atggccttaccagtgaccgccttgctcctgccgctggccttgctgctccacgccgccaggccggaagtgcagctgcttgaaagtggcggcggactgattcagcctggcggatctctgagactgagctgtgccgccagcggcttcaccttttctagccacgccatgacctgggtccgacaggcacctggaaaagggcttgaatgggtgtccgccatcagcggctctggcgattacacacactacgccgacagcgtgaagggcagattcaccatcagcagagacaacagcaagaacaccgtgtacctccagatgaacagcctgagagccgaggacagcgccgtgtattattgcgccaaggatgaggatggcggcagcctgcttggacacagaggacaaggcaccctggtcaccgtttcttccctcgagatccagaaccctgatcctgccgtgtaccagctgcgggatagcaagagcagcgacaagagcgtgtgtctgttcaccgacttcgacagccagaccaacgtgtcccagagcaaggactccgacgtgtacatcaccgataagtgcgtgctggacatgcggagcatggacttcaagagcaactccgccgtggcctggtccaacaagtccgatttcgcctgcgccaacgccttcaacaacagcattatccccgaggacacattcttcccaagccccgagagcagcgactccaccgaccacgtgaagcccaaagagacagagaacaccaagcagcccagcaagagctgccacaagcccaaggccatcgtgcacaccgagaaagtgaacatgatgagcctgaccgtgctgggcctgcggatgctgttcgccaaaaccgtggccgtgaacttcctgctgaccgccaagctgttcttcctcctcaccgcccgcgccaagagaagcggatctggcgtgaagcagaccctgaatttcgacctgctgaagctggctggcgacgtggaatccaacccaggccctactagtatggactggatttggcgcatccttttccttgtcggcgctgctaccggcgcgcattccttcgaagtgcagctggttgaatctggcggaggactggttcagcctggcggatctctgagactgtcttgtgccgccagcggcttcagcttcagcgacttttggatgagctgggtccgacaggcccctggcaaaggacttgaatgggtcgccacaatcagccaggccggcagcgagaaggactacgtggactctgtgaagggcagattcaccatcagccgggacaacgccaagaagtccctgtacctccagatgaacagcctgagagccgaggacaccgccgtgtactattgtgcctctggcgtgtacagcttcgactacagaggccagggcaccctggtcacagtctcttctacgcgtgaggacctgaagaacgtgttcccacctgaggtggccgtgttcgagcctagcgaggccgagatcagccacacccagaaagccaccctcgtgtgcctggctaccggcttctaccccgaccatgtggaactgtcttggtgggtcaacggcaaagaggtgcacagcggcgtgtgtaccgacccccagccactgaaagaacagcccgccctgaacgacagccggtactgcctgagcagcagactgagagtgtccgccaccttctggcagaacccccggaaccacttcagatgccaggtgcagttctacggcctgagcgagaacgacgagtggacccaggacagagccaagcccgtgacccagatcgtgtctgccgaagcctggggcagagccgatgatgtgattaagatccactggcaggaaaagaagtccaacaccatcctgggcagccaggaaggcaacaccatgaagaccaacgacacctacatgaagttcagctggctgaccgtgcccgagaagtccctggacaaagaacacagatgcatcgtgcggcacgaaaacaacaagaacggcgtggaccaggaaatcatcttcccacccatcaagaccgatgtgattacaatggaccccaaggacaactgctccaaggacgccaacgataccctgctgctccagctgaccaacaccagcgcctactacatgtacttgttgctgctgctgaagtccgtggtgtacttcgccatcatcacatgctgcctgctgatggctatggtcaagcggaaggacagccgggga

SEQ ID NO: 7017 - DNA, 2211 bp, synthetic construct
  source 1..2211: mol_type = other DNA
atggccttaccagtgaccgccttgctcctgccgctggccttgctgctccacgccgccaggccgcaggtgcagctggttgaatctggcggaggactggttcagcctggcggatctctgagactgtcttgtgccgccagcggcttcaccttcaccaatcacgccatgagctgggtccgacaggcccctggaaaaggactggaactggtgtctagcatcagcggcaacggcagaaccacctactacgccgatagcgtgaagggcagattcaccatcagccgggacatcagcaagaacaccctggacctccagatgaacagcctgagagccgaggataccgccgtgtactactgtgccaaggatggcggagagacactggtggatagcagaggccagggcacactggtcacagtgtcatctctcgaggacctgaagaacgtgttcccacctgaggtggccgtgttcgagcctagcgaggccgagatcagccacacccagaaagccaccctcgtgtgcctggctaccggcttctaccccgaccatgtggaactgtcttggtgggtcaacggcaaagaggtgcacagcggcgtgtgtaccgacccccagccactgaaagaacagcccgccctgaacgacagccggtactgcctgagcagcagactgagagtgtccgccaccttctggcagaacccccggaaccacttcagatgccaggtgcagttctacggcctgagcgagaacgacgagtggacccaggacagagccaagcccgtgacccagatcgtgtctgccgaagcctggggcagagccgatgatgtgattaagatccactggcaggaaaagaagtccaacaccatcctgggcagccaggaaggcaacaccatgaagaccaacgacacctacatgaagttcagctggctgaccgtgcccgagaagtccctggacaaagaacacagatgcatcgtgcggcacgaaaacaacaagaacggcgtggaccaggaaatcatcttcccacccatcaagaccgatgtgattacaatggaccccaaggacaactgctccaaggacgccaacgataccctgctgctccagctgaccaacaccagcgcctactacatgtacttgttgctgctgctgaagtccgtggtgtacttcgccatcatcacatgctgcctgctgatggctatggtcaagcggaaggacagccggggaagggccaagcgatctggatctggagcaacaaacttctcactactcaaacaagcaggtgacgtggaggagaatcccgggcctactagtatggactggatttggcgcatccttttccttgtcggcgctgctaccggcgcgcattccttcgaagaagttcagctgcttgagtctggcggaggactggttcaacctggcggaagcctgagactgtcttgtgccgccagcggcttcatcttcagcagctacgccatgagctgggtccgacaggctcctggaaagggccaagaatgggtttccggcgttagcggcacaggcgtgaacacctactacgccgatagcgtgaagggcagattcaccatcagccgggacaacagcaagaacaccctgtacctccagatgaacagcctgagagccgaggacaccgccgtgtactattgtgcctctggcaaaggctgggacagcggctcttggtacgaggactatagaggccagggcaccctggtcacagtttcttcaacgcgtatccagaaccctgatcctgccgtgtaccagctgcgggatagcaagagcagcgacaagagcgtgtgtctgttcaccgacttcgacagccagaccaacgtgtcccagagcaaggactccgacgtgtacatcaccgataagtgcgtgctggacatgcggagcatggacttcaagagcaactccgccgtggcctggtccaacaagtccgatttcgcctgcgccaacgccttcaacaacagcattatccccgaggacacattcttcccaagccccgagagcagcgactccaccgaccacgtgaagcccaaagagacagagaacaccaagcagcccagcaagagctgccacaagcccaaggccatcgtgcacaccgagaaagtgaacatgatgagcctgaccgtgctgggcctgcggatgctgttcgccaaaaccgtggccgtgaacttcctgctgaccgccaagctgttcttcctcctcaccgcc

SEQ ID NO: 7018 - DNA, 2223 bp, synthetic construct
  source 1..2223: mol_type = other DNA
atggccttaccagtgaccgccttgctcctgccgctggccttgctgctccacgccgccaggccgcaggtgcagctggttgaatctggcggaggactggttcagcctggcggatctctgagactgtcttgtgccgccagcggcttcaccttcaccaatcacgccatgagctgggtccgacaggcccctggaaaaggactggaactggtgtctagcatcagcggcaacggcagaaccacctactacgccgatagcgtgaagggcagattcaccatcagccgggacatcagcaagaacaccctggacctccagatgaacagcctgagagccgaggataccgccgtgtactactgtgccaaggatggcggagagacactggtggatagcagaggccagggcacactggtcacagtgtcatctctcgagatccagaaccctgatcctgccgtgtaccagctgcgggatagcaagagcagcgacaagagcgtgtgtctgttcaccgacttcgacagccagaccaacgtgtcccagagcaaggactccgacgtgtacatcaccgataagtgcgtgctggacatgcggagcatggacttcaagagcaactccgccgtggcctggtccaacaagtccgatttcgcctgcgccaacgccttcaacaacagcattatccccgaggacacattcttcccaagccccgagagcagcgactccaccgaccacgtgaagcccaaagagacagagaacaccaagcagcccagcaagagctgccacaagcccaaggccatcgtgcacaccgagaaagtgaacatgatgagcctgaccgtgctgggcctgcggatgctgttcgccaaaaccgtggccgtgaacttcctgctgaccgccaagctgttcttcctcctcaccgcccgcgccaagagaagcggatctggcgtgaagcagaccctgaatttcgacctgctgaagctggctggcgacgtggaatccaacccaggccctactagtatggactggatttggcgcatccttttccttgtcggcgctgctaccggcgcgcattccttcgaagaagttcagctgcttgagtctggcggaggactggttcaacctggcggaagcctgagactgtcttgtgccgccagcggcttcatcttcagcagctacgccatgagctgggtccgacaggctcctggaaagggccaagaatgggtttccggcgttagcggcacaggcgtgaacacctactacgccgatagcgtgaagggcagattcaccatcagccgggacaacagcaagaacaccctgtacctccagatgaacagcctgagagccgaggacaccgccgtgtactattgtgcctctggcaaaggctgggacagcggctcttggtacgaggactatagaggccagggcaccctggtcacagtttcttcaacgcgtgaggacctgaagaacgtgttcccacctgaggtggccgtgttcgagcctagcgaggccgagatcagccacacccagaaagccaccctcgtgtgcctggctaccggcttctaccccgaccatgtggaactgtcttggtgggtcaacggcaaagaggtgcacagcggcgtgtgtaccgacccccagccactgaaagaacagcccgccctgaacgacagccggtactgcctgagcagcagactgagagtgtccgccaccttctggcagaacccccggaaccacttcagatgccaggtgcagttctacggcctgagcgagaacgacgagtggacccaggacagagccaagcccgtgacccagatcgtgtctgccgaagcctggggcagagccgatgatgtgattaagatccactggcaggaaaagaagtccaacaccatcctgggcagccaggaaggcaacaccatgaagaccaacgacacctacatgaagttcagctggctgaccgtgcccgagaagtccctggacaaagaacacagatgcatcgtgcggcacgaaaacaacaagaacggcgtggaccaggaaatcatcttcccacccatcaagaccgatgtgattacaatggaccccaaggacaactgctccaaggacgccaacgataccctgctgctccagctgaccaacaccagcgcctactacatgtacttgttgctgctgctgaagtccgtggtgtacttcgccatcatcacatgctgcctgctgatggctatggtcaagcggaaggacagccgggga

SEQ ID NO: 7019 - DNA, 2199 bp, synthetic construct
  source 1..2199: mol_type = other DNA
atggccttaccagtgaccgccttgctcctgccgctggccttgctgctccacgccgccaggccggaagtgcagctggttgaatctggcggaggactggttcaggctggcggatctctgagactgtcttgtgccgccagcggcagaacctttagcatgggctggtttagacaggcccctggcaaagagagagagttcgtcgccgccatcacatactctggcggcagcccttactacgccgactctgtgaagggcagattcaccatcagccgggacaacgccaagaacaccgtgtacctccagatgaacagcctgaagcctgaggacaccgccgtgtactactgcgccgccaatccaacatacggcagcgactggaacgccgagaattggggccagggaacccaagtgacagtgtctagcctcgaggacctgaagaacgtgttcccacctgaggtggccgtgttcgagcctagcgaggccgagatcagccacacccagaaagccaccctcgtgtgcctggctaccggcttctaccccgaccatgtggaactgtcttggtgggtcaacggcaaagaggtgcacagcggcgtgtgtaccgacccccagccactgaaagaacagcccgccctgaacgacagccggtactgcctgagcagcagactgagagtgtccgccaccttctggcagaacccccggaaccacttcagatgccaggtgcagttctacggcctgagcgagaacgacgagtggacccaggacagagccaagcccgtgacccagatcgtgtctgccgaagcctggggcagagccgatgatgtgattaagatccactggcaggaaaagaagtccaacaccatcctgggcagccaggaaggcaacaccatgaagaccaacgacacctacatgaagttcagctggctgaccgtgcccgagaagtccctggacaaagaacacagatgcatcgtgcggcacgaaaacaacaagaacggcgtggaccaggaaatcatcttcccacccatcaagaccgatgtgattacaatggaccccaaggacaactgctccaaggacgccaacgataccctgctgctccagctgaccaacaccagcgcctactacatgtacttgttgctgctgctgaagtccgtggtgtacttcgccatcatcacatgctgcctgctgatggctatggtcaagcggaaggacagccggggaagggccaagcgatctggatctggagcaacaaacttctcactactcaaacaagcaggtgacgtggaggagaatcccgggcctactagtatggactggatttggcgcatccttttccttgtcggcgctgctaccggcgcgcattccttcgaacaactgcaactgcaagagtctggccctggcctggtcaagccttctgaaaccctgagcctgacctgtaccgtgtccggcggctctatcagcagcggcgattactactggggctggatcagacagcctccaggcaagggactcgaatggatcggcagcatcagctacagcggctccacctactacaacccaagcctgaagtccagagtgaccatcagcgtggacaccagcagaaaccagttctccctgaagctgagcagcgtgacagccgccgatacagccgtgtattattgcaccagagaggacagcagcaactggcggagtagaggacagggcacactggtcacagtgtcctctacgcgtatccagaaccctgatcctgccgtgtaccagctgcgggatagcaagagcagcgacaagagcgtgtgtctgttcaccgacttcgacagccagaccaacgtgtcccagagcaaggactccgacgtgtacatcaccgataagtgcgtgctggacatgcggagcatggacttcaagagcaactccgccgtggcctggtccaacaagtccgatttcgcctgcgccaacgccttcaacaacagcattatccccgaggacacattcttcccaagccccgagagcagcgactccaccgaccacgtgaagcccaaagagacagagaacaccaagcagcccagcaagagctgccacaagcccaaggccatcgtgcacaccgagaaagtgaacatgatgagcctgaccgtgctgggcctgcggatgctgttcgccaaaaccgtggccgtgaacttcctgctgaccgccaagctgttcttcctcctcaccgcc

SEQ ID NO: 7020 - DNA, 2211 bp, synthetic construct
  source 1..2211: mol_type = other DNA
atggccttaccagtgaccgccttgctcctgccgctggccttgctgctccacgccgccaggccggaagtgcagctggttgaatctggcggaggactggttcaggctggcggatctctgagactgtcttgtgccgccagcggcagaacctttagcatgggctggtttagacaggcccctggcaaagagagagagttcgtcgccgccatcacatactctggcggcagcccttactacgccgactctgtgaagggcagattcaccatcagccgggacaacgccaagaacaccgtgtacctccagatgaacagcctgaagcctgaggacaccgccgtgtactactgcgccgccaatccaacatacggcagcgactggaacgccgagaattggggccagggaacccaagtgacagtgtctagcctcgagatccagaaccctgatcctgccgtgtaccagctgcgggatagcaagagcagcgacaagagcgtgtgtctgttcaccgacttcgacagccagaccaacgtgtcccagagcaaggactccgacgtgtacatcaccgataagtgcgtgctggacatgcggagcatggacttcaagagcaactccgccgtggcctggtccaacaagtccgatttcgcctgcgccaacgccttcaacaacagcattatccccgaggacacattcttcccaagccccgagagcagcgactccaccgaccacgtgaagcccaaagagacagagaacaccaagcagcccagcaagagctgccacaagcccaaggccatcgtgcacaccgagaaagtgaacatgatgagcctgaccgtgctgggcctgcggatgctgttcgccaaaaccgtggccgtgaacttcctgctgaccgccaagctgttcttcctcctcaccgcccgcgccaagagaagcggatctggcgtgaagcagaccctgaatttcgacctgctgaagctggctggcgacgtggaatccaacccaggccctactagtatggactggatttggcgcatccttttccttgtcggcgctgctaccggcgcgcattccttcgaacaactgcaactgcaagagtctggccctggcctggtcaagccttctgaaaccctgagcctgacctgtaccgtgtccggcggctctatcagcagcggcgattactactggggctggatcagacagcctccaggcaagggactcgaatggatcggcagcatcagctacagcggctccacctactacaacccaagcctgaagtccagagtgaccatcagcgtggacaccagcagaaaccagttctccctgaagctgagcagcgtgacagccgccgatacagccgtgtattattgcaccagagaggacagcagcaactggcggagtagaggacagggcacactggtcacagtgtcctctacgcgtgaggacctgaagaacgtgttcccacctgaggtggccgtgttcgagcctagcgaggccgagatcagccacacccagaaagccaccctcgtgtgcctggctaccggcttctaccccgaccatgtggaactgtcttggtgggtcaacggcaaagaggtgcacagcggcgtgtgtaccgacccccagccactgaaagaacagcccgccctgaacgacagccggtactgcctgagcagcagactgagagtgtccgccaccttctggcagaacccccggaaccacttcagatgccaggtgcagttctacggcctgagcgagaacgacgagtggacccaggacagagccaagcccgtgacccagatcgtgtctgccgaagcctggggcagagccgatgatgtgattaagatccactggcaggaaaagaagtccaacaccatcctgggcagccaggaaggcaacaccatgaagaccaacgacacctacatgaagttcagctggctgaccgtgcccgagaagtccctggacaaagaacacagatgcatcgtgcggcacgaaaacaacaagaacggcgtggaccaggaaatcatcttcccacccatcaagaccgatgtgattacaatggaccccaaggacaactgctccaaggacgccaacgataccctgctgctccagctgaccaacaccagcgcctactacatgtacttgttgctgctgctgaagtccgtggtgtacttcgccatcatcacatgctgcctgctgatggctatggtcaagcggaaggacagccgggga

SEQ ID NO: 7021 - DNA, 3708 bp, synthetic construct
  source 1..3708: mol_type = other DNA
atggccttaccagtgaccgccttgctcctgccgctggccttgctgctccacgccgccaggccggaagtgcagctggttgaatctggcggaggactggttcaggctggcggatctctgagactgtcttgtgccgccagcggcagaacctttagcatgggctggtttagacaggcccctggcaaagagagagagttcgtcgccgccatcacatactctggcggcagcccttactacgccgactctgtgaagggcagattcaccatcagccgggacaacgccaagaacaccgtgtacctccagatgaacagcctgaagcctgaggacaccgccgtgtactactgcgccgccaatccaacatacggcagcgactggaacgccgagaattggggccagggaacccaagtgacagtgtctagcggtaccggcggaggcggatctggcggcggaggtagcggtggcggaggatctgaattcgacatccagatgacacagagccctagcagcctgtctgccagcgtgggagacagagtgaccatcacatgcaaggccagcgaccacatcaacaactggctggcctggtatcagcagaagcctggacaggcccctaagctgctgatctacggcgctaccacactggaaacaggcgtgcccagcagattttctggcagcggctctggcaccgactacaccctgacaatatccagcctccagcctgaggacttcgccacctactactgtcagcagagctggaacaccccttggacattcggccagggcaccaagctggaaatcaagagactcgaggacctgaagaacgtgttcccacctgaggtggccgtgttcgagcctagcgaggccgagatcagccacacccagaaagccaccctcgtgtgcctggctaccggcttctaccccgaccatgtggaactgtcttggtgggtcaacggcaaagaggtgcacagcggcgtgtgtaccgacccccagccactgaaagaacagcccgccctgaacgacagccggtactgcctgagcagcagactgagagtgtccgccaccttctggcagaacccccggaaccacttcagatgccaggtgcagttctacggcctgagcgagaacgacgagtggacccaggacagagccaagcccgtgacccagatcgtgtctgccgaagcctggggcagagccgatgatgtgattaagatccactggcaggaaaagaagtccaacaccatcctgggcagccaggaaggcaacaccatgaagaccaacgacacctacatgaagttcagctggctgaccgtgcccgagaagtccctggacaaagaacacagatgcatcgtgcggcacgaaaacaacaagaacggcgtggaccaggaaatcatcttcccacccatcaagaccgatgtgattacaatggaccccaaggacaactgctccaaggacgccaacgataccctgctgctccagctgaccaacaccagcgcctactacatgtacttgttgctgctgctgaagtccgtggtgtacttcgccatcatcacatgctgcctgctgatggctatggtcaagcggaaggacagccggggaagggccaagcgatctggatctggagcaacaaacttctcactactcaaacaagcaggtgacgtggaggagaatcccgggcctactagtgccaccatggactggatttggcgcatccttttccttgtcggcgctgctaccggcgcccattccgggcccgaagtgcaactggttgaatccggtggcggcctggtgcaagcaggcggatctctcagacttagctgtgccgcctccggcagaaccttcacaatgggatggtttaggcaggctccagggaaagagagagagttcgtcgccgccatctctctgtctcccacactggcctactacgccgactctgtgaaaggccggttcaccatctccagagataatgccaagaacaccgtggtgctgcaaatgaactctctgaaacccgaggatacagccctgtactattgtgccgctgaccggaagtccgtgatgagcatcagacccgattactggggacagggcacacaagtcacagtgtcctctggatccggcggcggaggatctggcggaggcggatctgggggcggaggctctttcgaacaagttcagcttcaacagcctggcgctgagctggtcaaacctggcgcttctgtgaagatgagctgcaaagccagcggctacgccttcagcagctactggatcaactggatgaagcagaaacccggccagggactcgaatggatcggccaaatctatcccggcgacggcgacaccaactacaacggcaagttcaagggcagagccacactgaccgccgatacctctagcagcacagcctacatgcagctgagcagcctgaccagcgaagatagcgccgtgtacttctgtgcccggtccatcacaacagtcgtgggctgcgctatggactattggggccagggaacaagcgtgaccgtgtctagtacgcgtatccagaaccctgatcctgccgtgtaccagctgcgggatagcaagagcagcgacaagagcgtgtgtctgttcaccgacttcgacagccagaccaacgtgtcccagagcaaggactccgacgtgtacatcaccgataagtgcgtgctggacatgcggagcatggacttcaagagcaactccgccgtggcctggtccaacaagtccgatttcgcctgcgccaacgccttcaacaacagcattatccccgaggacacattcttcccaagccccgagagcagcgactccaccgaccacgtgaagcccaaagagacagagaacaccaagcagcccagcaagagctgccacaagcccaaggccatcgtgcacaccgagaaagtgaacatgatgagcctgaccgtgctgggcctgcggatgctgttcgccaaaaccgtggccgtgaacttcctgctgaccgccaagctgttcttcctcctcaccgcccgcgccaagagaagcggatctggcgtgaagcagaccctgaatttcgacctgctgaagctggctggcgacgtggaatccaacccaggcccttctagaggccatatgaccgagtacaagcccacggtgcgcctcgccacccgcgacgacgtccccagggccgtacgcaccctcgccgccgcgttcgccgactaccccgccacgcgccacaccgtcgatccggaccgccacatcgagcgggtcaccgagctgcaagaactcttcctcacgcgcgtcgggctcgacatcggcaaggtgtgggtcgcggacgacggcgccgcggtggcggtctggaccacgccggagagcgtcgaagcgggggcggtgttcgccgagatcggcccgcgcatggccgagttgagcggttcccggctggccgcgcagcaacagatggaaggcctcctggcgccgcaccggcccaaggagcccgcgtggttcctggccaccgtcggcgtctcgcccgaccaccagggcaagggtctgggcagcgccgtcgtgctccccggagtggaggcggccgagcgcgccggggtgcccgccttcctggagacctccgcgccccgcaacctccccttctacgagcggctcggcttcaccgtcaccgccgacgtcgaggtgcccgaaggaccgcgcacctggtgcatgacccgcaagcccggtgcctga

SEQ ID NO: 7022 - DNA, 2622 bp, synthetic construct
  source 1..2622: mol_type = other DNA
atggccttaccagtgaccgccttgctcctgccgctggccttgctgctccacgccgccaggccggaagtgcagctggttgaatctggcggaggactggttcagcctggcggatctctgagactgtcttgtgccgcctctggcttcgccagcgactactatatcatcggctggttcagacaggcccctggcaaagagagagagggcgtcagctgtatcagcagcagatacgccaacaccaactacgccgacagcgtgaagggcagattcaccatcagccgggacaacgccaagaacaccgtgtacctccagatgaacagcctgaagcctgaggacaccgccgtgtactactgtgccgccgacaccagaagatacacctgtcctgacattgccaccatgcaccggaacttcgattcttggggccagggcacactggtcaccgtttcttctggtaccggcggaggcggatctggcggcggaggtagcggtggcggaggatctgaattcgacatccagatgacacagagccctagcagcctgtctgccagcgtgggagacagagtgaccatcacatgcaaggccagcgaccacatcaacaactggctggcctggtatcagcagaagcctggacaggcccctaagctgctgatctacggcgctaccacactggaaacaggcgtgcccagcagattttctggcagcggctctggcaccgactacaccctgacaatatccagcctccagcctgaggacttcgccacctactactgtcagcagagctggaacaccccttggacattcggccagggcaccaagctggaaatcaagagactcgaggacctgaagaacgtgttcccacctgaggtggccgtgttcgagcctagcgaggccgagatcagccacacccagaaagccaccctcgtgtgcctggctaccggcttctaccccgaccatgtggaactgtcttggtgggtcaacggcaaagaggtgcacagcggcgtgtgtaccgacccccagccactgaaagaacagcccgccctgaacgacagccggtactgcctgagcagcagactgagagtgtccgccaccttctggcagaacccccggaaccacttcagatgccaggtgcagttctacggcctgagcgagaacgacgagtggacccaggacagagccaagcccgtgacccagatcgtgtctgccgaagcctggggcagagccgatgatgtgattaagatccactggcaggaaaagaagtccaacaccatcctgggcagccaggaaggcaacaccatgaagaccaacgacacctacatgaagttcagctggctgaccgtgcccgagaagtccctggacaaagaacacagatgcatcgtgcggcacgaaaacaacaagaacggcgtggaccaggaaatcatcttcccacccatcaagaccgatgtgattacaatggaccccaaggacaactgctccaaggacgccaacgataccctgctgctccagctgaccaacaccagcgcctactacatgtacttgttgctgctgctgaagtccgtggtgtacttcgccatcatcacatgctgcctgctgatggctatggtcaagcggaaggacagccggggaagggccaagcgatctggatctggagcaacaaacttctcactactcaaacaagcaggtgacgtggaggagaatcccgggcctactagtatggactggatttggcgcatccttttccttgtcggcgctgctaccggcgcgcattccttcgaacaagttcagcttcaacagcctggcgctgagctggtcaaacctggcgcttctgtgaagatgagctgcaaagccagcggctacgccttcagcagctactggatcaactggatgaagcagaaacccggccagggactcgaatggatcggccaaatctatcccggcgacggcgacaccaactacaacggcaagttcaagggcagagccacactgaccgccgatacctctagcagcacagcctacatgcagctgagcagcctgaccagcgaagatagcgccgtgtacttctgtgcccggtccatcacaacagtcgtgggctgcgctatggactattggggccagggaacaagcgtgaccgtgtctagtacgcgtatccagaaccctgatcctgccgtgtaccagctgcgggatagcaagagcagcgacaagagcgtgtgtctgttcaccgacttcgacagccagaccaacgtgtcccagagcaaggactccgacgtgtacatcaccgataagtgcgtgctggacatgcggagcatggacttcaagagcaactccgccgtggcctggtccaacaagtccgatttcgcctgcgccaacgccttcaacaacagcattatccccgaggacacattcttcccaagccccgagagcagcgactccaccgaccacgtgaagcccaaagagacagagaacaccaagcagcccagcaagagctgccacaagcccaaggccatcgtgcacaccgagaaagtgaacatgatgagcctgaccgtgctgggcctgcggatgctgttcgccaaaaccgtggccgtgaacttcctgctgaccgccaagctgttcttcctcctcaccgcctaa

SEQ ID NO: 7023 - DNA, 2622 bp, synthetic construct
  source 1..2622: mol_type = other DNA
atggccttaccagtgaccgccttgctcctgccgctggccttgctgctccacgccgccaggccggaagtgcagctggttgaatctggcggaggactggttcagcctggcggatctctgagactgagctgtgaagccagcggcttcgccagcgacgattacatcatcggctggttcagacaggcccctggcaaagagagagagggcgtcagctgcatcagctctaagtacgccaacaccgtgtacaccgacagcgtgaagggcagattcagactgagcagaggcaccgccaagaataccgtgtacctccagatgagcgccctgaagcctgaggataccgccgtgtactactgcgctatggacagccgcagagtgacatgccctgagatcagcaccatgcaccggaacttcgattcttggggccagggcacactggtcacagtgtcatctggtaccggcggaggcggatctggcggcggaggtagcggtggcggaggatctgaattcgacatccagatgacacagagccctagcagcctgtctgccagcgtgggagacagagtgaccatcacatgcaaggccagcgaccacatcaacaactggctggcctggtatcagcagaagcctggacaggcccctaagctgctgatctacggcgctaccacactggaaacaggcgtgcccagcagattttctggcagcggctctggcaccgactacaccctgacaatatccagcctccagcctgaggacttcgccacctactactgtcagcagagctggaacaccccttggacattcggccagggcaccaagctggaaatcaagagactcgaggacctgaagaacgtgttcccacctgaggtggccgtgttcgagcctagcgaggccgagatcagccacacccagaaagccaccctcgtgtgcctggctaccggcttctaccccgaccatgtggaactgtcttggtgggtcaacggcaaagaggtgcacagcggcgtgtgtaccgacccccagccactgaaagaacagcccgccctgaacgacagccggtactgcctgagcagcagactgagagtgtccgccaccttctggcagaacccccggaaccacttcagatgccaggtgcagttctacggcctgagcgagaacgacgagtggacccaggacagagccaagcccgtgacccagatcgtgtctgccgaagcctggggcagagccgatgatgtgattaagatccactggcaggaaaagaagtccaacaccatcctgggcagccaggaaggcaacaccatgaagaccaacgacacctacatgaagttcagctggctgaccgtgcccgagaagtccctggacaaagaacacagatgcatcgtgcggcacgaaaacaacaagaacggcgtggaccaggaaatcatcttcccacccatcaagaccgatgtgattacaatggaccccaaggacaactgctccaaggacgccaacgataccctgctgctccagctgaccaacaccagcgcctactacatgtacttgttgctgctgctgaagtccgtggtgtacttcgccatcatcacatgctgcctgctgatggctatggtcaagcggaaggacagccggggaagggccaagcgatctggatctggagcaacaaacttctcactactcaaacaagcaggtgacgtggaggagaatcccgggcctactagtatggactggatttggcgcatccttttccttgtcggcgctgctaccggcgcgcattccttcgaacaagttcagcttcaacagcctggcgctgagctggtcaaacctggcgcttctgtgaagatgagctgcaaagccagcggctacgccttcagcagctactggatcaactggatgaagcagaaacccggccagggactcgaatggatcggccaaatctatcccggcgacggcgacaccaactacaacggcaagttcaagggcagagccacactgaccgccgatacctctagcagcacagcctacatgcagctgagcagcctgaccagcgaagatagcgccgtgtacttctgtgcccggtccatcacaacagtcgtgggctgcgctatggactattggggccagggaacaagcgtgaccgtgtctagtacgcgtatccagaaccctgatcctgccgtgtaccagctgcgggatagcaagagcagcgacaagagcgtgtgtctgttcaccgacttcgacagccagaccaacgtgtcccagagcaaggactccgacgtgtacatcaccgataagtgcgtgctggacatgcggagcatggacttcaagagcaactccgccgtggcctggtccaacaagtccgatttcgcctgcgccaacgccttcaacaacagcattatccccgaggacacattcttcccaagccccgagagcagcgactccaccgaccacgtgaagcccaaagagacagagaacaccaagcagcccagcaagagctgccacaagcccaaggccatcgtgcacaccgagaaagtgaacatgatgagcctgaccgtgctgggcctgcggatgctgttcgccaaaaccgtggccgtgaacttcctgctgaccgccaagctgttcttcctcctcaccgcctaa

SEQ ID NO: 7024 - DNA, 2634 bp, synthetic construct
  source 1..2634: mol_type = other DNA
atggccttaccagtgaccgccttgctcctgccgctggccttgctgctccacgccgccaggccggaagtgcagctggttgaatctggcggaggactggttcagcctggcggatctctgagactgtcttgtgccgcctctggcttcgccagcgactactatatcatcggctggttcagacaggcccctggcaaagagagagagggcgtcagctgtatcagcagcagatacgccaacaccaactacgccgacagcgtgaagggcagattcaccatcagccgggacaacgccaagaacaccgtgtacctccagatgaacagcctgaagcctgaggacaccgccgtgtactactgtgccgccgacaccagaagatacacctgtcctgacattgccaccatgcaccggaacttcgattcttggggccagggcacactggtcaccgtttcttctggtaccggcggaggcggatctggcggcggaggtagcggtggcggaggatctgaattcgacatccagatgacacagagccctagcagcctgtctgccagcgtgggagacagagtgaccatcacatgcaaggccagcgaccacatcaacaactggctggcctggtatcagcagaagcctggacaggcccctaagctgctgatctacggcgctaccacactggaaacaggcgtgcccagcagattttctggcagcggctctggcaccgactacaccctgacaatatccagcctccagcctgaggacttcgccacctactactgtcagcagagctggaacaccccttggacattcggccagggcaccaagctggaaatcaagagactcgagatccagaaccctgatcctgccgtgtaccagctgcgggatagcaagagcagcgacaagagcgtgtgtctgttcaccgacttcgacagccagaccaacgtgtcccagagcaaggactccgacgtgtacatcaccgataagtgcgtgctggacatgcggagcatggacttcaagagcaactccgccgtggcctggtccaacaagtccgatttcgcctgcgccaacgccttcaacaacagcattatccccgaggacacattcttcccaagccccgagagcagcgactccaccgaccacgtgaagcccaaagagacagagaacaccaagcagcccagcaagagctgccacaagcccaaggccatcgtgcacaccgagaaagtgaacatgatgagcctgaccgtgctgggcctgcggatgctgttcgccaaaaccgtggccgtgaacttcctgctgaccgccaagctgttcttcctcctcaccgcccgcgccaagagaagcggatctggcgtgaagcagaccctgaatttcgacctgctgaagctggctggcgacgtggaatccaacccaggccctactagtatggactggatttggcgcatccttttccttgtcggcgctgctaccggcgcgcattccttcgaacaagttcagcttcaacagcctggcgctgagctggtcaaacctggcgcttctgtgaagatgagctgcaaagccagcggctacgccttcagcagctactggatcaactggatgaagcagaaacccggccagggactcgaatggatcggccaaatctatcccggcgacggcgacaccaactacaacggcaagttcaagggcagagccacactgaccgccgatacctctagcagcacagcctacatgcagctgagcagcctgaccagcgaagatagcgccgtgtacttctgtgcccggtccatcacaacagtcgtgggctgcgctatggactattggggccagggaacaagcgtgaccgtgtctagtacgcgtgaggacctgaagaacgtgttcccacctgaggtggccgtgttcgagcctagcgaggccgagatcagccacacccagaaagccaccctcgtgtgcctggctaccggcttctaccccgaccatgtggaactgtcttggtgggtcaacggcaaagaggtgcacagcggcgtgtgtaccgacccccagccactgaaagaacagcccgccctgaacgacagccggtactgcctgagcagcagactgagagtgtccgccaccttctggcagaacccccggaaccacttcagatgccaggtgcagttctacggcctgagcgagaacgacgagtggacccaggacagagccaagcccgtgacccagatcgtgtctgccgaagcctggggcagagccgatgatgtgattaagatccactggcaggaaaagaagtccaacaccatcctgggcagccaggaaggcaacaccatgaagaccaacgacacctacatgaagttcagctggctgaccgtgcccgagaagtccctggacaaagaacacagatgcatcgtgcggcacgaaaacaacaagaacggcgtggaccaggaaatcatcttcccacccatcaagaccgatgtgattacaatggaccccaaggacaactgctccaaggacgccaacgataccctgctgctccagctgaccaacaccagcgcctactacatgtacttgttgctgctgctgaagtccgtggtgtacttcgccatcatcacatgctgcctgctgatggctatggtcaagcggaaggacagccggggataa

SEQ ID NO: 7025 - DNA, 2634 bp, synthetic construct
  source 1..2634: mol_type = other DNA
atggccttaccagtgaccgccttgctcctgccgctggccttgctgctccacgccgccaggccggaagtgcagctggttgaatctggcggaggactggttcagcctggcggatctctgagactgagctgtgaagccagcggcttcgccagcgacgattacatcatcggctggttcagacaggcccctggcaaagagagagagggcgtcagctgcatcagctctaagtacgccaacaccgtgtacaccgacagcgtgaagggcagattcagactgagcagaggcaccgccaagaataccgtgtacctccagatgagcgccctgaagcctgaggataccgccgtgtactactgcgctatggacagccgcagagtgacatgccctgagatcagcaccatgcaccggaacttcgattcttggggccagggcacactggtcacagtgtcatctggtaccggcggaggcggatctggcggcggaggtagcggtggcggaggatctgaattcgacatccagatgacacagagccctagcagcctgtctgccagcgtgggagacagagtgaccatcacatgcaaggccagcgaccacatcaacaactggctggcctggtatcagcagaagcctggacaggcccctaagctgctgatctacggcgctaccacactggaaacaggcgtgcccagcagattttctggcagcggctctggcaccgactacaccctgacaatatccagcctccagcctgaggacttcgccacctactactgtcagcagagctggaacaccccttggacattcggccagggcaccaagctggaaatcaagagactcgagatccagaaccctgatcctgccgtgtaccagctgcgggatagcaagagcagcgacaagagcgtgtgtctgttcaccgacttcgacagccagaccaacgtgtcccagagcaaggactccgacgtgtacatcaccgataagtgcgtgctggacatgcggagcatggacttcaagagcaactccgccgtggcctggtccaacaagtccgatttcgcctgcgccaacgccttcaacaacagcattatccccgaggacacattcttcccaagccccgagagcagcgactccaccgaccacgtgaagcccaaagagacagagaacaccaagcagcccagcaagagctgccacaagcccaaggccatcgtgcacaccgagaaagtgaacatgatgagcctgaccgtgctgggcctgcggatgctgttcgccaaaaccgtggccgtgaacttcctgctgaccgccaagctgttcttcctcctcaccgcccgcgccaagagaagcggatctggcgtgaagcagaccctgaatttcgacctgctgaagctggctggcgacgtggaatccaacccaggccctactagtatggactggatttggcgcatccttttccttgtcggcgctgctaccggcgcgcattccttcgaacaagttcagcttcaacagcctggcgctgagctggtcaaacctggcgcttctgtgaagatgagctgcaaagccagcggctacgccttcagcagctactggatcaactggatgaagcagaaacccggccagggactcgaatggatcggccaaatctatcccggcgacggcgacaccaactacaacggcaagttcaagggcagagccacactgaccgccgatacctctagcagcacagcctacatgcagctgagcagcctgaccagcgaagatagcgccgtgtacttctgtgcccggtccatcacaacagtcgtgggctgcgctatggactattggggccagggaacaagcgtgaccgtgtctagtacgcgtgaggacctgaagaacgtgttcccacctgaggtggccgtgttcgagcctagcgaggccgagatcagccacacccagaaagccaccctcgtgtgcctggctaccggcttctaccccgaccatgtggaactgtcttggtgggtcaacggcaaagaggtgcacagcggcgtgtgtaccgacccccagccactgaaagaacagcccgccctgaacgacagccggtactgcctgagcagcagactgagagtgtccgccaccttctggcagaacccccggaaccacttcagatgccaggtgcagttctacggcctgagcgagaacgacgagtggacccaggacagagccaagcccgtgacccagatcgtgtctgccgaagcctggggcagagccgatgatgtgattaagatccactggcaggaaaagaagtccaacaccatcctgggcagccaggaaggcaacaccatgaagaccaacgacacctacatgaagttcagctggctgaccgtgcccgagaagtccctggacaaagaacacagatgcatcgtgcggcacgaaaacaacaagaacggcgtggaccaggaaatcatcttcccacccatcaagaccgatgtgattacaatggaccccaaggacaactgctccaaggacgccaacgataccctgctgctccagctgaccaacaccagcgcctactacatgtacttgttgctgctgctgaagtccgtggtgtacttcgccatcatcacatgctgcctgctgatggctatggtcaagcggaaggacagccggggataa

SEQ ID NO: 7026 - DNA, 2607 bp, synthetic construct
  source 1..2607: mol_type = other DNA
atggccttaccagtgaccgccttgctcctgccgctggccttgctgctccacgccgccaggccgcaagtcaaactggaagaaagcggtggcggcctggtgcaacctggcgaatctctgagactgagctgtagcgccagcggctccatcttcaaggtgttcagagtgttcgccatgagctggtacaggcaaggccctggcaagcagagagagctggtcgcctctatcagcagcggcgagacaaccacatacgccgaatctgtgaaaggccggttcaccatcagccgggataatgccaagaataccgcctatctccagatggactccctgaagcctgaagatacagctgtgtactactgcaacgccgaccataccttcaccggcgatttttggggccagggaacccaagtgaccgtgtctagtggtaccggcggaggcggatctggcggcggaggtagcggtggcggaggatctgaattcgacatccagatgacacagagccctagcagcctgtctgccagcgtgggagacagagtgaccatcacatgcaaggccagcgaccacatcaacaactggctggcctggtatcagcagaagcctggacaggcccctaagctgctgatctacggcgctaccacactggaaacaggcgtgcccagcagattttctggcagcggctctggcaccgactacaccctgacaatatccagcctccagcctgaggacttcgccacctactactgtcagcagagctggaacaccccttggacattcggccagggcaccaagctggaaatcaagagactcgagatccagaaccctgatcctgccgtgtaccagctgcgggatagcaagagcagcgacaagagcgtgtgtctgttcaccgacttcgacagccagaccaacgtgtcccagagcaaggactccgacgtgtacatcaccgataagtgcgtgctggacatgcggagcatggacttcaagagcaactccgccgtggcctggtccaacaagtccgatttcgcctgcgccaacgccttcaacaacagcattatccccgaggacacattcttcccaagccccgagagcagcgactccaccgaccacgtgaagcccaaagagacagagaacaccaagcagcccagcaagagctgccacaagcccaaggccatcgtgcacaccgagaaagtgaacatgatgagcctgaccgtgctgggcctgcggatgctgttcgccaaaaccgtggccgtgaacttcctgctgaccgccaagctgttcttcctcctcaccgcccgcgccaagagaagcggatctggcgtgaagcagaccctgaatttcgacctgctgaagctggctggcgacgtggaatccaacccaggccctactagtatggactggatttggcgcatccttttccttgtcggcgctgctaccggcgcgcattccttcgaacaagttcagcttcaacagcctggcgctgagctggtcaaacctggcgcttctgtgaagatgagctgcaaagccagcggctacgccttcagcagctactggatcaactggatgaagcagaaacccggccagggactcgaatggatcggccaaatctatcccggcgacggcgacaccaactacaacggcaagttcaagggcagagccacactgaccgccgatacctctagcagcacagcctacatgcagctgagcagcctgaccagcgaagatagcgccgtgtacttctgtgcccggtccatcacaacagtcgtgggctgcgctatggactattggggccagggaacaagcgtgaccgtgtctagtacgcgtgaggacctgaagaacgtgttcccacctgaggtggccgtgttcgagcctagcgaggccgagatcagccacacccagaaagccaccctcgtgtgcctggctaccggcttctaccccgaccatgtggaactgtcttggtgggtcaacggcaaagaggtgcacagcggcgtgtgtaccgacccccagccactgaaagaacagcccgccctgaacgacagccggtactgcctgagcagcagactgagagtgtccgccaccttctggcagaacccccggaaccacttcagatgccaggtgcagttctacggcctgagcgagaacgacgagtggacccaggacagagccaagcccgtgacccagatcgtgtctgccgaagcctggggcagagccgatgatgtgattaagatccactggcaggaaaagaagtccaacaccatcctgggcagccaggaaggcaacaccatgaagaccaacgacacctacatgaagttcagctggctgaccgtgcccgagaagtccctggacaaagaacacagatgcatcgtgcggcacgaaaacaacaagaacggcgtggaccaggaaatcatcttcccacccatcaagaccgatgtgattacaatggaccccaaggacaactgctccaaggacgccaacgataccctgctgctccagctgaccaacaccagcgcctactacatgtacttgttgctgctgctgaagtccgtggtgtacttcgccatcatcacatgctgcctgctgatggctatggtcaagcggaaggacagccggggataa

SEQ ID NO: 7027 - DNA, 2598 bp, synthetic construct
  source 1..2598: mol_type = other DNA
atggccttaccagtgaccgccttgctcctgccgctggccttgctgctccacgccgccaggccggacatccagatgacacagagccctagcagcctgtctgccagcgtgggagacagagtgaccatcacatgcaaggccagcgaccacatcaacaactggctggcctggtatcagcagaagcctggacaggcccctaagctgctgatctacggcgctaccacactggaaacaggcgtgcccagcagattttctggcagcggctctggcaccgactacaccctgacaatatccagcctccagcctgaggacttcgccacctactactgtcagcagagctggaacaccccttggacattcggccagggcaccaagctggaaatcaagagactcgaggacctgaagaacgtgttcccacctgaggtggccgtgttcgagcctagcgaggccgagatcagccacacccagaaagccaccctcgtgtgcctggctaccggcttctaccccgaccatgtggaactgtcttggtgggtcaacggcaaagaggtgcacagcggcgtgtgtaccgacccccagccactgaaagaacagcccgccctgaacgacagccggtactgcctgagcagcagactgagagtgtccgccaccttctggcagaacccccggaaccacttcagatgccaggtgcagttctacggcctgagcgagaacgacgagtggacccaggacagagccaagcccgtgacccagatcgtgtctgccgaagcctggggcagagccgatgatgtgattaagatccactggcaggaaaagaagtccaacaccatcctgggcagccaggaaggcaacaccatgaagaccaacgacacctacatgaagttcagctggctgaccgtgcccgagaagtccctggacaaagaacacagatgcatcgtgcggcacgaaaacaacaagaacggcgtggaccaggaaatcatcttcccacccatcaagaccgatgtgattacaatggaccccaaggacaactgctccaaggacgccaacgataccctgctgctccagctgaccaacaccagcgcctactacatgtacttgttgctgctgctgaagtccgtggtgtacttcgccatcatcacatgctgcctgctgatggctatggtcaagcggaaggacagccggggaagggccaagcgatctggatctggagcaacaaacttctcactactcaaacaagcaggtgacgtggaggagaatcccgggcctactagtgccaccatggactggatttggcgcatccttttccttgtcggcgctgctaccggcgcccattccgggcccgaagtgcagctggttgaatctggcggaggactggttcaggctggcggatctctgagactgtcttgtgccgccagcggcagaacctttagcatgggctggtttagacaggcccctggcaaagagagagagttcgtcgccgccatcacatactctggcggcagcccttactacgccgactctgtgaagggcagattcaccatcagccgggacaacgccaagaacaccgtgtacctccagatgaacagcctgaagcctgaggacaccgccgtgtactactgcgccgccaatccaacatacggcagcgactggaacgccgagaattggggccagggaacccaagtgacagtgtctagcggatccggcggcggaggatctggcggaggcggatctgggggcggaggctctttcgaacaagttcagcttcaacagcctggcgctgagctggtcaaacctggcgcttctgtgaagatgagctgcaaagccagcggctacgccttcagcagctactggatcaactggatgaagcagaaacccggccagggactcgaatggatcggccaaatctatcccggcgacggcgacaccaactacaacggcaagttcaagggcagagccacactgaccgccgatacctctagcagcacagcctacatgcagctgagcagcctgaccagcgaagatagcgccgtgtacttctgtgcccggtccatcacaacagtcgtgggctgcgctatggactattggggccagggaacaagcgtgaccgtgtctagtacgcgtatccagaaccctgatcctgccgtgtaccagctgcgggatagcaagagcagcgacaagagcgtgtgtctgttcaccgacttcgacagccagaccaacgtgtcccagagcaaggactccgacgtgtacatcaccgataagtgcgtgctggacatgcggagcatggacttcaagagcaactccgccgtggcctggtccaacaagtccgatttcgcctgcgccaacgccttcaacaacagcattatccccgaggacacattcttcccaagccccgagagcagcgactccaccgaccacgtgaagcccaaagagacagagaacaccaagcagcccagcaagagctgccacaagcccaaggccatcgtgcacaccgagaaagtgaacatgatgagcctgaccgtgctgggcctgcggatgctgttcgccaaaaccgtggccgtgaacttcctgctgaccgccaagctgttcttcctcctcaccgcctaa

SEQ ID NO: 7028 - DNA, 2601 bp, synthetic construct
  source 1..2601: mol_type = other DNA
atggccttaccagtgaccgccttgctcctgccgctggccttgctgctccacgccgccaggccggacatccagatgacacagagccctagcagcctgtctgccagcgtgggagacagagtgaccatcacatgcaaggccagcgaccacatcaacaactggctggcctggtatcagcagaagcctggacaggcccctaagctgctgatctacggcgctaccacactggaaacaggcgtgcccagcagattttctggcagcggctctggcaccgactacaccctgacaatatccagcctccagcctgaggacttcgccacctactactgtcagcagagctggaacaccccttggacattcggccagggcaccaagctggaaatcaagagactcgaggacctgaagaacgtgttcccacctgaggtggccgtgttcgagcctagcgaggccgagatcagccacacccagaaagccaccctcgtgtgcctggctaccggcttctaccccgaccatgtggaactgtcttggtgggtcaacggcaaagaggtgcacagcggcgtgtgtaccgacccccagccactgaaagaacagcccgccctgaacgacagccggtactgcctgagcagcagactgagagtgtccgccaccttctggcagaacccccggaaccacttcagatgccaggtgcagttctacggcctgagcgagaacgacgagtggacccaggacagagccaagcccgtgacccagatcgtgtctgccgaagcctggggcagagccgatgatgtgattaagatccactggcaggaaaagaagtccaacaccatcctgggcagccaggaaggcaacaccatgaagaccaacgacacctacatgaagttcagctggctgaccgtgcccgagaagtccctggacaaagaacacagatgcatcgtgcggcacgaaaacaacaagaacggcgtggaccaggaaatcatcttcccacccatcaagaccgatgtgattacaatggaccccaaggacaactgctccaaggacgccaacgataccctgctgctccagctgaccaacaccagcgcctactacatgtacttgttgctgctgctgaagtccgtggtgtacttcgccatcatcacatgctgcctgctgatggctatggtcaagcggaaggacagccggggaagggccaagcgatctggatctggagcaacaaacttctcactactcaaacaagcaggtgacgtggaggagaatcccgggcctactagtgccaccatggactggatttggcgcatccttttccttgtcggcgctgctaccggcgcccattccgggcccgaagtgcaactggtggaatctgggggcggactggtgcagccaggcggaagtctgaggctgtcttgtgccgcctccggcagcatcttcggcttcaacgacatggcctggtatcggcaggctcccggaaaacagcgcgagctggtggctctgattagcagagtgggcgtgaccagcagcgccgactctgtgaagggcagattcacaatctccagagtgaacgccaaggatacagtgtacctccagatgaactctctgaaacctgaggatacagcagtgtactattgctacatggaccagcggctggacggcagcacactggcctactggggacagggaactcaagtgacagtgtctagcggatccggcggcggaggatctggcggaggcggatctgggggcggaggctctttcgaacaagttcagcttcaacagcctggcgctgagctggtcaaacctggcgcttctgtgaagatgagctgcaaagccagcggctacgccttcagcagctactggatcaactggatgaagcagaaacccggccagggactcgaatggatcggccaaatctatcccggcgacggcgacaccaactacaacggcaagttcaagggcagagccacactgaccgccgatacctctagcagcacagcctacatgcagctgagcagcctgaccagcgaagatagcgccgtgtacttctgtgcccggtccatcacaacagtcgtgggctgcgctatggactattggggccagggaacaagcgtgaccgtgtctagtacgcgtatccagaaccctgatcctgccgtgtaccagctgcgggatagcaagagcagcgacaagagcgtgtgtctgttcaccgacttcgacagccagaccaacgtgtcccagagcaaggactccgacgtgtacatcaccgataagtgcgtgctggacatgcggagcatggacttcaagagcaactccgccgtggcctggtccaacaagtccgatttcgcctgcgccaacgccttcaacaacagcattatccccgaggacacattcttcccaagccccgagagcagcgactccaccgaccacgtgaagcccaaagagacagagaacaccaagcagcccagcaagagctgccacaagcccaaggccatcgtgcacaccgagaaagtgaacatgatgagcctgaccgtgctgggcctgcggatgctgttcgccaaaaccgtggccgtgaacttcctgctgaccgccaagctgttcttcctcctcaccgcctaa

SEQ ID NO: 7029 - DNA, 2589 bp, synthetic construct
  source 1..2589: mol_type = other DNA
atggccttaccagtgaccgccttgctcctgccgctggccttgctgctccacgccgccaggccggacatccagatgacacagagccctagcagcctgtctgccagcgtgggagacagagtgaccatcacatgcaaggccagcgaccacatcaacaactggctggcctggtatcagcagaagcctggacaggcccctaagctgctgatctacggcgctaccacactggaaacaggcgtgcccagcagattttctggcagcggctctggcaccgactacaccctgacaatatccagcctccagcctgaggacttcgccacctactactgtcagcagagctggaacaccccttggacattcggccagggcaccaagctggaaatcaagagactcgaggacctgaagaacgtgttcccacctgaggtggccgtgttcgagcctagcgaggccgagatcagccacacccagaaagccaccctcgtgtgcctggctaccggcttctaccccgaccatgtggaactgtcttggtgggtcaacggcaaagaggtgcacagcggcgtgtgtaccgacccccagccactgaaagaacagcccgccctgaacgacagccggtactgcctgagcagcagactgagagtgtccgccaccttctggcagaacccccggaaccacttcagatgccaggtgcagttctacggcctgagcgagaacgacgagtggacccaggacagagccaagcccgtgacccagatcgtgtctgccgaagcctggggcagagccgatgatgtgattaagatccactggcaggaaaagaagtccaacaccatcctgggcagccaggaaggcaacaccatgaagaccaacgacacctacatgaagttcagctggctgaccgtgcccgagaagtccctggacaaagaacacagatgcatcgtgcggcacgaaaacaacaagaacggcgtggaccaggaaatcatcttcccacccatcaagaccgatgtgattacaatggaccccaaggacaactgctccaaggacgccaacgataccctgctgctccagctgaccaacaccagcgcctactacatgtacttgttgctgctgctgaagtccgtggtgtacttcgccatcatcacatgctgcctgctgatggctatggtcaagcggaaggacagccggggaagggccaagcgatctggatctggagcaacaaacttctcactactcaaacaagcaggtgacgtggaggagaatcccgggcctactagtgccaccatggactggatttggcgcatccttttccttgtcggcgctgctaccggcgcccattccgggcccgaggtgcagctggttgaatctggcggaggactggttcaggctggcggatctctgagactgtcttgtgccgccagcggctctgtgttcagcggcaatgtgatgggctggtacagacaggcccctggcaaagaaagagagtgggttgccgccattgccagcggcggcagcatctactacagagactctgtgaagggcagattcaccatcagccgggacaacgccaagaacaccgtgtacctccagatgaacagcctgaagcctgaggacaccgccgtgtactactgcaactctcaccctcctacactgccctattggggcctgggaacccaagtgacagtgtcctctggatccggcggcggaggatctggcggaggcggatctgggggcggaggctctttcgaacaagttcagcttcaacagcctggcgctgagctggtcaaacctggcgcttctgtgaagatgagctgcaaagccagcggctacgccttcagcagctactggatcaactggatgaagcagaaacccggccagggactcgaatggatcggccaaatctatcccggcgacggcgacaccaactacaacggcaagttcaagggcagagccacactgaccgccgatacctctagcagcacagcctacatgcagctgagcagcctgaccagcgaagatagcgccgtgtacttctgtgcccggtccatcacaacagtcgtgggctgcgctatggactattggggccagggaacaagcgtgaccgtgtctagtacgcgtatccagaaccctgatcctgccgtgtaccagctgcgggatagcaagagcagcgacaagagcgtgtgtctgttcaccgacttcgacagccagaccaacgtgtcccagagcaaggactccgacgtgtacatcaccgataagtgcgtgctggacatgcggagcatggacttcaagagcaactccgccgtggcctggtccaacaagtccgatttcgcctgcgccaacgccttcaacaacagcattatccccgaggacacattcttcccaagccccgagagcagcgactccaccgaccacgtgaagcccaaagagacagagaacaccaagcagcccagcaagagctgccacaagcccaaggccatcgtgcacaccgagaaagtgaacatgatgagcctgaccgtgctgggcctgcggatgctgttcgccaaaaccgtggccgtgaacttcctgctgaccgccaagctgttcttcctcctcaccgcctaa

SEQ ID NO: 7030 - DNA, 2583 bp, synthetic construct
  source 1..2583: mol_type = other DNA
atggccttaccagtgaccgccttgctcctgccgctggccttgctgctccacgccgccaggccggacatccagatgacacagagccctagcagcctgtctgccagcgtgggagacagagtgaccatcacatgcaaggccagcgaccacatcaacaactggctggcctggtatcagcagaagcctggacaggcccctaagctgctgatctacggcgctaccacactggaaacaggcgtgcccagcagattttctggcagcggctctggcaccgactacaccctgacaatatccagcctccagcctgaggacttcgccacctactactgtcagcagagctggaacaccccttggacattcggccagggcaccaagctggaaatcaagagactcgaggacctgaagaacgtgttcccacctgaggtggccgtgttcgagcctagcgaggccgagatcagccacacccagaaagccaccctcgtgtgcctggctaccggcttctaccccgaccatgtggaactgtcttggtgggtcaacggcaaagaggtgcacagcggcgtgtgtaccgacccccagccactgaaagaacagcccgccctgaacgacagccggtactgcctgagcagcagactgagagtgtccgccaccttctggcagaacccccggaaccacttcagatgccaggtgcagttctacggcctgagcgagaacgacgagtggacccaggacagagccaagcccgtgacccagatcgtgtctgccgaagcctggggcagagccgatgatgtgattaagatccactggcaggaaaagaagtccaacaccatcctgggcagccaggaaggcaacaccatgaagaccaacgacacctacatgaagttcagctggctgaccgtgcccgagaagtccctggacaaagaacacagatgcatcgtgcggcacgaaaacaacaagaacggcgtggaccaggaaatcatcttcccacccatcaagaccgatgtgattacaatggaccccaaggacaactgctccaaggacgccaacgataccctgctgctccagctgaccaacaccagcgcctactacatgtacttgttgctgctgctgaagtccgtggtgtacttcgccatcatcacatgctgcctgctgatggctatggtcaagcggaaggacagccggggaagggccaagcgatctggatctggagcaacaaacttctcactactcaaacaagcaggtgacgtggaggagaatcccgggcctactagtgccaccatggactggatttggcgcatccttttccttgtcggcgctgctaccggcgcccattccgggcccgaagttcagctgctggaatctggcggaggactcgttcaacctggcggctctctgagactgagctgtgccgcttctggcttcagcttctctagctacgccctgagctgggttcgacaagctcccggaaagggccttgaatgggtgtccagcatcggcgagaatgacggcaccacagactatgccgatgccgtgaaaggccggtttaccatcagcagagacaattccaagaacacgctctatctgcaaatgaactccctgcgcgtggaagatacagccgtgtattattgcgtgaaggacggcatccactggggacagggaaccctggttacagtgtctagcggatccggcggcggaggatctggcggaggcggatctgggggcggaggctctttcgaacaagttcagcttcaacagcctggcgctgagctggtcaaacctggcgcttctgtgaagatgagctgcaaagccagcggctacgccttcagcagctactggatcaactggatgaagcagaaacccggccagggactcgaatggatcggccaaatctatcccggcgacggcgacaccaactacaacggcaagttcaagggcagagccacactgaccgccgatacctctagcagcacagcctacatgcagctgagcagcctgaccagcgaagatagcgccgtgtacttctgtgcccggtccatcacaacagtcgtgggctgcgctatggactattggggccagggaacaagcgtgaccgtgtctagtacgcgtatccagaaccctgatcctgccgtgtaccagctgcgggatagcaagagcagcgacaagagcgtgtgtctgttcaccgacttcgacagccagaccaacgtgtcccagagcaaggactccgacgtgtacatcaccgataagtgcgtgctggacatgcggagcatggacttcaagagcaactccgccgtggcctggtccaacaagtccgatttcgcctgcgccaacgccttcaacaacagcattatccccgaggacacattcttcccaagccccgagagcagcgactccaccgaccacgtgaagcccaaagagacagagaacaccaagcagcccagcaagagctgccacaagcccaaggccatcgtgcacaccgagaaagtgaacatgatgagcctgaccgtgctgggcctgcggatgctgttcgccaaaaccgtggccgtgaacttcctgctgaccgccaagctgttcttcctcctcaccgcctaa

SEQ ID NO: 7031 - DNA, 3690 bp, synthetic construct
  source 1..3690: mol_type = other DNA
atgggacccagactgctgttttgggctctgctgtgtctgctcggcacaggacctgttgaagctggcgtgacacagagccccacacacctgattaagaccagaggccagcaggccacactgagatgcagccctatcagcggccacaccagcgtgtactggtatcagcaggctctcggactgggcctccagttcctgctttggtacgacgagggcgaagagagaaaccggggcaacttccctcctcggttttccggcagacagttccccaactacagcagcgagctgaacgtgaacgccctggaactggaagatagcgccctgtacctgtgtgcctcttctcttggtggacctcgcggactggctggactgagaggggatgagcagtttttcggccctggcaccagactgaccgtgctggaaggtaccggcggaggcggatctggcggcggagaattcgacatccagatgacacagagccctagcagcctgtctgccagcgtgggagacagagtgaccatcacatgcaaggccagcgaccacatcaacaactggctggcctggtatcagcagaagcctggacaggcccctaagctgctgatctacggcgctaccacactggaaacaggcgtgcccagcagattttctggcagcggctctggcaccgactacaccctgacaatatccagcctccagcctgaggacttcgccacctactactgtcagcagagctggaacaccccttggacattcggccagggcaccaagctggaaatcaagagactcgaggacctgaagaacgtgttcccacctgaggtggccgtgttcgagcctagcgaggccgagatcagccacacccagaaagccaccctcgtgtgcctggctaccggcttctaccccgaccatgtggaactgtcttggtgggtcaacggcaaagaggtgcacagcggcgtgtgtaccgacccccagccactgaaagaacagcccgccctgaacgacagccggtactgcctgagcagcagactgagagtgtccgccaccttctggcagaacccccggaaccacttcagatgccaggtgcagttctacggcctgagcgagaacgacgagtggacccaggacagagccaagcccgtgacccagatcgtgtctgccgaagcctggggcagagccgatgatgtgattaagatccactggcaggaaaagaagtccaacaccatcctgggcagccaggaaggcaacaccatgaagaccaacgacacctacatgaagttcagctggctgaccgtgcccgagaagtccctggacaaagaacacagatgcatcgtgcggcacgaaaacaacaagaacggcgtggaccaggaaatcatcttcccacccatcaagaccgatgtgattacaatggaccccaaggacaactgctccaaggacgccaacgataccctgctgctccagctgaccaacaccagcgcctactacatgtacttgttgctgctgctgaagtccgtggtgtacttcgccatcatcacatgctgcctgctgatggctatggtcaagcggaaggacagccggggaagggccaagcgatctggatctggagcaacaaacttctcactactcaaacaagcaggtgacgtggaggagaatcccgggcctactagtgccaccatggactggatttggcgcatccttttccttgtcggcgctgctaccggcgcccattccgggcccgaagtgcagctggttgaatctggcggaggactggttcaggctggcggatctctgagactgtcttgtgccgccagcggcagaacctttagcatgggctggtttagacaggcccctggcaaagagagagagttcgtcgccgccatcacatactctggcggcagcccttactacgccgactctgtgaagggcagattcaccatcagccgggacaacgccaagaacaccgtgtacctccagatgaacagcctgaagcctgaggacaccgccgtgtactactgcgccgccaatccaacatacggcagcgactggaacgccgagaattggggccagggaacccaagtgacagtgtctagcggatccggcggcggaggatctggcggaggcggatctgggggcggaggctctttcgaacaagttcagcttcaacagcctggcgctgagctggtcaaacctggcgcttctgtgaagatgagctgcaaagccagcggctacgccttcagcagctactggatcaactggatgaagcagaaacccggccagggactcgaatggatcggccaaatctatcccggcgacggcgacaccaactacaacggcaagttcaagggcagagccacactgaccgccgatacctctagcagcacagcctacatgcagctgagcagcctgaccagcgaagatagcgccgtgtacttctgtgcccggtccatcacaacagtcgtgggctgcgctatggactattggggccagggaacaagcgtgaccgtgtctagtacgcgtatccagaaccctgatcctgccgtgtaccagctgcgggatagcaagagcagcgacaagagcgtgtgtctgttcaccgacttcgacagccagaccaacgtgtcccagagcaaggactccgacgtgtacatcaccgataagtgcgtgctggacatgcggagcatggacttcaagagcaactccgccgtggcctggtccaacaagtccgatttcgcctgcgccaacgccttcaacaacagcattatccccgaggacacattcttcccaagccccgagagcagcgactccaccgaccacgtgaagcccaaagagacagagaacaccaagcagcccagcaagagctgccacaagcccaaggccatcgtgcacaccgagaaagtgaacatgatgagcctgaccgtgctgggcctgcggatgctgttcgccaaaaccgtggccgtgaacttcctgctgaccgccaagctgttcttcctcctcaccgcccgcgccaagagaagcggatctggcgtgaagcagaccctgaatttcgacctgctgaagctggctggcgacgtggaatccaacccaggcccttctagaggccatatgaccgagtacaagcccacggtgcgcctcgccacccgcgacgacgtccccagggccgtacgcaccctcgccgccgcgttcgccgactaccccgccacgcgccacaccgtcgatccggaccgccacatcgagcgggtcaccgagctgcaagaactcttcctcacgcgcgtcgggctcgacatcggcaaggtgtgggtcgcggacgacggcgccgcggtggcggtctggaccacgccggagagcgtcgaagcgggggcggtgttcgccgagatcggcccgcgcatggccgagttgagcggttcccggctggccgcgcagcaacagatggaaggcctcctggcgccgcaccggcccaaggagcccgcgtggttcctggccaccgtcggcgtctcgcccgaccaccagggcaagggtctgggcagcgccgtcgtgctccccggagtggaggcggccgagcgcgccggggtgcccgccttcctggagacctccgcgccccgcaacctccccttctacgagcggctcggcttcaccgtcaccgccgacgtcgaggtgcccgaaggaccgcgcacctggtgcatgacccgcaagcccggtgcctga

SEQ ID NO: 7032 - DNA, 3687 bp, synthetic construct
  source 1..3687: mol_type = other DNA
atgggacccagactgctgttttgggctctgctgtgtctgctcggcacaggacctgttgaagctggcgtgacacagagccccacacacctgattaagaccagaggccagcaggccacactgagatgcagccctatcagcggccacaccagcgtgtactggtatcagcaggctctcggactgggcctccagttcctgctttggtacgacgagggcgaagagagaaaccggggcaacttccctcctcggttttccggcagacagttccccaactacagcagcgagctgaacgtgaacgccctggaactggaagatagcgccctgtacctgtgtgccagctctctcggcggagatgaactgggagccgatggcaacgagcagttctttggccctggcaccagactgaccgtgctggaaggtaccggcggaggcggatctggcggcggaagcgaattcgacatccagatgacacagagccctagcagcctgtctgccagcgtgggagacagagtgaccatcacatgcaaggccagcgaccacatcaacaactggctggcctggtatcagcagaagcctggacaggcccctaagctgctgatctacggcgctaccacactggaaacaggcgtgcccagcagattttctggcagcggctctggcaccgactacaccctgacaatatccagcctccagcctgaggacttcgccacctactactgtcagcagagctggaacaccccttggacattcggccagggcaccaagctggaaatcaagagactcgaggacctgaagaacgtgttcccacctgaggtggccgtgttcgagcctagcgaggccgagatcagccacacccagaaagccaccctcgtgtgcctggctaccggcttctaccccgaccatgtggaactgtcttggtgggtcaacggcaaagaggtgcacagcggcgtgtgtaccgacccccagccactgaaagaacagcccgccctgaacgacagccggtactgcctgagcagcagactgagagtgtccgccaccttctggcagaacccccggaaccacttcagatgccaggtgcagttctacggcctgagcgagaacgacgagtggacccaggacagagccaagcccgtgacccagatcgtgtctgccgaagcctggggcagagccgatgatgtgattaagatccactggcaggaaaagaagtccaacaccatcctgggcagccaggaaggcaacaccatgaagaccaacgacacctacatgaagttcagctggctgaccgtgcccgagaagtccctggacaaagaacacagatgcatcgtgcggcacgaaaacaacaagaacggcgtggaccaggaaatcatcttcccacccatcaagaccgatgtgattacaatggaccccaaggacaactgctccaaggacgccaacgataccctgctgctccagctgaccaacaccagcgcctactacatgtacttgttgctgctgctgaagtccgtggtgtacttcgccatcatcacatgctgcctgctgatggctatggtcaagcggaaggacagccggggaagggccaagcgatctggatctggagcaacaaacttctcactactcaaacaagcaggtgacgtggaggagaatcccgggcctactagtgccaccatggactggatttggcgcatccttttccttgtcggcgctgctaccggcgcccattccgggcccgaagtgcagctggttgaatctggcggaggactggttcaggctggcggatctctgagactgtcttgtgccgccagcggcagaacctttagcatgggctggtttagacaggcccctggcaaagagagagagttcgtcgccgccatcacatactctggcggcagcccttactacgccgactctgtgaagggcagattcaccatcagccgggacaacgccaagaacaccgtgtacctccagatgaacagcctgaagcctgaggacaccgccgtgtactactgcgccgccaatccaacatacggcagcgactggaacgccgagaattggggccagggaacccaagtgacagtgtctagcggatccggcggcggaggatctggcggaggcggatctgggggcggaggctctttcgaacaagttcagcttcaacagcctggcgctgagctggtcaaacctggcgcttctgtgaagatgagctgcaaagccagcggctacgccttcagcagctactggatcaactggatgaagcagaaacccggccagggactcgaatggatcggccaaatctatcccggcgacggcgacaccaactacaacggcaagttcaagggcagagccacactgaccgccgatacctctagcagcacagcctacatgcagctgagcagcctgaccagcgaagatagcgccgtgtacttctgtgcccggtccatcacaacagtcgtgggctgcgctatggactattggggccagggaacaagcgtgaccgtgtctagtacgcgtatccagaaccctgatcctgccgtgtaccagctgcgggatagcaagagcagcgacaagagcgtgtgtctgttcaccgacttcgacagccagaccaacgtgtcccagagcaaggactccgacgtgtacatcaccgataagtgcgtgctggacatgcggagcatggacttcaagagcaactccgccgtggcctggtccaacaagtccgatttcgcctgcgccaacgccttcaacaacagcattatccccgaggacacattcttcccaagccccgagagcagcgactccaccgaccacgtgaagcccaaagagacagagaacaccaagcagcccagcaagagctgccacaagcccaaggccatcgtgcacaccgagaaagtgaacatgatgagcctgaccgtgctgggcctgcggatgctgttcgccaaaaccgtggccgtgaacttcctgctgaccgccaagctgttcttcctcctcaccgcccgcgccaagagaagcggatctggcgtgaagcagaccctgaatttcgacctgctgaagctggctggcgacgtggaatccaacccaggcccttctagaggccatatgaccgagtacaagcccacggtgcgcctcgccacccgcgacgacgtccccagggccgtacgcaccctcgccgccgcgttcgccgactaccccgccacgcgccacaccgtcgatccggaccgccacatcgagcgggtcaccgagctgcaagaactcttcctcacgcgcgtcgggctcgacatcggcaaggtgtgggtcgcggacgacggcgccgcggtggcggtctggaccacgccggagagcgtcgaagcgggggcggtgttcgccgagatcggcccgcgcatggccgagttgagcggttcccggctggccgcgcagcaacagatggaaggcctcctggcgccgcaccggcccaaggagcccgcgtggttcctggccaccgtcggcgtctcgcccgaccaccagggcaagggtctgggcagcgccgtcgtgctccccggagtggaggcggccgagcgcgccggggtgcccgccttcctggagacctccgcgccccgcaacctccccttctacgagcggctcggcttcaccgtcaccgccgacgtcgaggtgcccgaaggaccgcgcacctggtgcatgacccgcaagcccggtgcctga

SEQ ID NO: 7033 - DNA, 3012 bp, synthetic construct
  source 1..3012: mol_type = other DNA
atggccttaccagtgaccgccttgctcctgccgctggccttgctgctccacgccgccaggccggcatgcctgttcaatcaagaggtgcagatccctctgaccgagagctactgtggcccctgtcctaagaactggatctgctacaagaacaactgctaccagttcttcgacgagagcaagaattggtacgagagccaggccagctgcatgagccagaatgccagcctgctgaaggtgtacagcaaagaggaccaggacctgctgaaactggtcaagagcgcccactggatgggccttgtgcacatccccaccaatggctcttggcagtgggaggacggcagcattctgagccctaacctgctgaccatcatcgagatgcagaagggcgactgcgccctgtacgccagcagctttaagggctacatcgagaattgcagcaccccgaacacctacatctgtatgcagagaaccgttctcgaggacctgaagaacgtgttcccacctgaggtggccgtgttcgagcctagcgaggccgagatcagccacacccagaaagccaccctcgtgtgcctggctaccggcttctaccccgaccatgtggaactgtcttggtgggtcaacggcaaagaggtgcacagcggcgtgtgtaccgacccccagccactgaaagaacagcccgccctgaacgacagccggtactgcctgagcagcagactgagagtgtccgccaccttctggcagaacccccggaaccacttcagatgccaggtgcagttctacggcctgagcgagaacgacgagtggacccaggacagagccaagcccgtgacccagatcgtgtctgccgaagcctggggcagagccgatgatgtgattaagatccactggcaggaaaagaagtccaacaccatcctgggcagccaggaaggcaacaccatgaagaccaacgacacctacatgaagttcagctggctgaccgtgcccgagaagtccctggacaaagaacacagatgcatcgtgcggcacgaaaacaacaagaacggcgtggaccaggaaatcatcttcccacccatcaagaccgatgtgattacaatggaccccaaggacaactgctccaaggacgccaacgataccctgctgctccagctgaccaacaccagcgcctactacatgtacttgttgctgctgctgaagtccgtggtgtacttcgccatcatcacatgctgcctgctgatggctatggtcaagcggaaggacagccggggaagggccaagcgatctggatctggagcaacaaacttctcactactcaaacaagcaggtgacgtggaggagaatcccgggcctactagtatggactggatttggcgcatccttttccttgtcggcgctgctaccggcgcgcattccttcgaagacctctttaatcaagaagtccagattccactcaccgaatcctactgcggaccttgtccaaaaaattggatttgttataagaacaactgttatcaattctttgatgagtctaaaaattggtatgagtcccaggcttcctgcatgtctcagaacgcttctctgctgaaagtctactctaaagaagatcaggatctcctgaagctcgtcaagtctgcccattggatggggctcgtccacattcctaccaacggaagctggcaatgggaagatggctccatcctgtctccaaatctgctcacgattattgaaatgcagaaaggggattgtgctctctacgccagctccttcaagggatttattgagaactgtagcacgcccaatacttatatctgtatgcaacggaccgtgacgcgtatccagaaccctgatcctgccgtgtaccagctgcgggatagcaagagcagcgacaagagcgtgtgtctgttcaccgacttcgacagccagaccaacgtgtcccagagcaaggactccgacgtgtacatcaccgataagtgcgtgctggacatgcggagcatggacttcaagagcaactccgccgtggcctggtccaacaagtccgatttcgcctgcgccaacgccttcaacaacagcattatccccgaggacacattcttcccaagccccgagagcagcgactccaccgaccacgtgaagcccaaagagacagagaacaccaagcagcccagcaagagctgccacaagcccaaggccatcgtgcacaccgagaaagtgaacatgatgagcctgaccgtgctgggcctgcggatgctgttcgccaaaaccgtggccgtgaacttcctgctgaccgccaagctgttcttcctcctcaccgcccgcgccaagagaagcggatctggcgtgaagcagaccctgaatttcgacctgctgaagctggctggcgacgtggaatccaacccaggcccttctagaggccatatgaccgagtacaagcccacggtgcgcctcgccacccgcgacgacgtccccagggccgtacgcaccctcgccgccgcgttcgccgactaccccgccacgcgccacaccgtcgatccggaccgccacatcgagcgggtcaccgagctgcaagaactcttcctcacgcgcgtcgggctcgacatcggcaaggtgtgggtcgcggacgacggcgccgcggtggcggtctggaccacgccggagagcgtcgaagcgggggcggtgttcgccgagatcggcccgcgcatggccgagttgagcggttcccggctggccgcgcagcaacagatggaaggcctcctggcgccgcaccggcccaaggagcccgcgtggttcctggccaccgtcggcgtctcgcccgaccaccagggcaagggtctgggcagcgccgtcgtgctccccggagtggaggcggccgagcgcgccggggtgcccgccttcctggagacctccgcgccccgcaacctccccttctacgagcggctcggcttcaccgtcaccgccgacgtcgaggtgcccgaaggaccgcgcacctggtgcatgacccgcaagcccggtgcctga

SEQ ID NO: 7034 - DNA, 3162 bp, synthetic construct
  source 1..3162: mol_type = other DNA
atggccttaccagtgaccgccttgctcctgccgctggccttgctgctccacgccgccaggccggacatccagatgacacagagccctagcagcctgtctgccagcgtgggagacagagtgaccatcacatgcaaggccagcgaccacatcaacaactggctggcctggtatcagcagaagcctggacaggcccctaagctgctgatctacggcgctaccacactggaaacaggcgtgcccagcagattttctggcagcggctctggcaccgactacaccctgacaatatccagcctccagcctgaggacttcgccacctactactgtcagcagagctggaacaccccttggacattcggccagggcaccaagctggaaatcaagagactcgaggacctgaagaacgtgttcccacctgaggtggccgtgttcgagcctagcgaggccgagatcagccacacccagaaagccaccctcgtgtgcctggctaccggcttctaccccgaccatgtggaactgtcttggtgggtcaacggcaaagaggtgcacagcggcgtgtgtaccgacccccagccactgaaagaacagcccgccctgaacgacagccggtactgcctgagcagcagactgagagtgtccgccaccttctggcagaacccccggaaccacttcagatgccaggtgcagttctacggcctgagcgagaacgacgagtggacccaggacagagccaagcccgtgacccagatcgtgtctgccgaagcctggggcagagccgatgatgtgattaagatccactggcaggaaaagaagtccaacaccatcctgggcagccaggaaggcaacaccatgaagaccaacgacacctacatgaagttcagctggctgaccgtgcccgagaagtccctggacaaagaacacagatgcatcgtgcggcacgaaaacaacaagaacggcgtggaccaggaaatcatcttcccacccatcaagaccgatgtgattacaatggaccccaaggacaactgctccaaggacgccaacgataccctgctgctccagctgaccaacaccagcgcctactacatgtacttgttgctgctgctgaagtccgtggtgtacttcgccatcatcacatgctgcctgctgatggctatggtcaagcggaaggacagccggggaagggccaagcgatctggatctggagcaacaaacttctcactactcaaacaagcaggtgacgtggaggagaatcccgggcctactagtgccaccatggactggatttggcgcatccttttccttgtcggcgctgctaccggcgcccattccgggcccatgggaagctggcttgagttctaccacagactcaacgccattgacagcaggctgtgggcacttggcggaagcgaagctgaactcgccgcttttgaaaaagaaattgccgctttcgagtccgagcttcaggcttacaaaggcaaagggaatcctgaggtcgagagcctgagagatcacgctgcccacattagagagtggttgcaggcataccggcacaatggatccggcggcggaggatctggcggaggcggatctgggggcggaggctctttcgaacaagttcagcttcaacagcctggcgctgagctggtcaaacctggcgcttctgtgaagatgagctgcaaagccagcggctacgccttcagcagctactggatcaactggatgaagcagaaacccggccagggactcgaatggatcggccaaatctatcccggcgacggcgacaccaactacaacggcaagttcaagggcagagccacactgaccgccgatacctctagcagcacagcctacatgcagctgagcagcctgaccagcgaagatagcgccgtgtacttctgtgcccggtccatcacaacagtcgtgggctgcgctatggactattggggccagggaacaagcgtgaccgtgtctagtacgcgtatccagaaccctgatcctgccgtgtaccagctgcgggatagcaagagcagcgacaagagcgtgtgtctgttcaccgacttcgacagccagaccaacgtgtcccagagcaaggactccgacgtgtacatcaccgataagtgcgtgctggacatgcggagcatggacttcaagagcaactccgccgtggcctggtccaacaagtccgatttcgcctgcgccaacgccttcaacaacagcattatccccgaggacacattcttcccaagccccgagagcagcgactccaccgaccacgtgaagcccaaagagacagagaacaccaagcagcccagcaagagctgccacaagcccaaggccatcgtgcacaccgagaaagtgaacatgatgagcctgaccgtgctgggcctgcggatgctgttcgccaaaaccgtggccgtgaacttcctgctgaccgccaagctgttcttcctcctcaccgcccgcgccaagagaagcggatctggcgtgaagcagaccctgaatttcgacctgctgaagctggctggcgacgtggaatccaacccaggcccttctagaggccatatgaccgagtacaagcccacggtgcgcctcgccacccgcgacgacgtccccagggccgtacgcaccctcgccgccgcgttcgccgactaccccgccacgcgccacaccgtcgatccggaccgccacatcgagcgggtcaccgagctgcaagaactcttcctcacgcgcgtcgggctcgacatcggcaaggtgtgggtcgcggacgacggcgccgcggtggcggtctggaccacgccggagagcgtcgaagcgggggcggtgttcgccgagatcggcccgcgcatggccgagttgagcggttcccggctggccgcgcagcaacagatggaaggcctcctggcgccgcaccggcccaaggagcccgcgtggttcctggccaccgtcggcgtctcgcccgaccaccagggcaagggtctgggcagcgccgtcgtgctccccggagtggaggcggccgagcgcgccggggtgcccgccttcctggagacctccgcgccccgcaacctccccttctacgagcggctcggcttcaccgtcaccgccgacgtcgaggtgcccgaaggaccgcgcacctggtgcatgacccgcaagcccggtgcctga

SEQ ID NO: 7035 - DNA, 3162 bp, synthetic construct
  source 1..3162: mol_type = other DNA
atggccttaccagtgaccgccttgctcctgccgctggccttgctgctccacgccgccaggccggcatgcatgggcagttggttcgagttctacgaccggctgaatgccatcgacgccagactgtgggctctcggaggatctgaagctgagctggccgccttcgagaaagagatcgccgcctttgagagcgagctgcaagcctacaaaggcaagggcaaccccgaggtggaaaacctgagagtgcacgccgctgccatcagagaatggctccaggcttacagacacaacggtaccggcggaggcggatctggcggcggaggtagcggtggcggaggatctgaattcgacatccagatgacacagagccctagcagcctgtctgccagcgtgggagacagagtgaccatcacatgcaaggccagcgaccacatcaacaactggctggcctggtatcagcagaagcctggacaggcccctaagctgctgatctacggcgctaccacactggaaacaggcgtgcccagcagattttctggcagcggctctggcaccgactacaccctgacaatatccagcctccagcctgaggacttcgccacctactactgtcagcagagctggaacaccccttggacattcggccagggcaccaagctggaaatcaagagactcgaggacctgaagaacgtgttcccacctgaggtggccgtgttcgagcctagcgaggccgagatcagccacacccagaaagccaccctcgtgtgcctggctaccggcttctaccccgaccatgtggaactgtcttggtgggtcaacggcaaagaggtgcacagcggcgtgtgtaccgacccccagccactgaaagaacagcccgccctgaacgacagccggtactgcctgagcagcagactgagagtgtccgccaccttctggcagaacccccggaaccacttcagatgccaggtgcagttctacggcctgagcgagaacgacgagtggacccaggacagagccaagcccgtgacccagatcgtgtctgccgaagcctggggcagagccgatgatgtgattaagatccactggcaggaaaagaagtccaacaccatcctgggcagccaggaaggcaacaccatgaagaccaacgacacctacatgaagttcagctggctgaccgtgcccgagaagtccctggacaaagaacacagatgcatcgtgcggcacgaaaacaacaagaacggcgtggaccaggaaatcatcttcccacccatcaagaccgatgtgattacaatggaccccaaggacaactgctccaaggacgccaacgataccctgctgctccagctgaccaacaccagcgcctactacatgtacttgttgctgctgctgaagtccgtggtgtacttcgccatcatcacatgctgcctgctgatggctatggtcaagcggaaggacagccggggaagggccaagcgatctggatctggagcaacaaacttctcactactcaaacaagcaggtgacgtggaggagaatcccgggcctactagtatggactggatttggcgcatccttttccttgtcggcgctgctaccggcgcgcattccttcgaacaagttcagcttcaacagcctggcgctgagctggtcaaacctggcgcttctgtgaagatgagctgcaaagccagcggctacgccttcagcagctactggatcaactggatgaagcagaaacccggccagggactcgaatggatcggccaaatctatcccggcgacggcgacaccaactacaacggcaagttcaagggcagagccacactgaccgccgatacctctagcagcacagcctacatgcagctgagcagcctgaccagcgaagatagcgccgtgtacttctgtgcccggtccatcacaacagtcgtgggctgcgctatggactattggggccagggaacaagcgtgaccgtgtctagtacgcgtatccagaaccctgatcctgccgtgtaccagctgcgggatagcaagagcagcgacaagagcgtgtgtctgttcaccgacttcgacagccagaccaacgtgtcccagagcaaggactccgacgtgtacatcaccgataagtgcgtgctggacatgcggagcatggacttcaagagcaactccgccgtggcctggtccaacaagtccgatttcgcctgcgccaacgccttcaacaacagcattatccccgaggacacattcttcccaagccccgagagcagcgactccaccgaccacgtgaagcccaaagagacagagaacaccaagcagcccagcaagagctgccacaagcccaaggccatcgtgcacaccgagaaagtgaacatgatgagcctgaccgtgctgggcctgcggatgctgttcgccaaaaccgtggccgtgaacttcctgctgaccgccaagctgttcttcctcctcaccgcccgcgccaagagaagcggatctggcgtgaagcagaccctgaatttcgacctgctgaagctggctggcgacgtggaatccaacccaggcccttctagaggccatatgaccgagtacaagcccacggtgcgcctcgccacccgcgacgacgtccccagggccgtacgcaccctcgccgccgcgttcgccgactaccccgccacgcgccacaccgtcgatccggaccgccacatcgagcgggtcaccgagctgcaagaactcttcctcacgcgcgtcgggctcgacatcggcaaggtgtgggtcgcggacgacggcgccgcggtggcggtctggaccacgccggagagcgtcgaagcgggggcggtgttcgccgagatcggcccgcgcatggccgagttgagcggttcccggctggccgcgcagcaacagatggaaggcctcctggcgccgcaccggcccaaggagcccgcgtggttcctggccaccgtcggcgtctcgcccgaccaccagggcaagggtctgggcagcgccgtcgtgctccccggagtggaggcggccgagcgcgccggggtgcccgccttcctggagacctccgcgccccgcaacctccccttctacgagcggctcggcttcaccgtcaccgccgacgtcgaggtgcccgaaggaccgcgcacctggtgcatgacccgcaagcccggtgcctga

SEQ ID NO: 7036 - DNA, 3513 bp, synthetic construct
  source 1..3513: mol_type = other DNA
atggccttaccagtgaccgccttgctcctgccgctggccttgctgctccacgccgccaggccggcatgcatggaccccgacctggaaatcagagccgccttcctgcggcagagaaacacagccctgagaacagaggtggccgagctggaacaagaggtgcagcggctggaaaacgaggtgtcccagtacgagacaagatacggccctctcggaggcggaaaaggtaccggcggaggcggatctggcggcggaggtagcggtggcggaggatctgaattcgacatccagatgacacagagccctagcagcctgtctgccagcgtgggagacagagtgaccatcacatgcaaggccagcgaccacatcaacaactggctggcctggtatcagcagaagcctggacaggcccctaagctgctgatctacggcgctaccacactggaaacaggcgtgcccagcagattttctggcagcggctctggcaccgactacaccctgacaatatccagcctccagcctgaggacttcgccacctactactgtcagcagagctggaacaccccttggacattcggccagggcaccaagctggaaatcaagagactcgaggacctgaagaacgtgttcccacctgaggtggccgtgttcgagcctagcgaggccgagatcagccacacccagaaagccaccctcgtgtgcctggctaccggcttctaccccgaccatgtggaactgtcttggtgggtcaacggcaaagaggtgcacagcggcgtgtgtaccgacccccagccactgaaagaacagcccgccctgaacgacagccggtactgcctgagcagcagactgagagtgtccgccaccttctggcagaacccccggaaccacttcagatgccaggtgcagttctacggcctgagcgagaacgacgagtggacccaggacagagccaagcccgtgacccagatcgtgtctgccgaagcctggggcagagccgatgatgtgattaagatccactggcaggaaaagaagtccaacaccatcctgggcagccaggaaggcaacaccatgaagaccaacgacacctacatgaagttcagctggctgaccgtgcccgagaagtccctggacaaagaacacagatgcatcgtgcggcacgaaaacaacaagaacggcgtggaccaggaaatcatcttcccacccatcaagaccgatgtgattacaatggaccccaaggacaactgctccaaggacgccaacgataccctgctgctccagctgaccaacaccagcgcctactacatgtacttgttgctgctgctgaagtccgtggtgtacttcgccatcatcacatgctgcctgctgatggctatggtcaagcggaaggacagccggggaagggccaagcgatctggatctggagcaacaaacttctcactactcaaacaagcaggtgacgtggaggagaatcccgggcctactagtgccaccatggactggatttggcgcatccttttccttgtcggcgctgctaccggcgcccattccgggcccgaagtgcagctggttgaatctggcggaggactggttcaggctggcggatctctgagactgtcttgtgccgccagcggcagaacctttagcatgggctggtttagacaggcccctggcaaagagagagagttcgtcgccgccatcacatactctggcggcagcccttactacgccgactctgtgaagggcagattcaccatcagccgggacaacgccaagaacaccgtgtacctccagatgaacagcctgaagcctgaggacaccgccgtgtactactgcgccgccaatccaacatacggcagcgactggaacgccgagaattggggccagggaacccaagtgacagtgtctagcggatccggcggcggaggatctggcggaggcggatctgggggcggaggctctttcgaacaagttcagcttcaacagcctggcgctgagctggtcaaacctggcgcttctgtgaagatgagctgcaaagccagcggctacgccttcagcagctactggatcaactggatgaagcagaaacccggccagggactcgaatggatcggccaaatctatcccggcgacggcgacaccaactacaacggcaagttcaagggcagagccacactgaccgccgatacctctagcagcacagcctacatgcagctgagcagcctgaccagcgaagatagcgccgtgtacttctgtgcccggtccatcacaacagtcgtgggctgcgctatggactattggggccagggaacaagcgtgaccgtgtctagtacgcgtatccagaaccctgatcctgccgtgtaccagctgcgggatagcaagagcagcgacaagagcgtgtgtctgttcaccgacttcgacagccagaccaacgtgtcccagagcaaggactccgacgtgtacatcaccgataagtgcgtgctggacatgcggagcatggacttcaagagcaactccgccgtggcctggtccaacaagtccgatttcgcctgcgccaacgccttcaacaacagcattatccccgaggacacattcttcccaagccccgagagcagcgactccaccgaccacgtgaagcccaaagagacagagaacaccaagcagcccagcaagagctgccacaagcccaaggccatcgtgcacaccgagaaagtgaacatgatgagcctgaccgtgctgggcctgcggatgctgttcgccaaaaccgtggccgtgaacttcctgctgaccgccaagctgttcttcctcctcaccgcccgcgccaagagaagcggatctggcgtgaagcagaccctgaatttcgacctgctgaagctggctggcgacgtggaatccaacccaggcccttctagaggccatatgaccgagtacaagcccacggtgcgcctcgccacccgcgacgacgtccccagggccgtacgcaccctcgccgccgcgttcgccgactaccccgccacgcgccacaccgtcgatccggaccgccacatcgagcgggtcaccgagctgcaagaactcttcctcacgcgcgtcgggctcgacatcggcaaggtgtgggtcgcggacgacggcgccgcggtggcggtctggaccacgccggagagcgtcgaagcgggggcggtgttcgccgagatcggcccgcgcatggccgagttgagcggttcccggctggccgcgcagcaacagatggaaggcctcctggcgccgcaccggcccaaggagcccgcgtggttcctggccaccgtcggcgtctcgcccgaccaccagggcaagggtctgggcagcgccgtcgtgctccccggagtggaggcggccgagcgcgccggggtgcccgccttcctggagacctccgcgccccgcaacctccccttctacgagcggctcggcttcaccgtcaccgccgacgtcgaggtgcccgaaggaccgcgcacctggtgcatgacccgcaagcccggtgcctga

SEQ ID NO: 7037 - DNA, 3162 bp, synthetic construct
  source 1..3162: mol_type = other DNA
atggccttaccagtgaccgccttgctcctgccgctggccttgctgctccacgccgccaggccggacatccagatgacacagagccctagcagcctgtctgccagcgtgggagacagagtgaccatcacatgcaaggccagcgaccacatcaacaactggctggcctggtatcagcagaagcctggacaggcccctaagctgctgatctacggcgctaccacactggaaacaggcgtgcccagcagattttctggcagcggctctggcaccgactacaccctgacaatatccagcctccagcctgaggacttcgccacctactactgtcagcagagctggaacaccccttggacattcggccagggcaccaagctggaaatcaagagactcgaggacctgaagaacgtgttcccacctgaggtggccgtgttcgagcctagcgaggccgagatcagccacacccagaaagccaccctcgtgtgcctggctaccggcttctaccccgaccatgtggaactgtcttggtgggtcaacggcaaagaggtgcacagcggcgtgtgtaccgacccccagccactgaaagaacagcccgccctgaacgacagccggtactgcctgagcagcagactgagagtgtccgccaccttctggcagaacccccggaaccacttcagatgccaggtgcagttctacggcctgagcgagaacgacgagtggacccaggacagagccaagcccgtgacccagatcgtgtctgccgaagcctggggcagagccgatgatgtgattaagatccactggcaggaaaagaagtccaacaccatcctgggcagccaggaaggcaacaccatgaagaccaacgacacctacatgaagttcagctggctgaccgtgcccgagaagtccctggacaaagaacacagatgcatcgtgcggcacgaaaacaacaagaacggcgtggaccaggaaatcatcttcccacccatcaagaccgatgtgattacaatggaccccaaggacaactgctccaaggacgccaacgataccctgctgctccagctgaccaacaccagcgcctactacatgtacttgttgctgctgctgaagtccgtggtgtacttcgccatcatcacatgctgcctgctgatggctatggtcaagcggaaggacagccggggaagggccaagcgatctggatctggagcaacaaacttctcactactcaaacaagcaggtgacgtggaggagaatcccgggcctactagtgccaccatggactggatttggcgcatccttttccttgtcggcgctgctaccggcgcccattccgggcccatgggatcttggagcgagttttacgatcggctgcacgccattcaccaccggctgtatgctctcggaggaagcgaagctgagctggccgcttttgaaaaagaaattgccgctttcgagtccgagcttcaggcttacaaaggcaaagggaatcctgaggtcgaggccctgagagataccgccgccttcatcagaacccggttgcaggcataccggcacaacggatccggcggcggaggatctggcggaggcggatctgggggcggaggctctttcgaacaagttcagcttcaacagcctggcgctgagctggtcaaacctggcgcttctgtgaagatgagctgcaaagccagcggctacgccttcagcagctactggatcaactggatgaagcagaaacccggccagggactcgaatggatcggccaaatctatcccggcgacggcgacaccaactacaacggcaagttcaagggcagagccacactgaccgccgatacctctagcagcacagcctacatgcagctgagcagcctgaccagcgaagatagcgccgtgtacttctgtgcccggtccatcacaacagtcgtgggctgcgctatggactattggggccagggaacaagcgtgaccgtgtctagtacgcgtatccagaaccctgatcctgccgtgtaccagctgcgggatagcaagagcagcgacaagagcgtgtgtctgttcaccgacttcgacagccagaccaacgtgtcccagagcaaggactccgacgtgtacatcaccgataagtgcgtgctggacatgcggagcatggacttcaagagcaactccgccgtggcctggtccaacaagtccgatttcgcctgcgccaacgccttcaacaacagcattatccccgaggacacattcttcccaagccccgagagcagcgactccaccgaccacgtgaagcccaaagagacagagaacaccaagcagcccagcaagagctgccacaagcccaaggccatcgtgcacaccgagaaagtgaacatgatgagcctgaccgtgctgggcctgcggatgctgttcgccaaaaccgtggccgtgaacttcctgctgaccgccaagctgttcttcctcctcaccgcccgcgccaagagaagcggatctggcgtgaagcagaccctgaatttcgacctgctgaagctggctggcgacgtggaatccaacccaggcccttctagaggccatatgaccgagtacaagcccacggtgcgcctcgccacccgcgacgacgtccccagggccgtacgcaccctcgccgccgcgttcgccgactaccccgccacgcgccacaccgtcgatccggaccgccacatcgagcgggtcaccgagctgcaagaactcttcctcacgcgcgtcgggctcgacatcggcaaggtgtgggtcgcggacgacggcgccgcggtggcggtctggaccacgccggagagcgtcgaagcgggggcggtgttcgccgagatcggcccgcgcatggccgagttgagcggttcccggctggccgcgcagcaacagatggaaggcctcctggcgccgcaccggcccaaggagcccgcgtggttcctggccaccgtcggcgtctcgcccgaccaccagggcaagggtctgggcagcgccgtcgtgctccccggagtggaggcggccgagcgcgccggggtgcccgccttcctggagacctccgcgccccgcaacctccccttctacgagcggctcggcttcaccgtcaccgccgacgtcgaggtgcccgaaggaccgcgcacctggtgcatgacccgcaagcccggtgcctga

SEQ ID NO: 7038 - DNA, 3792 bp, synthetic construct
  source 1..3792: mol_type = other DNA
atggccttaccagtgaccgccttgctcctgccgctggccttgctgctccacgccgccaggccggacatccagatgacacagagccctagcagcctgtctgccagcgtgggagacagagtgaccatcacatgcaaggccagcgaccacatcaacaactggctggcctggtatcagcagaagcctggacaggcccctaagctgctgatctacggcgctaccacactggaaacaggcgtgcccagcagattttctggcagcggctctggcaccgactacaccctgacaatatccagcctccagcctgaggacttcgccacctactactgtcagcagagctggaacaccccttggacattcggccagggcaccaagctggaaatcaagagactcgaggacctgaagaacgtgttcccacctgaggtggccgtgttcgagcctagcgaggccgagatcagccacacccagaaagccaccctcgtgtgcctggctaccggcttctaccccgaccatgtggaactgtcttggtgggtcaacggcaaagaggtgcacagcggcgtgtgtaccgacccccagccactgaaagaacagcccgccctgaacgacagccggtactgcctgagcagcagactgagagtgtccgccaccttctggcagaacccccggaaccacttcagatgccaggtgcagttctacggcctgagcgagaacgacgagtggacccaggacagagccaagcccgtgacccagatcgtgtctgccgaagcctggggcagagccgatgatgtgattaagatccactggcaggaaaagaagtccaacaccatcctgggcagccaggaaggcaacaccatgaagaccaacgacacctacatgaagttcagctggctgaccgtgcccgagaagtccctggacaaagaacacagatgcatcgtgcggcacgaaaacaacaagaacggcgtggaccaggaaatcatcttcccacccatcaagaccgatgtgattacaatggaccccaaggacaactgctccaaggacgccaacgataccctgctgctccagctgaccaacaccagcgcctactacatgtacttgttgctgctgctgaagtccgtggtgtacttcgccatcatcacatgctgcctgctgatggctatggtcaagcggaaggacagccggggaagggccaagcgatctggatctggagcaacaaacttctcactactcaaacaagcaggtgacgtggaggagaatcccgggcctactagtaccatggactggatttggcgcatccttttccttgtcggcgctgctaccggcgcccattccctgttcaatcaagaggtgcagatccctctgaccgagagctactgtggcccctgtcctaagaactggatctgctacaagaacaactgctaccagttcttcgacgagagcaagaattggtacgagagccaggccagctgcatgagccagaatgccagcctgctgaaggtgtacagcaaagaggaccaggacctgctgaaactggtcaagagcgcccactggatgggccttgtgcacatccccaccaatggctcttggcagtgggaggacggcagcattctgagccctaacctgctgaccatcatcgagatgcagaagggcgactgcgccctgtacgccagcagctttaagggctacatcgagaattgcagcaccccgaacacctacatctgtatgcagagaaccgtttctggcggaggcggctctggaggaggcggaagtggcggcggaggcgacctctttaatcaagaagtccagattccactcaccgaatcctactgcggaccttgtccaaaaaattggatttgttataagaacaactgttatcaattctttgatgagtctaaaaattggtatgagtcccaggcttcctgcatgtctcagaacgcttctctgctgaaagtctactctaaagaagatcaggatctcctgaagctcgtcaagtctgcccattggatggggctcgtccacattcctaccaacggaagctggcaatgggaagatggctccatcctgtctccaaatctgctcacgattattgaaatgcagaaaggggattgtgctctctacgccagctccttcaagggatatattgagaactgtagcacgcccaatacttatatctgtatgcaacggaccgtgggatccggcggcggaggatctggcggaggcggatctgggggcggaggctctttcgaacaagttcagcttcaacagcctggcgctgagctggtcaaacctggcgcttctgtgaagatgagctgcaaagccagcggctacgccttcagcagctactggatcaactggatgaagcagaaacccggccagggactcgaatggatcggccaaatctatcccggcgacggcgacaccaactacaacggcaagttcaagggcagagccacactgaccgccgatacctctagcagcacagcctacatgcagctgagcagcctgaccagcgaagatagcgccgtgtacttctgtgcccggtccatcacaacagtcgtgggctgcgctatggactattggggccagggaacaagcgtgaccgtgtctagtacgcgtatccagaaccctgatcctgccgtgtaccagctgcgggatagcaagagcagcgacaagagcgtgtgtctgttcaccgacttcgacagccagaccaacgtgtcccagagcaaggactccgacgtgtacatcaccgataagtgcgtgctggacatgcggagcatggacttcaagagcaactccgccgtggcctggtccaacaagtccgatttcgcctgcgccaacgccttcaacaacagcattatccccgaggacacattcttcccaagccccgagagcagcgactccaccgaccacgtgaagcccaaagagacagagaacaccaagcagcccagcaagagctgccacaagcccaaggccatcgtgcacaccgagaaagtgaacatgatgagcctgaccgtgctgggcctgcggatgctgttcgccaaaaccgtggccgtgaacttcctgctgaccgccaagctgttcttcctcctcaccgcccgcgccaagagaagcggatctggcgtgaagcagaccctgaatttcgacctgctgaagctggctggcgacgtggaatccaacccaggcccttctagaggccatatgaccgagtacaagcccacggtgcgcctcgccacccgcgacgacgtccccagggccgtacgcaccctcgccgccgcgttcgccgactaccccgccacgcgccacaccgtcgatccggaccgccacatcgagcgggtcaccgagctgcaagaactcttcctcacgcgcgtcgggctcgacatcggcaaggtgtgggtcgcggacgacggcgccgcggtggcggtctggaccacgccggagagcgtcgaagcgggggcggtgttcgccgagatcggcccgcgcatggccgagttgagcggttcccggctggccgcgcagcaacagatggaaggcctcctggcgccgcaccggcccaaggagcccgcgtggttcctggccaccgtcggcgtctcgcccgaccaccagggcaagggtctgggcagcgccgtcgtgctccccggagtggaggcggccgagcgcgccggggtgcccgccttcctggagacctccgcgccccgcaacctccccttctacgagcggctcggcttcaccgtcaccgccgacgtcgaggtgcccgaaggaccgcgcacctggtgcatgacccgcaagcccggtgcctga

SEQ ID NO: 7039 - DNA, 2163 bp, synthetic construct
  source 1..2163: mol_type = other DNA
atggccttaccagtgaccgccttgctcctgccgctggccttgctgctccacgccgccaggccggacatccagatgacacagactacatcctccctgtctgcctctctgggagacagagtcaccatcagttgcagggcaagtcaggacattagtaagtacctgaactggtatcagcagaaaccagatggaactgttaaactcctgatctaccatacatcaagattacactcaggagtcccatcaaggttcagtggcagtgggtctggaacagattattctctcaccattagcaacctggagcaagaagatattgccacttacttttgccaacagggtaatacgcttccgtacacgttcggaggggggaccaagctggagatcacactcgaggacctgaagaacgtgttcccacctgaggtggccgtgttcgagcctagcgaggccgagatcagccacacccagaaagccaccctcgtgtgcctggctaccggcttctaccccgaccatgtggaactgtcttggtgggtcaacggcaaagaggtgcacagcggcgtgtgtaccgacccccagccactgaaagaacagcccgccctgaacgacagccggtactgcctgagcagcagactgagagtgtccgccaccttctggcagaacccccggaaccacttcagatgccaggtgcagttctacggcctgagcgagaacgacgagtggacccaggacagagccaagcccgtgacccagatcgtgtctgccgaagcctggggcagagccgatgatgtgattaagatccactggcaggaaaagaagtccaacaccatcctgggcagccaggaaggcaacaccatgaagaccaacgacacctacatgaagttcagctggctgaccgtgcccgagaagtccctggacaaagaacacagatgcatcgtgcggcacgaaaacaacaagaacggcgtggaccaggaaatcatcttcccacccatcaagaccgatgtgattacaatggaccccaaggacaactgctccaaggacgccaacgataccctgctgctccagctgaccaacaccagcgcctactacatgtacttgttgctgctgctgaagtccgtggtgtacttcgccatcatcacatgctgcctgctgcggagaaccgccttctgctgcaacggcgagaagtctagggccaagcgatctggatctggagcaacaaacttctcactactcaaacaagcaggtgacgtggaggagaatcccgggcctactagtatggactggatttggcgcatccttttccttgtcggcgctgctaccggcgcgcattccttcgaagtgaaactgcaggagtcaggacctggcctggtggcgccctcacagagcctgtccgtcacatgcactgtctcaggggtctcattacccgactatggtgtaagctggattcgccagcctccacgaaagggtctggagtggctgggagtaatatggggtagtgaaaccacatactataattcagctctcaaatccagactgaccatcatcaaggacaactccaagagccaagttttcttaaaaatgaacagtctgcaaactgatgacacagccatttactactgtgccaaacattattactacggtggtagctatgctatggactactggggccaaggaacctcagtcaccgtctcctcaacgcgtatccagaaccctgatcctgccgtgtaccagctgcgggatagcaagagcagcgacaagagcgtgtgtctgttcaccgacttcgacagccagaccaacgtgtcccagagcaaggactccgacgtgtacatcaccgataagtgcgtgctggacatgcggagcatggacttcaagagcaactccgccgtggcctggtccaacaagtccgatttcgcctgcgccaacgccttcaacaacagcattatccccgaggacacattcttcccaagccccgagagcagcgactccaccgaccacgtgaagcccaaagagacagagaacaccaagcagcccagcaagagctgccacaagcccaaggccatcgtgcacaccgagaaagtgaacatgatgagcctgaccgtgctgggcctgcggatgctgttcgccaaaaccgtggccgtgaacttcctgctgaccgccaagctgttcttcctc

SEQ ID NO: 7040 - DNA, 2166 bp, synthetic construct
  source 1..2166: mol_type = other DNA
atggccttaccagtgaccgccttgctcctgccgctggccttgctgctccacgccgccaggccggagatcgtgatgacccagagccctgccaccctgtctctgagccctggcgaaagagccaccctgagctgtagagccagccaggacatcagcaagtacctgaactggtatcagcagaagcccggccaggcccccagactgctgatctaccacaccagcagactgcacagcggcatccccgccagattttctggctctggcagcggcaccgactacaccctgacaatcagcagcctccagcccgaggacttcgccgtgtacttctgtcagcaaggcaacaccctgccctacaccttcggccagggcaccaagctggaaatcaagctcgaggacctgaagaacgtgttcccacctgaggtggccgtgttcgagcctagcgaggccgagatcagccacacccagaaagccaccctcgtgtgcctggctaccggcttctaccccgaccatgtggaactgtcttggtgggtcaacggcaaagaggtgcacagcggcgtgtgtaccgacccccagccactgaaagaacagcccgccctgaacgacagccggtactgcctgagcagcagactgagagtgtccgccaccttctggcagaacccccggaaccacttcagatgccaggtgcagttctacggcctgagcgagaacgacgagtggacccaggacagagccaagcccgtgacccagatcgtgtctgccgaagcctggggcagagccgatgatgtgattaagatccactggcaggaaaagaagtccaacaccatcctgggcagccaggaaggcaacaccatgaagaccaacgacacctacatgaagttcagctggctgaccgtgcccgagaagtccctggacaaagaacacagatgcatcgtgcggcacgaaaacaacaagaacggcgtggaccaggaaatcatcttcccacccatcaagaccgatgtgattacaatggaccccaaggacaactgctccaaggacgccaacgataccctgctgctccagctgaccaacaccagcgcctactacatgtacttgttgctgctgctgaagtccgtggtgtacttcgccatcatcacatgctgcctgctgcggagaaccgccttctgctgcaacggcgagaagtctagggccaagcgatctggatctggagcaacaaacttctcactactcaaacaagcaggtgacgtggaggagaatcccgggcctactagtatggactggatttggcgcatccttttccttgtcggcgctgctaccggcgcgcattccttcgaacaggtgcaactccaggaatctggccctggcctcgtgaagcccagcgagacactgagcctgacctgtaccgtgtccggcgtgtccctgcctgactatggcgtgtcctggatcagacagccccctggcaagggcctggaatggatcggagtgatttggggcagcgaaaccacctactacaacagctccctgaagtccagagtgaccatctccaaggacaactccaagaaccaggtgtccctgaagctgagcagcgtgacagccgccgacaccgccgtgtattactgcgccaagcactactactacggcggcagctacgctatggactactggggccagggaaccctcgtgaccgtgtctagtacgcgtatccagaaccctgatcctgccgtgtaccagctgcgggatagcaagagcagcgacaagagcgtgtgtctgttcaccgacttcgacagccagaccaacgtgtcccagagcaaggactccgacgtgtacatcaccgataagtgcgtgctggacatgcggagcatggacttcaagagcaactccgccgtggcctggtccaacaagtccgatttcgcctgcgccaacgccttcaacaacagcattatccccgaggacacattcttcccaagccccgagagcagcgactccaccgaccacgtgaagcccaaagagacagagaacaccaagcagcccagcaagagctgccacaagcccaaggccatcgtgcacaccgagaaagtgaacatgatgagcctgaccgtgctgggcctgcggatgctgttcgccaaaaccgtggccgtgaacttcctgctgaccgccaagctgttcttcctc

SEQ ID NO: 7041 - DNA, 2169 bp, synthetic construct
  source 1..2169: mol_type = other DNA
atggccttaccagtgaccgccttgctcctgccgctggccttgctgctccacgccgccaggccggacgagatcgtgctgacacagagccccgccaccctgtcactgtctccaggcgaaagagccaccctgagctgtagcgccagcagcagcgtgtcctacatgcactggtatcagcagaagcccggccaggcccccagactgctgatctacgataccagcaagctggcctccggcatccccgccagattttctggcagcggctccggcaccgacttcaccctgacaatcagcagcctggaacccgaggacgtggccgtgtactactgttttcaaggcagcgtgtaccccttcaccttcggccagggcaccaagctggaaatcaagagactcgaggacctgaagaacgtgttcccacctgaggtggccgtgttcgagcctagcgaggccgagatcagccacacccagaaagccaccctcgtgtgcctggctaccggcttctaccccgaccatgtggaactgtcttggtgggtcaacggcaaagaggtgcacagcggcgtgtgtaccgacccccagccactgaaagaacagcccgccctgaacgacagccggtactgcctgagcagcagactgagagtgtccgccaccttctggcagaacccccggaaccacttcagatgccaggtgcagttctacggcctgagcgagaacgacgagtggacccaggacagagccaagcccgtgacccagatcgtgtctgccgaagcctggggcagagccgatgatgtgattaagatccactggcaggaaaagaagtccaacaccatcctgggcagccaggaaggcaacaccatgaagaccaacgacacctacatgaagttcagctggctgaccgtgcccgagaagtccctggacaaagaacacagatgcatcgtgcggcacgaaaacaacaagaacggcgtggaccaggaaatcatcttcccacccatcaagaccgatgtgattacaatggaccccaaggacaactgctccaaggacgccaacgataccctgctgctccagctgaccaacaccagcgcctactacatgtacttgttgctgctgctgaagtccgtggtgtacttcgccatcatcacatgctgcctgctgcggagaaccgccttctgctgcaacggcgagaagtctagggccaagcgatctggatctggagcaacaaacttctcactactcaaacaagcaggtgacgtggaggagaatcccgggcctactagtatggactggatttggcgcatccttttccttgtcggcgctgctaccggcgcgcattccttcgaacaggtgcagctccaggaatctggccctggcctcgtgaagcctagccagaccctgagcctgacctgtaccgtgtctggcggcagcatcagcacaagcggcatgggcgtgggctggatcagacagcaccctggcaagggcctggaatggatcggccacatttggtgggacgacgacaagcggtacaaccccgccctgaagtccagagtgaccatcagcgtggacaccagcaagaaccagttcagcctgaagctgagcagcgtgacagccgccgataccgccgtgtattattgcgcccggatggaactgtggtcctactacttcgactactggggccagggaaccctcgtgaccgtgtctagtacgcgtatccagaaccctgatcctgccgtgtaccagctgcgggatagcaagagcagcgacaagagcgtgtgtctgttcaccgacttcgacagccagaccaacgtgtcccagagcaaggactccgacgtgtacatcaccgataagtgcgtgctggacatgcggagcatggacttcaagagcaactccgccgtggcctggtccaacaagtccgatttcgcctgcgccaacgccttcaacaacagcattatccccgaggacacattcttcccaagccccgagagcagcgactccaccgaccacgtgaagcccaaagagacagagaacaccaagcagcccagcaagagctgccacaagcccaaggccatcgtgcacaccgagaaagtgaacatgatgagcctgaccgtgctgggcctgcggatgctgttcgccaaaaccgtggccgtgaacttcctgctgaccgccaagctgttcttcctc

SEQ ID NO: 7042 - DNA, 2163 bp, synthetic construct
  source 1..2163: mol_type = other DNA
atggccttaccagtgaccgccttgctcctgccgctggccttgctgctccacgccgccaggccggactacatccacgtgacacagagccctagcagcctgtccgtgtccatcggcgatagagtgaccatcaactgccagacctctcaaggcgtgggcagcgacctgcactggtatcagcacaaacctggcagagcccctaagctgctgatccaccatgccagctctgtggaagatggcgtgcccagcagattttccggcaccggatttcacaccagcttcaacctgacaatcaacgacctccaggccgacgacatcggcacctactactgtcaagtgctccagagcttcggcagaggcagcagactggatacaaaactcgaggacctgaagaacgtgttcccacctgaggtggccgtgttcgagcctagcgaggccgagatcagccacacccagaaagccaccctcgtgtgcctggctaccggcttctaccccgaccatgtggaactgtcttggtgggtcaacggcaaagaggtgcacagcggcgtgtgtaccgacccccagccactgaaagaacagcccgccctgaacgacagccggtactgcctgagcagcagactgagagtgtccgccaccttctggcagaacccccggaaccacttcagatgccaggtgcagttctacggcctgagcgagaacgacgagtggacccaggacagagccaagcccgtgacccagatcgtgtctgccgaagcctggggcagagccgatgatgtgattaagatccactggcaggaaaagaagtccaacaccatcctgggcagccaggaaggcaacaccatgaagaccaacgacacctacatgaagttcagctggctgaccgtgcccgagaagtccctggacaaagaacacagatgcatcgtgcggcacgaaaacaacaagaacggcgtggaccaggaaatcatcttcccacccatcaagaccgatgtgattacaatggaccccaaggacaactgctccaaggacgccaacgataccctgctgctccagctgaccaacaccagcgcctactacatgtacttgttgctgctgctgaagtccgtggtgtacttcgccatcatcacatgctgcctgctgcggagaaccgccttctgctgcaacggcgagaagtctagggccaagcgatctggatctggagcaacaaacttctcactactcaaacaagcaggtgacgtggaggagaatcccgggcctactagtatggactggatttggcgcatccttttccttgtcggcgctgctaccggcgcgcattccttcgaaagggcacacctggtgcagtctggcaccgccatgaagaaacctggcgcttccgtcagagtgtcctgtcagacaagcggctacaccttcacagcccacatcctgttctggttcagacaggccccaggcagaggactggaatgggtcggatggatcaagccccagtacggggccgtgaatttcggcggaggcttcagagacagagtgaccctgaccagggacgtgtaccgggaaatcgcctacatggacatccggggcctgaagcctgatgacaccgccgtgtactactgcgccagggatagaagctacggcgacagctcttgggctctcgatgcttggggacagggcacaacagtggtggtgtctgctacgcgtatccagaaccctgatcctgccgtgtaccagctgcgggatagcaagagcagcgacaagagcgtgtgtctgttcaccgacttcgacagccagaccaacgtgtcccagagcaaggactccgacgtgtacatcaccgataagtgcgtgctggacatgcggagcatggacttcaagagcaactccgccgtggcctggtccaacaagtccgatttcgcctgcgccaacgccttcaacaacagcattatccccgaggacacattcttcccaagccccgagagcagcgactccaccgaccacgtgaagcccaaagagacagagaacaccaagcagcccagcaagagctgccacaagcccaaggccatcgtgcacaccgagaaagtgaacatgatgagcctgaccgtgctgggcctgcggatgctgttcgccaaaaccgtggccgtgaacttcctgctgaccgccaagctgttcttcctc

SEQ ID NO: 7043 - DNA, 2193 bp, synthetic construct
  source 1..2193: mol_type = other DNA
atggccttaccagtgaccgccttgctcctgccgctggccttgctgctccacgccgccaggccggacgtgcagatgatccagacccccgatagcctggccgtgtccctgggacagagagccaccatctcttgcagagccagcgagagcgtggacaactacggcatcagcttcatgcactggtatcagcagaagcccggccagagccccaagctgctgatctacagagcctccaacctggaaagcggcatccccgccagattttccggcagcggcagcagaaccgacttcaccctgaccatcaaccccgtggaaaccgacgacgtggcaacctactactgccagcagaacaacaaggacccccccacctttggcggaggcaccaagctggaaatcaagctcgaggacctgaagaacgtgttcccacctgaggtggccgtgttcgagcctagcgaggccgagatcagccacacccagaaagccaccctcgtgtgcctggctaccggcttctaccccgaccatgtggaactgtcttggtgggtcaacggcaaagaggtgcacagcggcgtgtgtaccgacccccagccactgaaagaacagcccgccctgaacgacagccggtactgcctgagcagcagactgagagtgtccgccaccttctggcagaacccccggaaccacttcagatgccaggtgcagttctacggcctgagcgagaacgacgagtggacccaggacagagccaagcccgtgacccagatcgtgtctgccgaagcctggggcagagccgatgatgtgattaagatccactggcaggaaaagaagtccaacaccatcctgggcagccaggaaggcaacaccatgaagaccaacgacacctacatgaagttcagctggctgaccgtgcccgagaagtccctggacaaagaacacagatgcatcgtgcggcacgaaaacaacaagaacggcgtggaccaggaaatcatcttcccacccatcaagaccgatgtgattacaatggaccccaaggacaactgctccaaggacgccaacgataccctgctgctccagctgaccaacaccagcgcctactacatgtacttgttgctgctgctgaagtccgtggtgtacttcgccatcatcacatgctgcctgctgcggagaaccgccttctgctgcaacggcgagaagtctagggccaagcgatctggatctggagcaacaaacttctcactactcaaacaagcaggtgacgtggaggagaatcccgggcctactagtatggactggatttggcgcatccttttccttgtcggcgctgctaccggcgcgcattccttcgaagggggaggcggctctcaggtgcaactccagcagtctggcgctgagcttgtgaagcctggggccagcgtgaagattagctgcaaggccagcggctacgccttcagcagctactggatgaactgggtcaagcagcggcctggcaagggcctggaatggatcggccaaatctaccccggcgacggcgacaccacctacaacggcaagttcaagggcaaggccaccctgacagccgacaagagcagcagcaccgtgtacatgcaactgaacagcctgaccagcgaggacagcgccgtgtacttctgcgtgcggtactactacggcagctccggctacttcgactattggggccagggcaccacactgaccgtgtcctctacgcgtatccagaaccctgatcctgccgtgtaccagctgcgggatagcaagagcagcgacaagagcgtgtgtctgttcaccgacttcgacagccagaccaacgtgtcccagagcaaggactccgacgtgtacatcaccgataagtgcgtgctggacatgcggagcatggacttcaagagcaactccgccgtggcctggtccaacaagtccgatttcgcctgcgccaacgccttcaacaacagcattatccccgaggacacattcttcccaagccccgagagcagcgactccaccgaccacgtgaagcccaaagagacagagaacaccaagcagcccagcaagagctgccacaagcccaaggccatcgtgcacaccgagaaagtgaacatgatgagcctgaccgtgctgggcctgcggatgctgttcgccaaaaccgtggccgtgaacttcctgctgaccgccaagctgttcttcctc

SEQ ID NO: 7044 - DNA, 2166 bp, synthetic construct
  source 1..2166: mol_type = other DNA
atggccttaccagtgaccgccttgctcctgccgctggccttgctgctccacgccgccaggccggacgtgcagatgatccagacccccagcagcctgtctgccagcctgggcgatagagtgaccatcagctgtcgggccagccaggacatcggcaactacctgaactggtatcagcagaaacccgacggcaccgtgaagctgctgatctactacaccagcagactgcacagcggcgtgcccagcagattttctggcagcggctctggcaccgagtacagcctgaccatctccaacctggaacaggaagatattgctacctacttctgtcagcaaggcagcgccctgccccctacatttggcggcggaacaaagctggaaatcaacctcgaggacctgaagaacgtgttcccacctgaggtggccgtgttcgagcctagcgaggccgagatcagccacacccagaaagccaccctcgtgtgcctggctaccggcttctaccccgaccatgtggaactgtcttggtgggtcaacggcaaagaggtgcacagcggcgtgtgtaccgacccccagccactgaaagaacagcccgccctgaacgacagccggtactgcctgagcagcagactgagagtgtccgccaccttctggcagaacccccggaaccacttcagatgccaggtgcagttctacggcctgagcgagaacgacgagtggacccaggacagagccaagcccgtgacccagatcgtgtctgccgaagcctggggcagagccgatgatgtgattaagatccactggcaggaaaagaagtccaacaccatcctgggcagccaggaaggcaacaccatgaagaccaacgacacctacatgaagttcagctggctgaccgtgcccgagaagtccctggacaaagaacacagatgcatcgtgcggcacgaaaacaacaagaacggcgtggaccaggaaatcatcttcccacccatcaagaccgatgtgattacaatggaccccaaggacaactgctccaaggacgccaacgataccctgctgctccagctgaccaacaccagcgcctactacatgtacttgttgctgctgctgaagtccgtggtgtacttcgccatcatcacatgctgcctgctgcggagaaccgccttctgctgcaacggcgagaagtctagggccaagcgatctggatctggagcaacaaacttctcactactcaaacaagcaggtgacgtggaggagaatcccgggcctactagtatggactggatttggcgcatccttttccttgtcggcgctgctaccggcgcgcattccttcgaagctctccagctccagcagtctggcgcagaactcgtgcggcctggcgcttctgtgaccctgagctgtaaagccagcggctacaccttcaccgactacgagatgcactgggtcaagcagacccctgtgcacggcctggaatggatcggagccatcgaccctgagacaggcggcaccgcctacaaccagaagttcgagggcaaggccatcctgaccgccgacaagagcagcagcacagcctacatggaactgcggagcctgacctccgaggacagccccgtgtactactgtgccagacggcggtactacggcagcagctccttcgactattggggccagggcaccaccctgaccgtgtctagtacgcgtatccagaaccctgatcctgccgtgtaccagctgcgggatagcaagagcagcgacaagagcgtgtgtctgttcaccgacttcgacagccagaccaacgtgtcccagagcaaggactccgacgtgtacatcaccgataagtgcgtgctggacatgcggagcatggacttcaagagcaactccgccgtggcctggtccaacaagtccgatttcgcctgcgccaacgccttcaacaacagcattatccccgaggacacattcttcccaagccccgagagcagcgactccaccgaccacgtgaagcccaaagagacagagaacaccaagcagcccagcaagagctgccacaagcccaaggccatcgtgcacaccgagaaagtgaacatgatgagcctgaccgtgctgggcctgcggatgctgttcgccaaaaccgtggccgtgaacttcctgctgaccgccaagctgttcttcctc

SEQ ID NO: 7045 - DNA, 2178 bp, synthetic construct
  source 1..2178: mol_type = other DNA
atggccttaccagtgaccgccttgctcctgccgctggccttgctgctccacgccgccaggccggacatcgtcctgacccagtccccagccagcctggcggtgtccctgggtcaacgagctaccatttcctgcagagcctctaagtccgtatccacttccggctatagttacctgcattggtaccaacagaaaccagggcagccacccaagctgctcatctatctggcctcaaacctggagtccggcgtgcccgccagattctccggaagtgggagcggcaccgactttacattgaacatccacccagtcgaagaggaagatgctgccacttattactgtcagcactccagggagctgccatttacatttggctctggcacaaaactggagatcaaactcgaggacctgaagaacgtgttcccacctgaggtggccgtgttcgagcctagcgaggccgagatcagccacacccagaaagccaccctcgtgtgcctggctaccggcttctaccccgaccatgtggaactgtcttggtgggtcaacggcaaagaggtgcacagcggcgtgtgtaccgacccccagccactgaaagaacagcccgccctgaacgacagccggtactgcctgagcagcagactgagagtgtccgccaccttctggcagaacccccggaaccacttcagatgccaggtgcagttctacggcctgagcgagaacgacgagtggacccaggacagagccaagcccgtgacccagatcgtgtctgccgaagcctggggcagagccgatgatgtgattaagatccactggcaggaaaagaagtccaacaccatcctgggcagccaggaaggcaacaccatgaagaccaacgacacctacatgaagttcagctggctgaccgtgcccgagaagtccctggacaaagaacacagatgcatcgtgcggcacgaaaacaacaagaacggcgtggaccaggaaatcatcttcccacccatcaagaccgatgtgattacaatggaccccaaggacaactgctccaaggacgccaacgataccctgctgctccagctgaccaacaccagcgcctactacatgtacttgttgctgctgctgaagtccgtggtgtacttcgccatcatcacatgctgcctgctgcggagaaccgccttctgctgcaacggcgagaagtctagggccaagcgatctggatctggagcaacaaacttctcactactcaaacaagcaggtgacgtggaggagaatcccgggcctactagtatggactggatttggcgcatccttttccttgtcggcgctgctaccggcgcgcattccttcgaacaggttcagctggtcgagtccgggggaggtctggtacagccgggtggcagcctcaagctgtcatgtgccgcatctggttttgactttagcaggtattggatgagctgggtccgccaggccccgggcaagggacttgagtggattggagaaataaaccctacttccagcacaatcaacttcacaccttctttgaaagataaggtttttatctctcgggataacgctaaaaacacactgtacttgcagatgtctaaggtgcgaagcgaagacaccgccctctattattgcgcccggggtaattactaccgctatggggatgcgatggactattgggggcaaggtacctccgtcacggtctcaacgcgtatccagaaccctgatcctgccgtgtaccagctgcgggatagcaagagcagcgacaagagcgtgtgtctgttcaccgacttcgacagccagaccaacgtgtcccagagcaaggactccgacgtgtacatcaccgataagtgcgtgctggacatgcggagcatggacttcaagagcaactccgccgtggcctggtccaacaagtccgatttcgcctgcgccaacgccttcaacaacagcattatccccgaggacacattcttcccaagccccgagagcagcgactccaccgaccacgtgaagcccaaagagacagagaacaccaagcagcccagcaagagctgccacaagcccaaggccatcgtgcacaccgagaaagtgaacatgatgagcctgaccgtgctgggcctgcggatgctgttcgccaaaaccgtggccgtgaacttcctgctgaccgccaagctgttcttcctc

SEQ ID NO: 7046 - DNA, 2172 bp, synthetic construct
  source 1..2172: mol_type = other DNA
atggccttaccagtgaccgccttgctcctgccgctggccttgctgctccacgccgccaggccggacatccagatgacccagagccctagctcactgagcgccagcgtgggcgacagggtgaccattacctgctccgccagccaggacatcagcaactacctgaactggtaccagcagaagcccggcaaggcccccaagctgctgatctactacacctccaacctgcactccggcgtgcccagcaggttcagcggaagcggcagcggcaccgatttcaccctgaccatctccagcctgcagcccgaggacttcgccacctactactgccagcagtacaggaagctcccctggactttcggccagggcaccaaactggagatcaagcgtctcgaggacctgaagaacgtgttcccacctgaggtggccgtgttcgagcctagcgaggccgagatcagccacacccagaaagccaccctcgtgtgcctggctaccggcttctaccccgaccatgtggaactgtcttggtgggtcaacggcaaagaggtgcacagcggcgtgtgtaccgacccccagccactgaaagaacagcccgccctgaacgacagccggtactgcctgagcagcagactgagagtgtccgccaccttctggcagaacccccggaaccacttcagatgccaggtgcagttctacggcctgagcgagaacgacgagtggacccaggacagagccaagcccgtgacccagatcgtgtctgccgaagcctggggcagagccgatgatgtgattaagatccactggcaggaaaagaagtccaacaccatcctgggcagccaggaaggcaacaccatgaagaccaacgacacctacatgaagttcagctggctgaccgtgcccgagaagtccctggacaaagaacacagatgcatcgtgcggcacgaaaacaacaagaacggcgtggaccaggaaatcatcttcccacccatcaagaccgatgtgattacaatggaccccaaggacaactgctccaaggacgccaacgataccctgctgctccagctgaccaacaccagcgcctactacatgtacttgttgctgctgctgaagtccgtggtgtacttcgccatcatcacatgctgcctgctgcggagaaccgccttctgctgcaacggcgagaagtctagggccaagcgatctggatctggagcaacaaacttctcactactcaaacaagcaggtgacgtggaggagaatcccgggcctactagtatggactggatttggcgcatccttttccttgtcggcgctgctaccggcgcgcattccttcgaacaggtgcagctggtccagagcggcgccgaagtgaagaagcccggcagctccgtgaaagtgagctgcaaggccagcggcggcaccttcagcaactactggatgcactgggtgaggcaggcccccggacagggcctggagtggatgggcgccacctacaggggccacagcgacacctactacaaccagaagttcaagggccgggtgaccatcaccgccgacaagagcaccagcaccgcctacatggaactgagcagcctcaggagcgaggacaccgctgtgtattactgcgccaggggcgccatctacgacggctacgacgtgctggacaactggggccagggcacactggtgaccgtgtccagcacgcgtatccagaaccctgatcctgccgtgtaccagctgcgggatagcaagagcagcgacaagagcgtgtgtctgttcaccgacttcgacagccagaccaacgtgtcccagagcaaggactccgacgtgtacatcaccgataagtgcgtgctggacatgcggagcatggacttcaagagcaactccgccgtggcctggtccaacaagtccgatttcgcctgcgccaacgccttcaacaacagcattatccccgaggacacattcttcccaagccccgagagcagcgactccaccgaccacgtgaagcccaaagagacagagaacaccaagcagcccagcaagagctgccacaagcccaaggccatcgtgcacaccgagaaagtgaacatgatgagcctgaccgtgctgggcctgcggatgctgttcgccaaaaccgtggccgtgaacttcctgctgaccgccaagctgttcttcctc

SEQ ID NO: 7047 - DNA, 2172 bp, synthetic construct
  source 1..2172: mol_type = other DNA
atggccttaccagtgaccgccttgctcctgccgctggccttgctgctccacgccgccaggccggacatcgtgctgacacagagccctgccaccctgtctctgagccctggcgatagagccaccatcagctgtagagccagcgagagcgtgaccatcctgggcagccacctgatctactggtatcagcagaagcccggccagccccccagactgctgattcagctggcctccaatgtgcagaccggcgtgccagccagattttccggcagcggcagcagaaccgacttcaccctgaccatcagcagcgtggaacccgaggacttcgccgtgtactactgcctccagagccggaccatccccagaacattcggccagggcaccaagctggaaatcaagagactcgaggacctgaagaacgtgttcccacctgaggtggccgtgttcgagcctagcgaggccgagatcagccacacccagaaagccaccctcgtgtgcctggctaccggcttctaccccgaccatgtggaactgtcttggtgggtcaacggcaaagaggtgcacagcggcgtgtgtaccgacccccagccactgaaagaacagcccgccctgaacgacagccggtactgcctgagcagcagactgagagtgtccgccaccttctggcagaacccccggaaccacttcagatgccaggtgcagttctacggcctgagcgagaacgacgagtggacccaggacagagccaagcccgtgacccagatcgtgtctgccgaagcctggggcagagccgatgatgtgattaagatccactggcaggaaaagaagtccaacaccatcctgggcagccaggaaggcaacaccatgaagaccaacgacacctacatgaagttcagctggctgaccgtgcccgagaagtccctggacaaagaacacagatgcatcgtgcggcacgaaaacaacaagaacggcgtggaccaggaaatcatcttcccacccatcaagaccgatgtgattacaatggaccccaaggacaactgctccaaggacgccaacgataccctgctgctccagctgaccaacaccagcgcctactacatgtacttgttgctgctgctgaagtccgtggtgtacttcgccatcatcacatgctgcctgctgcggagaaccgccttctgctgcaacggcgagaagtctagggccaagcgatctggatctggagcaacaaacttctcactactcaaacaagcaggtgacgtggaggagaatcccgggcctactagtatggactggatttggcgcatccttttccttgtcggcgctgctaccggcgcgcattccttcgaacaggtgcagctggtgcagtctggccccgaagtgaagaaacccggcgagtccgtgaagatcagctgcaaggccagcggctacaccttccggcactacagcatgaactgggtcaagcaggccccaggccagggcctgaagtggatgggcagaatcaacaccgagagcggcgtgcccatctacgccgacgacttcaagggccggttcagcttcaccgtggacaccagcgccagcaccgcctacctggaaatctccagcctgaccagcgaggataccgccgtgtatttctgctccaacgactacctgtacagcctggatttctggggccagggaaccaccctgacagtgtcctctacgcgtatccagaaccctgatcctgccgtgtaccagctgcgggatagcaagagcagcgacaagagcgtgtgtctgttcaccgacttcgacagccagaccaacgtgtcccagagcaaggactccgacgtgtacatcaccgataagtgcgtgctggacatgcggagcatggacttcaagagcaactccgccgtggcctggtccaacaagtccgatttcgcctgcgccaacgccttcaacaacagcattatccccgaggacacattcttcccaagccccgagagcagcgactccaccgaccacgtgaagcccaaagagacagagaacaccaagcagcccagcaagagctgccacaagcccaaggccatcgtgcacaccgagaaagtgaacatgatgagcctgaccgtgctgggcctgcggatgctgttcgccaaaaccgtggccgtgaacttcctgctgaccgccaagctgttcttcctc

SEQ ID NO: 7048 - DNA, 2175 bp, synthetic construct
  source 1..2175: mol_type = other DNA
atggccttaccagtgaccgccttgctcctgccgctggccttgctgctccacgccgccaggccgcagtctgtgctgacacagcctcctagtgtgtctggcgctcctggacagagagtgaccatcagctgtacaggcagcagcagcaatatcggagccggctttgacgtgcactggtatcagcagctgcctggcacagcccctaaactgctgatctacggcaacagcaacagacccagcggcgtgcccgatagattttccggctctaagagcggcacaagcgccagcctggctattactggactccaggccgaggacgaggccgactactactgtcagagctacgacagcagcctgagcggctacgttttcggcaccggcaccaaagtgacagtgcttggtctcgaggacctgaagaacgtgttcccacctgaggtggccgtgttcgagcctagcgaggccgagatcagccacacccagaaagccaccctcgtgtgcctggctaccggcttctaccccgaccatgtggaactgtcttggtgggtcaacggcaaagaggtgcacagcggcgtgtgtaccgacccccagccactgaaagaacagcccgccctgaacgacagccggtactgcctgagcagcagactgagagtgtccgccaccttctggcagaacccccggaaccacttcagatgccaggtgcagttctacggcctgagcgagaacgacgagtggacccaggacagagccaagcccgtgacccagatcgtgtctgccgaagcctggggcagagccgatgatgtgattaagatccactggcaggaaaagaagtccaacaccatcctgggcagccaggaaggcaacaccatgaagaccaacgacacctacatgaagttcagctggctgaccgtgcccgagaagtccctggacaaagaacacagatgcatcgtgcggcacgaaaacaacaagaacggcgtggaccaggaaatcatcttcccacccatcaagaccgatgtgattacaatggaccccaaggacaactgctccaaggacgccaacgataccctgctgctccagctgaccaacaccagcgcctactacatgtacttgttgctgctgctgaagtccgtggtgtacttcgccatcatcacatgctgcctgctgcggagaaccgccttctgctgcaacggcgagaagtctagggccaagcgatctggatctggagcaacaaacttctcactactcaaacaagcaggtgacgtggaggagaatcccgggcctactagtatggactggatttggcgcatccttttccttgtcggcgctgctaccggcgcgcattccttcgaacaagttcagctggttcagagcggagccgaagtgaagaaacctggggcctctgtgaaggtgtcctgcaaggcttccggctacacctttaccgattactacatgcactgggtccgacaggctcccggccaaagacttgaatggatgggctggatcaaccccaacagcggcggcacaaattacgcccagaagttccaggaccggatcaccgtgaccagagacaccagctccaacaccggctacatggaactgacccggctgagatccgatgacaccgccgtgtactactgcgctagaagcccttactccggcgtgctggataagtggggacagggcacactggtcaccgtgtcatctacgcgtatccagaaccctgatcctgccgtgtaccagctgcgggatagcaagagcagcgacaagagcgtgtgtctgttcaccgacttcgacagccagaccaacgtgtcccagagcaaggactccgacgtgtacatcaccgataagtgcgtgctggacatgcggagcatggacttcaagagcaactccgccgtggcctggtccaacaagtccgatttcgcctgcgccaacgccttcaacaacagcattatccccgaggacacattcttcccaagccccgagagcagcgactccaccgaccacgtgaagcccaaagagacagagaacaccaagcagcccagcaagagctgccacaagcccaaggccatcgtgcacaccgagaaagtgaacatgatgagcctgaccgtgctgggcctgcggatgctgttcgccaaaaccgtggccgtgaacttcctgctgaccgccaagctgttcttcctc

SEQ ID NO: 7049 - DNA, 2166 bp, synthetic construct
  source 1..2166: mol_type = other DNA
atggccttaccagtgaccgccttgctcctgccgctggccttgctgctccacgccgccaggccgcaggctgttctgacacagcctccatctgcctctggcacacctggacagagagtgaccatctcctgtagcggcagcagcagcaacatcggcagctacaccgtgtcctggtatcagcagctccctggaacagcccctaagttcctgatctacagcaacaaccagcggcctagcggcgtgcccgatagattttctggcagcaagagcggcacaagcgccagcctggctatttctggactccagtctgaggacgaggccgactactattgtgccgcctgggacgatagcctgaacggctatgtgtttggcaccggcaccaaagtgacagtgcttggtctcgaggacctgaagaacgtgttcccacctgaggtggccgtgttcgagcctagcgaggccgagatcagccacacccagaaagccaccctcgtgtgcctggctaccggcttctaccccgaccatgtggaactgtcttggtgggtcaacggcaaagaggtgcacagcggcgtgtgtaccgacccccagccactgaaagaacagcccgccctgaacgacagccggtactgcctgagcagcagactgagagtgtccgccaccttctggcagaacccccggaaccacttcagatgccaggtgcagttctacggcctgagcgagaacgacgagtggacccaggacagagccaagcccgtgacccagatcgtgtctgccgaagcctggggcagagccgatgatgtgattaagatccactggcaggaaaagaagtccaacaccatcctgggcagccaggaaggcaacaccatgaagaccaacgacacctacatgaagttcagctggctgaccgtgcccgagaagtccctggacaaagaacacagatgcatcgtgcggcacgaaaacaacaagaacggcgtggaccaggaaatcatcttcccacccatcaagaccgatgtgattacaatggaccccaaggacaactgctccaaggacgccaacgataccctgctgctccagctgaccaacaccagcgcctactacatgtacttgttgctgctgctgaagtccgtggtgtacttcgccatcatcacatgctgcctgctgcggagaaccgccttctgctgcaacggcgagaagtctagggccaagcgatctggatctggagcaacaaacttctcactactcaaacaagcaggtgacgtggaggagaatcccgggcctactagtatggactggatttggcgcatccttttccttgtcggcgctgctaccggcgcgcattccttcgaagttcaactggttcagagcggagccgaagtgaagaagcctggcgagagcctgaagattagctgcaaaggcagcggctacgacttcaccacctactggatcggctgggtccgacagatgcctggcaaaggactggaatggatgggcatcatctaccccggcgacagcgacaccagatacagccctagcgttagaggccgcgtgaccatcagcgccgacaagtctatcaacaccgcctacctccagtggtccagcctggaagcctctgacaccgccatgtactactgcgccagaatgtggaccttcagccaggatggatggggccagggaacactggtcacagtgtcatctacgcgtatccagaaccctgatcctgccgtgtaccagctgcgggatagcaagagcagcgacaagagcgtgtgtctgttcaccgacttcgacagccagaccaacgtgtcccagagcaaggactccgacgtgtacatcaccgataagtgcgtgctggacatgcggagcatggacttcaagagcaactccgccgtggcctggtccaacaagtccgatttcgcctgcgccaacgccttcaacaacagcattatccccgaggacacattcttcccaagccccgagagcagcgactccaccgaccacgtgaagcccaaagagacagagaacaccaagcagcccagcaagagctgccacaagcccaaggccatcgtgcacaccgagaaagtgaacatgatgagcctgaccgtgctgggcctgcggatgctgttcgccaaaaccgtggccgtgaacttcctgctgaccgccaagctgttcttcctc

SEQ ID NO: 7050 - DNA, 2175 bp, synthetic construct
  source 1..2175: mol_type = other DNA
atggccttaccagtgaccgccttgctcctgccgctggccttgctgctccacgccgccaggccggacatcgtgatgacccagagccccgatagcctggccgtgtctctgggagagagagccaccatcaactgcaagagcagccagagcatcctgtacagcagcaaccagaagaactacctggcctggtatcagcagaagcccggccagagccctaagctgctgatctactgggccagcaccagagaaagcggcgtgcccgatagattcagcggcagcggctctggcaccgacttcaccctgaccatcagttctcttcaggccgaggacgtggccgtgtactactgccaccagtacatcagctcctacaccttcggccagggcaccaagctggaaatcaagctcgaggacctgaagaacgtgttcccacctgaggtggccgtgttcgagcctagcgaggccgagatcagccacacccagaaagccaccctcgtgtgcctggctaccggcttctaccccgaccatgtggaactgtcttggtgggtcaacggcaaagaggtgcacagcggcgtgtgtaccgacccccagccactgaaagaacagcccgccctgaacgacagccggtactgcctgagcagcagactgagagtgtccgccaccttctggcagaacccccggaaccacttcagatgccaggtgcagttctacggcctgagcgagaacgacgagtggacccaggacagagccaagcccgtgacccagatcgtgtctgccgaagcctggggcagagccgatgatgtgattaagatccactggcaggaaaagaagtccaacaccatcctgggcagccaggaaggcaacaccatgaagaccaacgacacctacatgaagttcagctggctgaccgtgcccgagaagtccctggacaaagaacacagatgcatcgtgcggcacgaaaacaacaagaacggcgtggaccaggaaatcatcttcccacccatcaagaccgatgtgattacaatggaccccaaggacaactgctccaaggacgccaacgataccctgctgctccagctgaccaacaccagcgcctactacatgtacttgttgctgctgctgaagtccgtggtgtacttcgccatcatcacatgctgcctgctgcggagaaccgccttctgctgcaacggcgagaagtctagggccaagcgatctggatctggagcaacaaacttctcactactcaaacaagcaggtgacgtggaggagaatcccgggcctactagtatggactggatttggcgcatccttttccttgtcggcgctgctaccggcgcgcattccttcgaacaggtgcagctggtgcagtctggcgctgaagtgaagaaacctggggccagcgtgaaggtgtcctgcaaggccagcggctacacctttgccagccagtggatgcactggatgagacaggcccctggacagggcctggaatggatcggctggatcaaccccggcaacgtgaacaccaagtacaacgagaagttcaagggcagagccaccctgacagtggacaccagcaccaacaccgcctacatggaactgagcagcctgcggagcgaggacaccgccgtgtattattgcgccagaagcacctggtacagacccctggattattggggccagggaacccttgtgaccgtgtcctctacgcgtatccagaaccctgatcctgccgtgtaccagctgcgggatagcaagagcagcgacaagagcgtgtgtctgttcaccgacttcgacagccagaccaacgtgtcccagagcaaggactccgacgtgtacatcaccgataagtgcgtgctggacatgcggagcatggacttcaagagcaactccgccgtggcctggtccaacaagtccgatttcgcctgcgccaacgccttcaacaacagcattatccccgaggacacattcttcccaagccccgagagcagcgactccaccgaccacgtgaagcccaaagagacagagaacaccaagcagcccagcaagagctgccacaagcccaaggccatcgtgcacaccgagaaagtgaacatgatgagcctgaccgtgctgggcctgcggatgctgttcgccaaaaccgtggccgtgaacttcctgctgaccgccaagctgttcttcctc

SEQ ID NO: 7051 - DNA, 2175 bp, synthetic construct
  source 1..2175: mol_type = other DNA
atggccttaccagtgaccgccttgctcctgccgctggccttgctgctccacgccgccaggccggaccacatcgtgctgacccagagccctagcagcctgtctgccagcctgggcgacagagtgaccatcagctgtagagccagccaggacatcagcacctacctgaactggtatcagcagaaacccgacggcaccgtgaagctgctgatcttctacaccagcagactgcacgccggggtgcccagcagattttctggcagcggctctggcacccaccacagcctgaccatctccaacctggaacaggaagatattgctacctacttctgtcagcaaggcaacagcctgcccttcaccttcggcagcggcaccaagctggaaatcaagagactcgaggacctgaagaacgtgttcccacctgaggtggccgtgttcgagcctagcgaggccgagatcagccacacccagaaagccaccctcgtgtgcctggctaccggcttctaccccgaccatgtggaactgtcttggtgggtcaacggcaaagaggtgcacagcggcgtgtgtaccgacccccagccactgaaagaacagcccgccctgaacgacagccggtactgcctgagcagcagactgagagtgtccgccaccttctggcagaacccccggaaccacttcagatgccaggtgcagttctacggcctgagcgagaacgacgagtggacccaggacagagccaagcccgtgacccagatcgtgtctgccgaagcctggggcagagccgatgatgtgattaagatccactggcaggaaaagaagtccaacaccatcctgggcagccaggaaggcaacaccatgaagaccaacgacacctacatgaagttcagctggctgaccgtgcccgagaagtccctggacaaagaacacagatgcatcgtgcggcacgaaaacaacaagaacggcgtggaccaggaaatcatcttcccacccatcaagaccgatgtgattacaatggaccccaaggacaactgctccaaggacgccaacgataccctgctgctccagctgaccaacaccagcgcctactacatgtacttgttgctgctgctgaagtccgtggtgtacttcgccatcatcacatgctgcctgctgcggagaaccgccttctgctgcaacggcgagaagtctagggccaagcgatctggatctggagcaacaaacttctcactactcaaacaagcaggtgacgtggaggagaatcccgggcctactagtatggactggatttggcgcatccttttccttgtcggcgctgctaccggcgcgcattccttcgaacaggtgcagctgaaagagagcggccctgagctggaaaagcctggggccagcgtgaagattagctgcaaggccagcggctacagcttcaccgcctacagcatgaactgggtcaagcagaacaacggcatgagcctggaatggatcggcagcatcgacccctactacggcgacaccaaatacgcccagaagttcaagggcaaggccaccctgaccgtggataaggccagcagcaccgcctacctccagctgaagtctctgaccagcgaggacagcgccgtgtactactgcgccagacggatgattaccaccggcgactggtacttcgacgtgtggggagccggaaccaccgtgacagtgtctagcacgcgtatccagaaccctgatcctgccgtgtaccagctgcgggatagcaagagcagcgacaagagcgtgtgtctgttcaccgacttcgacagccagaccaacgtgtcccagagcaaggactccgacgtgtacatcaccgataagtgcgtgctggacatgcggagcatggacttcaagagcaactccgccgtggcctggtccaacaagtccgatttcgcctgcgccaacgccttcaacaacagcattatccccgaggacacattcttcccaagccccgagagcagcgactccaccgaccacgtgaagcccaaagagacagagaacaccaagcagcccagcaagagctgccacaagcccaaggccatcgtgcacaccgagaaagtgaacatgatgagcctgaccgtgctgggcctgcggatgctgttcgccaaaaccgtggccgtgaacttcctgctgaccgccaagctgttcttcctc

SEQ ID NO: 7052 - DNA, 2175 bp, synthetic construct; identical to SEQ ID NO: 7051
  source 1..2175: mol_type = other DNA

SEQ ID NO: 7053 - DNA, 2175 bp, synthetic construct
  source 1..2175: mol_type = other DNA
atggccttaccagtgaccgccttgctcctgccgctggccttgctgctccacgccgccaggccggacgagatcgtgctgacacagagccctgccaccctgtctctgagccctggcgaaagagccaccctgagctgtagagccagccagagcgtgtccagctacctggcctggtatcagcagaagcccggccaggctccccggctgctgatctacgatgccagcaatagagccaccggcatccccgccagattttccggctctggcagcggcaccgacttcaccctgaccatcagctccctggaacccgaggacttcgccgtgtactactgccagcagcggagcaactggcccatcacattcggccagggcacccggctggaaatcaaactcgaggacctgaagaacgtgttcccacctgaggtggccgtgttcgagcctagcgaggccgagatcagccacacccagaaagccaccctcgtgtgcctggctaccggcttctaccccgaccatgtggaactgtcttggtgggtcaacggcaaagaggtgcacagcggcgtgtgtaccgacccccagccactgaaagaacagcccgccctgaacgacagccggtactgcctgagcagcagactgagagtgtccgccaccttctggcagaacccccggaaccacttcagatgccaggtgcagttctacggcctgagcgagaacgacgagtggacccaggacagagccaagcccgtgacccagatcgtgtctgccgaagcctggggcagagccgatgatgtgattaagatccactggcaggaaaagaagtccaacaccatcctgggcagccaggaaggcaacaccatgaagaccaacgacacctacatgaagttcagctggctgaccgtgcccgagaagtccctggacaaagaacacagatgcatcgtgcggcacgaaaacaacaagaacggcgtggaccaggaaatcatcttcccacccatcaagaccgatgtgattacaatggaccccaaggacaactgctccaaggacgccaacgataccctgctgctccagctgaccaacaccagcgcctactacatgtacttgttgctgctgctgaagtccgtggtgtacttcgccatcatcacatgctgcctgctgcggagaaccgccttctgctgcaacggcgagaagtctagggccaagcgatctggatctggagcaacaaacttctcactactcaaacaagcaggtgacgtggaggagaatcccgggcctactagtatggactggatttggcgcatccttttccttgtcggcgctgctaccggcgcgcattccttcgaagaagtgcagctggtggaatcaggcggcggactggtgcagcctggcagaagcctgagactgagctgtgccgccagcggcttcaccttcaacgactacgccatgcactgggtgcgccaggcccctggaaaaggactggaatgggtgtccacaatcagctggaacagcggcagcatcggctacgccgatagcgtgaagggccggttcaccatcagccgggacaacgccaagaagtccctgtacctccagatgaacagcctgcgggccgaggacacagccctgtactattgcgccaaggacatccagtacggcaactactactacggcatggacgtgtggggccagggaaccaccgtgaccgtgtcatctacgcgtatccagaaccctgatcctgccgtgtaccagctgcgggatagcaagagcagcgacaagagcgtgtgtctgttcaccgacttcgacagccagaccaacgtgtcccagagcaaggactccgacgtgtacatcaccgataagtgcgtgctggacatgcggagcatggacttcaagagcaactccgccgtggcctggtccaacaagtccgatttcgcctgcgccaacgccttcaacaacagcattatccccgaggacacattcttcccaagccccgagagcagcgactccaccgaccacgtgaagcccaaagagacagagaacaccaagcagcccagcaagagctgccacaagcccaaggccatcgtgcacaccgagaaagtgaacatgatgagcctgaccgtgctgggcctgcggatgctgttcgccaaaaccgtggccgtgaacttcctgctgaccgccaagctgttcttcctc

SEQ ID NO: 7054 - DNA, 2181 bp, synthetic construct
  source 1..2181: mol_type = other DNA
atggccttaccagtgaccgccttgctcctgccgctggccttgctgctccacgccgccaggccggacatcgtgatgacccagacccccctgagcctgcctgtgacacctggcgagcctgccagcatctcctgcagaagcagcaagagcctgctgcacagcaacggcatcacctacctgtactggtatctgcagaaacccggccagagcccccaactgctgatctaccagatgagcaacctggtgtccggcgtgcccgacagattttctggcagcggctccggcaccgacttcaccctgaagatcagccgggtggaagccgaggacgtgggcgtgtactactgcgcccagaacctggaactgccctacacctttggcggcggaacaaaggtggaaatcaagcggctcgaggacctgaagaacgtgttcccacctgaggtggccgtgttcgagcctagcgaggccgagatcagccacacccagaaagccaccctcgtgtgcctggctaccggcttctaccccgaccatgtggaactgtcttggtgggtcaacggcaaagaggtgcacagcggcgtgtgtaccgacccccagccactgaaagaacagcccgccctgaacgacagccggtactgcctgagcagcagactgagagtgtccgccaccttctggcagaacccccggaaccacttcagatgccaggtgcagttctacggcctgagcgagaacgacgagtggacccaggacagagccaagcccgtgacccagatcgtgtctgccgaagcctggggcagagccgatgatgtgattaagatccactggcaggaaaagaagtccaacaccatcctgggcagccaggaaggcaacaccatgaagaccaacgacacctacatgaagttcagctggctgaccgtgcccgagaagtccctggacaaagaacacagatgcatcgtgcggcacgaaaacaacaagaacggcgtggaccaggaaatcatcttcccacccatcaagaccgatgtgattacaatggaccccaaggacaactgctccaaggacgccaacgataccctgctgctccagctgaccaacaccagcgcctactacatgtacttgttgctgctgctgaagtccgtggtgtacttcgccatcatcacatgctgcctgctgcggagaaccgccttctgctgcaacggcgagaagtctagggccaagcgatctggatctggagcaacaaacttctcactactcaaacaagcaggtgacgtggaggagaatcccgggcctactagtatggactggatttggcgcatccttttccttgtcggcgctgctaccggcgcgcattccttcgaacaggtgcaactggtgcagagcggagccgaagtgaaaaagcccggcagcagcgtgaaggtgtcctgcaaggccagcggctacgccttcagctactcctggatcaactgggtgcgccaggcccctggacagggcctggaatggatgggcagaatcttccccggcgacggcgacaccgactacaacggcaagttcaagggcagagtgaccatcaccgccgacaagagcaccagcaccgcctacatggaactgagcagcctgcggagcgaggataccgccgtgtactattgtgccagaaacgtgttcgacggctactggctggtgtactggggccagggaacacttgtgaccgtgtccagcacgcgtatccagaaccctgatcctgccgtgtaccagctgcgggatagcaagagcagcgacaagagcgtgtgtctgttcaccgacttcgacagccagaccaacgtgtcccagagcaaggactccgacgtgtacatcaccgataagtgcgtgctggacatgcggagcatggacttcaagagcaactccgccgtggcctggtccaacaagtccgatttcgcctgcgccaacgccttcaacaacagcattatccccgaggacacattcttcccaagccccgagagcagcgactccaccgaccacgtgaagcccaaagagacagagaacaccaagcagcccagcaagagctgccacaagcccaaggccatcgtgcacaccgagaaagtgaacatgatgagcctgaccgtgctgggcctgcggatgctgttcgccaaaaccgtggccgtgaacttcctgctgaccgccaagctgttcttcctc

SEQ ID NO: 7055 - DNA, 2184 bp, synthetic construct
  source 1..2184: mol_type = other DNA
atggccttaccagtgaccgccttgctcctgccgctggccttgctgctccacgccgccaggccggacatccagatgacccagagccccagcagcctgtctgccagcgtgggcgacagagtgaccatcacctgtcggagcagccagagcatcgtgcactccgtgggcaacaccttcctggaatggtatcagcagaagcccggcaaggcccccaagctgctgatctacaaggtgtccaacagattcagcggcgtgcccagcaggtttagcggctctggcagcggcaccgacttcaccctgaccatctctagcctccagcccgaggacttcgccacctactactgttttcaaggcagccagttcccctacaccttcggccagggaacaaaggtggaaatcaagcggctcgaggacctgaagaacgtgttcccacctgaggtggccgtgttcgagcctagcgaggccgagatcagccacacccagaaagccaccctcgtgtgcctggctaccggcttctaccccgaccatgtggaactgtcttggtgggtcaacggcaaagaggtgcacagcggcgtgtgtaccgacccccagccactgaaagaacagcccgccctgaacgacagccggtactgcctgagcagcagactgagagtgtccgccaccttctggcagaacccccggaaccacttcagatgccaggtgcagttctacggcctgagcgagaacgacgagtggacccaggacagagccaagcccgtgacccagatcgtgtctgccgaagcctggggcagagccgatgatgtgattaagatccactggcaggaaaagaagtccaacaccatcctgggcagccaggaaggcaacaccatgaagaccaacgacacctacatgaagttcagctggctgaccgtgcccgagaagtccctggacaaagaacacagatgcatcgtgcggcacgaaaacaacaagaacggcgtggaccaggaaatcatcttcccacccatcaagaccgatgtgattacaatggaccccaaggacaactgctccaaggacgccaacgataccctgctgctccagctgaccaacaccagcgcctactacatgtacttgttgctgctgctgaagtccgtggtgtacttcgccatcatcacatgctgcctgctgcggagaaccgccttctgctgcaacggcgagaagtctagggccaagcgatctggatctggagcaacaaacttctcactactcaaacaagcaggtgacgtggaggagaatcccgggcctactagtatggactggatttggcgcatccttttccttgtcggcgctgctaccggcgcgcattccttcgaagaagtgcaactggtggaaagcggaggcggcctggtgcagcctggcggatctctgagactgagctgtgccgccagcggctacgagttcagccggtcctggatgaactgggtgcgccaggcccctggcaagggactggaatgggtgggaagaatctaccccggcgacggcgacaccaactacagcggcaagttcaagggccggttcaccatcagcgccgacaccagcaagaacaccgcctacctccagatgaacagcctgcgggccgaggataccgccgtgtactactgtgccagagatggcagctcctgggactggtacttcgacgtgtggggacagggaacccttgtgaccgtgtccagcacgcgtatccagaaccctgatcctgccgtgtaccagctgcgggatagcaagagcagcgacaagagcgtgtgtctgttcaccgacttcgacagccagaccaacgtgtcccagagcaaggactccgacgtgtacatcaccgataagtgcgtgctggacatgcggagcatggacttcaagagcaactccgccgtggcctggtccaacaagtccgatttcgcctgcgccaacgccttcaacaacagcattatccccgaggacacattcttcccaagccccgagagcagcgactccaccgaccacgtgaagcccaaagagacagagaacaccaagcagcccagcaagagctgccacaagcccaaggccatcgtgcacaccgagaaagtgaacatgatgagcctgaccgtgctgggcctgcggatgctgttcgccaaaaccgtggccgtgaacttcctgctgaccgccaagctgttcttcctc

SEQ ID NO: 7056 - DNA, 2178 bp, synthetic construct
  source 1..2178: mol_type = other DNA
atggccttaccagtgaccgccttgctcctgccgctggccttgctgctccacgccgccaggccggacatccagatgacccagagccccagcagcctgtctgccagcgtgggcgacagagtgaccatcacctgtagagccagccagaccatctggtcctacctgaactggtatcagcagaggcccggcaaggcccccaacctgctgatctatgccgccagctctctccagagcggcgtgcccagcagattttccggcagaggcagcggcaccgacttcaccctgaccatcagttccttgcaggccgaggacttcgccacctactactgccagcagagctacagcatcccccagattttcggccagggcaccaagctggaaatcaagctcgaggacctgaagaacgtgttcccacctgaggtggccgtgttcgagcctagcgaggccgagatcagccacacccagaaagccaccctcgtgtgcctggctaccggcttctaccccgaccatgtggaactgtcttggtgggtcaacggcaaagaggtgcacagcggcgtgtgtaccgacccccagccactgaaagaacagcccgccctgaacgacagccggtactgcctgagcagcagactgagagtgtccgccaccttctggcagaacccccggaaccacttcagatgccaggtgcagttctacggcctgagcgagaacgacgagtggacccaggacagagccaagcccgtgacccagatcgtgtctgccgaagcctggggcagagccgatgatgtgattaagatccactggcaggaaaagaagtccaacaccatcctgggcagccaggaaggcaacaccatgaagaccaacgacacctacatgaagttcagctggctgaccgtgcccgagaagtccctggacaaagaacacagatgcatcgtgcggcacgaaaacaacaagaacggcgtggaccaggaaatcatcttcccacccatcaagaccgatgtgattacaatggaccccaaggacaactgctccaaggacgccaacgataccctgctgctccagctgaccaacaccagcgcctactacatgtacttgttgctgctgctgaagtccgtggtgtacttcgccatcatcacatgctgcctgctgcggagaaccgccttctgctgcaacggcgagaagtctagggccaagcgatctggatctggagcaacaaacttctcactactcaaacaagcaggtgacgtggaggagaatcccgggcctactagtatggactggatttggcgcatccttttccttgtcggcgctgctaccggcgcgcattccttcgaacaggtgcagctccagcagtctggacccggcctcgtgaagcctagccagacactgagcctgacctgcgccatcagcggcgatagcgtgtccagcaatagcgccgcctggaactggatcagacagtccccctctcggggcctggaatggctgggccggacctactaccgcagcaagtggtacaacgactacgccgtgtccgtgaagtcccggatcaccatcaaccccgacaccagcaagaaccagttctccttgcaactgaacagcgtgacccccgaggacaccgccgtgtactactgcgccagagaagtgaccggcgacctggaagatgccttcgacatctggggccagggaacaatggtcacagtgtccagcacgcgtatccagaaccctgatcctgccgtgtaccagctgcgggatagcaagagcagcgacaagagcgtgtgtctgttcaccgacttcgacagccagaccaacgtgtcccagagcaaggactccgacgtgtacatcaccgataagtgcgtgctggacatgcggagcatggacttcaagagcaactccgccgtggcctggtccaacaagtccgatttcgcctgcgccaacgccttcaacaacagcattatccccgaggacacattcttcccaagccccgagagcagcgactccaccgaccacgtgaagcccaaagagacagagaacaccaagcagcccagcaagagctgccacaagcccaaggccatcgtgcacaccgagaaagtgaacatgatgagcctgaccgtgctgggcctgcggatgctgttcgccaaaaccgtggccgtgaacttcctgctgaccgccaagctgttcttcctc

SEQ ID NO: 7057 - DNA, 2157 bp, synthetic construct
  source 1..2157: mol_type = other DNA
atggccttaccagtgaccgccttgctcctgccgctggccttgctgctccacgccgccaggccggacatccagatgacccagagccccgccaccatcgagaacacaagcctgtctgccagcgtgggcgacagagtgaccatcacctgtagagccagccagggcatcagctcttggctgacctggtatcagcagaagcccgagaaggcccccaagagcctgatctacgccgccagctctctgcagtctggcgtgcccagcagattttccggcagcggctctggcaccgacttcaccctgacaatcagcagcctgcagcccgaggacttcgccacctactactgccagcagtacgacagctaccccatcaccttcggccagggcacccggctggaaatcaagctcgaggacctgaagaacgtgttcccacctgaggtggccgtgttcgagcctagcgaggccgagatcagccacacccagaaagccaccctcgtgtgcctggctaccggcttctaccccgaccatgtggaactgtcttggtgggtcaacggcaaagaggtgcacagcggcgtgtgtaccgacccccagccactgaaagaacagcccgccctgaacgacagccggtactgcctgagcagcagactgagagtgtccgccaccttctggcagaacccccggaaccacttcagatgccaggtgcagttctacggcctgagcgagaacgacgagtggacccaggacagagccaagcccgtgacccagatcgtgtctgccgaagcctggggcagagccgatgatgtgattaagatccactggcaggaaaagaagtccaacaccatcctgggcagccaggaaggcaacaccatgaagaccaacgacacctacatgaagttcagctggctgaccgtgcccgagaagtccctggacaaagaacacagatgcatcgtgcggcacgaaaacaacaagaacggcgtggaccaggaaatcatcttcccacccatcaagaccgatgtgattacaatggaccccaaggacaactgctccaaggacgccaacgataccctgctgctccagctgaccaacaccagcgcctactacatgtacttgttgctgctgctgaagtccgtggtgtacttcgccatcatcacatgctgcctgctgcggagaaccgccttctgctgcaacggcgagaagtctagggccaagcgatctggatctggagcaacaaacttctcactactcaaacaagcaggtgacgtggaggagaatcccgggcctactagtatggactggatttggcgcatccttttccttgtcggcgctgctaccggcgcgcattccttcgaacaggtgcaactgcagcagtggggagccggactgctgaagcctagcgagacactgagcctgacctgcgccgtgtacggcggcagcttcagcgcctactattggagctggatcagacagccccctggcaagggcctggaatggatcggcgacatcaatcacggcggaggcaccaactacaaccccagcctgaagtcccgcgtgaccatctccgtggacaccagcaagaaccagttctccctgaagctgaacagcgtgacagccgccgacacagccgtgtactactgtgccagcctgaccgcctattggggccagggatctcttgtgaccgtgtccagcacgcgtatccagaaccctgatcctgccgtgtaccagctgcgggatagcaagagcagcgacaagagcgtgtgtctgttcaccgacttcgacagccagaccaacgtgtcccagagcaaggactccgacgtgtacatcaccgataagtgcgtgctggacatgcggagcatggacttcaagagcaactccgccgtggcctggtccaacaagtccgatttcgcctgcgccaacgccttcaacaacagcattatccccgaggacacattcttcccaagccccgagagcagcgactccaccgaccacgtgaagcccaaagagacagagaacaccaagcagcccagcaagagctgccacaagcccaaggccatcgtgcacaccgagaaagtgaacatgatgagcctgaccgtgctgggcctgcggatgctgttcgccaaaaccgtggccgtgaacttcctgctgaccgccaagctgttcttcctc

SEQ ID NO: 7058 - DNA, 2172 bp, synthetic construct
  source 1..2172: mol_type = other DNA
atggccttaccagtgaccgccttgctcctgccgctggccttgctgctccacgccgccaggccggacgagatcgtgctgacccagagccctgatagcctggccgtgtctctgggcgagagagccaccatcaactgcaaggccagccagagcgtggacttcgacggcgacagctacctgaactggtatcagcagaagcccggccagccccccaaggtgctgatctatgccgccagcacactgcagagcggcgtgcccagcagattttctggcagcggctccggcaccgacttcaccctgaccatcaacagcctggaagccgaggacgccgccacctactactgccagcagagcaacgaggacccctggacctttggcggcggaacaaaggtggaaatcaagctcgaggacctgaagaacgtgttcccacctgaggtggccgtgttcgagcctagcgaggccgagatcagccacacccagaaagccaccctcgtgtgcctggctaccggcttctaccccgaccatgtggaactgtcttggtgggtcaacggcaaagaggtgcacagcggcgtgtgtaccgacccccagccactgaaagaacagcccgccctgaacgacagccggtactgcctgagcagcagactgagagtgtccgccaccttctggcagaacccccggaaccacttcagatgccaggtgcagttctacggcctgagcgagaacgacgagtggacccaggacagagccaagcccgtgacccagatcgtgtctgccgaagcctggggcagagccgatgatgtgattaagatccactggcaggaaaagaagtccaacaccatcctgggcagccaggaaggcaacaccatgaagaccaacgacacctacatgaagttcagctggctgaccgtgcccgagaagtccctggacaaagaacacagatgcatcgtgcggcacgaaaacaacaagaacggcgtggaccaggaaatcatcttcccacccatcaagaccgatgtgattacaatggaccccaaggacaactgctccaaggacgccaacgataccctgctgctccagctgaccaacaccagcgcctactacatgtacttgttgctgctgctgaagtccgtggtgtacttcgccatcatcacatgctgcctgctgcggagaaccgccttctgctgcaacggcgagaagtctagggccaagcgatctggatctggagcaacaaacttctcactactcaaacaagcaggtgacgtggaggagaatcccgggcctactagtatggactggatttggcgcatccttttccttgtcggcgctgctaccggcgcgcattccttcgaacaggtgcaactggtgcagtccggcgctgaagtgaagaaacctggggccagcgtgaaggtgtcctgcaaggtgtccggctacacctttaccgactactacattacctgggtgcgccaggcccctggacaggccctggaatggatgggctggatctaccccggcagcggcaacaccaagtacagccagaagttccagggcagattcgtgttcagcgtggacaccagcgccagcaccgcctacctgcaactgtctagcctgaaggccgaagataccgccgtgtactactgcgccaactacggcaactattggttcgcctattggggccagggaacccttgtgaccgtgtcctctacgcgtatccagaaccctgatcctgccgtgtaccagctgcgggatagcaagagcagcgacaagagcgtgtgtctgttcaccgacttcgacagccagaccaacgtgtcccagagcaaggactccgacgtgtacatcaccgataagtgcgtgctggacatgcggagcatggacttcaagagcaactccgccgtggcctggtccaacaagtccgatttcgcctgcgccaacgccttcaacaacagcattatccccgaggacacattcttcccaagccccgagagcagcgactccaccgaccacgtgaagcccaaagagacagagaacaccaagcagcccagcaagagctgccacaagcccaaggccatcgtgcacaccgagaaagtgaacatgatgagcctgaccgtgctgggcctgcggatgctgttcgccaaaaccgtggccgtgaacttcctgctgaccgccaagctgttcttcctc

SEQ ID NO: 7059 - DNA, 2163 bp, synthetic construct
  source 1..2163: mol_type = other DNA
atggccttaccagtgaccgccttgctcctgccgctggccttgctgctccacgccgccaggccggacatccagatgacccagagccccagcagcctgtctgccagcgtgggcgacagagtgaccatcacctgtagagccagccagggcatcagctcttggctggcctggtatcagcagaagcccgagaaggcccccaagagcctgatctacgccgcctctagtctccagagcggcgtgcccagcagattttctggcagcggctccggcaccgacttcaccctgacaatcagctccctccagcccgaggacttcgccacctactactgccagcagtacaacagctaccctcccacctttggcggaggcaccaaggtggaaatcaagctcgaggacctgaagaacgtgttcccacctgaggtggccgtgttcgagcctagcgaggccgagatcagccacacccagaaagccaccctcgtgtgcctggctaccggcttctaccccgaccatgtggaactgtcttggtgggtcaacggcaaagaggtgcacagcggcgtgtgtaccgacccccagccactgaaagaacagcccgccctgaacgacagccggtactgcctgagcagcagactgagagtgtccgccaccttctggcagaacccccggaaccacttcagatgccaggtgcagttctacggcctgagcgagaacgacgagtggacccaggacagagccaagcccgtgacccagatcgtgtctgccgaagcctggggcagagccgatgatgtgattaagatccactggcaggaaaagaagtccaacaccatcctgggcagccaggaaggcaacaccatgaagaccaacgacacctacatgaagttcagctggctgaccgtgcccgagaagtccctggacaaagaacacagatgcatcgtgcggcacgaaaacaacaagaacggcgtggaccaggaaatcatcttcccacccatcaagaccgatgtgattacaatggaccccaaggacaactgctccaaggacgccaacgataccctgctgctccagctgaccaacaccagcgcctactacatgtacttgttgctgctgctgaagtccgtggtgtacttcgccatcatcacatgctgcctgctgcggagaaccgccttctgctgcaacggcgagaagtctagggccaagcgatctggatctggagcaacaaacttctcactactcaaacaagcaggtgacgtggaggagaatcccgggcctactagtatggactggatttggcgcatccttttccttgtcggcgctgctaccggcgcgcattccttcgaagaagtgcaactggtgcagtctggcggagggctggtgcatcctgggggaagcctgagactgagctgtgccggctctggcttcgccttcagcagcagcaccatgcactggatcagacaggcccctggcaagggcctggaatggatcagcctgatcggaagcggagggggcatctactacggcgacagcgtgaagggccggttcaccatcagccgggacaacgccaagaacagcctgtacctccagatgaactccctgcgggccgaggacatggccgtgtactattgtgtgcggggctacttcgactgggtggactacttcgattactggggccagggcaccctcgtgaccgtgtcatctacgcgtatccagaaccctgatcctgccgtgtaccagctgcgggatagcaagagcagcgacaagagcgtgtgtctgttcaccgacttcgacagccagaccaacgtgtcccagagcaaggactccgacgtgtacatcaccgataagtgcgtgctggacatgcggagcatggacttcaagagcaactccgccgtggcctggtccaacaagtccgatttcgcctgcgccaacgccttcaacaacagcattatccccgaggacacattcttcccaagccccgagagcagcgactccaccgaccacgtgaagcccaaagagacagagaacaccaagcagcccagcaagagctgccacaagcccaaggccatcgtgcacaccgagaaagtgaacatgatgagcctgaccgtgctgggcctgcggatgctgttcgccaaaaccgtggccgtgaacttcctgctgaccgccaagctgttcttcctc

SEQ ID NO: 7060 - DNA, 2193 bp, synthetic construct
  source 1..2193: mol_type = other DNA
atggccttaccagtgaccgccttgctcctgccgctggccttgctgctccacgccgccaggccggacgacatcgtgatgacacagtcaccagatagcctcaccgtctccctgggggagcggaccaccattaattgtaaatccagccaaagcgtgctggactcaagcaagaacaagaatagcctcgcctggtatcagcagaagcccggtcagcctccaaagctgctgctttcttgggcctccaccagagagtccgggattcctgataggtttagtggttcaggctccggcacagattttactctgaccattgattctctccagccagaggattctgcaacttattactgccagcaaagcgcccactttcctataacttttggccagggaacccgacttgaaatcaagctcgaggacctgaagaacgtgttcccacctgaggtggccgtgttcgagcctagcgaggccgagatcagccacacccagaaagccaccctcgtgtgcctggctaccggcttctaccccgaccatgtggaactgtcttggtgggtcaacggcaaagaggtgcacagcggcgtgtgtaccgacccccagccactgaaagaacagcccgccctgaacgacagccggtactgcctgagcagcagactgagagtgtccgccaccttctggcagaacccccggaaccacttcagatgccaggtgcagttctacggcctgagcgagaacgacgagtggacccaggacagagccaagcccgtgacccagatcgtgtctgccgaagcctggggcagagccgatgatgtgattaagatccactggcaggaaaagaagtccaacaccatcctgggcagccaggaaggcaacaccatgaagaccaacgacacctacatgaagttcagctggctgaccgtgcccgagaagtccctggacaaagaacacagatgcatcgtgcggcacgaaaacaacaagaacggcgtggaccaggaaatcatcttcccacccatcaagaccgatgtgattacaatggaccccaaggacaactgctccaaggacgccaacgataccctgctgctccagctgaccaacaccagcgcctactacatgtacttgttgctgctgctgaagtccgtggtgtacttcgccatcatcacatgctgcctgctgcggagaaccgccttctgctgcaacggcgagaagtctagggccaagcgatctggatctggagcaacaaacttctcactactcaaacaagcaggtgacgtggaggagaatcccgggcctactagtatggactggatttggcgcatccttttccttgtcggcgctgctaccggcgcgcattccttcgaacaggtgcagctggtgcagagcggtgccgaagtgaagaaaccaggtgcatccgttaaagtttcatgtaaggctagtggatataccttcaccaattacggaatgaactgggtgaaacaggcccctggccagggactgaagtggatggggtggattaacacctacaccggggagccgacttatgcagacgactttaaggggcgggtcacgatgacctccgacacctccaccagtaccgcctacctggagctgcacaaccttaggtcagacgataccgccgtgtattactgtgcccgatggtcttggtccgacggatactatgtctacttcgactattggggccaggggaccacagttaccgtgtcctctacgcgtatccagaaccctgatcctgccgtgtaccagctgcgggatagcaagagcagcgacaagagcgtgtgtctgttcaccgacttcgacagccagaccaacgtgtcccagagcaaggactccgacgtgtacatcaccgataagtgcgtgctggacatgcggagcatggacttcaagagcaactccgccgtggcctggtccaacaagtccgatttcgcctgcgccaacgccttcaacaacagcattatccccgaggacacattcttcccaagccccgagagcagcgactccaccgaccacgtgaagcccaaagagacagagaacaccaagcagcccagcaagagctgccacaagcccaaggccatcgtgcacaccgagaaagtgaacatgatgagcctgaccgtgctgggcctgcggatgctgttcgccaaaaccgtggccgtgaacttcctgctgaccgccaagctgttcttcctc

SEQ ID NO: 7061 - DNA, 2181 bp, synthetic construct
  source 1..2181: mol_type = other DNA
atggccttaccagtgaccgccttgctcctgccgctggccttgctgctccacgccgccaggccggacgagatcgtgctgacacagagccctggaagcctggccgtgtctcctggcgagcgcgtgacaatgagctgcaagagcagccagagcgtgttcttcagcagctcccagaagaactacctggcctggtatcagcagatccccggccagagccccagactgctgatctactgggccagcaccagagaaagcggcgtgcccgatagattcaccggcagcggctctggcaccgacttcaccctgacaatcagcagcgtgcagcccgaggacctggctatctactactgccaccagtacctgagcagccggaccttcggccagggcaccaagctggaaatcaagagactcgaggacctgaagaacgtgttcccacctgaggtggccgtgttcgagcctagcgaggccgagatcagccacacccagaaagccaccctcgtgtgcctggctaccggcttctaccccgaccatgtggaactgtcttggtgggtcaacggcaaagaggtgcacagcggcgtgtgtaccgacccccagccactgaaagaacagcccgccctgaacgacagccggtactgcctgagcagcagactgagagtgtccgccaccttctggcagaacccccggaaccacttcagatgccaggtgcagttctacggcctgagcgagaacgacgagtggacccaggacagagccaagcccgtgacccagatcgtgtctgccgaagcctggggcagagccgatgatgtgattaagatccactggcaggaaaagaagtccaacaccatcctgggcagccaggaaggcaacaccatgaagaccaacgacacctacatgaagttcagctggctgaccgtgcccgagaagtccctggacaaagaacacagatgcatcgtgcggcacgaaaacaacaagaacggcgtggaccaggaaatcatcttcccacccatcaagaccgatgtgattacaatggaccccaaggacaactgctccaaggacgccaacgataccctgctgctccagctgaccaacaccagcgcctactacatgtacttgttgctgctgctgaagtccgtggtgtacttcgccatcatcacatgctgcctgctgcggagaaccgccttctgctgcaacggcgagaagtctagggccaagcgatctggatctggagcaacaaacttctcactactcaaacaagcaggtgacgtggaggagaatcccgggcctactagtatggactggatttggcgcatccttttccttgtcggcgctgctaccggcgcgcattccttcgaacaggtgcaactgcagcagcctggcgctgaggtcgtgaagccaggcgcttccgtgaagatgtcctgcaaggccagcggctacaccttcaccagctactacatccactggatcaagcagacccctggacagggcctggaatgggtgggagtgatctaccccggcaacgacgacatcagctacaaccagaagttccagggcaaggccaccctgaccgccgacaagtctagcaccaccgcctacatgcaactgtccagcctgaccagcgaggacagcgccgtgtactactgcgccagagaagtgcggctgcggtacttcgatgtgtggggccagggaaccaccgtgaccgtgtcatctacgcgtatccagaaccctgatcctgccgtgtaccagctgcgggatagcaagagcagcgacaagagcgtgtgtctgttcaccgacttcgacagccagaccaacgtgtcccagagcaaggactccgacgtgtacatcaccgataagtgcgtgctggacatgcggagcatggacttcaagagcaactccgccgtggcctggtccaacaagtccgatttcgcctgcgccaacgccttcaacaacagcattatccccgaggacacattcttcccaagccccgagagcagcgactccaccgaccacgtgaagcccaaagagacagagaacaccaagcagcccagcaagagctgccacaagcccaaggccatcgtgcacaccgagaaagtgaacatgatgagcctgaccgtgctgggcctgcggatgctgttcgccaaaaccgtggccgtgaacttcctgctgaccgccaagctgttcttcctc

SEQ ID NO: 7062 - DNA, 2193 bp, synthetic construct
  source 1..2193: mol_type = other DNA
atggccttaccagtgaccgccttgctcctgccgctggccttgctgctccacgccgccaggccggatgtgctgctgacccagagccctctgagcctgcctgtgacactgggacagcctgccagcatctcctgtcggagcagccagaccatcgtgcacagcaacggcaacacctacctggaatggttccagcagcggccaggccagagccccagactgctgatctaccaggtgtccaacagattcagcggcgtgcccgacagattctccggcagcggctctggcaccgacttcaccctgaagatcagccgggtggaagccgaggacgtgggcgtgtactactgttttcaaggcagccacgtgccccggacctttggcggaggaacaaaggtggaaatcaagagagccctcgaggacctgaagaacgtgttcccacctgaggtggccgtgttcgagcctagcgaggccgagatcagccacacccagaaagccaccctcgtgtgcctggctaccggcttctaccccgaccatgtggaactgtcttggtgggtcaacggcaaagaggtgcacagcggcgtgtgtaccgacccccagccactgaaagaacagcccgccctgaacgacagccggtactgcctgagcagcagactgagagtgtccgccaccttctggcagaacccccggaaccacttcagatgccaggtgcagttctacggcctgagcgagaacgacgagtggacccaggacagagccaagcccgtgacccagatcgtgtctgccgaagcctggggcagagccgatgatgtgattaagatccactggcaggaaaagaagtccaacaccatcctgggcagccaggaaggcaacaccatgaagaccaacgacacctacatgaagttcagctggctgaccgtgcccgagaagtccctggacaaagaacacagatgcatcgtgcggcacgaaaacaacaagaacggcgtggaccaggaaatcatcttcccacccatcaagaccgatgtgattacaatggaccccaaggacaactgctccaaggacgccaacgataccctgctgctccagctgaccaacaccagcgcctactacatgtacttgttgctgctgctgaagtccgtggtgtacttcgccatcatcacatgctgcctgctgcggagaaccgccttctgctgcaacggcgagaagtctagggccaagcgatctggatctggagcaacaaacttctcactactcaaacaagcaggtgacgtggaggagaatcccgggcctactagtatggactggatttggcgcatccttttccttgtcggcgctgctaccggcgcgcattccttcgaacagatccaactggtgcagagcggcagcgagctgaagaaacctggggccagcgtgaaggtgtcctgcaaggccagcggctacacctttaccaactacggcatgaactgggtgcgccaggcccctggacagggcctgaaatggatgggctggatcaacaccaacaccggcgagcctaagtacgccgaagagttcaagggcagattcgccctgagcctggacaccagcgtgtccacagcctacctccagatcaacagcctgaaggccgaggataccgccgtgtacttctgcgccagaggctacggcaactacgccagaggggcttggctggcctattggggccagggaacactcgtgaccgtgtcctctacgcgtatccagaaccctgatcctgccgtgtaccagctgcgggatagcaagagcagcgacaagagcgtgtgtctgttcaccgacttcgacagccagaccaacgtgtcccagagcaaggactccgacgtgtacatcaccgataagtgcgtgctggacatgcggagcatggacttcaagagcaactccgccgtggcctggtccaacaagtccgatttcgcctgcgccaacgccttcaacaacagcattatccccgaggacacattcttcccaagccccgagagcagcgactccaccgaccacgtgaagcccaaagagacagagaacaccaagcagcccagcaagagctgccacaagcccaaggccatcgtgcacaccgagaaagtgaacatgatgagcctgaccgtgctgggcctgcggatgctgttcgccaaaaccgtggccgtgaacttcctgctgaccgccaagctgttcttcctc

SEQ ID NO: 7063 - DNA, 2148 bp, synthetic construct
  source 1..2148: mol_type = other DNA
atggccttaccagtgaccgccttgctcctgccgctggccttgctgctccacgccgccaggccggacgagatcgtgctgacacagagccctgccacactctctctgagccctggcgaaagagccaccctgagctgtagcgccagcagcagcatcaactacatctactggctccagcagaagcccggccaggcccccagaatcctgatctacctgaccagcaacctggcctccggcgtgccagccagattttctggcagcggctccggcaccgacttcaccctgacaatcagcagcctggaacccgaggacttcgccgtgtactactgcctccagtggtccagcaaccccctgacctttggcggaggcaccaaggtggaaatcaagctcgaggacctgaagaacgtgttcccacctgaggtggccgtgttcgagcctagcgaggccgagatcagccacacccagaaagccaccctcgtgtgcctggctaccggcttctaccccgaccatgtggaactgtcttggtgggtcaacggcaaagaggtgcacagcggcgtgtgtaccgacccccagccactgaaagaacagcccgccctgaacgacagccggtactgcctgagcagcagactgagagtgtccgccaccttctggcagaacccccggaaccacttcagatgccaggtgcagttctacggcctgagcgagaacgacgagtggacccaggacagagccaagcccgtgacccagatcgtgtctgccgaagcctggggcagagccgatgatgtgattaagatccactggcaggaaaagaagtccaacaccatcctgggcagccaggaaggcaacaccatgaagaccaacgacacctacatgaagttcagctggctgaccgtgcccgagaagtccctggacaaagaacacagatgcatcgtgcggcacgaaaacaacaagaacggcgtggaccaggaaatcatcttcccacccatcaagaccgatgtgattacaatggaccccaaggacaactgctccaaggacgccaacgataccctgctgctccagctgaccaacaccagcgcctactacatgtacttgttgctgctgctgaagtccgtggtgtacttcgccatcatcacatgctgcctgctgcggagaaccgccttctgctgcaacggcgagaagtctagggccaagcgatctggatctggagcaacaaacttctcactactcaaacaagcaggtgacgtggaggagaatcccgggcctactagtatggactggatttggcgcatccttttccttgtcggcgctgctaccggcgcgcattccttcgaagaagtgcaactggtggaaagcgggggaggacttgtgaagcctggcggctctctgagactgagctgtgccgcctctggcttcaccttcagcagctacgacatgagctgggtgcgccaggctcctggcaagggactggaatgggtgtccaccatcagcagcggcggcagctacacctactacctggacagcatcaagggccggttcaccatctccagagacaacgccaagaacagcctgtacctccagatgaactccctgcgggccgaggacacagccgtgtattattgcgccagacagggcctggattactggggcagaggcacccttgtgaccgtgtcctctacgcgtatccagaaccctgatcctgccgtgtaccagctgcgggatagcaagagcagcgacaagagcgtgtgtctgttcaccgacttcgacagccagaccaacgtgtcccagagcaaggactccgacgtgtacatcaccgataagtgcgtgctggacatgcggagcatggacttcaagagcaactccgccgtggcctggtccaacaagtccgatttcgcctgcgccaacgccttcaacaacagcattatccccgaggacacattcttcccaagccccgagagcagcgactccaccgaccacgtgaagcccaaagagacagagaacaccaagcagcccagcaagagctgccacaagcccaaggccatcgtgcacaccgagaaagtgaacatgatgagcctgaccgtgctgggcctgcggatgctgttcgccaaaaccgtggccgtgaacttcctgctgaccgccaagctgttcttcctc

SEQ ID NO: 7064 - DNA, 2175 bp, synthetic construct
  source 1..2175: mol_type = other DNA
atggccttaccagtgaccgccttgctcctgccgctggccttgctgctccacgccgccaggccggacatcgtgatgacccagagccccgatagcctggccgtgtctctgggagagagagccaccatcaactgccgggccagcaagagcgtgtccaccagcggctacagcttcatgcactggtatcagcagaagcccggccagccccccaagctgctgatctacctggcctccaacctggaaagcggcgtgcccgatagattcagcggcagcggctctggcaccgacttcaccctgaccatcagttctcttcaggccgaggacgtggccgtgtactactgccagcacagcagagaggtgccctggacattcggccagggcacaaaggtggaaatcaagcggctcgaggacctgaagaacgtgttcccacctgaggtggccgtgttcgagcctagcgaggccgagatcagccacacccagaaagccaccctcgtgtgcctggctaccggcttctaccccgaccatgtggaactgtcttggtgggtcaacggcaaagaggtgcacagcggcgtgtgtaccgacccccagccactgaaagaacagcccgccctgaacgacagccggtactgcctgagcagcagactgagagtgtccgccaccttctggcagaacccccggaaccacttcagatgccaggtgcagttctacggcctgagcgagaacgacgagtggacccaggacagagccaagcccgtgacccagatcgtgtctgccgaagcctggggcagagccgatgatgtgattaagatccactggcaggaaaagaagtccaacaccatcctgggcagccaggaaggcaacaccatgaagaccaacgacacctacatgaagttcagctggctgaccgtgcccgagaagtccctggacaaagaacacagatgcatcgtgcggcacgaaaacaacaagaacggcgtggaccaggaaatcatcttcccacccatcaagaccgatgtgattacaatggaccccaaggacaactgctccaaggacgccaacgataccctgctgctccagctgaccaacaccagcgcctactacatgtacttgttgctgctgctgaagtccgtggtgtacttcgccatcatcacatgctgcctgctgcggagaaccgccttctgctgcaacggcgagaagtctagggccaagcgatctggatctggagcaacaaacttctcactactcaaacaagcaggtgacgtggaggagaatcccgggcctactagtatggactggatttggcgcatccttttccttgtcggcgctgctaccggcgcgcattccttcgaacaggtgcagctggtgcagtctggggccgaagtgaagaaacctggggccagcgtgaaggtgtcctgcaaggccagcggatacacctttaccaactacggcatgaactgggtgcgccaggcccctggacagggcctggaatggatgggctggatcaacacctacaccggcgagcccacatacgccgacgccttcaagggcagattcgccttcagcctggacaccagcacctccaccgcctacctccagatcaacagcctgcggagcgacgacaccgccgtgtattattgcgccagagattacggcgactacgggatggactattggggccagggaaccaccgtgaccgtgtcctctacgcgtatccagaaccctgatcctgccgtgtaccagctgcgggatagcaagagcagcgacaagagcgtgtgtctgttcaccgacttcgacagccagaccaacgtgtcccagagcaaggactccgacgtgtacatcaccgataagtgcgtgctggacatgcggagcatggacttcaagagcaactccgccgtggcctggtccaacaagtccgatttcgcctgcgccaacgccttcaacaacagcattatccccgaggacacattcttcccaagccccgagagcagcgactccaccgaccacgtgaagcccaaagagacagagaacaccaagcagcccagcaagagctgccacaagcccaaggccatcgtgcacaccgagaaagtgaacatgatgagcctgaccgtgctgggcctgcggatgctgttcgccaaaaccgtggccgtgaacttcctgctgaccgccaagctgttcttcctc

SEQ ID NO: 7065 - DNA, 2163 bp, synthetic construct
  source 1..2163: mol_type = other DNA
atggccttaccagtgaccgccttgctcctgccgctggccttgctgctccacgccgccaggccggacatcgtgatgacccagacccccctgaccctgagcgtgacaatcggacagcctgccagcatctcctgcaagagcagccagagcctgctggacagcgacggcaagacctacctgaactggctgctgcagaggccaggccagagccccgagagactgatctacctggtgtccaagctggactccggcgtgcccgatagattcacaggcagcggctccggcaccgacttcaccctgaagatcagccgggtggaagccgaggacctgggcgtgtactgttgttggcagggcacccacttcccttacaccttcggcggagggaccaaggtggaaatcaagggcctcgaggacctgaagaacgtgttcccacctgaggtggccgtgttcgagcctagcgaggccgagatcagccacacccagaaagccaccctcgtgtgcctggctaccggcttctaccccgaccatgtggaactgtcttggtgggtcaacggcaaagaggtgcacagcggcgtgtgtaccgacccccagccactgaaagaacagcccgccctgaacgacagccggtactgcctgagcagcagactgagagtgtccgccaccttctggcagaacccccggaaccacttcagatgccaggtgcagttctacggcctgagcgagaacgacgagtggacccaggacagagccaagcccgtgacccagatcgtgtctgccgaagcctggggcagagccgatgatgtgattaagatccactggcaggaaaagaagtccaacaccatcctgggcagccaggaaggcaacaccatgaagaccaacgacacctacatgaagttcagctggctgaccgtgcccgagaagtccctggacaaagaacacagatgcatcgtgcggcacgaaaacaacaagaacggcgtggaccaggaaatcatcttcccacccatcaagaccgatgtgattacaatggaccccaaggacaactgctccaaggacgccaacgataccctgctgctccagctgaccaacaccagcgcctactacatgtacttgttgctgctgctgaagtccgtggtgtacttcgccatcatcacatgctgcctgctgcggagaaccgccttctgctgcaacggcgagaagtctagggccaagcgatctggatctggagcaacaaacttctcactactcaaacaagcaggtgacgtggaggagaatcccgggcctactagtatggactggatttggcgcatccttttccttgtcggcgctgctaccggcgcgcattccttcgaacaggtgcaactgcagcagcctggcgctgaacttgtgcggccaggcgcctctgtgaagctgagctgtaaagccagcggctacaccttcaccagctactggatgaactgggtcaagcagcgcccaggccagggcctggaatggatcggaatgatcgaccccagcgacagcgagacacactacaaccacatcttcaaggacaaggccaccctgaccgtggacaagtccagcagcacagcctacctgcaactgtccagcctgaccagcgaggacagcgccgtgtactactgcgcccggaacctgtatctgtggggccagggaacaagcgtgaccgtgtctagcacgcgtatccagaaccctgatcctgccgtgtaccagctgcgggatagcaagagcagcgacaagagcgtgtgtctgttcaccgacttcgacagccagaccaacgtgtcccagagcaaggactccgacgtgtacatcaccgataagtgcgtgctggacatgcggagcatggacttcaagagcaactccgccgtggcctggtccaacaagtccgatttcgcctgcgccaacgccttcaacaacagcattatccccgaggacacattcttcccaagccccgagagcagcgactccaccgaccacgtgaagcccaaagagacagagaacaccaagcagcccagcaagagctgccacaagcccaaggccatcgtgcacaccgagaaagtgaacatgatgagcctgaccgtgctgggcctgcggatgctgttcgccaaaaccgtggccgtgaacttcctgctgaccgccaagctgttcttcctc

SEQ ID NO: 7066 - DNA, 2187 bp, synthetic construct
  source 1..2187: mol_type = other DNA
atggccttaccagtgaccgccttgctcctgccgctggccttgctgctccacgccgccaggccggacatcgtgatgacccagagccccgatagcctggccgtgtctctgggagagagagccaccatcaactgcgagagcagccagagcctgctgaacagcggcaaccagaagaactacctgacctggtatcagcagaagcccggccagccccccaagcccctgatctattgggccagcaccagagaaagcggcgtgcccgatagattcagcggcagcggaagcggcaccgacttcaccctgaccatcagttctcttcaggccgaggacgtggccgtgtactactgccagaacgactacagctacccctacaccttcggccagggcaccaagctggaaatcaagagactcgaggacctgaagaacgtgttcccacctgaggtggccgtgttcgagcctagcgaggccgagatcagccacacccagaaagccaccctcgtgtgcctggctaccggcttctaccccgaccatgtggaactgtcttggtgggtcaacggcaaagaggtgcacagcggcgtgtgtaccgacccccagccactgaaagaacagcccgccctgaacgacagccggtactgcctgagcagcagactgagagtgtccgccaccttctggcagaacccccggaaccacttcagatgccaggtgcagttctacggcctgagcgagaacgacgagtggacccaggacagagccaagcccgtgacccagatcgtgtctgccgaagcctggggcagagccgatgatgtgattaagatccactggcaggaaaagaagtccaacaccatcctgggcagccaggaaggcaacaccatgaagaccaacgacacctacatgaagttcagctggctgaccgtgcccgagaagtccctggacaaagaacacagatgcatcgtgcggcacgaaaacaacaagaacggcgtggaccaggaaatcatcttcccacccatcaagaccgatgtgattacaatggaccccaaggacaactgctccaaggacgccaacgataccctgctgctccagctgaccaacaccagcgcctactacatgtacttgttgctgctgctgaagtccgtggtgtacttcgccatcatcacatgctgcctgctgcggagaaccgccttctgctgcaacggcgagaagtctagggccaagcgatctggatctggagcaacaaacttctcactactcaaacaagcaggtgacgtggaggagaatcccgggcctactagtatggactggatttggcgcatccttttccttgtcggcgctgctaccggcgcgcattccttcgaagaagtgcagctggtgcagtctggggccgaagtgaagaagcctggcgagagcctgaagatcagctgcaagggcagcggctacagcttcaccgactactacatgaagtgggccagacagatgcccggcaagggcctggaatggatgggcgacatcatccccagcaacggggccaccttctacaaccagaaattcaagggccaagtgaccatctccgccgacaagagcatcagcaccacctacctccagtggtccagcctgaaggccagcgacaccgccatgtactattgcgccagaagccatctgctgcgggccagttggttcgcctattggggccagggaacaatggtcacagtgtccagcacgcgtatccagaaccctgatcctgccgtgtaccagctgcgggatagcaagagcagcgacaagagcgtgtgtctgttcaccgacttcgacagccagaccaacgtgtcccagagcaaggactccgacgtgtacatcaccgataagtgcgtgctggacatgcggagcatggacttcaagagcaactccgccgtggcctggtccaacaagtccgatttcgcctgcgccaacgccttcaacaacagcattatccccgaggacacattcttcccaagccccgagagcagcgactccaccgaccacgtgaagcccaaagagacagagaacaccaagcagcccagcaagagctgccacaagcccaaggccatcgtgcacaccgagaaagtgaacatgatgagcctgaccgtgctgggcctgcggatgctgttcgccaaaaccgtggccgtgaacttcctgctgaccgccaagctgttcttcctc

SEQ ID NO: 7067 - DNA, 2172 bp, synthetic construct
  source 1..2172: mol_type = other DNA
atggccttaccagtgaccgccttgctcctgccgctggccttgctgctccacgccgccaggccggacatccagatgacccagtctaccagttccctgagtgcatccctcggagacagggtgacgatcagttgcagcgcaagccaagggatcaataactatctgaactggtatcagcagaaaccggacggaacagtcgaactcctgatttattacaccagcacccttcagagtggcgtcccttcccggttcagtggctccggaagcgggaccgattactccctgaccatttctaatctggagccagaggacataggaacgtattattgccagcagtatagtaaactgccacgaacttttggaggggggacgaaactggagatcaaactcgaggacctgaagaacgtgttcccacctgaggtggccgtgttcgagcctagcgaggccgagatcagccacacccagaaagccaccctcgtgtgcctggctaccggcttctaccccgaccatgtggaactgtcttggtgggtcaacggcaaagaggtgcacagcggcgtgtgtaccgacccccagccactgaaagaacagcccgccctgaacgacagccggtactgcctgagcagcagactgagagtgtccgccaccttctggcagaacccccggaaccacttcagatgccaggtgcagttctacggcctgagcgagaacgacgagtggacccaggacagagccaagcccgtgacccagatcgtgtctgccgaagcctggggcagagccgatgatgtgattaagatccactggcaggaaaagaagtccaacaccatcctgggcagccaggaaggcaacaccatgaagaccaacgacacctacatgaagttcagctggctgaccgtgcccgagaagtccctggacaaagaacacagatgcatcgtgcggcacgaaaacaacaagaacggcgtggaccaggaaatcatcttcccacccatcaagaccgatgtgattacaatggaccccaaggacaactgctccaaggacgccaacgataccctgctgctccagctgaccaacaccagcgcctactacatgtacttgttgctgctgctgaagtccgtggtgtacttcgccatcatcacatgctgcctgctgcggagaaccgccttctgctgcaacggcgagaagtctagggccaagcgatctggatctggagcaacaaacttctcactactcaaacaagcaggtgacgtggaggagaatcccgggcctactagtatggactggatttggcgcatccttttccttgtcggcgctgctaccggcgcgcattccttcgaacaggtgcaactccagcagtccggaagcgagcttatgatgccaggggcatcagtgaagatcagctgcaaggctactggctacaccttctctaattactggatagagtgggttaaacaaaggccagggcacggcctggaatggatcggcgagatcctgcctgggacaggccgaaccatttataacgagaagttcaaaggcaaggctactttcaccgcagatataagctctaatacagtgcaaatgcagctctcttccctgacaagtgaggatagtgccgtgtattattgcgcacgaagagattactatggaaatttttattacgctatggattattggggtcaaggaacaagtgtgaccgttagcagcacgcgtatccagaaccctgatcctgccgtgtaccagctgcgggatagcaagagcagcgacaagagcgtgtgtctgttcaccgacttcgacagccagaccaacgtgtcccagagcaaggactccgacgtgtacatcaccgataagtgcgtgctggacatgcggagcatggacttcaagagcaactccgccgtggcctggtccaacaagtccgatttcgcctgcgccaacgccttcaacaacagcattatccccgaggacacattcttcccaagccccgagagcagcgactccaccgaccacgtgaagcccaaagagacagagaacaccaagcagcccagcaagagctgccacaagcccaaggccatcgtgcacaccgagaaagtgaacatgatgagcctgaccgtgctgggcctgcggatgctgttcgccaaaaccgtggccgtgaacttcctgctgaccgccaagctgttcttcctc

SEQ ID NO: 7068 - DNA, 2157 bp, synthetic construct
  source 1..2157: mol_type = other DNA
atggccttaccagtgaccgccttgctcctgccgctggccttgctgctccacgccgccaggccggacatccagatgacccagagccctgccagcctgtccgtgtctgtgggcgagacagtgaccatcacctgtcgggccagcgagaacatctacagcaacctggcctggtatcagcagaagcagggcaagagcccccaactgctggtgtacgccgccaccaatctggccgatggcgtgcccagcagattttccggctctggcagcggcacccagtacagcctgaagatcaacagcctccagagcgaggacttcggcagctactactgccagcacttctggggcacctggacctttggaggaggcaccaccctggaaatcaagctcgaggacctgaagaacgtgttcccacctgaggtggccgtgttcgagcctagcgaggccgagatcagccacacccagaaagccaccctcgtgtgcctggctaccggcttctaccccgaccatgtggaactgtcttggtgggtcaacggcaaagaggtgcacagcggcgtgtgtaccgacccccagccactgaaagaacagcccgccctgaacgacagccggtactgcctgagcagcagactgagagtgtccgccaccttctggcagaacccccggaaccacttcagatgccaggtgcagttctacggcctgagcgagaacgacgagtggacccaggacagagccaagcccgtgacccagatcgtgtctgccgaagcctggggcagagccgatgatgtgattaagatccactggcaggaaaagaagtccaacaccatcctgggcagccaggaaggcaacaccatgaagaccaacgacacctacatgaagttcagctggctgaccgtgcccgagaagtccctggacaaagaacacagatgcatcgtgcggcacgaaaacaacaagaacggcgtggaccaggaaatcatcttcccacccatcaagaccgatgtgattacaatggaccccaaggacaactgctccaaggacgccaacgataccctgctgctccagctgaccaacaccagcgcctactacatgtacttgttgctgctgctgaagtccgtggtgtacttcgccatcatcacatgctgcctgctgcggagaaccgccttctgctgcaacggcgagaagtctagggccaagcgatctggatctggagcaacaaacttctcactactcaaacaagcaggtgacgtggaggagaatcccgggcctactagtatggactggatttggcgcatccttttccttgtcggcgctgctaccggcgcgcattccttcgaagaagtgcaactccagcagagcggccctgagcttgtgaagcctggcgcttccgtgaagatgagctgcaaggccagcggctacaccttcaccgactactacatgaagtggatgaagcagagccacggcaagtccctggaatggatcggcgacatcaaccccaacaacggcggcaccacctacaaccagaagttcaagggcaaggccaccctgaccgtggacaagagcagcagcaccgcctacatgcaactgaacagcctgaccagcgaggacagcgccgtgtactactgcgccagagactacggctacggctatttcgactactggggccagggcacaaccctgacagtgtcctctacgcgtatccagaaccctgatcctgccgtgtaccagctgcgggatagcaagagcagcgacaagagcgtgtgtctgttcaccgacttcgacagccagaccaacgtgtcccagagcaaggactccgacgtgtacatcaccgataagtgcgtgctggacatgcggagcatggacttcaagagcaactccgccgtggcctggtccaacaagtccgatttcgcctgcgccaacgccttcaacaacagcattatccccgaggacacattcttcccaagccccgagagcagcgactccaccgaccacgtgaagcccaaagagacagagaacaccaagcagcccagcaagagctgccacaagcccaaggccatcgtgcacaccgagaaagtgaacatgatgagcctgaccgtgctgggcctgcggatgctgttcgccaaaaccgtggccgtgaacttcctgctgaccgccaagctgttcttcctc

SEQ ID NO: 7069 - DNA, 2166 bp, synthetic construct
  source 1..2166: mol_type = other DNA
atggccttaccagtgaccgccttgctcctgccgctggccttgctgctccacgccgccaggccggagatcgtgctgacacagagccctggcaccctgagcctgtctccaggcgaaagagccacactgagctgtcgggcctctcagagcgtgggaggctacctggcttggtatcagcagaagccaggccaggcccccagactgctgatctacgacgccagcaatcgggccacaggcatccccgccagattttctggcagcggctccggcaccgacttcaccctgacaatcagcagcctggaacccgaggacttcgccgtgtactactgccagcagcggaacaactggccccccatgtacacattcggccagggcaccaagctggaaatcaagagactcgaggacctgaagaacgtgttcccacctgaggtggccgtgttcgagcctagcgaggccgagatcagccacacccagaaagccaccctcgtgtgcctggctaccggcttctaccccgaccatgtggaactgtcttggtgggtcaacggcaaagaggtgcacagcggcgtgtgtaccgacccccagccactgaaagaacagcccgccctgaacgacagccggtactgcctgagcagcagactgagagtgtccgccaccttctggcagaacccccggaaccacttcagatgccaggtgcagttctacggcctgagcgagaacgacgagtggacccaggacagagccaagcccgtgacccagatcgtgtctgccgaagcctggggcagagccgatgatgtgattaagatccactggcaggaaaagaagtccaacaccatcctgggcagccaggaaggcaacaccatgaagaccaacgacacctacatgaagttcagctggctgaccgtgcccgagaagtccctggacaaagaacacagatgcatcgtgcggcacgaaaacaacaagaacggcgtggaccaggaaatcatcttcccacccatcaagaccgatgtgattacaatggaccccaaggacaactgctccaaggacgccaacgataccctgctgctccagctgaccaacaccagcgcctactacatgtacttgttgctgctgctgaagtccgtggtgtacttcgccatcatcacatgctgcctgctgcggagaaccgccttctgctgcaacggcgagaagtctagggccaagcgatctggatctggagcaacaaacttctcactactcaaacaagcaggtgacgtggaggagaatcccgggcctactagtatggactggatttggcgcatccttttccttgtcggcgctgctaccggcgcgcattccttcgaacaggtgcaactggtgcagagcggagccgaagtgaagaaacccggcagcagcgtgaaggtgtcctgcaaggcttccggcggcaccttcagcagctacgccatttcttgggtgcgccaggctcctggacagggcctggaatggatgggcggcatcatccctatcctgggcaccgccaactacgcccagaaattccagggcagagtgaccatcaccgccgacgagagcaccagcaccgcctacatggaactgagcagcctgcggagcgaggacacagccgtgtattattgcgccagatggggcggaggggccttcgacatttggggccagggaacaatggtcaccgtgtccagcacgcgtatccagaaccctgatcctgccgtgtaccagctgcgggatagcaagagcagcgacaagagcgtgtgtctgttcaccgacttcgacagccagaccaacgtgtcccagagcaaggactccgacgtgtacatcaccgataagtgcgtgctggacatgcggagcatggacttcaagagcaactccgccgtggcctggtccaacaagtccgatttcgcctgcgccaacgccttcaacaacagcattatccccgaggacacattcttcccaagccccgagagcagcgactccaccgaccacgtgaagcccaaagagacagagaacaccaagcagcccagcaagagctgccacaagcccaaggccatcgtgcacaccgagaaagtgaacatgatgagcctgaccgtgctgggcctgcggatgctgttcgccaaaaccgtggccgtgaacttcctgctgaccgccaagctgttcttcctc

SEQ ID NO: 7070 - DNA, 2151 bp, synthetic construct
  source 1..2151: mol_type = other DNA
atggccttaccagtgaccgccttgctcctgccgctggccttgctgctccacgccgccaggccgcagatcgtgctgacacagagccctgccctgatgagcgccagccctggcgagaaagtgaccatgacctgtagcgccagcagcagcgtgcgctacatgtactggtatcagcagaagcccagaagcagccccaagccctggattcacctgaccagcaatctggcctctggcgtgcccgctagattttccggctctggcagcggcaccagctacagcctgaccatcagcagcatggaagccgaggacgccgccacctactactgccagcagtggtccagccaccccttcacatttggctccggcaccaagctggaaatcaagctcgaggacctgaagaacgtgttcccacctgaggtggccgtgttcgagcctagcgaggccgagatcagccacacccagaaagccaccctcgtgtgcctggctaccggcttctaccccgaccatgtggaactgtcttggtgggtcaacggcaaagaggtgcacagcggcgtgtgtaccgacccccagccactgaaagaacagcccgccctgaacgacagccggtactgcctgagcagcagactgagagtgtccgccaccttctggcagaacccccggaaccacttcagatgccaggtgcagttctacggcctgagcgagaacgacgagtggacccaggacagagccaagcccgtgacccagatcgtgtctgccgaagcctggggcagagccgatgatgtgattaagatccactggcaggaaaagaagtccaacaccatcctgggcagccaggaaggcaacaccatgaagaccaacgacacctacatgaagttcagctggctgaccgtgcccgagaagtccctggacaaagaacacagatgcatcgtgcggcacgaaaacaacaagaacggcgtggaccaggaaatcatcttcccacccatcaagaccgatgtgattacaatggaccccaaggacaactgctccaaggacgccaacgataccctgctgctccagctgaccaacaccagcgcctactacatgtacttgttgctgctgctgaagtccgtggtgtacttcgccatcatcacatgctgcctgctgcggagaaccgccttctgctgcaacggcgagaagtctagggccaagcgatctggatctggagcaacaaacttctcactactcaaacaagcaggtgacgtggaggagaatcccgggcctactagtatggactggatttggcgcatccttttccttgtcggcgctgctaccggcgcgcattccttcgaagatgtgcaactccaggaaagcggccctggccttgtgaagcctagccagagcctgtccctgacctgtaccgtgaccggcttcagcatcaccagcgactactcttggaactggatcagacagttccctggcaacaaactggaatggatgggctacatcagctactccggccacacctcctacaaccccagcctggaaagccggatctccatcaccagagacaccagcaagaaccagttcttcttgcaactgaacagcgtgaccaccgaggataccgccacatattactgtaccagaggcaactgggacgtggtgtactggggccagggcacacttgtgaccgtgtctgctacgcgtatccagaaccctgatcctgccgtgtaccagctgcgggatagcaagagcagcgacaagagcgtgtgtctgttcaccgacttcgacagccagaccaacgtgtcccagagcaaggactccgacgtgtacatcaccgataagtgcgtgctggacatgcggagcatggacttcaagagcaactccgccgtggcctggtccaacaagtccgatttcgcctgcgccaacgccttcaacaacagcattatccccgaggacacattcttcccaagccccgagagcagcgactccaccgaccacgtgaagcccaaagagacagagaacaccaagcagcccagcaagagctgccacaagcccaaggccatcgtgcacaccgagaaagtgaacatgatgagcctgaccgtgctgggcctgcggatgctgttcgccaaaaccgtggccgtgaacttcctgctgaccgccaagctgttcttcctc

SEQ ID NO: 7071 - DNA, 2181 bp, synthetic construct
  source 1..2181: mol_type = other DNA
atggccttaccagtgaccgccttgctcctgccgctggccttgctgctccacgccgccaggccggacgtcgtgatgacccagagccctctgagcctgcctgtgacactgggacagcctgccagcatctcctgtcggagcagccagagcatcgtgcacagcgacggcaacacctacctggaatggtatcagcagcggccaggccagagccccagacggctgatctacaaggtgtccaacagattcagcggcgtgcccgacagattctccggcagcggctctggcaccgacttcaccctgaagatcagcagagtggaagccgaggacgtgggcgtgtactactgttttcaaggcagccacgccccctggacctttggcggaggaacaaaggtggaaatcaagctcgaggacctgaagaacgtgttcccacctgaggtggccgtgttcgagcctagcgaggccgagatcagccacacccagaaagccaccctcgtgtgcctggctaccggcttctaccccgaccatgtggaactgtcttggtgggtcaacggcaaagaggtgcacagcggcgtgtgtaccgacccccagccactgaaagaacagcccgccctgaacgacagccggtactgcctgagcagcagactgagagtgtccgccaccttctggcagaacccccggaaccacttcagatgccaggtgcagttctacggcctgagcgagaacgacgagtggacccaggacagagccaagcccgtgacccagatcgtgtctgccgaagcctggggcagagccgatgatgtgattaagatccactggcaggaaaagaagtccaacaccatcctgggcagccaggaaggcaacaccatgaagaccaacgacacctacatgaagttcagctggctgaccgtgcccgagaagtccctggacaaagaacacagatgcatcgtgcggcacgaaaacaacaagaacggcgtggaccaggaaatcatcttcccacccatcaagaccgatgtgattacaatggaccccaaggacaactgctccaaggacgccaacgataccctgctgctccagctgaccaacaccagcgcctactacatgtacttgttgctgctgctgaagtccgtggtgtacttcgccatcatcacatgctgcctgctgcggagaaccgccttctgctgcaacggcgagaagtctagggccaagcgatctggatctggagcaacaaacttctcactactcaaacaagcaggtgacgtggaggagaatcccgggcctactagtatggactggatttggcgcatccttttccttgtcggcgctgctaccggcgcgcattccttcgaagaagtgcaactggtggaatcaggcggcggactggtgcagcctggcggatctctgagactgagctgtgccgccagcggcttcaccttcagcagctacggaatgcactgggtgcgccaggcccctggcaaaggactggaatgggtggcctacatcaccaccagaagcagcaccatctactacgccgacagcgtgaagggccggttcaccatctccagagacaacgccaagaacagcctgtacctccagatgaactccctgcgggccgaggacaccgccgtgtactattgcaccagagagcccctgaccggctactacgctatggactattggggccagggcaccagcgtgaccgtgtctagtacgcgtatccagaaccctgatcctgccgtgtaccagctgcgggatagcaagagcagcgacaagagcgtgtgtctgttcaccgacttcgacagccagaccaacgtgtcccagagcaaggactccgacgtgtacatcaccgataagtgcgtgctggacatgcggagcatggacttcaagagcaactccgccgtggcctggtccaacaagtccgatttcgcctgcgccaacgccttcaacaacagcattatccccgaggacacattcttcccaagccccgagagcagcgactccaccgaccacgtgaagcccaaagagacagagaacaccaagcagcccagcaagagctgccacaagcccaaggccatcgtgcacaccgagaaagtgaacatgatgagcctgaccgtgctgggcctgcggatgctgttcgccaaaaccgtggccgtgaacttcctgctgaccgccaagctgttcttcctc

SEQ ID NO: 7072 - DNA, 2157 bp, synthetic construct
  source 1..2157: mol_type = other DNA
atggccttaccagtgaccgccttgctcctgccgctggccttgctgctccacgccgccaggccggacatccagatgacccagagccccagcagcctgtctgccagcgtgggcgacagagtgaccatcacctgtagagccagccagagcatcagcctgtggctgaactggtatcagcagaagcccggcaaggcccccaagctgctgatctacgccgccagcacactccagagcggcgtgccaagcagattttccggcagcggctccggcaccgacttcaccctgacaatcagctccctccagcccgaggacttcgccacctactactgccagcagtactacaccagcccctacaccttcggccagggcaccaaggtggaaatcaagagactcgaggacctgaagaacgtgttcccacctgaggtggccgtgttcgagcctagcgaggccgagatcagccacacccagaaagccaccctcgtgtgcctggctaccggcttctaccccgaccatgtggaactgtcttggtgggtcaacggcaaagaggtgcacagcggcgtgtgtaccgacccccagccactgaaagaacagcccgccctgaacgacagccggtactgcctgagcagcagactgagagtgtccgccaccttctggcagaacccccggaaccacttcagatgccaggtgcagttctacggcctgagcgagaacgacgagtggacccaggacagagccaagcccgtgacccagatcgtgtctgccgaagcctggggcagagccgatgatgtgattaagatccactggcaggaaaagaagtccaacaccatcctgggcagccaggaaggcaacaccatgaagaccaacgacacctacatgaagttcagctggctgaccgtgcccgagaagtccctggacaaagaacacagatgcatcgtgcggcacgaaaacaacaagaacggcgtggaccaggaaatcatcttcccacccatcaagaccgatgtgattacaatggaccccaaggacaactgctccaaggacgccaacgataccctgctgctccagctgaccaacaccagcgcctactacatgtacttgttgctgctgctgaagtccgtggtgtacttcgccatcatcacatgctgcctgctgcggagaaccgccttctgctgcaacggcgagaagtctagggccaagcgatctggatctggagcaacaaacttctcactactcaaacaagcaggtgacgtggaggagaatcccgggcctactagtatggactggatttggcgcatccttttccttgtcggcgctgctaccggcgcgcattccttcgaacaggtgcaactgctggaatctggcggcggactggtgcagcctggcggatctctgagactgagctgtgccgccagcggcttcaccttcagcagctacgccatgagctgggtgcgccaggcccctggaaaaggactggaatgggtgtccgtgatccggtccagcggcagcagcacctattacgccgatagcgtgaagggccggttcaccatcagccgggacaacagcaagaacaccctgtacctccagatgaacagcctgcgggccgaggacaccgccgtgtactattgtgctaggggaggcggctacttcgactactggggccagggaacactcgtgaccgtgtcctctacgcgtatccagaaccctgatcctgccgtgtaccagctgcgggatagcaagagcagcgacaagagcgtgtgtctgttcaccgacttcgacagccagaccaacgtgtcccagagcaaggactccgacgtgtacatcaccgataagtgcgtgctggacatgcggagcatggacttcaagagcaactccgccgtggcctggtccaacaagtccgatttcgcctgcgccaacgccttcaacaacagcattatccccgaggacacattcttcccaagccccgagagcagcgactccaccgaccacgtgaagcccaaagagacagagaacaccaagcagcccagcaagagctgccacaagcccaaggccatcgtgcacaccgagaaagtgaacatgatgagcctgaccgtgctgggcctgcggatgctgttcgccaaaaccgtggccgtgaacttcctgctgaccgccaagctgttcttcctc

SEQ ID NO: 7073 - DNA, 2166 bp, synthetic construct
  source 1..2166: mol_type = other DNA
atggccttaccagtgaccgccttgctcctgccgctggccttgctgctccacgccgccaggccggacatccagatgacccagagccccagcagcctgtctgccagcgtgggcgacagagtgaccatcacctgtagagccagccagagcatcagcagctacctgaactggtatcagcagaagcccggcaaggcccccaaactgctgatctacgccgtgtccacactccagagcggcgtgcccagcagattttctggcagcggctccggcaccgacttcaccctgacaatcagctccctccagcccgaggacttcgccacctactactgtcagcagagcggcaccttccctcccaccacatttggacagggcaccaaggtggaaatcaagagactcgaggacctgaagaacgtgttcccacctgaggtggccgtgttcgagcctagcgaggccgagatcagccacacccagaaagccaccctcgtgtgcctggctaccggcttctaccccgaccatgtggaactgtcttggtgggtcaacggcaaagaggtgcacagcggcgtgtgtaccgacccccagccactgaaagaacagcccgccctgaacgacagccggtactgcctgagcagcagactgagagtgtccgccaccttctggcagaacccccggaaccacttcagatgccaggtgcagttctacggcctgagcgagaacgacgagtggacccaggacagagccaagcccgtgacccagatcgtgtctgccgaagcctggggcagagccgatgatgtgattaagatccactggcaggaaaagaagtccaacaccatcctgggcagccaggaaggcaacaccatgaagaccaacgacacctacatgaagttcagctggctgaccgtgcccgagaagtccctggacaaagaacacagatgcatcgtgcggcacgaaaacaacaagaacggcgtggaccaggaaatcatcttcccacccatcaagaccgatgtgattacaatggaccccaaggacaactgctccaaggacgccaacgataccctgctgctccagctgaccaacaccagcgcctactacatgtacttgttgctgctgctgaagtccgtggtgtacttcgccatcatcacatgctgcctgctgcggagaaccgccttctgctgcaacggcgagaagtctagggccaagcgatctggatctggagcaacaaacttctcactactcaaacaagcaggtgacgtggaggagaatcccgggcctactagtatggactggatttggcgcatccttttccttgtcggcgctgctaccggcgcgcattccttcgaacaggtgcaactgctggaatctggcggcggactggtgcagcctggcggatctctgagactgagctgtgccgccagcggcttcaccttcagcagccacggaatgcactgggtgcgccaggcccctggaaagggactggaatgggtgtccgtgatctccggcagcggcagcaataccggctacgccgatagcgtgaagggccggttcaccatcagccgggacaacagcaagaacaccctgtacctccagatgaacagcctgcgggccgaggacaccgccgtgtactattgtgccagacagtggggcagctacgccttcgattcttggggccagggcaccctcgtgaccgtgtcatctacgcgtatccagaaccctgatcctgccgtgtaccagctgcgggatagcaagagcagcgacaagagcgtgtgtctgttcaccgacttcgacagccagaccaacgtgtcccagagcaaggactccgacgtgtacatcaccgataagtgcgtgctggacatgcggagcatggacttcaagagcaactccgccgtggcctggtccaacaagtccgatttcgcctgcgccaacgccttcaacaacagcattatccccgaggacacattcttcccaagccccgagagcagcgactccaccgaccacgtgaagcccaaagagacagagaacaccaagcagcccagcaagagctgccacaagcccaaggccatcgtgcacaccgagaaagtgaacatgatgagcctgaccgtgctgggcctgcggatgctgttcgccaaaaccgtggccgtgaacttcctgctgaccgccaagctgttcttcctc

SEQ ID NO: 7074 - DNA, 2196 bp, synthetic construct
  source 1..2196: mol_type = other DNA
atggccttaccagtgaccgccttgctcctgccgctggccttgctgctccacgccgccaggccggacatcgtgatgagccagagccctagcagcctggccgtgtccgtgggcgagaaagtgaccatgagctgcaagagcagccagtccctgctgcacagcagcaaccagaagaactacctggcctggtatcagcagaagcccggccagtcccccaaggtgctgatctactgggccagcaccagagaaagcggcgtgcccgatagattcaccggcagcggctctggcaccgacttcaccctgaccatcaccagcgtgaagtccgaggacctggctgtgtactactgccagcagtattacagctacccctggaccttcggcggaggcacccggctggaaatcaaaagactcgaggacctgaagaacgtgttcccacctgaggtggccgtgttcgagcctagcgaggccgagatcagccacacccagaaagccaccctcgtgtgcctggctaccggcttctaccccgaccatgtggaactgtcttggtgggtcaacggcaaagaggtgcacagcggcgtgtgtaccgacccccagccactgaaagaacagcccgccctgaacgacagccggtactgcctgagcagcagactgagagtgtccgccaccttctggcagaacccccggaaccacttcagatgccaggtgcagttctacggcctgagcgagaacgacgagtggacccaggacagagccaagcccgtgacccagatcgtgtctgccgaagcctggggcagagccgatgatgtgattaagatccactggcaggaaaagaagtccaacaccatcctgggcagccaggaaggcaacaccatgaagaccaacgacacctacatgaagttcagctggctgaccgtgcccgagaagtccctggacaaagaacacagatgcatcgtgcggcacgaaaacaacaagaacggcgtggaccaggaaatcatcttcccacccatcaagaccgatgtgattacaatggaccccaaggacaactgctccaaggacgccaacgataccctgctgctccagctgaccaacaccagcgcctactacatgtacttgttgctgctgctgaagtccgtggtgtacttcgccatcatcacatgctgcctgctgcggagaaccgccttctgctgcaacggcgagaagtctagggccaagcgatctggatctggagcaacaaacttctcactactcaaacaagcaggtgacgtggaggagaatcccgggcctactagtatggactggatttggcgcatccttttccttgtcggcgctgctaccggcgcgcattccttcgaagaagtgcaactccagcagagcgtggccgagcttgtgaagcctggcgcttccgtgaagatgtcctgcaaggtgtccggctacaccctgacagaccacaccatccactggatgaagcagcggcctgagcagggcctggaatggatcggctacatctaccccagggacggcatcaccggctacaacgagaagttcaagggcaaggccacactgaccgccgacaccagcagcagcacagcctacatgcaactgaacagcctgaccagcgaggacagcgccgtgtacttctgtgccagatggggctacagctacagaaactacgcctactactacgactactggggccagggcacaaccctgaccgtgtctagtacgcgtatccagaaccctgatcctgccgtgtaccagctgcgggatagcaagagcagcgacaagagcgtgtgtctgttcaccgacttcgacagccagaccaacgtgtcccagagcaaggactccgacgtgtacatcaccgataagtgcgtgctggacatgcggagcatggacttcaagagcaactccgccgtggcctggtccaacaagtccgatttcgcctgcgccaacgccttcaacaacagcattatccccgaggacacattcttcccaagccccgagagcagcgactccaccgaccacgtgaagcccaaagagacagagaacaccaagcagcccagcaagagctgccacaagcccaaggccatcgtgcacaccgagaaagtgaacatgatgagcctgaccgtgctgggcctgcggatgctgttcgccaaaaccgtggccgtgaacttcctgctgaccgccaagctgttcttcctc

SEQ ID NO: 7075 - DNA, 2187 bp, synthetic construct
  source 1..2187: mol_type = other DNA
atggccttaccagtgaccgccttgctcctgccgctggccttgctgctccacgccgccaggccggagatcgtgctgacacagagccctggcaccctgagcctgtctccaggcgaaagagccacactgagctgtcgggccagccagagcgtgtccagctcttacctggcctggtatcagcagaagcccggccaggctccccggctgctgatctacggaacaagcagcagagccaccggcatccccgacagattttctggcagcggctccggcaccgacttcaccctgacaatcagcagactggaacccgaggacttcgccgtgtactactgccagcagtacggcagcagccccttcacctttggcggaggcaccaaggtggaaatcaagagactcgaggacctgaagaacgtgttcccacctgaggtggccgtgttcgagcctagcgaggccgagatcagccacacccagaaagccaccctcgtgtgcctggctaccggcttctaccccgaccatgtggaactgtcttggtgggtcaacggcaaagaggtgcacagcggcgtgtgtaccgacccccagccactgaaagaacagcccgccctgaacgacagccggtactgcctgagcagcagactgagagtgtccgccaccttctggcagaacccccggaaccacttcagatgccaggtgcagttctacggcctgagcgagaacgacgagtggacccaggacagagccaagcccgtgacccagatcgtgtctgccgaagcctggggcagagccgatgatgtgattaagatccactggcaggaaaagaagtccaacaccatcctgggcagccaggaaggcaacaccatgaagaccaacgacacctacatgaagttcagctggctgaccgtgcccgagaagtccctggacaaagaacacagatgcatcgtgcggcacgaaaacaacaagaacggcgtggaccaggaaatcatcttcccacccatcaagaccgatgtgattacaatggaccccaaggacaactgctccaaggacgccaacgataccctgctgctccagctgaccaacaccagcgcctactacatgtacttgttgctgctgctgaagtccgtggtgtacttcgccatcatcacatgctgcctgctgcggagaaccgccttctgctgcaacggcgagaagtctagggccaagcgatctggatctggagcaacaaacttctcactactcaaacaagcaggtgacgtggaggagaatcccgggcctactagtatggactggatttggcgcatccttttccttgtcggcgctgctaccggcgcgcattccttcgaacaggtgcaactccaggaatctggccccggactggctaagcccagcgagacactgagcctgacctgtaccgtgtccggcgacagcatcaccagctactactggtcctggatcagacagccccctggcaagggcctggaatggatcggctacatctactacagcggcagcaccaactacaaccccagcctgaagtccagagtgaccatcagcgtggacaccagcaagaaccagttctccctgaagctgagcagcgtgacagccgccgacaccgccgtgtattattgcgccagagatcagcggagaatcgccgctgccggcacccacttttacggcatggatgtgtggggccagggcaccaccgtgaccgtgtcatctacgcgtatccagaaccctgatcctgccgtgtaccagctgcgggatagcaagagcagcgacaagagcgtgtgtctgttcaccgacttcgacagccagaccaacgtgtcccagagcaaggactccgacgtgtacatcaccgataagtgcgtgctggacatgcggagcatggacttcaagagcaactccgccgtggcctggtccaacaagtccgatttcgcctgcgccaacgccttcaacaacagcattatccccgaggacacattcttcccaagccccgagagcagcgactccaccgaccacgtgaagcccaaagagacagagaacaccaagcagcccagcaagagctgccacaagcccaaggccatcgtgcacaccgagaaagtgaacatgatgagcctgaccgtgctgggcctgcggatgctgttcgccaaaaccgtggccgtgaacttcctgctgaccgccaagctgttcttcctc

SEQ ID NO: 7076 - DNA, 2163 bp, synthetic construct
  source 1..2163: mol_type = other DNA
atggccttaccagtgaccgccttgctcctgccgctggccttgctgctccacgccgccaggccggacatcctgctgacccagagccccgtgatcctgtccgtgtctcctggcgagagagtgtccttcagctgtcgggccagccagagcatcggcaccaacatccactggtatcagcagcggaccaacggcagccccagactgctgattaagtacgccagcgagtccatcagcggcatccccagcagattttccggcagcggctccggcaccgacttcaccctgagcatcaacagcgtggaaagcgaggacattgccgactactactgccagcagaacaacaactggcccaccaccttcggagccggcaccaagctggaactgaagctcgaggacctgaagaacgtgttcccacctgaggtggccgtgttcgagcctagcgaggccgagatcagccacacccagaaagccaccctcgtgtgcctggctaccggcttctaccccgaccatgtggaactgtcttggtgggtcaacggcaaagaggtgcacagcggcgtgtgtaccgacccccagccactgaaagaacagcccgccctgaacgacagccggtactgcctgagcagcagactgagagtgtccgccaccttctggcagaacccccggaaccacttcagatgccaggtgcagttctacggcctgagcgagaacgacgagtggacccaggacagagccaagcccgtgacccagatcgtgtctgccgaagcctggggcagagccgatgatgtgattaagatccactggcaggaaaagaagtccaacaccatcctgggcagccaggaaggcaacaccatgaagaccaacgacacctacatgaagttcagctggctgaccgtgcccgagaagtccctggacaaagaacacagatgcatcgtgcggcacgaaaacaacaagaacggcgtggaccaggaaatcatcttcccacccatcaagaccgatgtgattacaatggaccccaaggacaactgctccaaggacgccaacgataccctgctgctccagctgaccaacaccagcgcctactacatgtacttgttgctgctgctgaagtccgtggtgtacttcgccatcatcacatgctgcctgctgcggagaaccgccttctgctgcaacggcgagaagtctagggccaagcgatctggatctggagcaacaaacttctcactactcaaacaagcaggtgacgtggaggagaatcccgggcctactagtatggactggatttggcgcatccttttccttgtcggcgctgctaccggcgcgcattccttcgaacaggtgcagctgaagcagagcggacctggcctggtgcagcctagccagagcctgtccatcacctgtaccgtgtccggcttcagcctgaccaactacggcgtgcactgggtgcgccagagccctggaaaaggactggaatggctgggagtgatttggagcggcggcaacaccgactacaacacccccttcaccagcagactgtctatcaacaaggacaacagcaagagccaggtgttcttcaagatgaacagcctccagagcaacgacaccgccatctactactgtgctagagccctgacctactatgactacgagttcgcctactggggccagggcacactcgtgacagtgtctgctacgcgtatccagaaccctgatcctgccgtgtaccagctgcgggatagcaagagcagcgacaagagcgtgtgtctgttcaccgacttcgacagccagaccaacgtgtcccagagcaaggactccgacgtgtacatcaccgataagtgcgtgctggacatgcggagcatggacttcaagagcaactccgccgtggcctggtccaacaagtccgatttcgcctgcgccaacgccttcaacaacagcattatccccgaggacacattcttcccaagccccgagagcagcgactccaccgaccacgtgaagcccaaagagacagagaacaccaagcagcccagcaagagctgccacaagcccaaggccatcgtgcacaccgagaaagtgaacatgatgagcctgaccgtgctgggcctgcggatgctgttcgccaaaaccgtggccgtgaacttcctgctgaccgccaagctgttcttcctc

SEQ ID NO: 7077 - DNA, 2142 bp, synthetic construct
  source 1..2142: mol_type = other DNA
atggccttaccagtgaccgccttgctcctgccgctggccttgctgctccacgccgccaggccgatgacccagagccccaagttcctgctggtgtctgccggcgacagagtgaccctgacatgcaaggccagccagagcgtgaacaacgacgtgtactggtatcagcaggaacccggccagtcccccaagctgctgatctactgggccagcaccagagaaagcggcgtgcccgatagattcaccggcagcggctctggcaccgacttcaccctgacaatcagcagcgtgcaggccgaggacctggccgtgtactactgcaagcagagctacaacctgtacaccttcggcggaggcaccaagctggaaatcaagagactcgaggacctgaagaacgtgttcccacctgaggtggccgtgttcgagcctagcgaggccgagatcagccacacccagaaagccaccctcgtgtgcctggctaccggcttctaccccgaccatgtggaactgtcttggtgggtcaacggcaaagaggtgcacagcggcgtgtgtaccgacccccagccactgaaagaacagcccgccctgaacgacagccggtactgcctgagcagcagactgagagtgtccgccaccttctggcagaacccccggaaccacttcagatgccaggtgcagttctacggcctgagcgagaacgacgagtggacccaggacagagccaagcccgtgacccagatcgtgtctgccgaagcctggggcagagccgatgatgtgattaagatccactggcaggaaaagaagtccaacaccatcctgggcagccaggaaggcaacaccatgaagaccaacgacacctacatgaagttcagctggctgaccgtgcccgagaagtccctggacaaagaacacagatgcatcgtgcggcacgaaaacaacaagaacggcgtggaccaggaaatcatcttcccacccatcaagaccgatgtgattacaatggaccccaaggacaactgctccaaggacgccaacgataccctgctgctccagctgaccaacaccagcgcctactacatgtacttgttgctgctgctgaagtccgtggtgtacttcgccatcatcacatgctgcctgctgcggagaaccgccttctgctgcaacggcgagaagtctagggccaagcgatctggatctggagcaacaaacttctcactactcaaacaagcaggtgacgtggaggagaatcccgggcctactagtatggactggatttggcgcatccttttccttgtcggcgctgctaccggcgcgcattccttcgaagaatctggaagaggactggtgcagcctggcggcagcagaaagctgtcttgtgccgccagcggcttcaccttcagcaccagcggaatgcactgggtgcgccaggcccctgagaagggactggaatgggtggcctacatcagctccggcagcaccaccatctaccacgccgataccgtgaagggccggttcaccatcagccgggacaaccccaagaataccctgttcctccagatgaccagcctgcggagcgaggacaccgccatgtactattgctgcgccagaagcggccagttcggcaactacttcgactactggggccagggcaccaccctgaccgtgtcatctacgcgtatccagaaccctgatcctgccgtgtaccagctgcgggatagcaagagcagcgacaagagcgtgtgtctgttcaccgacttcgacagccagaccaacgtgtcccagagcaaggactccgacgtgtacatcaccgataagtgcgtgctggacatgcggagcatggacttcaagagcaactccgccgtggcctggtccaacaagtccgatttcgcctgcgccaacgccttcaacaacagcattatccccgaggacacattcttcccaagccccgagagcagcgactccaccgaccacgtgaagcccaaagagacagagaacaccaagcagcccagcaagagctgccacaagcccaaggccatcgtgcacaccgagaaagtgaacatgatgagcctgaccgtgctgggcctgcggatgctgttcgccaaaaccgtggccgtgaacttcctgctgaccgccaagctgttcttcctc

SEQ ID NO: 7078 - DNA, 2157 bp, synthetic construct
  source 1..2157: mol_type = other DNA
atggccttaccagtgaccgccttgctcctgccgctggccttgctgctccacgccgccaggccgcagagcccatctagcctggctgtgtctgccggcgagaaagtgaccatgagctgcaagagcagccagagcctgctgaacagccggacccggaagaactacctggcctggtatcagcagaagcccggccagagccccaagctgctgatctactgggccagcaccagagaaagcggcgtgcccgatagattcaccggctctggcagcggcaccgacttcaccctgacaatcagcagcgtgcaggccgaggacctggccgtgtactactgcaagcagagcaacctgtacaccttcggcggaggcaccaagctggaaatcaagctcgaggacctgaagaacgtgttcccacctgaggtggccgtgttcgagcctagcgaggccgagatcagccacacccagaaagccaccctcgtgtgcctggctaccggcttctaccccgaccatgtggaactgtcttggtgggtcaacggcaaagaggtgcacagcggcgtgtgtaccgacccccagccactgaaagaacagcccgccctgaacgacagccggtactgcctgagcagcagactgagagtgtccgccaccttctggcagaacccccggaaccacttcagatgccaggtgcagttctacggcctgagcgagaacgacgagtggacccaggacagagccaagcccgtgacccagatcgtgtctgccgaagcctggggcagagccgatgatgtgattaagatccactggcaggaaaagaagtccaacaccatcctgggcagccaggaaggcaacaccatgaagaccaacgacacctacatgaagttcagctggctgaccgtgcccgagaagtccctggacaaagaacacagatgcatcgtgcggcacgaaaacaacaagaacggcgtggaccaggaaatcatcttcccacccatcaagaccgatgtgattacaatggaccccaaggacaactgctccaaggacgccaacgataccctgctgctccagctgaccaacaccagcgcctactacatgtacttgttgctgctgctgaagtccgtggtgtacttcgccatcatcacatgctgcctgctgcggagaaccgccttctgctgcaacggcgagaagtctagggccaagcgatctggatctggagcaacaaacttctcactactcaaacaagcaggtgacgtggaggagaatcccgggcctactagtatggactggatttggcgcatccttttccttgtcggcgctgctaccggcgcgcattccttcgaacaggtgcagctggaagagtctggacccgagcttgtgaagcctggggccagcgtgaagctgtcctgtaaagccagcggctacaccttcaccgagtacatcatccactgggtcaagcagcggagcggccagggcctggaatggatcggctggttttaccctggctccggcagcatcaagtacaacgagaagttcaaggacaaggccaccctgaccgccgacaagtccagcagcaccgtgtacatggaactgagcggcctgaccagcgaggacagcgccgtgtatttctgcgccagacacgacggctacagctacttcgactattggggccagggcaccacactgaccgtgtcctctacgcgtatccagaaccctgatcctgccgtgtaccagctgcgggatagcaagagcagcgacaagagcgtgtgtctgttcaccgacttcgacagccagaccaacgtgtcccagagcaaggactccgacgtgtacatcaccgataagtgcgtgctggacatgcggagcatggacttcaagagcaactccgccgtggcctggtccaacaagtccgatttcgcctgcgccaacgccttcaacaacagcattatccccgaggacacattcttcccaagccccgagagcagcgactccaccgaccacgtgaagcccaaagagacagagaacaccaagcagcccagcaagagctgccacaagcccaaggccatcgtgcacaccgagaaagtgaacatgatgagcctgaccgtgctgggcctgcggatgctgttcgccaaaaccgtggccgtgaacttcctgctgaccgccaagctgttcttcctc

SEQ ID NO: 7079 - DNA, 2166 bp, synthetic construct
  source 1..2166: mol_type = other DNA
atggccttaccagtgaccgccttgctcctgccgctggccttgctgctccacgccgccaggccggacatccagatgacccagagccccagcagcctgtctgcctctctgggcgagagagtgtccctgacctgtcgggccacacaggaactgagcggctacctgtcttggctgcagcagaagcccgacggcaccatcaagcggctgatctacgccgccagcaccctggatagcggcgtgcccaagagattcagcggcaacagaagcggcagcgactacagcctgaccatcagctccctggaaagcgaggacttcgccgactactactgcctgcagtacgccatctacccctacaccttcggcggaggcaccaagctggaaatcaagctcgaggacctgaagaacgtgttcccacctgaggtggccgtgttcgagcctagcgaggccgagatcagccacacccagaaagccaccctcgtgtgcctggctaccggcttctaccccgaccatgtggaactgtcttggtgggtcaacggcaaagaggtgcacagcggcgtgtgtaccgacccccagccactgaaagaacagcccgccctgaacgacagccggtactgcctgagcagcagactgagagtgtccgccaccttctggcagaacccccggaaccacttcagatgccaggtgcagttctacggcctgagcgagaacgacgagtggacccaggacagagccaagcccgtgacccagatcgtgtctgccgaagcctggggcagagccgatgatgtgattaagatccactggcaggaaaagaagtccaacaccatcctgggcagccaggaaggcaacaccatgaagaccaacgacacctacatgaagttcagctggctgaccgtgcccgagaagtccctggacaaagaacacagatgcatcgtgcggcacgaaaacaacaagaacggcgtggaccaggaaatcatcttcccacccatcaagaccgatgtgattacaatggaccccaaggacaactgctccaaggacgccaacgataccctgctgctccagctgaccaacaccagcgcctactacatgtacttgttgctgctgctgaagtccgtggtgtacttcgccatcatcacatgctgcctgctgcggagaaccgccttctgctgcaacggcgagaagtctagggccaagcgatctggatctggagcaacaaacttctcactactcaaacaagcaggtgacgtggaggagaatcccgggcctactagtatggactggatttggcgcatccttttccttgtcggcgctgctaccggcgcgcattccttcgaagaggtgcaactgcagcagtctggccccgagcttgtgaagcctggcgcctccgtgaagatgagctgcaaggccagcggctacacctttaccagctacttcatccactgggtcaagcagaaacccggccagggcctggaatggatcggcttcatcaacccttacaacgacggcagcaagtacaacgagaagttcaagggcaaggccaccctgaccagcgacaagagcagcagcaccgcctacatggaactgtccagcctgacatccgaggacagcgccgtgtactactgcaccagggacgacggctactacggctacgccatggactactggggccagggaacaagcgtcaccgtgtcctctacgcgtatccagaaccctgatcctgccgtgtaccagctgcgggatagcaagagcagcgacaagagcgtgtgtctgttcaccgacttcgacagccagaccaacgtgtcccagagcaaggactccgacgtgtacatcaccgataagtgcgtgctggacatgcggagcatggacttcaagagcaactccgccgtggcctggtccaacaagtccgatttcgcctgcgccaacgccttcaacaacagcattatccccgaggacacattcttcccaagccccgagagcagcgactccaccgaccacgtgaagcccaaagagacagagaacaccaagcagcccagcaagagctgccacaagcccaaggccatcgtgcacaccgagaaagtgaacatgatgagcctgaccgtgctgggcctgcggatgctgttcgccaaaaccgtggccgtgaacttcctgctgaccgccaagctgttcttcctc

SEQ ID NO: 7080 - DNA, 2181 bp, synthetic construct
  source 1..2181: mol_type = other DNA
atggccttaccagtgaccgccttgctcctgccgctggccttgctgctccacgccgccaggccggacaccatcgtgctgacacagagccctgcttccctggccgtgtccctgggacagagagccaccatctcttgcagagccagcgagagcgtggacagctacggcaacagcttcatgcactggtatcagcagaagcccggccagccccccaagctgctgatctacctggcctccaacctggaaagcggcgtgcccgccagattttctggcagcggcagcagaaccgacttcaccctgaccatcgaccccgtggaagccgatgatgccgccacctactactgccagcagaacaactacgacccctggaccttcggcggaggcaccaagctggaaatcaagctcgaggacctgaagaacgtgttcccacctgaggtggccgtgttcgagcctagcgaggccgagatcagccacacccagaaagccaccctcgtgtgcctggctaccggcttctaccccgaccatgtggaactgtcttggtgggtcaacggcaaagaggtgcacagcggcgtgtgtaccgacccccagccactgaaagaacagcccgccctgaacgacagccggtactgcctgagcagcagactgagagtgtccgccaccttctggcagaacccccggaaccacttcagatgccaggtgcagttctacggcctgagcgagaacgacgagtggacccaggacagagccaagcccgtgacccagatcgtgtctgccgaagcctggggcagagccgatgatgtgattaagatccactggcaggaaaagaagtccaacaccatcctgggcagccaggaaggcaacaccatgaagaccaacgacacctacatgaagttcagctggctgaccgtgcccgagaagtccctggacaaagaacacagatgcatcgtgcggcacgaaaacaacaagaacggcgtggaccaggaaatcatcttcccacccatcaagaccgatgtgattacaatggaccccaaggacaactgctccaaggacgccaacgataccctgctgctccagctgaccaacaccagcgcctactacatgtacttgttgctgctgctgaagtccgtggtgtacttcgccatcatcacatgctgcctgctgcggagaaccgccttctgctgcaacggcgagaagtctagggccaagcgatctggatctggagcaacaaacttctcactactcaaacaagcaggtgacgtggaggagaatcccgggcctactagtatggactggatttggcgcatccttttccttgtcggcgctgctaccggcgcgcattccttcgaagaagtgcaactccagcagagcggccctgagcttgtgaagcctggcgcttccgtgaagatgagctgcaaggccagcggctacaccttcaccagctacgtgatgcactgggtcaagcagaaacctggacagggcctggaatggatcggctacatcaacccctacaacgacggcaccaagtacaacgagaagttcaagggcaaggccaccctgacaagcgacaccagcagcagcaccgcctacatggaactgaacagcctgaccagcgaggacagcgccgtgtacttctgcgccagacccatctacttcgacaacgactacttcgattactggggccagggcaccaccctgaaggtgtcctctacgcgtatccagaaccctgatcctgccgtgtaccagctgcgggatagcaagagcagcgacaagagcgtgtgtctgttcaccgacttcgacagccagaccaacgtgtcccagagcaaggactccgacgtgtacatcaccgataagtgcgtgctggacatgcggagcatggacttcaagagcaactccgccgtggcctggtccaacaagtccgatttcgcctgcgccaacgccttcaacaacagcattatccccgaggacacattcttcccaagccccgagagcagcgactccaccgaccacgtgaagcccaaagagacagagaacaccaagcagcccagcaagagctgccacaagcccaaggccatcgtgcacaccgagaaagtgaacatgatgagcctgaccgtgctgggcctgcggatgctgttcgccaaaaccgtggccgtgaacttcctgctgaccgccaagctgttcttcctc

SEQ ID NO: 7081 - DNA, 2166 bp, synthetic construct
  source 1..2166: mol_type = other DNA
atggccttaccagtgaccgccttgctcctgccgctggccttgctgctccacgccgccaggccggacatccagatgacccagagccccagcagcctgtctgccagcgtgggcgacagagtgaccatcacatgcaaggccagccaggacgtgggaatcgccgtggcctggtatcagcagaaacccggcaaggtgcccaagctgctgatctactgggccagcaccagacacaccggcgtgcccgatagattttccggcagcggctccggcaccgacttcaccctgacaatcagctccctccagcccgaggacgtggcaacctactactgccagcagtacagcagctacccctacaccttcggccagggcaccaaggtggaaatcaagagactcgaggacctgaagaacgtgttcccacctgaggtggccgtgttcgagcctagcgaggccgagatcagccacacccagaaagccaccctcgtgtgcctggctaccggcttctaccccgaccatgtggaactgtcttggtgggtcaacggcaaagaggtgcacagcggcgtgtgtaccgacccccagccactgaaagaacagcccgccctgaacgacagccggtactgcctgagcagcagactgagagtgtccgccaccttctggcagaacccccggaaccacttcagatgccaggtgcagttctacggcctgagcgagaacgacgagtggacccaggacagagccaagcccgtgacccagatcgtgtctgccgaagcctggggcagagccgatgatgtgattaagatccactggcaggaaaagaagtccaacaccatcctgggcagccaggaaggcaacaccatgaagaccaacgacacctacatgaagttcagctggctgaccgtgcccgagaagtccctggacaaagaacacagatgcatcgtgcggcacgaaaacaacaagaacggcgtggaccaggaaatcatcttcccacccatcaagaccgatgtgattacaatggaccccaaggacaactgctccaaggacgccaacgataccctgctgctccagctgaccaacaccagcgcctactacatgtacttgttgctgctgctgaagtccgtggtgtacttcgccatcatcacatgctgcctgctgcggagaaccgccttctgctgcaacggcgagaagtctagggccaagcgatctggatctggagcaacaaacttctcactactcaaacaagcaggtgacgtggaggagaatcccgggcctactagtatggactggatttggcgcatccttttccttgtcggcgctgctaccggcgcgcattccttcgaagaagtgcaactggtggaatcaggcggcggactggtgcagcctggcggatctctgagactgagctgtgccgccagcggcttcgacttcagccggtactggatgagctgggtgcgccaggcccctggcaaaggactggaatggatcggcgagatcaaccccgacagcagcaccatcaactacgcccccagcctgaaggacaagttcatcatcagccgggacaacgccaagaacagcctgtacctccagatgaactccctgcgggccgaggacaccgccgtgtactattgcgccagacccgacggcaactactggtacttcgacgtgtggggccagggaaccctcgtgaccgtgtcatctacgcgtatccagaaccctgatcctgccgtgtaccagctgcgggatagcaagagcagcgacaagagcgtgtgtctgttcaccgacttcgacagccagaccaacgtgtcccagagcaaggactccgacgtgtacatcaccgataagtgcgtgctggacatgcggagcatggacttcaagagcaactccgccgtggcctggtccaacaagtccgatttcgcctgcgccaacgccttcaacaacagcattatccccgaggacacattcttcccaagccccgagagcagcgactccaccgaccacgtgaagcccaaagagacagagaacaccaagcagcccagcaagagctgccacaagcccaaggccatcgtgcacaccgagaaagtgaacatgatgagcctgaccgtgctgggcctgcggatgctgttcgccaaaaccgtggccgtgaacttcctgctgaccgccaagctgttcttcctc

SEQ ID NO: 7082 - DNA, 2166 bp, synthetic construct
  source 1..2166: mol_type = other DNA
atggccttaccagtgaccgccttgctcctgccgctggccttgctgctccacgccgccaggccggacatcgtgatgacccagagccagaagagcatgagcaccagcgtgggcgacagagtgagcatcacctgcaaggccagccaggacgtgatcaccggcgtggcctggtaccagcagaagcccggccagagccccaagctgctgatctacagcgccagctacagatacaccggcgtgcccgacagattcaccggcagcggcagcggcaccgacttcaccttcaccatcagcaacgtgcaggccgaggacctggccgtgtactactgccagcagcactacagcacccccctgaccttcggcgccggcaccaagctggagctgaagctcgaggacctgaagaacgtgttcccacctgaggtggccgtgttcgagcctagcgaggccgagatcagccacacccagaaagccaccctcgtgtgcctggctaccggcttctaccccgaccatgtggaactgtcttggtgggtcaacggcaaagaggtgcacagcggcgtgtgtaccgacccccagccactgaaagaacagcccgccctgaacgacagccggtactgcctgagcagcagactgagagtgtccgccaccttctggcagaacccccggaaccacttcagatgccaggtgcagttctacggcctgagcgagaacgacgagtggacccaggacagagccaagcccgtgacccagatcgtgtctgccgaagcctggggcagagccgatgatgtgattaagatccactggcaggaaaagaagtccaacaccatcctgggcagccaggaaggcaacaccatgaagaccaacgacacctacatgaagttcagctggctgaccgtgcccgagaagtccctggacaaagaacacagatgcatcgtgcggcacgaaaacaacaagaacggcgtggaccaggaaatcatcttcccacccatcaagaccgatgtgattacaatggaccccaaggacaactgctccaaggacgccaacgataccctgctgctccagctgaccaacaccagcgcctactacatgtacttgttgctgctgctgaagtccgtggtgtacttcgccatcatcacatgctgcctgctgcggagaaccgccttctgctgcaacggcgagaagtctagggccaagcgatctggatctggagcaacaaacttctcactactcaaacaagcaggtgacgtggaggagaatcccgggcctactagtatggactggatttggcgcatccttttccttgtcggcgctgctaccggcgcgcattccttcgaacaggtgcagctgcagcagcccggcgccgagctggtgagacccggcgccagcgtgaagctgagctgcaaggccagcggctacagcttcaccacctactggatgaactgggtgaagcagagacccggccagggcctggagtggatcggcatgatccaccccagcgacagcgagaccagactgaaccagaagttcaaggacaaggccaccctgaccgtggacaagagcagcagcaccgcctacatgcagctgagcagccccaccagcgaggacagcgccgtgtactactgcgccagaagcaccatgatcgccaccagagccatggactactggggccagggcaccagcgtgaccgtgagcagcacgcgtatccagaaccctgatcctgccgtgtaccagctgcgggatagcaagagcagcgacaagagcgtgtgtctgttcaccgacttcgacagccagaccaacgtgtcccagagcaaggactccgacgtgtacatcaccgataagtgcgtgctggacatgcggagcatggacttcaagagcaactccgccgtggcctggtccaacaagtccgatttcgcctgcgccaacgccttcaacaacagcattatccccgaggacacattcttcccaagccccgagagcagcgactccaccgaccacgtgaagcccaaagagacagagaacaccaagcagcccagcaagagctgccacaagcccaaggccatcgtgcacaccgagaaagtgaacatgatgagcctgaccgtgctgggcctgcggatgctgttcgccaaaaccgtggccgtgaacttcctgctgaccgccaagctgttcttcctc

SEQ ID NO: 7083 - DNA, 2184 bp, synthetic construct
  source 1..2184: mol_type = other DNA
atggccttaccagtgaccgccttgctcctgccgctggccttgctgctccacgccgccaggccgcagagcgtgctgacacagcctccatccgtgtctggcgctccaggccagagagtgaccatctcctgtaccggcagcggcagcaacatcggagccccctacgacgtgtcctggtatcagcaactgcctggcaccgcccccaagctgctgatctaccacaacaacaagcggcccagcggcgtgcccgatagattcagcggctctaagagcggcaccagcgccagcctggctatcactggactccaggccgaggacgaggccgactactactgtgccacagtggaagccggcctgagcggctctgtgtttggcggcggaacaaagctgaccgtgctgggagctctcgaggacctgaagaacgtgttcccacctgaggtggccgtgttcgagcctagcgaggccgagatcagccacacccagaaagccaccctcgtgtgcctggctaccggcttctaccccgaccatgtggaactgtcttggtgggtcaacggcaaagaggtgcacagcggcgtgtgtaccgacccccagccactgaaagaacagcccgccctgaacgacagccggtactgcctgagcagcagactgagagtgtccgccaccttctggcagaacccccggaaccacttcagatgccaggtgcagttctacggcctgagcgagaacgacgagtggacccaggacagagccaagcccgtgacccagatcgtgtctgccgaagcctggggcagagccgatgatgtgattaagatccactggcaggaaaagaagtccaacaccatcctgggcagccaggaaggcaacaccatgaagaccaacgacacctacatgaagttcagctggctgaccgtgcccgagaagtccctggacaaagaacacagatgcatcgtgcggcacgaaaacaacaagaacggcgtggaccaggaaatcatcttcccacccatcaagaccgatgtgattacaatggaccccaaggacaactgctccaaggacgccaacgataccctgctgctccagctgaccaacaccagcgcctactacatgtacttgttgctgctgctgaagtccgtggtgtacttcgccatcatcacatgctgcctgctgcggagaaccgccttctgctgcaacggcgagaagtctagggccaagcgatctggatctggagcaacaaacttctcactactcaaacaagcaggtgacgtggaggagaatcccgggcctactagtatggactggatttggcgcatccttttccttgtcggcgctgctaccggcgcgcattccttcgaacaggtgcaactggtgcagagcggagccgaagtgaagaaacctggggccagcgtgaaggtgtcctgcaaggtgtccggctacaccctgaccgagctgagcattcactgggtgcgccaggcccctggcaagggactggaatggatgggcggcttcgaccccgaagagaacgagatcgtgtacgcccagcggttccagggcagagtgacaatgaccgaggacaccagcaccgacaccgcctacatggaactgagcagcctgcggagcgaggataccgccgtgtactactgcgccatcgtgggcagcttcagccctctgacactgggcctgtggggccagggaactatggtcaccgtgtccagcacgcgtatccagaaccctgatcctgccgtgtaccagctgcgggatagcaagagcagcgacaagagcgtgtgtctgttcaccgacttcgacagccagaccaacgtgtcccagagcaaggactccgacgtgtacatcaccgataagtgcgtgctggacatgcggagcatggacttcaagagcaactccgccgtggcctggtccaacaagtccgatttcgcctgcgccaacgccttcaacaacagcattatccccgaggacacattcttcccaagccccgagagcagcgactccaccgaccacgtgaagcccaaagagacagagaacaccaagcagcccagcaagagctgccacaagcccaaggccatcgtgcacaccgagaaagtgaacatgatgagcctgaccgtgctgggcctgcggatgctgttcgccaaaaccgtggccgtgaacttcctgctgaccgccaagctgttcttcctc

SEQ ID NO: 7084 - DNA, 2184 bp, synthetic construct
  source 1..2184: mol_type = other DNA
atggccttaccagtgaccgccttgctcctgccgctggccttgctgctccacgccgccaggccgcagagcgtgctgacacagcctccatccgtgtctggcgctccaggccagagagtgaccatctcctgtaccggcagcggcagcaacatcggagccccctacgacgtgtcctggtatcagcaactgcctggcaccgcccccaagctgctgatctaccacaacaacaagcggcccagcggcgtgcccgatagattcagcggctctaagagcggcaccagcgccagcctggctatcactggactccaggccgaggacgaggccgactactactgccagagctacgacagcagcagcatcagcaccatcttcggcggaggcaccaagctgacagtgctgggagctctcgaggacctgaagaacgtgttcccacctgaggtggccgtgttcgagcctagcgaggccgagatcagccacacccagaaagccaccctcgtgtgcctggctaccggcttctaccccgaccatgtggaactgtcttggtgggtcaacggcaaagaggtgcacagcggcgtgtgtaccgacccccagccactgaaagaacagcccgccctgaacgacagccggtactgcctgagcagcagactgagagtgtccgccaccttctggcagaacccccggaaccacttcagatgccaggtgcagttctacggcctgagcgagaacgacgagtggacccaggacagagccaagcccgtgacccagatcgtgtctgccgaagcctggggcagagccgatgatgtgattaagatccactggcaggaaaagaagtccaacaccatcctgggcagccaggaaggcaacaccatgaagaccaacgacacctacatgaagttcagctggctgaccgtgcccgagaagtccctggacaaagaacacagatgcatcgtgcggcacgaaaacaacaagaacggcgtggaccaggaaatcatcttcccacccatcaagaccgatgtgattacaatggaccccaaggacaactgctccaaggacgccaacgataccctgctgctccagctgaccaacaccagcgcctactacatgtacttgttgctgctgctgaagtccgtggtgtacttcgccatcatcacatgctgcctgctgcggagaaccgccttctgctgcaacggcgagaagtctagggccaagcgatctggatctggagcaacaaacttctcactactcaaacaagcaggtgacgtggaggagaatcccgggcctactagtatggactggatttggcgcatccttttccttgtcggcgctgctaccggcgcgcattccttcgaacaggtgcaactggtgcagagcggagccgaagtgaagaaacctggggccagcgtgaaggtgtcctgcaaggtgtccggctacaccctgaccgagctgagcattcactgggtgcgccaggcccctggcaagggactggaatggatgggcggcttcgaccccgaagagaacgagatcgtgtacgcccagcggttccagggcagagtgacaatgaccgaggacaccagcaccgacaccgcctacatggaactgagcagcctgcggagcgaggataccgccgtgtactactgtgccatcgtgggcagcttcagcggaatcgcctacagaccttggggccagggcacaatggtcaccgtgtctagcacgcgtatccagaaccctgatcctgccgtgtaccagctgcgggatagcaagagcagcgacaagagcgtgtgtctgttcaccgacttcgacagccagaccaacgtgtcccagagcaaggactccgacgtgtacatcaccgataagtgcgtgctggacatgcggagcatggacttcaagagcaactccgccgtggcctggtccaacaagtccgatttcgcctgcgccaacgccttcaacaacagcattatccccgaggacacattcttcccaagccccgagagcagcgactccaccgaccacgtgaagcccaaagagacagagaacaccaagcagcccagcaagagctgccacaagcccaaggccatcgtgcacaccgagaaagtgaacatgatgagcctgaccgtgctgggcctgcggatgctgttcgccaaaaccgtggccgtgaacttcctgctgaccgccaagctgttcttcctc

SEQ ID NO: 7085 - DNA, 2148 bp, synthetic construct
  source 1..2148: mol_type = other DNA
atggccttaccagtgaccgccttgctcctgccgctggccttgctgctccacgccgccaggccggacatccagatgacccagagccccagcagcctgtctgccagcgtgggcgacagagtgaccatcacctgtagagccagccagggcatcagaaacaacctggcctggtatcagcagaagcccggcaaggcccccaagcggctgatctacgccgccagcaatctccagagcggcgtgcccagcagattcacaggctctggcagcggcaccgagttcaccctgatcgtgtctagcctccagcccgaggacttcgccacctactactgcctccagcaccacagctaccccctgacatctggcggaggcaccaaggtggaactcgaggacctgaagaacgtgttcccacctgaggtggccgtgttcgagcctagcgaggccgagatcagccacacccagaaagccaccctcgtgtgcctggctaccggcttctaccccgaccatgtggaactgtcttggtgggtcaacggcaaagaggtgcacagcggcgtgtgtaccgacccccagccactgaaagaacagcccgccctgaacgacagccggtactgcctgagcagcagactgagagtgtccgccaccttctggcagaacccccggaaccacttcagatgccaggtgcagttctacggcctgagcgagaacgacgagtggacccaggacagagccaagcccgtgacccagatcgtgtctgccgaagcctggggcagagccgatgatgtgattaagatccactggcaggaaaagaagtccaacaccatcctgggcagccaggaaggcaacaccatgaagaccaacgacacctacatgaagttcagctggctgaccgtgcccgagaagtccctggacaaagaacacagatgcatcgtgcggcacgaaaacaacaagaacggcgtggaccaggaaatcatcttcccacccatcaagaccgatgtgattacaatggaccccaaggacaactgctccaaggacgccaacgataccctgctgctccagctgaccaacaccagcgcctactacatgtacttgttgctgctgctgaagtccgtggtgtacttcgccatcatcacatgctgcctgctgcggagaaccgccttctgctgcaacggcgagaagtctagggccaagcgatctggatctggagcaacaaacttctcactactcaaacaagcaggtgacgtggaggagaatcccgggcctactagtatggactggatttggcgcatccttttccttgtcggcgctgctaccggcgcgcattccttcgaagaggtgcaggtgctggaaagtggcggaggactggtgcagcctggcggctctctgagactgtcttgtgccgccagcggcttcaccttcagcagctacgccatgagctgggtgcgccaggcccctggaaaaggactggaatgggtgtccgccatcagcggctctggcgggtctaccaactacgccgatagcgtgaagggccggttcaccatcagccgggacaacagcaagaacaccctgtacctccagatgaacagcctgcgggccgaggacaccgccgtgtattattgtgccggcagcagcgggtggagcgagtattggggacagggcaccctcgtgaccgtgtcctctacgcgtatccagaaccctgatcctgccgtgtaccagctgcgggatagcaagagcagcgacaagagcgtgtgtctgttcaccgacttcgacagccagaccaacgtgtcccagagcaaggactccgacgtgtacatcaccgataagtgcgtgctggacatgcggagcatggacttcaagagcaactccgccgtggcctggtccaacaagtccgatttcgcctgcgccaacgccttcaacaacagcattatccccgaggacacattcttcccaagccccgagagcagcgactccaccgaccacgtgaagcccaaagagacagagaacaccaagcagcccagcaagagctgccacaagcccaaggccatcgtgcacaccgagaaagtgaacatgatgagcctgaccgtgctgggcctgcggatgctgttcgccaaaaccgtggccgtgaacttcctgctgaccgccaagctgttcttcctc

SEQ ID NO: 7086 - DNA, 2166 bp, synthetic construct
  source 1..2166: mol_type = other DNA
atggccttaccagtgaccgccttgctcctgccgctggccttgctgctccacgccgccaggccggacgagatccagctggtgcagagcggagccgaagtgaagaagcctggcgagagcctgcggatcagctgcaagggcagcggcttcaacatcgaggactactacatccactgggtgcgccagatgcccggcaagggcctggaatggatgggcagaatcgaccccgagaacgacgagactaagtacggccccatcttccagggccacgtgaccatcagcgccgacaccagcatcaacaccgtgtacctccagtggtccagcctgaaggccagcgacaccgccatgtactactgcgcctttagaggcggcgtgtactggggccagggcaccacagtgacagtgtctagcctcgaggacctgaagaacgtgttcccacctgaggtggccgtgttcgagcctagcgaggccgagatcagccacacccagaaagccaccctcgtgtgcctggctaccggcttctaccccgaccatgtggaactgtcttggtgggtcaacggcaaagaggtgcacagcggcgtgtgtaccgacccccagccactgaaagaacagcccgccctgaacgacagccggtactgcctgagcagcagactgagagtgtccgccaccttctggcagaacccccggaaccacttcagatgccaggtgcagttctacggcctgagcgagaacgacgagtggacccaggacagagccaagcccgtgacccagatcgtgtctgccgaagcctggggcagagccgatgatgtgattaagatccactggcaggaaaagaagtccaacaccatcctgggcagccaggaaggcaacaccatgaagaccaacgacacctacatgaagttcagctggctgaccgtgcccgagaagtccctggacaaagaacacagatgcatcgtgcggcacgaaaacaacaagaacggcgtggaccaggaaatcatcttcccacccatcaagaccgatgtgattacaatggaccccaaggacaactgctccaaggacgccaacgataccctgctgctccagctgaccaacaccagcgcctactacatgtacttgttgctgctgctgaagtccgtggtgtacttcgccatcatcacatgctgcctgctgcggagaaccgccttctgctgcaacggcgagaagtctagggccaagcgatctggatctggagcaacaaacttctcactactcaaacaagcaggtgacgtggaggagaatcccgggcctactagtatggactggatttggcgcatccttttccttgtcggcgctgctaccggcgcgcattccttcgaagatgtcgtgatgacccagagccccgacagcctggctgtgtctctgggagagagagccaccatcaactgcaagtccagccagtccctgctggacagcgacggcaagacctacctgaactggctccagcagaagcccggccagccccccaagagactgatctccctggtgtccaagctggactccggcgtgcccgatagattttccggctctggcagcggcaccgacttcaccctgacaatcagctcccttcaggccgaggacgtggccgtgtactattgctggcagggcacacacttccccggcacctttggcggaggcaccaaggtggaaatcaagacgcgtatccagaaccctgatcctgccgtgtaccagctgcgggatagcaagagcagcgacaagagcgtgtgtctgttcaccgacttcgacagccagaccaacgtgtcccagagcaaggactccgacgtgtacatcaccgataagtgcgtgctggacatgcggagcatggacttcaagagcaactccgccgtggcctggtccaacaagtccgatttcgcctgcgccaacgccttcaacaacagcattatccccgaggacacattcttcccaagccccgagagcagcgactccaccgaccacgtgaagcccaaagagacagagaacaccaagcagcccagcaagagctgccacaagcccaaggccatcgtgcacaccgagaaagtgaacatgatgagcctgaccgtgctgggcctgcggatgctgttcgccaaaaccgtggccgtgaacttcctgctgaccgccaagctgttcttcctc

SEQ ID NO: 7087 - DNA, 2187 bp, synthetic construct
  source 1..2187: mol_type = other DNA
atggccttaccagtgaccgccttgctcctgccgctggccttgctgctccacgccgccaggccggacgagcttgtgatgacccagagccccagcagcctgacagtgacagccggcgagaaagtgaccatgagctgcaagagcagccagagcctgctgaacagcggcaaccagaagaactacctgacctggtatcagcagaagcccggccagccccccaagctgctgatctactgggccagcaccagagaaagcggcgtgcccgatagattcaccggctctggcagcggcaccgacttcaccctgacaatcagcagcgtgcaggccgaggacctggccgtgtactactgccagaacgactacagctaccccctgaccttcggagccggcaccaagctggaaatcaagctcgaggacctgaagaacgtgttcccacctgaggtggccgtgttcgagcctagcgaggccgagatcagccacacccagaaagccaccctcgtgtgcctggctaccggcttctaccccgaccatgtggaactgtcttggtgggtcaacggcaaagaggtgcacagcggcgtgtgtaccgacccccagccactgaaagaacagcccgccctgaacgacagccggtactgcctgagcagcagactgagagtgtccgccaccttctggcagaacccccggaaccacttcagatgccaggtgcagttctacggcctgagcgagaacgacgagtggacccaggacagagccaagcccgtgacccagatcgtgtctgccgaagcctggggcagagccgatgatgtgattaagatccactggcaggaaaagaagtccaacaccatcctgggcagccaggaaggcaacaccatgaagaccaacgacacctacatgaagttcagctggctgaccgtgcccgagaagtccctggacaaagaacacagatgcatcgtgcggcacgaaaacaacaagaacggcgtggaccaggaaatcatcttcccacccatcaagaccgatgtgattacaatggaccccaaggacaactgctccaaggacgccaacgataccctgctgctccagctgaccaacaccagcgcctactacatgtacttgttgctgctgctgaagtccgtggtgtacttcgccatcatcacatgctgcctgctgcggagaaccgccttctgctgcaacggcgagaagtctagggccaagcgatctggatctggagcaacaaacttctcactactcaaacaagcaggtgacgtggaggagaatcccgggcctactagtatggactggatttggcgcatccttttccttgtcggcgctgctaccggcgcgcattccttcgaagaagtgcagctgctggaacagtctggcgccgaacttgtgcggcctggcaccagcgtgaagatcagctgtaaagccagcggctacgccttcaccaactactggctgggctgggtcaagcagaggcctggacacggcctggaatggatcggcgacatctttcccggctccggcaacatccactacaacgagaagttcaagggcaaggccaccctgaccgccgacaagtctagcagcaccgcctacatgcagctgtccagcctgacctttgaggacagcgccgtgtatttctgtgcccggctgcggaactgggacgagcccatggattattggggccagggcaccaccgtgaccgtgtctagtacgcgtatccagaaccctgatcctgccgtgtaccagctgcgggatagcaagagcagcgacaagagcgtgtgtctgttcaccgacttcgacagccagaccaacgtgtcccagagcaaggactccgacgtgtacatcaccgataagtgcgtgctggacatgcggagcatggacttcaagagcaactccgccgtggcctggtccaacaagtccgatttcgcctgcgccaacgccttcaacaacagcattatccccgaggacacattcttcccaagccccgagagcagcgactccaccgaccacgtgaagcccaaagagacagagaacaccaagcagcccagcaagagctgccacaagcccaaggccatcgtgcacaccgagaaagtgaacatgatgagcctgaccgtgctgggcctgcggatgctgttcgccaaaaccgtggccgtgaacttcctgctgaccgccaagctgttcttcctc

SEQ ID NO: 7088 - DNA, 2190 bp, synthetic construct
  source 1..2190: mol_type = other DNA
atggccttaccagtgaccgccttgctcctgccgctggccttgctgctccacgccgccaggccggacgagctgcagatgacccagagccctagcagcctgtctgccagcgtgggcgacagagtgaccatcacctgtagagccagccagagcatcagcagctacctgaactggtatcagcagaagcccggccagccccccaaactgctgatctactgggccagcaccagagaaagcggcgtgcccgatagattcagcggcagcgagagcggcaccaactacaccctgaccatcagctccctgcagcccgaggacttcgccacctacttttgccagcagagcgacagcctgcccatcacctttggacagggcacccggctggacattcagctcgaggacctgaagaacgtgttcccacctgaggtggccgtgttcgagcctagcgaggccgagatcagccacacccagaaagccaccctcgtgtgcctggctaccggcttctaccccgaccatgtggaactgtcttggtgggtcaacggcaaagaggtgcacagcggcgtgtgtaccgacccccagccactgaaagaacagcccgccctgaacgacagccggtactgcctgagcagcagactgagagtgtccgccaccttctggcagaacccccggaaccacttcagatgccaggtgcagttctacggcctgagcgagaacgacgagtggacccaggacagagccaagcccgtgacccagatcgtgtctgccgaagcctggggcagagccgatgatgtgattaagatccactggcaggaaaagaagtccaacaccatcctgggcagccaggaaggcaacaccatgaagaccaacgacacctacatgaagttcagctggctgaccgtgcccgagaagtccctggacaaagaacacagatgcatcgtgcggcacgaaaacaacaagaacggcgtggaccaggaaatcatcttcccacccatcaagaccgatgtgattacaatggaccccaaggacaactgctccaaggacgccaacgataccctgctgctccagctgaccaacaccagcgcctactacatgtacttgttgctgctgctgaagtccgtggtgtacttcgccatcatcacatgctgcctgctgcggagaaccgccttctgctgcaacggcgagaagtctagggccaagcgatctggatctggagcaacaaacttctcactactcaaacaagcaggtgacgtggaggagaatcccgggcctactagtatggactggatttggcgcatccttttccttgtcggcgctgctaccggcgcgcattccttcgaagaggtgcaactgctggaatctgggggcggagtggtgcagcctggcagaagcctgagactgagctgtgccgccagcggcttcaccttcagctcctacggaatgcactgggtgcgccaggcccctggcaaaggactggaatgggtggccgtgatctcctacgacggcagcaacaagtactacgccgacagcgtgaagggccggttcaccatcagccgggacaacagcaagaacaccctgtacctgcagatgaacagcctgcgggccgaggacaccgccgtgtactactgcgccaaggatatgggctggggcagcggctggcggccttactactactacggcatggacgtgtggggccagggcaccaccgtgacagtgtcatctacgcgtatccagaaccctgatcctgccgtgtaccagctgcgggatagcaagagcagcgacaagagcgtgtgtctgttcaccgacttcgacagccagaccaacgtgtcccagagcaaggactccgacgtgtacatcaccgataagtgcgtgctggacatgcggagcatggacttcaagagcaactccgccgtggcctggtccaacaagtccgatttcgcctgcgccaacgccttcaacaacagcattatccccgaggacacattcttcccaagccccgagagcagcgactccaccgaccacgtgaagcccaaagagacagagaacaccaagcagcccagcaagagctgccacaagcccaaggccatcgtgcacaccgagaaagtgaacatgatgagcctgaccgtgctgggcctgcggatgctgttcgccaaaaccgtggccgtgaacttcctgctgaccgccaagctgttcttcctc

SEQ ID NO: 7089 - DNA, 2181 bp, synthetic construct
  source 1..2181: mol_type = other DNA
atggccttaccagtgaccgccttgctcctgccgctggccttgctgctccacgccgccaggccggacgacatccaaatgacacagagtccttctagtttgagtgcgagcgtgggggacagggtgaccattacctgcagggccagccagagcataagctcataccttaattggtaccagcaaaaaccaggtaaggcccctaagctcctgatctacgcggcctcttcacttcaatctggggtcccttcccgcttcagtggctccggcagcggcaccgacttcacgctcactatatcaagtctgcagcctgaggatctcgccacctattactgtcaacaaagttattccacccctttcacctttggaccgggcacgaaagtggatattaagctcgaggacctgaagaacgtgttcccacctgaggtggccgtgttcgagcctagcgaggccgagatcagccacacccagaaagccaccctcgtgtgcctggctaccggcttctaccccgaccatgtggaactgtcttggtgggtcaacggcaaagaggtgcacagcggcgtgtgtaccgacccccagccactgaaagaacagcccgccctgaacgacagccggtactgcctgagcagcagactgagagtgtccgccaccttctggcagaacccccggaaccacttcagatgccaggtgcagttctacggcctgagcgagaacgacgagtggacccaggacagagccaagcccgtgacccagatcgtgtctgccgaagcctggggcagagccgatgatgtgattaagatccactggcaggaaaagaagtccaacaccatcctgggcagccaggaaggcaacaccatgaagaccaacgacacctacatgaagttcagctggctgaccgtgcccgagaagtccctggacaaagaacacagatgcatcgtgcggcacgaaaacaacaagaacggcgtggaccaggaaatcatcttcccacccatcaagaccgatgtgattacaatggaccccaaggacaactgctccaaggacgccaacgataccctgctgctccagctgaccaacaccagcgcctactacatgtacttgttgctgctgctgaagtccgtggtgtacttcgccatcatcacatgctgcctgctgcggagaaccgccttctgctgcaacggcgagaagtctagggccaagcgatctggatctggagcaacaaacttctcactactcaaacaagcaggtgacgtggaggagaatcccgggcctactagtatggactggatttggcgcatccttttccttgtcggcgctgctaccggcgcgcattccttcgaagtgcacgaggtccagcttgtgcagtccggggcagaggtcaagaagcctggttctagcgtaaaagtgagttgcaaagcctcaggtgggacattttcatcctacgcgatcagttgggttagacaggctcctggtcaagggctggaatggatgggcggaattattccaatcttcggaacagcgaattacgcgcagaagttccagggtagagtaaccatcactgctgacaagtccacctccaccgcatacatggaattgtctagtctccggagcgaggatacggcggtgtattattgtgctacgttcgccctgtttggcttccgcgaacaggctttcgacatctgggggcagggcacgacagtcacggttagtagtacgcgtatccagaaccctgatcctgccgtgtaccagctgcgggatagcaagagcagcgacaagagcgtgtgtctgttcaccgacttcgacagccagaccaacgtgtcccagagcaaggactccgacgtgtacatcaccgataagtgcgtgctggacatgcggagcatggacttcaagagcaactccgccgtggcctggtccaacaagtccgatttcgcctgcgccaacgccttcaacaacagcattatccccgaggacacattcttcccaagccccgagagcagcgactccaccgaccacgtgaagcccaaagagacagagaacaccaagcagcccagcaagagctgccacaagcccaaggccatcgtgcacaccgagaaagtgaacatgatgagcctgaccgtgctgggcctgcggatgctgttcgccaaaaccgtggccgtgaacttcctgctgaccgccaagctgttcttcctc

SEQ ID NO: 7090 - DNA, 2175 bp, synthetic construct
  source 1..2175: mol_type = other DNA
atggccttaccagtgaccgccttgctcctgccgctggccttgctgctccacgccgccaggccggacatcgtgctgacccagagccctctgagcctggccgtgtctctgggacagcctgccatcatcagctgcaaggccagccagagcgtgtcctttgccggcacctctctgatgcactggtatcaccagaagcccggccagcagcccagactgctgatctacagagccagcaacctggaagccggcgtgcccgatagattttccggcagcggcagcaagaccgacttcaccctgaccatcagccccgtggaagccgaagatgccgccacctactactgccagcagagcagagagtacccctacaccttcggcggaggcaccaagctggaaatcaagaggctcgaggacctgaagaacgtgttcccacctgaggtggccgtgttcgagcctagcgaggccgagatcagccacacccagaaagccaccctcgtgtgcctggctaccggcttctaccccgaccatgtggaactgtcttggtgggtcaacggcaaagaggtgcacagcggcgtgtgtaccgacccccagccactgaaagaacagcccgccctgaacgacagccggtactgcctgagcagcagactgagagtgtccgccaccttctggcagaacccccggaaccacttcagatgccaggtgcagttctacggcctgagcgagaacgacgagtggacccaggacagagccaagcccgtgacccagatcgtgtctgccgaagcctggggcagagccgatgatgtgattaagatccactggcaggaaaagaagtccaacaccatcctgggcagccaggaaggcaacaccatgaagaccaacgacacctacatgaagttcagctggctgaccgtgcccgagaagtccctggacaaagaacacagatgcatcgtgcggcacgaaaacaacaagaacggcgtggaccaggaaatcatcttcccacccatcaagaccgatgtgattacaatggaccccaaggacaactgctccaaggacgccaacgataccctgctgctccagctgaccaacaccagcgcctactacatgtacttgttgctgctgctgaagtccgtggtgtacttcgccatcatcacatgctgcctgctgcggagaaccgccttctgctgcaacggcgagaagtctagggccaagcgatctggatctggagcaacaaacttctcactactcaaacaagcaggtgacgtggaggagaatcccgggcctactagtatggactggatttggcgcatccttttccttgtcggcgctgctaccggcgcgcattccttcgaacaggtccaactggtgcagagcggagccgaggtcgtgaagcctggcgcttccgtgaagattagctgcaaagccagcggctacacctttaccggctactttatgaactgggtcaagcagagccctggccagagcctggaatggatcggcagaatccacccctacgacggcgacaccttctacaaccagaagttccagggcaaggccaccctgacagtggacaagagcagcaacaccgcccacatggaactgctgagcctgaccagcgaggacttcgccgtgtactactgcaccagatacgacggcagccgggctatggactattggggccagggcaccaccgtgaccgtgtctagtacgcgtatccagaaccctgatcctgccgtgtaccagctgcgggatagcaagagcagcgacaagagcgtgtgtctgttcaccgacttcgacagccagaccaacgtgtcccagagcaaggactccgacgtgtacatcaccgataagtgcgtgctggacatgcggagcatggacttcaagagcaactccgccgtggcctggtccaacaagtccgatttcgcctgcgccaacgccttcaacaacagcattatccccgaggacacattcttcccaagccccgagagcagcgactccaccgaccacgtgaagcccaaagagacagagaacaccaagcagcccagcaagagctgccacaagcccaaggccatcgtgcacaccgagaaagtgaacatgatgagcctgaccgtgctgggcctgcggatgctgttcgccaaaaccgtggccgtgaacttcctgctgaccgccaagctgttcttcctc

SEQ ID NO: 7091 - DNA, 2166 bp, synthetic construct
  source 1..2166: mol_type = other DNA
atggccttaccagtgaccgccttgctcctgccgctggccttgctgctccacgccgccaggccggacgacgttgtgatgacccagacccccctgagcctgcctgtgacacctggcgaacctgccagcatcagctgtcggagcagccagagcctggtgcacagaaacggcaacacctacctgcactggtatctccagaagcccggccagagccccaagctgctgatccacaaggtgtccaacagattcagcggcgtgcccgacagattctccggcagcggctctggcaccgacttcaccctgaagatcagccgggtggaagccgaggacctgggcgtgtacttctgtagccagagcacccatgtgccccccctgacatttggagccggcaccaagctggaactgaagctcgaggacctgaagaacgtgttcccacctgaggtggccgtgttcgagcctagcgaggccgagatcagccacacccagaaagccaccctcgtgtgcctggctaccggcttctaccccgaccatgtggaactgtcttggtgggtcaacggcaaagaggtgcacagcggcgtgtgtaccgacccccagccactgaaagaacagcccgccctgaacgacagccggtactgcctgagcagcagactgagagtgtccgccaccttctggcagaacccccggaaccacttcagatgccaggtgcagttctacggcctgagcgagaacgacgagtggacccaggacagagccaagcccgtgacccagatcgtgtctgccgaagcctggggcagagccgatgatgtgattaagatccactggcaggaaaagaagtccaacaccatcctgggcagccaggaaggcaacaccatgaagaccaacgacacctacatgaagttcagctggctgaccgtgcccgagaagtccctggacaaagaacacagatgcatcgtgcggcacgaaaacaacaagaacggcgtggaccaggaaatcatcttcccacccatcaagaccgatgtgattacaatggaccccaaggacaactgctccaaggacgccaacgataccctgctgctccagctgaccaacaccagcgcctactacatgtacttgttgctgctgctgaagtccgtggtgtacttcgccatcatcacatgctgcctgctgcggagaaccgccttctgctgcaacggcgagaagtctagggccaagcgatctggatctggagcaacaaacttctcactactcaaacaagcaggtgacgtggaggagaatcccgggcctactagtatggactggatttggcgcatccttttccttgtcggcgctgctaccggcgcgcattccttcgaagaagtgcagctggtgcagtctggcgctgaggtggaaaagcctggggccagcgtgaagattagctgcaaggccagcggcagcagcttcaccggctacaacatgaactgggtgcgccagaacatcggcaagagcctggaatggatcggagccatcgacccctactacggcggcaccagctacaaccagaagttcaagggcagagccaccctgaccgtggacaagagcaccagcaccgcctacatgcacctgaagtccctgcggagcgaggacaccgccgtgtactactgtgtgtccggcatggaatattggggccagggcaccagcgtgaccgtgtctagtacgcgtatccagaaccctgatcctgccgtgtaccagctgcgggatagcaagagcagcgacaagagcgtgtgtctgttcaccgacttcgacagccagaccaacgtgtcccagagcaaggactccgacgtgtacatcaccgataagtgcgtgctggacatgcggagcatggacttcaagagcaactccgccgtggcctggtccaacaagtccgatttcgcctgcgccaacgccttcaacaacagcattatccccgaggacacattcttcccaagccccgagagcagcgactccaccgaccacgtgaagcccaaagagacagagaacaccaagcagcccagcaagagctgccacaagcccaaggccatcgtgcacaccgagaaagtgaacatgatgagcctgaccgtgctgggcctgcggatgctgttcgccaaaaccgtggccgtgaacttcctgctgaccgccaagctgttcttcctc

SEQ ID NO: 7092 - DNA, 2160 bp, synthetic construct
  source 1..2160: mol_type = other DNA
atggccttaccagtgaccgccttgctcctgccgctggccttgctgctccacgccgccaggccggacgagatcgtgatgacccagacccctgccaccctgtctgtgtctgccggcgagagagtgaccattacctgcaaggccagccagagcgtgtccaacgacgtgacctggtatcagcagaagcccggccaggcccccagactgctgatctacagcgccagcaacagatacagcggcgtgcccgccagattttccggcagcggctacggcaccgagttcaccttcaccatcagcagcgtgcagagcgaggacttcgccgtgtacttctgtcagcaagactacagcagcttcggccagggcaccaagctggaaatcaagaggctcgaggacctgaagaacgtgttcccacctgaggtggccgtgttcgagcctagcgaggccgagatcagccacacccagaaagccaccctcgtgtgcctggctaccggcttctaccccgaccatgtggaactgtcttggtgggtcaacggcaaagaggtgcacagcggcgtgtgtaccgacccccagccactgaaagaacagcccgccctgaacgacagccggtactgcctgagcagcagactgagagtgtccgccaccttctggcagaacccccggaaccacttcagatgccaggtgcagttctacggcctgagcgagaacgacgagtggacccaggacagagccaagcccgtgacccagatcgtgtctgccgaagcctggggcagagccgatgatgtgattaagatccactggcaggaaaagaagtccaacaccatcctgggcagccaggaaggcaacaccatgaagaccaacgacacctacatgaagttcagctggctgaccgtgcccgagaagtccctggacaaagaacacagatgcatcgtgcggcacgaaaacaacaagaacggcgtggaccaggaaatcatcttcccacccatcaagaccgatgtgattacaatggaccccaaggacaactgctccaaggacgccaacgataccctgctgctccagctgaccaacaccagcgcctactacatgtacttgttgctgctgctgaagtccgtggtgtacttcgccatcatcacatgctgcctgctgcggagaaccgccttctgctgcaacggcgagaagtctagggccaagcgatctggatctggagcaacaaacttctcactactcaaacaagcaggtgacgtggaggagaatcccgggcctactagtatggactggatttggcgcatccttttccttgtcggcgctgctaccggcgcgcattccttcgaacaggtgcagctggtggaatctggacctggcgtggtgcagcctggcagaagcctgagaatcagctgtgccgtgtccggcttcagcgtgaccaactacggcgtgcactgggtgcgccagccacctggaaaaggactggaatggctgggcgtgatctgggctggcggcatcaccaactacaacagcgccttcatgtcccggctgaccatctccaaggacaacagcaagaacaccgtgtacctccagatgaacagcctgcgggccgaggacaccgccatgtactactgtgcttccagaggcggccactacggctacgccctggattattggggccagggaaccctcgtgaccgtgtcctctacgcgtatccagaaccctgatcctgccgtgtaccagctgcgggatagcaagagcagcgacaagagcgtgtgtctgttcaccgacttcgacagccagaccaacgtgtcccagagcaaggactccgacgtgtacatcaccgataagtgcgtgctggacatgcggagcatggacttcaagagcaactccgccgtggcctggtccaacaagtccgatttcgcctgcgccaacgccttcaacaacagcattatccccgaggacacattcttcccaagccccgagagcagcgactccaccgaccacgtgaagcccaaagagacagagaacaccaagcagcccagcaagagctgccacaagcccaaggccatcgtgcacaccgagaaagtgaacatgatgagcctgaccgtgctgggcctgcggatgctgttcgccaaaaccgtggccgtgaacttcctgctgaccgccaagctgttcttcctc

SEQ ID NO: 7093 - DNA, 2166 bp, synthetic construct
  source 1..2166: mol_type = other DNA
atggccttaccagtgaccgccttgctcctgccgctggccttgctgctccacgccgccaggccggacatccagatgacccagaccgccagcagcctgcctgcctctctgggcgacagagtgaccatctcctgtagcgccagccaggacatcagcaactacctgaactggtatcagcagaaacccgacggcaccgtgaagctgctgatcttctacagcagcaacctgcacagcggcgtgcccagcagattttctggcggcggaagcggcaccgactacagcctgaccatcagcaatctggaacccgaggacattgccacctacttttgccaccagtacagcaagctgccctggacctttggcggaggcaccaagctggaaatcaagagactcgaggacctgaagaacgtgttcccacctgaggtggccgtgttcgagcctagcgaggccgagatcagccacacccagaaagccaccctcgtgtgcctggctaccggcttctaccccgaccatgtggaactgtcttggtgggtcaacggcaaagaggtgcacagcggcgtgtgtaccgacccccagccactgaaagaacagcccgccctgaacgacagccggtactgcctgagcagcagactgagagtgtccgccaccttctggcagaacccccggaaccacttcagatgccaggtgcagttctacggcctgagcgagaacgacgagtggacccaggacagagccaagcccgtgacccagatcgtgtctgccgaagcctggggcagagccgatgatgtgattaagatccactggcaggaaaagaagtccaacaccatcctgggcagccaggaaggcaacaccatgaagaccaacgacacctacatgaagttcagctggctgaccgtgcccgagaagtccctggacaaagaacacagatgcatcgtgcggcacgaaaacaacaagaacggcgtggaccaggaaatcatcttcccacccatcaagaccgatgtgattacaatggaccccaaggacaactgctccaaggacgccaacgataccctgctgctccagctgaccaacaccagcgcctactacatgtacttgttgctgctgctgaagtccgtggtgtacttcgccatcatcacatgctgcctgctgcggagaaccgccttctgctgcaacggcgagaagtctagggccaagcgatctggatctggagcaacaaacttctcactactcaaacaagcaggtgacgtggaggagaatcccgggcctactagtatggactggatttggcgcatccttttccttgtcggcgctgctaccggcgcgcattccttcgaagaagtgaccctggtggaaagcggcggagacttcgtgaagcctggcggctctctgaaggtgtcctgtgccgccagcggcttcgcctttagccactacgccatgagctgggtgcgccagacccctgccaagagactggaatgggtggcctacatcagcagcggcggctccggcacctactactccgatagcgtgaagggccggttcaccatcagccgggacaacgccaagaacaccctgtacctccagatgcggagcctgcggagcgaggacagcgccatgtatttctgcaccagagtgaagctgggcacctattacttcgactcttggggccagggcaccaccctgaccgtgtcatctacgcgtatccagaaccctgatcctgccgtgtaccagctgcgggatagcaagagcagcgacaagagcgtgtgtctgttcaccgacttcgacagccagaccaacgtgtcccagagcaaggactccgacgtgtacatcaccgataagtgcgtgctggacatgcggagcatggacttcaagagcaactccgccgtggcctggtccaacaagtccgatttcgcctgcgccaacgccttcaacaacagcattatccccgaggacacattcttcccaagccccgagagcagcgactccaccgaccacgtgaagcccaaagagacagagaacaccaagcagcccagcaagagctgccacaagcccaaggccatcgtgcacaccgagaaagtgaacatgatgagcctgaccgtgctgggcctgcggatgctgttcgccaaaaccgtggccgtgaacttcctgctgaccgccaagctgttcttcctc

SEQ ID NO: 7094 - DNA, 2172 bp, synthetic construct
  source 1..2172: mol_type = other DNA
atggccttaccagtgaccgccttgctcctgccgctggccttgctgctccacgccgccaggccgcagttcgtgctgacccagagcccttctgcctctgctgccctgggagcctctgccaagctgacctgtacactgagcagcgcccacaagacctacaccatcgactggtatcagcagcagaagggaaaggcccccagatacctgatccaagtgaagtccgacggcacctacacaaaggccaccggcgtgcccgatagattcagcggcagtagcagcggagccgatagatacctgattatccccagcgtgcaggccgacgacgaggccgattactactgcggcaccgattacaccggcggctacgtgttcggcggaggcacacaactgaccgtgacactcgaggacctgaagaacgtgttcccacctgaggtggccgtgttcgagcctagcgaggccgagatcagccacacccagaaagccaccctcgtgtgcctggctaccggcttctaccccgaccatgtggaactgtcttggtgggtcaacggcaaagaggtgcacagcggcgtgtgtaccgacccccagccactgaaagaacagcccgccctgaacgacagccggtactgcctgagcagcagactgagagtgtccgccaccttctggcagaacccccggaaccacttcagatgccaggtgcagttctacggcctgagcgagaacgacgagtggacccaggacagagccaagcccgtgacccagatcgtgtctgccgaagcctggggcagagccgatgatgtgattaagatccactggcaggaaaagaagtccaacaccatcctgggcagccaggaaggcaacaccatgaagaccaacgacacctacatgaagttcagctggctgaccgtgcccgagaagtccctggacaaagaacacagatgcatcgtgcggcacgaaaacaacaagaacggcgtggaccaggaaatcatcttcccacccatcaagaccgatgtgattacaatggaccccaaggacaactgctccaaggacgccaacgataccctgctgctccagctgaccaacaccagcgcctactacatgtacttgttgctgctgctgaagtccgtggtgtacttcgccatcatcacatgctgcctgctgcggagaaccgccttctgctgcaacggcgagaagtctagggccaagcgatctggatctggagcaacaaacttctcactactcaaacaagcaggtgacgtggaggagaatcccgggcctactagtatggactggatttggcgcatccttttccttgtcggcgctgctaccggcgcgcattccttcgaagagcaactgaaagagtctggcggcggactgttcaagcccaccgataccctgaccctgacctgcaccgtgtccggcttcagcctgagctactacggcgtgaactgggtgcgccaggcccctggcaatggcctggaatggatcggcacaatcggcggcagcggcgacacctactatgcctcttgggccaagtccagaagcaccatcatcagaaacaccaacgagaacaccgtgaccctgaagatgaccagcctgacagccgccgacaccgccacctacttttgcgtcagatacgccaacatcggctacgagtatttcaacgtgtggggacccggcaccctcgtgaccgtgtcatctacgcgtatccagaaccctgatcctgccgtgtaccagctgcgggatagcaagagcagcgacaagagcgtgtgtctgttcaccgacttcgacagccagaccaacgtgtcccagagcaaggactccgacgtgtacatcaccgataagtgcgtgctggacatgcggagcatggacttcaagagcaactccgccgtggcctggtccaacaagtccgatttcgcctgcgccaacgccttcaacaacagcattatccccgaggacacattcttcccaagccccgagagcagcgactccaccgaccacgtgaagcccaaagagacagagaacaccaagcagcccagcaagagctgccacaagcccaaggccatcgtgcacaccgagaaagtgaacatgatgagcctgaccgtgctgggcctgcggatgctgttcgccaaaaccgtggccgtgaacttcctgctgaccgccaagctgttcttcctc

SEQ ID NO: 7095 - DNA, 2187 bp, synthetic construct
  source 1..2187: mol_type = other DNA
atggccttaccagtgaccgccttgctcctgccgctggccttgctgctccacgccgccaggccgcagttcgtgctgacccagagcccttctgtgtctgccgccctgggagcctctgccaagctgacctgtacactgagcagcgcccacaagacctacaccatcgactggtatcagcagcagcagggcgaggcccccagatacctgatgcaagtgaagtccgacggcagctacaccaagggcaccggcgtgcccgatagattcagcggcagtagcagcggagccgatagatacctgattatccccagcgtgcaggccgacgacgaggccggatatgtgtgcggcgctgacgacaatggcggctacgtgttcggcggaggcacccaactgacagtgacactcgaggacctgaagaacgtgttcccacctgaggtggccgtgttcgagcctagcgaggccgagatcagccacacccagaaagccaccctcgtgtgcctggctaccggcttctaccccgaccatgtggaactgtcttggtgggtcaacggcaaagaggtgcacagcggcgtgtgtaccgacccccagccactgaaagaacagcccgccctgaacgacagccggtactgcctgagcagcagactgagagtgtccgccaccttctggcagaacccccggaaccacttcagatgccaggtgcagttctacggcctgagcgagaacgacgagtggacccaggacagagccaagcccgtgacccagatcgtgtctgccgaagcctggggcagagccgatgatgtgattaagatccactggcaggaaaagaagtccaacaccatcctgggcagccaggaaggcaacaccatgaagaccaacgacacctacatgaagttcagctggctgaccgtgcccgagaagtccctggacaaagaacacagatgcatcgtgcggcacgaaaacaacaagaacggcgtggaccaggaaatcatcttcccacccatcaagaccgatgtgattacaatggaccccaaggacaactgctccaaggacgccaacgataccctgctgctccagctgaccaacaccagcgcctactacatgtacttgttgctgctgctgaagtccgtggtgtacttcgccatcatcacatgctgcctgctgcggagaaccgccttctgctgcaacggcgagaagtctagggccaagcgatctggatctggagcaacaaacttctcactactcaaacaagcaggtgacgtggaggagaatcccgggcctactagtatggactggatttggcgcatccttttccttgtcggcgctgctaccggcgcgcattccttcgaacagagcgtgaaagagtctgagggcggcctgttcaagcccaccgataccctgaccctgacctgcaccgtgtccggcttcagcctgagcagacacgccctgacatgggtgcgccaggcccctggaaatggcctggaatggatcggagccatcgacaacgccggcaccacctactatgcctcttgggccaagtccagaagcaccatcacccggaacaccgacctgcacaccgtgaccctgaagatgaccagcctgaccgccagcgacaccgccacctacttttgcgccagagtgttctacgacatcaacagcggctactacctggacggcatggacctgtggggacctggcacacttgtgaccgtgtccagcacgcgtatccagaaccctgatcctgccgtgtaccagctgcgggatagcaagagcagcgacaagagcgtgtgtctgttcaccgacttcgacagccagaccaacgtgtcccagagcaaggactccgacgtgtacatcaccgataagtgcgtgctggacatgcggagcatggacttcaagagcaactccgccgtggcctggtccaacaagtccgatttcgcctgcgccaacgccttcaacaacagcattatccccgaggacacattcttcccaagccccgagagcagcgactccaccgaccacgtgaagcccaaagagacagagaacaccaagcagcccagcaagagctgccacaagcccaaggccatcgtgcacaccgagaaagtgaacatgatgagcctgaccgtgctgggcctgcggatgctgttcgccaaaaccgtggccgtgaacttcctgctgaccgccaagctgttcttcctc

SEQ ID NO: 7096 - DNA, 2169 bp, synthetic construct
  source 1..2169: mol_type = other DNA
atggccttaccagtgaccgccttgctcctgccgctggccttgctgctccacgccgccaggccggacatccagatgacccagagccccagcagcctgtctgccagcgtgggcgacagagtgaccatcacctgtagagccagccagggcatcagctcttggctggcctggtatcagcagaagcccgagaaggcccccaagagcctgatctacgccgcctctagtctccagagcggcgtgcccagcagattttctggcagcggctccggcaccgacttcaccctgacaatcagctccctccagcccgaggacttcgccacctactactgccagcagtacaacagctacccccccacctttggcggaggcaccaaggtggaaatcaagctcgaggacctgaagaacgtgttcccacctgaggtggccgtgttcgagcctagcgaggccgagatcagccacacccagaaagccaccctcgtgtgcctggctaccggcttctaccccgaccatgtggaactgtcttggtgggtcaacggcaaagaggtgcacagcggcgtgtgtaccgacccccagccactgaaagaacagcccgccctgaacgacagccggtactgcctgagcagcagactgagagtgtccgccaccttctggcagaacccccggaaccacttcagatgccaggtgcagttctacggcctgagcgagaacgacgagtggacccaggacagagccaagcccgtgacccagatcgtgtctgccgaagcctggggcagagccgatgatgtgattaagatccactggcaggaaaagaagtccaacaccatcctgggcagccaggaaggcaacaccatgaagaccaacgacacctacatgaagttcagctggctgaccgtgcccgagaagtccctggacaaagaacacagatgcatcgtgcggcacgaaaacaacaagaacggcgtggaccaggaaatcatcttcccacccatcaagaccgatgtgattacaatggaccccaaggacaactgctccaaggacgccaacgataccctgctgctccagctgaccaacaccagcgcctactacatgtacttgttgctgctgctgaagtccgtggtgtacttcgccatcatcacatgctgcctgctgcggagaaccgccttctgctgcaacggcgagaagtctagggccaagcgatctggatctggagcaacaaacttctcactactcaaacaagcaggtgacgtggaggagaatcccgggcctactagtatggactggatttggcgcatccttttccttgtcggcgctgctaccggcgcgcattccttcgaagaagtgcaactggtggaatcaggcggcggactggtgcagcctggcgagtctctgagactgagctgtgtggcctccggcttcaccttcagccggtacaagatgaactgggtgcgccaggcccctggcaagggactggaatgggtgtcctacatcagccgcagcggcagagacatctactacgccgacagcgtgaagggccggttcaccatcagcagagacaacgccaagaacagcctgtacctccagatgaactccctgcgggacgaggacaccgccgtgtactactgtgccggaaccgtgaccacctattactacttcggcatggacgtgtggggccacggcaccaccgtgacagtgtcatctacgcgtatccagaaccctgatcctgccgtgtaccagctgcgggatagcaagagcagcgacaagagcgtgtgtctgttcaccgacttcgacagccagaccaacgtgtcccagagcaaggactccgacgtgtacatcaccgataagtgcgtgctggacatgcggagcatggacttcaagagcaactccgccgtggcctggtccaacaagtccgatttcgcctgcgccaacgccttcaacaacagcattatccccgaggacacattcttcccaagccccgagagcagcgactccaccgaccacgtgaagcccaaagagacagagaacaccaagcagcccagcaagagctgccacaagcccaaggccatcgtgcacaccgagaaagtgaacatgatgagcctgaccgtgctgggcctgcggatgctgttcgccaaaaccgtggccgtgaacttcctgctgaccgccaagctgttcttcctc

SEQ ID NO: 7097 - DNA, 2172 bp, synthetic construct
  source 1..2172: mol_type = other DNA
atggccttaccagtgaccgccttgctcctgccgctggccttgctgctccacgccgccaggccggacatccagatgacccagagccccagcagcctgtctgccagcgtgggcgacagagtgaccatcacctgtagagccagccagggcatcagctcttggctggcctggtatcagcagaagcccgagaaggcccccaagagcctgatctacgccgcctctagtctccagagcggcgtgcccagcagattttctggcagcggctccggcaccgacttcaccctgacaatcagctccctccagcccgaggacttcgccacctactactgccagcagtacaacagctaccctcccacctttggcggaggcaccaaggtggaaatcaagctcgaggacctgaagaacgtgttcccacctgaggtggccgtgttcgagcctagcgaggccgagatcagccacacccagaaagccaccctcgtgtgcctggctaccggcttctaccccgaccatgtggaactgtcttggtgggtcaacggcaaagaggtgcacagcggcgtgtgtaccgacccccagccactgaaagaacagcccgccctgaacgacagccggtactgcctgagcagcagactgagagtgtccgccaccttctggcagaacccccggaaccacttcagatgccaggtgcagttctacggcctgagcgagaacgacgagtggacccaggacagagccaagcccgtgacccagatcgtgtctgccgaagcctggggcagagccgatgatgtgattaagatccactggcaggaaaagaagtccaacaccatcctgggcagccaggaaggcaacaccatgaagaccaacgacacctacatgaagttcagctggctgaccgtgcccgagaagtccctggacaaagaacacagatgcatcgtgcggcacgaaaacaacaagaacggcgtggaccaggaaatcatcttcccacccatcaagaccgatgtgattacaatggaccccaaggacaactgctccaaggacgccaacgataccctgctgctccagctgaccaacaccagcgcctactacatgtacttgttgctgctgctgaagtccgtggtgtacttcgccatcatcacatgctgcctgctgcggagaaccgccttctgctgcaacggcgagaagtctagggccaagcgatctggatctggagcaacaaacttctcactactcaaacaagcaggtgacgtggaggagaatcccgggcctactagtatggactggatttggcgcatccttttccttgtcggcgctgctaccggcgcgcattccttcgaagaagtgcaactggtggaatccgggggaggctctgtgcagcctggcgagtctctgagactgagctgtgtggcctccggcttcaccttcagccggtacaagatgaactgggtgcgccaggcccctggcaagggactggaatgggtgtcctacatcagccgcagcggcagagacatctactacgccgacagcgtgaagggccggttcaccatcagcagagacaacgccaagaacagcctgtacctccagatgaactccctgcgggacgaggacaccgccgtgtactactgtgccggaaccgtgaccacctattactacgacttcggcatggacgtgtggggccagggcacaaccgtgacagtgtctagcacgcgtatccagaaccctgatcctgccgtgtaccagctgcgggatagcaagagcagcgacaagagcgtgtgtctgttcaccgacttcgacagccagaccaacgtgtcccagagcaaggactccgacgtgtacatcaccgataagtgcgtgctggacatgcggagcatggacttcaagagcaactccgccgtggcctggtccaacaagtccgatttcgcctgcgccaacgccttcaacaacagcattatccccgaggacacattcttcccaagccccgagagcagcgactccaccgaccacgtgaagcccaaagagacagagaacaccaagcagcccagcaagagctgccacaagcccaaggccatcgtgcacaccgagaaagtgaacatgatgagcctgaccgtgctgggcctgcggatgctgttcgccaaaaccgtggccgtgaacttcctgctgaccgccaagctgttcttcctc

SEQ ID NO: 7098 - DNA, 2166 bp, synthetic construct
  source 1..2166: mol_type = other DNA
atggccttaccagtgaccgccttgctcctgccgctggccttgctgctccacgccgccaggccgcagtctgtgctgacacagcctccatctgcctctggcacacctggacagagagtgaccatcagctgtagcggcagcagaagcaacgtcggcggcaactacgtgttctggtatcagcaggtcccaggcgctacccctaagctgctgatctacagaagcaatcagcggcctagcggcgtgcccgatagatttgccggaagcaagagcggcagctctgccagccttgccatctctggactgagaagcgaggacgaggccgactactactgtgccacctgggatgatagcctgagcggcttcgtgtttggcaccggcaccaaagtgacagtgcttggtctcgaggacctgaagaacgtgttcccacctgaggtggccgtgttcgagcctagcgaggccgagatcagccacacccagaaagccaccctcgtgtgcctggctaccggcttctaccccgaccatgtggaactgtcttggtgggtcaacggcaaagaggtgcacagcggcgtgtgtaccgacccccagccactgaaagaacagcccgccctgaacgacagccggtactgcctgagcagcagactgagagtgtccgccaccttctggcagaacccccggaaccacttcagatgccaggtgcagttctacggcctgagcgagaacgacgagtggacccaggacagagccaagcccgtgacccagatcgtgtctgccgaagcctggggcagagccgatgatgtgattaagatccactggcaggaaaagaagtccaacaccatcctgggcagccaggaaggcaacaccatgaagaccaacgacacctacatgaagttcagctggctgaccgtgcccgagaagtccctggacaaagaacacagatgcatcgtgcggcacgaaaacaacaagaacggcgtggaccaggaaatcatcttcccacccatcaagaccgatgtgattacaatggaccccaaggacaactgctccaaggacgccaacgataccctgctgctccagctgaccaacaccagcgcctactacatgtacttgttgctgctgctgaagtccgtggtgtacttcgccatcatcacatgctgcctgctgcggagaaccgccttctgctgcaacggcgagaagtctagggccaagcgatctggatctggagcaacaaacttctcactactcaaacaagcaggtgacgtggaggagaatcccgggcctactagtatggactggatttggcgcatccttttccttgtcggcgctgctaccggcgcgcattccttcgaagttcagctggttgaatctggcggcggactggttaagcctggcggatctctgagactgtcttgtgccgccagcggcttcaccttcagcgattactacatgagctggatcagacaggcccctggcaaaggactggaatgggtgtcctacatcagcagcagcggctccaccatctactacgccgatagcgtgaagggcagattcaccatcagccgggacaacgccaagaacagcctgtacctccagatgaactccctgagagccgaggacaccgccgtgtactattgcgccagaggctacggcaaagcctacgatcaatggggccagggcacactggtcaccgtttcttctacgcgtatccagaaccctgatcctgccgtgtaccagctgcgggatagcaagagcagcgacaagagcgtgtgtctgttcaccgacttcgacagccagaccaacgtgtcccagagcaaggactccgacgtgtacatcaccgataagtgcgtgctggacatgcggagcatggacttcaagagcaactccgccgtggcctggtccaacaagtccgatttcgcctgcgccaacgccttcaacaacagcattatccccgaggacacattcttcccaagccccgagagcagcgactccaccgaccacgtgaagcccaaagagacagagaacaccaagcagcccagcaagagctgccacaagcccaaggccatcgtgcacaccgagaaagtgaacatgatgagcctgaccgtgctgggcctgcggatgctgttcgccaaaaccgtggccgtgaacttcctgctgaccgccaagctgttcttcctc

SEQ ID NO: 7099 - DNA, 2163 bp, synthetic construct
  source 1..2163: mol_type = other DNA
atggccttaccagtgaccgccttgctcctgccgctggccttgctgctccacgccgccaggccgcagtctgtggtcacacagccacctagcatgtctgccgctccaggccagcaagtgaccatctcttgtagcggcggcaacagcaacatcgagcggaactacgtgtcctggtatctgcaactgcctggcacagcccctaagctggtcatcttcgacaacgacagacggcccagcggcatccccgatagattttctggcagcaagagcggcaccagcgccacactgggaattaccggacttcagacaggcgacgaggccgactactactgtggcacatgggactctagcctgagaggctgggttttcggcggaggcacaaagctgacagtgcttggtctcgaggacctgaagaacgtgttcccacctgaggtggccgtgttcgagcctagcgaggccgagatcagccacacccagaaagccaccctcgtgtgcctggctaccggcttctaccccgaccatgtggaactgtcttggtgggtcaacggcaaagaggtgcacagcggcgtgtgtaccgacccccagccactgaaagaacagcccgccctgaacgacagccggtactgcctgagcagcagactgagagtgtccgccaccttctggcagaacccccggaaccacttcagatgccaggtgcagttctacggcctgagcgagaacgacgagtggacccaggacagagccaagcccgtgacccagatcgtgtctgccgaagcctggggcagagccgatgatgtgattaagatccactggcaggaaaagaagtccaacaccatcctgggcagccaggaaggcaacaccatgaagaccaacgacacctacatgaagttcagctggctgaccgtgcccgagaagtccctggacaaagaacacagatgcatcgtgcggcacgaaaacaacaagaacggcgtggaccaggaaatcatcttcccacccatcaagaccgatgtgattacaatggaccccaaggacaactgctccaaggacgccaacgataccctgctgctccagctgaccaacaccagcgcctactacatgtacttgttgctgctgctgaagtccgtggtgtacttcgccatcatcacatgctgcctgctgcggagaaccgccttctgctgcaacggcgagaagtctagggccaagcgatctggatctggagcaacaaacttctcactactcaaacaagcaggtgacgtggaggagaatcccgggcctactagtatggactggatttggcgcatccttttccttgtcggcgctgctaccggcgcgcattccttcgaagtgcagctcgttgagtctggcggcggactgattcaacctggcggaagcctgagactgagctgtgccgcttccggcttcaccttcagcaactacgccatgaactgggttcgacaggcccctggcaaaggactggaatgggtgtccaccatcaacggcagaggcagcagcaccatctacgccgattctgtgaagggcagattcaccatcagccgggacaacagcaagaacaccctgtacctccagatgaactccctgagagccgaggacaccgccacctattactgtgcccggtacatcagcagaggactgggcgattcttggggccagggcacactggttacagtgacgcgtatccagaaccctgatcctgccgtgtaccagctgcgggatagcaagagcagcgacaagagcgtgtgtctgttcaccgacttcgacagccagaccaacgtgtcccagagcaaggactccgacgtgtacatcaccgataagtgcgtgctggacatgcggagcatggacttcaagagcaactccgccgtggcctggtccaacaagtccgatttcgcctgcgccaacgccttcaacaacagcattatccccgaggacacattcttcccaagccccgagagcagcgactccaccgaccacgtgaagcccaaagagacagagaacaccaagcagcccagcaagagctgccacaagcccaaggccatcgtgcacaccgagaaagtgaacatgatgagcctgaccgtgctgggcctgcggatgctgttcgccaaaaccgtggccgtgaacttcctgctgaccgccaagctgttcttcctc

SEQ ID NO: 7100 - DNA, 2166 bp, synthetic construct
  source 1..2166: mol_type = other DNA
atggccttaccagtgaccgccttgctcctgccgctggccttgctgctccacgccgccaggccggacgtcgtgatgacccagacccctctgagcctgcctgtgtccctgggcgatcaggccagcatcagctgtagaagcagccagagcctggtgcacagcaacggcaacacctacctgcactggtatctccagaagcccggccagagccccaagctgctgatctacaaggtgtccaacagattcagcggcgtgcccgacagattctccggcagcggctctggcaccgacttcaccctgaagatcagccgggtggaagccgaggacctgggcgtgtacttctgtagccagaacacccccgtgccccccaagtttggcagcggcaccaagctggaaatcaagctcgaggacctgaagaacgtgttcccacctgaggtggccgtgttcgagcctagcgaggccgagatcagccacacccagaaagccaccctcgtgtgcctggctaccggcttctaccccgaccatgtggaactgtcttggtgggtcaacggcaaagaggtgcacagcggcgtgtgtaccgacccccagccactgaaagaacagcccgccctgaacgacagccggtactgcctgagcagcagactgagagtgtccgccaccttctggcagaacccccggaaccacttcagatgccaggtgcagttctacggcctgagcgagaacgacgagtggacccaggacagagccaagcccgtgacccagatcgtgtctgccgaagcctggggcagagccgatgatgtgattaagatccactggcaggaaaagaagtccaacaccatcctgggcagccaggaaggcaacaccatgaagaccaacgacacctacatgaagttcagctggctgaccgtgcccgagaagtccctggacaaagaacacagatgcatcgtgcggcacgaaaacaacaagaacggcgtggaccaggaaatcatcttcccacccatcaagaccgatgtgattacaatggaccccaaggacaactgctccaaggacgccaacgataccctgctgctccagctgaccaacaccagcgcctactacatgtacttgttgctgctgctgaagtccgtggtgtacttcgccatcatcacatgctgcctgctgcggagaaccgccttctgctgcaacggcgagaagtctagggccaagcgatctggatctggagcaacaaacttctcactactcaaacaagcaggtgacgtggaggagaatcccgggcctactagtatggactggatttggcgcatccttttccttgtcggcgctgctaccggcgcgcattccttcgaacaggtgcagctccagcagtctggcgctgaactcgtgcggcctggcgcttctgtgaagctgtcttgcaaggccagcggctacaccttcaacgactacgagatgcactgggtcaagcagacccctgtgcacggcctgaagtggatcggagccctggaacccaagaccggcgataccgcctacagccagaagttcaagggcaaggccaccctgaccgccgacaagagcagcagcacagcctacatggaactgcggagcctgaccagcgaggacagcgccgtgtactactgcaccagctgctactactacacctacagcggccagggcaccctcgtgacagtgtctgctacgcgtatccagaaccctgatcctgccgtgtaccagctgcgggatagcaagagcagcgacaagagcgtgtgtctgttcaccgacttcgacagccagaccaacgtgtcccagagcaaggactccgacgtgtacatcaccgataagtgcgtgctggacatgcggagcatggacttcaagagcaactccgccgtggcctggtccaacaagtccgatttcgcctgcgccaacgccttcaacaacagcattatccccgaggacacattcttcccaagccccgagagcagcgactccaccgaccacgtgaagcccaaagagacagagaacaccaagcagcccagcaagagctgccacaagcccaaggccatcgtgcacaccgagaaagtgaacatgatgagcctgaccgtgctgggcctgcggatgctgttcgccaaaaccgtggccgtgaacttcctgctgaccgccaagctgttcttcctc

SEQ ID NO: 7101 - DNA, 2163 bp, synthetic construct
  source 1..2163: mol_type = other DNA
atggccttaccagtgaccgccttgctcctgccgctggccttgctgctccacgccgccaggccggacatccaactgacccagagccccagcagcctgtctgcctctgtgggcgacagagtgaccatcacctgtagagccagccagggcatcagaaacgacctgggctggtatcagcagaagcccggcaaggcccccaagcggctgatctatgctgccagctccctccagaatggcgtgcccagcagattttccggcagcggctctggcaccgagttcaccctgaccatcagctccctccagcccgaggacttcgccacctactactgcctccagcacaacacctaccccgccttcggccagggcaccaaggtggaaatcaagagactcgaggacctgaagaacgtgttcccacctgaggtggccgtgttcgagcctagcgaggccgagatcagccacacccagaaagccaccctcgtgtgcctggctaccggcttctaccccgaccatgtggaactgtcttggtgggtcaacggcaaagaggtgcacagcggcgtgtgtaccgacccccagccactgaaagaacagcccgccctgaacgacagccggtactgcctgagcagcagactgagagtgtccgccaccttctggcagaacccccggaaccacttcagatgccaggtgcagttctacggcctgagcgagaacgacgagtggacccaggacagagccaagcccgtgacccagatcgtgtctgccgaagcctggggcagagccgatgatgtgattaagatccactggcaggaaaagaagtccaacaccatcctgggcagccaggaaggcaacaccatgaagaccaacgacacctacatgaagttcagctggctgaccgtgcccgagaagtccctggacaaagaacacagatgcatcgtgcggcacgaaaacaacaagaacggcgtggaccaggaaatcatcttcccacccatcaagaccgatgtgattacaatggaccccaaggacaactgctccaaggacgccaacgataccctgctgctccagctgaccaacaccagcgcctactacatgtacttgttgctgctgctgaagtccgtggtgtacttcgccatcatcacatgctgcctgctgcggagaaccgccttctgctgcaacggcgagaagtctagggccaagcgatctggatctggagcaacaaacttctcactactcaaacaagcaggtgacgtggaggagaatcccgggcctactagtatggactggatttggcgcatccttttccttgtcggcgctgctaccggcgcgcattccttcgaacaggtgcaactccaggaatctggccctggcctcgtgaagcctagccagaccctgagcctgacctgtaccgtgtctggcggcagcatcagcagcttcaactactactggtcctggatcagacaccaccctggcaagggcctggaatggatcggctacatctactacagcggcagcacctacagcaaccccagcctgaagtcccgcgtgaccatctccgtggacaccagcaagaaccagtttagcctgaccctgtccagcgtgacagccgccgataccgccgtgtactactgcgccagaggctacaactggaactacttcgactactggggccagggaaccctcgtgaccgtgtctagtacgcgtatccagaaccctgatcctgccgtgtaccagctgcgggatagcaagagcagcgacaagagcgtgtgtctgttcaccgacttcgacagccagaccaacgtgtcccagagcaaggactccgacgtgtacatcaccgataagtgcgtgctggacatgcggagcatggacttcaagagcaactccgccgtggcctggtccaacaagtccgatttcgcctgcgccaacgccttcaacaacagcattatccccgaggacacattcttcccaagccccgagagcagcgactccaccgaccacgtgaagcccaaagagacagagaacaccaagcagcccagcaagagctgccacaagcccaaggccatcgtgcacaccgagaaagtgaacatgatgagcctgaccgtgctgggcctgcggatgctgttcgccaaaaccgtggccgtgaacttcctgctgaccgccaagctgttcttcctc

SEQ ID NO: 7102 - DNA, 2169 bp, synthetic construct
  source 1..2169: mol_type = other DNA
atggccttaccagtgaccgccttgctcctgccgctggccttgctgctccacgccgccaggccggacgacatcgtgctgacccagagccccgccagcctggccgtgagcctgggccagagcgtgaccatcagctgcagagccagcgagagcgtggagtactacggcaccagcctgatgcagtggtaccagcagaagcccggccagccccccaagctgctgatctacgccaccagcaacgtggagagcggcgtgcccgccagattcagcggcagcggcagcggcaccgacttcagcctgaacatccaccccgtggaggaggacgacatcgccatgtacttctgccagcagagcagaaagctgcccagcaccttcggcggcggcaccaagctggagatcaagctcgaggacctgaagaacgtgttcccacctgaggtggccgtgttcgagcctagcgaggccgagatcagccacacccagaaagccaccctcgtgtgcctggctaccggcttctaccccgaccatgtggaactgtcttggtgggtcaacggcaaagaggtgcacagcggcgtgtgtaccgacccccagccactgaaagaacagcccgccctgaacgacagccggtactgcctgagcagcagactgagagtgtccgccaccttctggcagaacccccggaaccacttcagatgccaggtgcagttctacggcctgagcgagaacgacgagtggacccaggacagagccaagcccgtgacccagatcgtgtctgccgaagcctggggcagagccgatgatgtgattaagatccactggcaggaaaagaagtccaacaccatcctgggcagccaggaaggcaacaccatgaagaccaacgacacctacatgaagttcagctggctgaccgtgcccgagaagtccctggacaaagaacacagatgcatcgtgcggcacgaaaacaacaagaacggcgtggaccaggaaatcatcttcccacccatcaagaccgatgtgattacaatggaccccaaggacaactgctccaaggacgccaacgataccctgctgctccagctgaccaacaccagcgcctactacatgtacttgttgctgctgctgaagtccgtggtgtacttcgccatcatcacatgctgcctgctgcggagaaccgccttctgctgcaacggcgagaagtctagggccaagcgatctggatctggagcaacaaacttctcactactcaaacaagcaggtgacgtggaggagaatcccgggcctactagtatggactggatttggcgcatccttttccttgtcggcgctgctaccggcgcgcattccttcgaagacgtgagactgcaggagagcggccccggccaggtgaagcccagccagaccgtgagcctgacctgcagcgtgaccggctacagcatcaccaacggcaaccactggtggaactggatcagacaggtgagcggcagcaagctggagtggatcggctacatcagcagcagcggcagcaccgacagcaaccccagcctgaagagcagaatcagcatcaccagagacaccagcaagaaccagctgttcctgcagctgaacagcgtgaccaccgaggacatcgccacctactactgcgccagaggctactacttcgactactggggccagggcaccaccctgaccgtgagcagcacgcgtatccagaaccctgatcctgccgtgtaccagctgcgggatagcaagagcagcgacaagagcgtgtgtctgttcaccgacttcgacagccagaccaacgtgtcccagagcaaggactccgacgtgtacatcaccgataagtgcgtgctggacatgcggagcatggacttcaagagcaactccgccgtggcctggtccaacaagtccgatttcgcctgcgccaacgccttcaacaacagcattatccccgaggacacattcttcccaagccccgagagcagcgactccaccgaccacgtgaagcccaaagagacagagaacaccaagcagcccagcaagagctgccacaagcccaaggccatcgtgcacaccgagaaagtgaacatgatgagcctgaccgtgctgggcctgcggatgctgttcgccaaaaccgtggccgtgaacttcctgctgaccgccaagctgttcttcctc

SEQ ID NO: 7103 - DNA, 2166 bp, synthetic construct
  source 1..2166: mol_type = other DNA
atggccttaccagtgaccgccttgctcctgccgctggccttgctgctccacgccgccaggccggacatccagatgacccagagccccagcagcctgtctgccagcgtgggcgacagagtgaccatcacctgtagagccagccaggacgtgaacaccgccgtggcctggtatcagcagaagcctggcaaggcccccaagctgctgatctacagcgccagcttcctggaaagcggcgtgcccagcagattcagcggaagcagaagcggcaccgacttcaccctgaccatcagctccctccagcccgaggacttcgccacctactactgccagcagcactacaccacccctcccaccttcggccagaccaaggtggaaatcaagagactcgaggacctgaagaacgtgttcccacctgaggtggccgtgttcgagcctagcgaggccgagatcagccacacccagaaagccaccctcgtgtgcctggctaccggcttctaccccgaccatgtggaactgtcttggtgggtcaacggcaaagaggtgcacagcggcgtgtgtaccgacccccagccactgaaagaacagcccgccctgaacgacagccggtactgcctgagcagcagactgagagtgtccgccaccttctggcagaacccccggaaccacttcagatgccaggtgcagttctacggcctgagcgagaacgacgagtggacccaggacagagccaagcccgtgacccagatcgtgtctgccgaagcctggggcagagccgatgatgtgattaagatccactggcaggaaaagaagtccaacaccatcctgggcagccaggaaggcaacaccatgaagaccaacgacacctacatgaagttcagctggctgaccgtgcccgagaagtccctggacaaagaacacagatgcatcgtgcggcacgaaaacaacaagaacggcgtggaccaggaaatcatcttcccacccatcaagaccgatgtgattacaatggaccccaaggacaactgctccaaggacgccaacgataccctgctgctccagctgaccaacaccagcgcctactacatgtacttgttgctgctgctgaagtccgtggtgtacttcgccatcatcacatgctgcctgctgcggagaaccgccttctgctgcaacggcgagaagtctagggccaagcgatctggatctggagcaacaaacttctcactactcaaacaagcaggtgacgtggaggagaatcccgggcctactagtatggactggatttggcgcatccttttccttgtcggcgctgctaccggcgcgcattccttcgaagaagtgcaactggtggaatctggcggcggactggtgcagcctggcggatctctgagactgagctgtgccgccagcggcttcaacatcaaggacacctacatccactgggtgcgccaggcccctggaaagggactggaatgggtggcccggatctaccccaccaacggctacaccagatacgccgacagcgtgaagggccggttcaccatcagcgccgacaccagcaagaataccgcctacctccagatgaacagcctgcgggccgaggataccgccgtgtactactgctcaagatggggaggcgacggcttctacgctatggacgtgtggggccagggcacccttgtgaccgtgtcatctacgcgtatccagaaccctgatcctgccgtgtaccagctgcgggatagcaagagcagcgacaagagcgtgtgtctgttcaccgacttcgacagccagaccaacgtgtcccagagcaaggactccgacgtgtacatcaccgataagtgcgtgctggacatgcggagcatggacttcaagagcaactccgccgtggcctggtccaacaagtccgatttcgcctgcgccaacgccttcaacaacagcattatccccgaggacacattcttcccaagccccgagagcagcgactccaccgaccacgtgaagcccaaagagacagagaacaccaagcagcccagcaagagctgccacaagcccaaggccatcgtgcacaccgagaaagtgaacatgatgagcctgaccgtgctgggcctgcggatgctgttcgccaaaaccgtggccgtgaacttcctgctgaccgccaagctgttcttcctc

SEQ ID NO: 7104 - DNA, 2163 bp, synthetic construct
  source 1..2163: mol_type = other DNA
atggccttaccagtgaccgccttgctcctgccgctggccttgctgctccacgccgccaggccggaccagagcgtgctgacacagcctcctagcgtgtcagtggcccctggcaagaccgccagaatcccctgcgagggcaactacatcggcagcagcaacgtgcactggtatcagcagaagcccggccaggctcccgtgctcgtgatccacttcgacagcgacagacccagcggcatccccgacagattcagcggcagcaacagcggcaacatggctaccctgaccatcagcagagtggaagccggggacgaggccgactactactgtcaagtgtgggagaaccacggctgggtgttcggcggaggcaccaagctgacagtgctgtctctcgaggacctgaagaacgtgttcccacctgaggtggccgtgttcgagcctagcgaggccgagatcagccacacccagaaagccaccctcgtgtgcctggctaccggcttctaccccgaccatgtggaactgtcttggtgggtcaacggcaaagaggtgcacagcggcgtgtgtaccgacccccagccactgaaagaacagcccgccctgaacgacagccggtactgcctgagcagcagactgagagtgtccgccaccttctggcagaacccccggaaccacttcagatgccaggtgcagttctacggcctgagcgagaacgacgagtggacccaggacagagccaagcccgtgacccagatcgtgtctgccgaagcctggggcagagccgatgatgtgattaagatccactggcaggaaaagaagtccaacaccatcctgggcagccaggaaggcaacaccatgaagaccaacgacacctacatgaagttcagctggctgaccgtgcccgagaagtccctggacaaagaacacagatgcatcgtgcggcacgaaaacaacaagaacggcgtggaccaggaaatcatcttcccacccatcaagaccgatgtgattacaatggaccccaaggacaactgctccaaggacgccaacgataccctgctgctccagctgaccaacaccagcgcctactacatgtacttgttgctgctgctgaagtccgtggtgtacttcgccatcatcacatgctgcctgctgcggagaaccgccttctgctgcaacggcgagaagtctagggccaagcgatctggatctggagcaacaaacttctcactactcaaacaagcaggtgacgtggaggagaatcccgggcctactagtatggactggatttggcgcatccttttccttgtcggcgctgctaccggcgcgcattccttcgaagaggtgcaactggtggaaacaggcggcggactggtgcagcctggcgagtctctgagactgagctgtgccgccagcggcttcaccttcagcgactacgagatgaactgggtgcgccaggcccctggaaagggcctggaatgggtgtcctacatcagcagctccggcagcaccatctactacgccgacagcgtgaagggccggtttaccatctaccgggacaacgccaagaacagcctgtacctccagatgaactccctgcgggccgaggacaccgccctgtactattgtgccagagcctggggcgtgggaccccctgattattggggacagggcaccctcgtgaccgtgtcctctacgcgtatccagaaccctgatcctgccgtgtaccagctgcgggatagcaagagcagcgacaagagcgtgtgtctgttcaccgacttcgacagccagaccaacgtgtcccagagcaaggactccgacgtgtacatcaccgataagtgcgtgctggacatgcggagcatggacttcaagagcaactccgccgtggcctggtccaacaagtccgatttcgcctgcgccaacgccttcaacaacagcattatccccgaggacacattcttcccaagccccgagagcagcgactccaccgaccacgtgaagcccaaagagacagagaacaccaagcagcccagcaagagctgccacaagcccaaggccatcgtgcacaccgagaaagtgaacatgatgagcctgaccgtgctgggcctgcggatgctgttcgccaaaaccgtggccgtgaacttcctgctgaccgccaagctgttcttcctc

SEQ ID NO: 7105 - DNA, 2187 bp, synthetic construct
  source 1..2187: mol_type = other DNA
atggccttaccagtgaccgccttgctcctgccgctggccttgctgctccacgccgccaggccggacatccagatgacccagagccccagcagcctgtctgccagcgtgggcgataccgtgaccatcacctgtcaggccaacggctacctgaactggtatcagcagcggagaggcaaggcccccaagctgctgatctacgacggcagcaagctggaaagaggcgtgcccagcagattcagcggcagaagatggggccaggagtacaacctgaccatcaacaacctccagcccgaggatattgccacatacttttgccaggtgtacgagttcgtggtgcccggcacacggctggacctgaagagaacagtggctgctcctctcgaggacctgaagaacgtgttcccacctgaggtggccgtgttcgagcctagcgaggccgagatcagccacacccagaaagccaccctcgtgtgcctggctaccggcttctaccccgaccatgtggaactgtcttggtgggtcaacggcaaagaggtgcacagcggcgtgtgtaccgacccccagccactgaaagaacagcccgccctgaacgacagccggtactgcctgagcagcagactgagagtgtccgccaccttctggcagaacccccggaaccacttcagatgccaggtgcagttctacggcctgagcgagaacgacgagtggacccaggacagagccaagcccgtgacccagatcgtgtctgccgaagcctggggcagagccgatgatgtgattaagatccactggcaggaaaagaagtccaacaccatcctgggcagccaggaaggcaacaccatgaagaccaacgacacctacatgaagttcagctggctgaccgtgcccgagaagtccctggacaaagaacacagatgcatcgtgcggcacgaaaacaacaagaacggcgtggaccaggaaatcatcttcccacccatcaagaccgatgtgattacaatggaccccaaggacaactgctccaaggacgccaacgataccctgctgctccagctgaccaacaccagcgcctactacatgtacttgttgctgctgctgaagtccgtggtgtacttcgccatcatcacatgctgcctgctgcggagaaccgccttctgctgcaacggcgagaagtctagggccaagcgatctggatctggagcaacaaacttctcactactcaaacaagcaggtgacgtggaggagaatcccgggcctactagtatggactggatttggcgcatccttttccttgtcggcgctgctaccggcgcgcattccttcgaacaggtgcagctgctccagtctggcgctgccgtgacaaagcctggcgcttctgtgcgggtgtcctgtgaagccagcggctacaacatccgggactacttcatccactggtggcggcaggctccaggccagggactccagtgggtgggatggatcaaccccaagaccggccagcccaacaaccccagacagttccagggcagagtgtccctgaccagacacgccagctgggacttcgacaccttcagcttctacatggatctgaaggccctgcggagcgacgataccgccgtgtacttctgcgccagacagagaagcgactactgggatttcgacgtgtggggcagcggcacccaagtgacagtgtctagcgccagcaccaagggacccacgcgtatccagaaccctgatcctgccgtgtaccagctgcgggatagcaagagcagcgacaagagcgtgtgtctgttcaccgacttcgacagccagaccaacgtgtcccagagcaaggactccgacgtgtacatcaccgataagtgcgtgctggacatgcggagcatggacttcaagagcaactccgccgtggcctggtccaacaagtccgatttcgcctgcgccaacgccttcaacaacagcattatccccgaggacacattcttcccaagccccgagagcagcgactccaccgaccacgtgaagcccaaagagacagagaacaccaagcagcccagcaagagctgccacaagcccaaggccatcgtgcacaccgagaaagtgaacatgatgagcctgaccgtgctgggcctgcggatgctgttcgccaaaaccgtggccgtgaacttcctgctgaccgccaagctgttcttcctc

SEQ ID NO: 7106 - DNA, 2205 bp, synthetic construct
  source 1..2205: mol_type = other DNA
atggccttaccagtgaccgccttgctcctgccgctggccttgctgctccacgccgccaggccgcagtctgccctgacacagcctcctagcgcctctggctctcccggccagagcatcaccatcagctgtaccggcaccagcaacaacttcgtgtcctggtatcagcagcacgccggcaaggcccccaagctcgtgatctacgacgtgaacaagcggcccagcggcgtgcccgatagattcagcggcagcaagagcggcaacaccgccagcctgacagtgtctggcctccagaccgatgacgaggccgtgtactactgcggcagcctcgtgggcaactgggacgtgatctttggcggaggcaccaagctgaccgtgctgctcgaggacctgaagaacgtgttcccacctgaggtggccgtgttcgagcctagcgaggccgagatcagccacacccagaaagccaccctcgtgtgcctggctaccggcttctaccccgaccatgtggaactgtcttggtgggtcaacggcaaagaggtgcacagcggcgtgtgtaccgacccccagccactgaaagaacagcccgccctgaacgacagccggtactgcctgagcagcagactgagagtgtccgccaccttctggcagaacccccggaaccacttcagatgccaggtgcagttctacggcctgagcgagaacgacgagtggacccaggacagagccaagcccgtgacccagatcgtgtctgccgaagcctggggcagagccgatgatgtgattaagatccactggcaggaaaagaagtccaacaccatcctgggcagccaggaaggcaacaccatgaagaccaacgacacctacatgaagttcagctggctgaccgtgcccgagaagtccctggacaaagaacacagatgcatcgtgcggcacgaaaacaacaagaacggcgtggaccaggaaatcatcttcccacccatcaagaccgatgtgattacaatggaccccaaggacaactgctccaaggacgccaacgataccctgctgctccagctgaccaacaccagcgcctactacatgtacttgttgctgctgctgaagtccgtggtgtacttcgccatcatcacatgctgcctgctgcggagaaccgccttctgctgcaacggcgagaagtctagggccaagcgatctggatctggagcaacaaacttctcactactcaaacaagcaggtgacgtggaggagaatcccgggcctactagtatggactggatttggcgcatccttttccttgtcggcgctgctaccggcgcgcattccttcgaacagccccagctccaggaatctggccccacactggtggaagccagcgagacactgagcctgacctgtgccgtgtccggcgattctaccgccgcctgcaatagcttctggggctgggtgcgccagcctcctggaaagggactggaatgggtgggaagcctgagccactgcgccagctattggaaccggggctggacctaccacaaccccagcctgaagtccagactgaccctggccctggacacccccaagaacctggtgttcctgaagctgaacagcgtgacagccgccgacaccgccacctactactgtgccagatttggcggcgaggtgctgcggtacaccgactggcctaaacctgcctgggtggacctgtggggcagaggaacactcgtgaccgtgtccagcacgcgtatccagaaccctgatcctgccgtgtaccagctgcgggatagcaagagcagcgacaagagcgtgtgtctgttcaccgacttcgacagccagaccaacgtgtcccagagcaaggactccgacgtgtacatcaccgataagtgcgtgctggacatgcggagcatggacttcaagagcaactccgccgtggcctggtccaacaagtccgatttcgcctgcgccaacgccttcaacaacagcattatccccgaggacacattcttcccaagccccgagagcagcgactccaccgaccacgtgaagcccaaagagacagagaacaccaagcagcccagcaagagctgccacaagcccaaggccatcgtgcacaccgagaaagtgaacatgatgagcctgaccgtgctgggcctgcggatgctgttcgccaaaaccgtggccgtgaacttcctgctgaccgccaagctgttcttcctc

SEQ ID NO: 7107 - DNA, 2160 bp, synthetic construct
  source 1..2160: mol_type = other DNA
atggccttaccagtgaccgccttgctcctgccgctggccttgctgctccacgccgccaggccggagatcgtgctgacacagagccctggcaccctgagcctgtctccaggcgagacagccatcatcagctgccggacaagccagtacggcagcctggcctggtatcagcagaggccaggacaggcccccagactcgtgatctacagcggcagcacaagagccgccggaatccccgatagattcagcggctccagatggggacccgactacaacctgaccatcagcaacctggaaagcggcgacttcggcgtgtactactgccagcagtacgagttcttcggccagggcaccaaggtgcaggtggacatcaaaagactcgaggacctgaagaacgtgttcccacctgaggtggccgtgttcgagcctagcgaggccgagatcagccacacccagaaagccaccctcgtgtgcctggctaccggcttctaccccgaccatgtggaactgtcttggtgggtcaacggcaaagaggtgcacagcggcgtgtgtaccgacccccagccactgaaagaacagcccgccctgaacgacagccggtactgcctgagcagcagactgagagtgtccgccaccttctggcagaacccccggaaccacttcagatgccaggtgcagttctacggcctgagcgagaacgacgagtggacccaggacagagccaagcccgtgacccagatcgtgtctgccgaagcctggggcagagccgatgatgtgattaagatccactggcaggaaaagaagtccaacaccatcctgggcagccaggaaggcaacaccatgaagaccaacgacacctacatgaagttcagctggctgaccgtgcccgagaagtccctggacaaagaacacagatgcatcgtgcggcacgaaaacaacaagaacggcgtggaccaggaaatcatcttcccacccatcaagaccgatgtgattacaatggaccccaaggacaactgctccaaggacgccaacgataccctgctgctccagctgaccaacaccagcgcctactacatgtacttgttgctgctgctgaagtccgtggtgtacttcgccatcatcacatgctgcctgctgcggagaaccgccttctgctgcaacggcgagaagtctagggccaagcgatctggatctggagcaacaaacttctcactactcaaacaagcaggtgacgtggaggagaatcccgggcctactagtatggactggatttggcgcatccttttccttgtcggcgctgctaccggcgcgcattccttcgaacaggtgcagctggtgcagtctggcggccagatgaagaaacccggcgagagcatgagaatcagctgtcgggcctccggctacgagttcatcgactgcaccctgaactggatcagactggcccctggcaagcggcctgagtggatgggatggctgaagcctagaggcggagccgtgaactacgccagacctctccagggcagagtgaccatgaccagggacgtgtacagcgataccgccttcctggaactgcggagcctgaccgtggatgataccgccgtgtacttctgcaccagaggcaagaactgcgattacaactgggacttcgagcactggggcagaggcacccctgtgatcgtgtctagcacgcgtatccagaaccctgatcctgccgtgtaccagctgcgggatagcaagagcagcgacaagagcgtgtgtctgttcaccgacttcgacagccagaccaacgtgtcccagagcaaggactccgacgtgtacatcaccgataagtgcgtgctggacatgcggagcatggacttcaagagcaactccgccgtggcctggtccaacaagtccgatttcgcctgcgccaacgccttcaacaacagcattatccccgaggacacattcttcccaagccccgagagcagcgactccaccgaccacgtgaagcccaaagagacagagaacaccaagcagcccagcaagagctgccacaagcccaaggccatcgtgcacaccgagaaagtgaacatgatgagcctgaccgtgctgggcctgcggatgctgttcgccaaaaccgtggccgtgaacttcctgctgaccgccaagctgttcttcctc

SEQ ID NO: 7108 - DNA, 2190 bp, synthetic construct
  source 1..2190: mol_type = other DNA
atggccttaccagtgaccgccttgctcctgccgctggccttgctgctccacgccgccaggccggagctggtgctgacacagagccctggcaccctgtctctgtctgccggcgaaagagccaccctgagctgtagagccagccagagcgtgtcctctggcagcctggcttggtatcagcagaagccaggccaggcccccagactgctgatctacggcgcttctaccagagccaccggcatccccgatagattcagcggctctggctccggcaccgacttcaccctgacaatcggcagactggaacccgaggacctggccgtgtactactgccagcagtacggcaccagcccctacacattcggccagggcaccaagctggaaatcctcgaggacctgaagaacgtgttcccacctgaggtggccgtgttcgagcctagcgaggccgagatcagccacacccagaaagccaccctcgtgtgcctggctaccggcttctaccccgaccatgtggaactgtcttggtgggtcaacggcaaagaggtgcacagcggcgtgtgtaccgacccccagccactgaaagaacagcccgccctgaacgacagccggtactgcctgagcagcagactgagagtgtccgccaccttctggcagaacccccggaaccacttcagatgccaggtgcagttctacggcctgagcgagaacgacgagtggacccaggacagagccaagcccgtgacccagatcgtgtctgccgaagcctggggcagagccgatgatgtgattaagatccactggcaggaaaagaagtccaacaccatcctgggcagccaggaaggcaacaccatgaagaccaacgacacctacatgaagttcagctggctgaccgtgcccgagaagtccctggacaaagaacacagatgcatcgtgcggcacgaaaacaacaagaacggcgtggaccaggaaatcatcttcccacccatcaagaccgatgtgattacaatggaccccaaggacaactgctccaaggacgccaacgataccctgctgctccagctgaccaacaccagcgcctactacatgtacttgttgctgctgctgaagtccgtggtgtacttcgccatcatcacatgctgcctgctgcggagaaccgccttctgctgcaacggcgagaagtctagggccaagcgatctggatctggagcaacaaacttctcactactcaaacaagcaggtgacgtggaggagaatcccgggcctactagtatggactggatttggcgcatccttttccttgtcggcgctgctaccggcgcgcattccttcgaactggaacagagcggagccgaagtgaagaaacccggcagcagcgtgcaggtgtcctgcaaagcaagcggcggcaccttctctatgtacggcttcaactgggtgcgccaggctcctggacacggcctggaatggatgggcggcatcatccccatcttcggcacctccaactacgcccagaaattccggggcagagtgaccttcaccgccgaccaggccacaagcaccgcctacatggaactgaccaacctgcggagcgacgacaccgccgtgtattattgcgccagagacttcggccccgactgggaggatggcgacagctacgatggcagcggcagaggcttcttcgacttctggggccagggaacccttgtgaccgtgtcctcaacgcgtatccagaaccctgatcctgccgtgtaccagctgcgggatagcaagagcagcgacaagagcgtgtgtctgttcaccgacttcgacagccagaccaacgtgtcccagagcaaggactccgacgtgtacatcaccgataagtgcgtgctggacatgcggagcatggacttcaagagcaactccgccgtggcctggtccaacaagtccgatttcgcctgcgccaacgccttcaacaacagcattatccccgaggacacattcttcccaagccccgagagcagcgactccaccgaccacgtgaagcccaaagagacagagaacaccaagcagcccagcaagagctgccacaagcccaaggccatcgtgcacaccgagaaagtgaacatgatgagcctgaccgtgctgggcctgcggatgctgttcgccaaaaccgtggccgtgaacttcctgctgaccgccaagctgttcttcctc

SEQ ID NO: 7109 - DNA, 2130 bp, synthetic construct
  source 1..2130: mol_type = other DNA
atggccttaccagtgaccgccttgctcctgccgctggccttgctgctccacgccgccaggccggacatccagatgacccagagccccagcagcctgtctgccagcgtgggcgacagagtgaccatcacctgtcaggccagccaggacatcaacaactacctgaactggtatcagcagaagcccggcaaggcccccaagctgctgatctacgacgccagcaatctgcagaccggcgtgcccagcagattttccggctctggcagcggcaccgacttcaccttcaccatcgaggacattgccacctactactgccagcagtacaccttcggccctggcaccaaggtggacatcaaactcgaggacctgaagaacgtgttcccacctgaggtggccgtgttcgagcctagcgaggccgagatcagccacacccagaaagccaccctcgtgtgcctggctaccggcttctaccccgaccatgtggaactgtcttggtgggtcaacggcaaagaggtgcacagcggcgtgtgtaccgacccccagccactgaaagaacagcccgccctgaacgacagccggtactgcctgagcagcagactgagagtgtccgccaccttctggcagaacccccggaaccacttcagatgccaggtgcagttctacggcctgagcgagaacgacgagtggacccaggacagagccaagcccgtgacccagatcgtgtctgccgaagcctggggcagagccgatgatgtgattaagatccactggcaggaaaagaagtccaacaccatcctgggcagccaggaaggcaacaccatgaagaccaacgacacctacatgaagttcagctggctgaccgtgcccgagaagtccctggacaaagaacacagatgcatcgtgcggcacgaaaacaacaagaacggcgtggaccaggaaatcatcttcccacccatcaagaccgatgtgattacaatggaccccaaggacaactgctccaaggacgccaacgataccctgctgctccagctgaccaacaccagcgcctactacatgtacttgttgctgctgctgaagtccgtggtgtacttcgccatcatcacatgctgcctgctgcggagaaccgccttctgctgcaacggcgagaagtctagggccaagcgatctggatctggagcaacaaacttctcactactcaaacaagcaggtgacgtggaggagaatcccgggcctactagtatggactggatttggcgcatccttttccttgtcggcgctgctaccggcgcgcattccttcgaagaagtgcaactgctggaatctggcggcggactggtgcagcctggcggatctctgagactgagctgtgccgccagcggcttcacctttagctggtacagcatgacctgggtgcgccaggcccctggcaaaggactggaatgggtgtccagcatcgtgccctggggcgatttcacccagtacgccgatagcgtgaagggccggttcaccatcagccgggacaacagcaagaacaccctgtacctgcagatgaacagcctgcgggccgaggacaccgccgtgtactattgtgccaagggacctggctggggcagcttcgatctgtggggcagaggaacccttgtgaccgtgtccagcacgcgtatccagaaccctgatcctgccgtgtaccagctgcgggatagcaagagcagcgacaagagcgtgtgtctgttcaccgacttcgacagccagaccaacgtgtcccagagcaaggactccgacgtgtacatcaccgataagtgcgtgctggacatgcggagcatggacttcaagagcaactccgccgtggcctggtccaacaagtccgatttcgcctgcgccaacgccttcaacaacagcattatccccgaggacacattcttcccaagccccgagagcagcgactccaccgaccacgtgaagcccaaagagacagagaacaccaagcagcccagcaagagctgccacaagcccaaggccatcgtgcacaccgagaaagtgaacatgatgagcctgaccgtgctgggcctgcggatgctgttcgccaaaaccgtggccgtgaacttcctgctgaccgccaagctgttcttcctc

SEQ ID NO: 7110 - DNA, 2160 bp, synthetic construct
  source 1..2160: mol_type = other DNA
atggccttaccagtgaccgccttgctcctgccgctggccttgctgctccacgccgccaggccggacatccagatgacccagagccccagcagcctgtctgccagcgtgggcgacagagtgaccatcacctgtaccgccagcctgagcgtgtccagcacctacctgcactggtatcagcagaagcccggcagcagccccaagctgtggatctacagcaccagcaacctggcctccggcgtgcccagcagattttctggcagcggctctggcaccagctacaccctgaccatcagctccctccagcccgaggacttcgccacctactactgccaccagtaccacagaagccccctgacctttggcggaggcaccaaggtggaaatcaagagactcgaggacctgaagaacgtgttcccacctgaggtggccgtgttcgagcctagcgaggccgagatcagccacacccagaaagccaccctcgtgtgcctggctaccggcttctaccccgaccatgtggaactgtcttggtgggtcaacggcaaagaggtgcacagcggcgtgtgtaccgacccccagccactgaaagaacagcccgccctgaacgacagccggtactgcctgagcagcagactgagagtgtccgccaccttctggcagaacccccggaaccacttcagatgccaggtgcagttctacggcctgagcgagaacgacgagtggacccaggacagagccaagcccgtgacccagatcgtgtctgccgaagcctggggcagagccgatgatgtgattaagatccactggcaggaaaagaagtccaacaccatcctgggcagccaggaaggcaacaccatgaagaccaacgacacctacatgaagttcagctggctgaccgtgcccgagaagtccctggacaaagaacacagatgcatcgtgcggcacgaaaacaacaagaacggcgtggaccaggaaatcatcttcccacccatcaagaccgatgtgattacaatggaccccaaggacaactgctccaaggacgccaacgataccctgctgctccagctgaccaacaccagcgcctactacatgtacttgttgctgctgctgaagtccgtggtgtacttcgccatcatcacatgctgcctgctgcggagaaccgccttctgctgcaacggcgagaagtctagggccaagcgatctggatctggagcaacaaacttctcactactcaaacaagcaggtgacgtggaggagaatcccgggcctactagtatggactggatttggcgcatccttttccttgtcggcgctgctaccggcgcgcattccttcgaagaagtgcaactggtggaatctggcggcggactggtgcagcctggcggatctctgagactgagctgtgccgccagcggcttcagcctgaccaaatacggcgtgcactgggtgcgccaggcccctggaaaaggactggaatgggtgggagtgaagtgggctggcggctccaccgactacaacagcgccctgatgagccggttcaccatcagcaaggacaacgccaagaacagcctgtacctccagatgaactccctgcgggccgaggacaccgccgtgtactactgtgccagagatcaccgggacgctatggactactggggccagggaacactcgtgaccgtgtcctctacgcgtatccagaaccctgatcctgccgtgtaccagctgcgggatagcaagagcagcgacaagagcgtgtgtctgttcaccgacttcgacagccagaccaacgtgtcccagagcaaggactccgacgtgtacatcaccgataagtgcgtgctggacatgcggagcatggacttcaagagcaactccgccgtggcctggtccaacaagtccgatttcgcctgcgccaacgccttcaacaacagcattatccccgaggacacattcttcccaagccccgagagcagcgactccaccgaccacgtgaagcccaaagagacagagaacaccaagcagcccagcaagagctgccacaagcccaaggccatcgtgcacaccgagaaagtgaacatgatgagcctgaccgtgctgggcctgcggatgctgttcgccaaaaccgtggccgtgaacttcctgctgaccgccaagctgttcttcctc

SEQ ID NO: 7111 - DNA, 2172 bp, synthetic construct
  source 1..2172: mol_type = other DNA
atggccttaccagtgaccgccttgctcctgccgctggccttgctgctccacgccgccaggccggacatccagatgacccagagccccagcagcctgtctgccagcgtgggcgacagagtgaccatcacatgcaaggccagccaggacgtgggaacagccgtggcctggtatcagcagaagcctggcaaggcccccaagctgctgatctacagcgccagctacagatccaccggcgtgcccagcagattttccggctctggcagcggcaccgacttcaccctgaccatctctagcctccagcccgaggacttcgccacctactactgccagcaccactactccgccccctggacatttggcggaggcaccaaggtggaaatcaagctcgaggacctgaagaacgtgttcccacctgaggtggccgtgttcgagcctagcgaggccgagatcagccacacccagaaagccaccctcgtgtgcctggctaccggcttctaccccgaccatgtggaactgtcttggtgggtcaacggcaaagaggtgcacagcggcgtgtgtaccgacccccagccactgaaagaacagcccgccctgaacgacagccggtactgcctgagcagcagactgagagtgtccgccaccttctggcagaacccccggaaccacttcagatgccaggtgcagttctacggcctgagcgagaacgacgagtggacccaggacagagccaagcccgtgacccagatcgtgtctgccgaagcctggggcagagccgatgatgtgattaagatccactggcaggaaaagaagtccaacaccatcctgggcagccaggaaggcaacaccatgaagaccaacgacacctacatgaagttcagctggctgaccgtgcccgagaagtccctggacaaagaacacagatgcatcgtgcggcacgaaaacaacaagaacggcgtggaccaggaaatcatcttcccacccatcaagaccgatgtgattacaatggaccccaaggacaactgctccaaggacgccaacgataccctgctgctccagctgaccaacaccagcgcctactacatgtacttgttgctgctgctgaagtccgtggtgtacttcgccatcatcacatgctgcctgctgcggagaaccgccttctgctgcaacggcgagaagtctagggccaagcgatctggatctggagcaacaaacttctcactactcaaacaagcaggtgacgtggaggagaatcccgggcctactagtatggactggatttggcgcatccttttccttgtcggcgctgctaccggcgcgcattccttcgaagaagtgcaactggtggaatcaggcggcggactggtgcagcctggcggatctctgagactgagctgtgccgccagcggcttcaccttcagcagaaacggcatgagctgggtgcgccaggcccctggaaaaggactggaatgggtggcaaccgtgtccagcggcggcagctacatctactacgccgacagcgtgaagggccggttcaccatctccagagacaacgccaagaacagcctgtacctccagatgaactccctgcgggccgaggacaccgccgtgtactattgtgccagacagggcaccaccgccctggctaccagattcttcgatgtgtggggccagggcaccctcgtgaccgtgtcatctacgcgtatccagaaccctgatcctgccgtgtaccagctgcgggatagcaagagcagcgacaagagcgtgtgtctgttcaccgacttcgacagccagaccaacgtgtcccagagcaaggactccgacgtgtacatcaccgataagtgcgtgctggacatgcggagcatggacttcaagagcaactccgccgtggcctggtccaacaagtccgatttcgcctgcgccaacgccttcaacaacagcattatccccgaggacacattcttcccaagccccgagagcagcgactccaccgaccacgtgaagcccaaagagacagagaacaccaagcagcccagcaagagctgccacaagcccaaggccatcgtgcacaccgagaaagtgaacatgatgagcctgaccgtgctgggcctgcggatgctgttcgccaaaaccgtggccgtgaacttcctgctgaccgccaagctgttcttcctc

SEQ ID NO: 7112 - DNA, 2160 bp, synthetic construct
  source 1..2160: mol_type = other DNA
atggccttaccagtgaccgccttgctcctgccgctggccttgctgctccacgccgccaggccggacatccagatgacccagagcccccctagcctgtctgcctctgtgggcggcaaagtgaccatcacatgcaaggccagccaggacatcgaccgctacatggcctggtatcaggacaagcccggcaagggacccaagctgctgatccacgataccagcaccctccagcccggcatccccagcagattttctggcagcggctccggcagagactacagcttcagcatcagcaacctggaacccgaggacattgccacctactactgcctccagtacgacaacctgtggaccttcggcggaggcaccaagctggaaatcaagagactcgaggacctgaagaacgtgttcccacctgaggtggccgtgttcgagcctagcgaggccgagatcagccacacccagaaagccaccctcgtgtgcctggctaccggcttctaccccgaccatgtggaactgtcttggtgggtcaacggcaaagaggtgcacagcggcgtgtgtaccgacccccagccactgaaagaacagcccgccctgaacgacagccggtactgcctgagcagcagactgagagtgtccgccaccttctggcagaacccccggaaccacttcagatgccaggtgcagttctacggcctgagcgagaacgacgagtggacccaggacagagccaagcccgtgacccagatcgtgtctgccgaagcctggggcagagccgatgatgtgattaagatccactggcaggaaaagaagtccaacaccatcctgggcagccaggaaggcaacaccatgaagaccaacgacacctacatgaagttcagctggctgaccgtgcccgagaagtccctggacaaagaacacagatgcatcgtgcggcacgaaaacaacaagaacggcgtggaccaggaaatcatcttcccacccatcaagaccgatgtgattacaatggaccccaaggacaactgctccaaggacgccaacgataccctgctgctccagctgaccaacaccagcgcctactacatgtacttgttgctgctgctgaagtccgtggtgtacttcgccatcatcacatgctgcctgctgcggagaaccgccttctgctgcaacggcgagaagtctagggccaagcgatctggatctggagcaacaaacttctcactactcaaacaagcaggtgacgtggaggagaatcccgggcctactagtatggactggatttggcgcatccttttccttgtcggcgctgctaccggcgcgcattccttcgaacaggtgcaactggtgcagagcggagccgagcttgtgaagcctggcgcttccgtgaagatgagctgcaaagccagcggctacatcttcaccaactacaacatccactgggtcaagaagtccccaggccagggcctggaatggatcggagccatctaccccggaaacggcgacgccccttacagccagaagttccaggacagagccaccctgaccgccgacaccagcagcagcaccacctacatggaactgagcagcctgaccagcgaggacagcgccgtgtactattgcgtgcgggccaactgggatgtggccttcgcctattggggccagggcacactggtgtccgtgtcctctacgcgtatccagaaccctgatcctgccgtgtaccagctgcgggatagcaagagcagcgacaagagcgtgtgtctgttcaccgacttcgacagccagaccaacgtgtcccagagcaaggactccgacgtgtacatcaccgataagtgcgtgctggacatgcggagcatggacttcaagagcaactccgccgtggcctggtccaacaagtccgatttcgcctgcgccaacgccttcaacaacagcattatccccgaggacacattcttcccaagccccgagagcagcgactccaccgaccacgtgaagcccaaagagacagagaacaccaagcagcccagcaagagctgccacaagcccaaggccatcgtgcacaccgagaaagtgaacatgatgagcctgaccgtgctgggcctgcggatgctgttcgccaaaaccgtggccgtgaacttcctgctgaccgccaagctgttcttcctc

SEQ ID NO: 7113 - DNA, 2163 bp, synthetic construct
  source 1..2163: mol_type = other DNA
atggccttaccagtgaccgccttgctcctgccgctggccttgctgctccacgccgccaggccggacatccagatgacccagagccctgccagcctgtctgcctctgtgggcgagacagtgaccatcacctgtcgggtgtccggcaacatccacaactacctggcctggtatcagcagaagcagggcaagagcccccaactgctggtgtacaacgccaagaccctggccgatggcgtgcccagcagattttctggctctggcagcggcacccagtacagcctgaagatcaacagcctccagcccgaggacttcggcagctactactgccagcacttctggtccaacccctacaccttcggcggaggcaccaagctggaaatcaagctcgaggacctgaagaacgtgttcccacctgaggtggccgtgttcgagcctagcgaggccgagatcagccacacccagaaagccaccctcgtgtgcctggctaccggcttctaccccgaccatgtggaactgtcttggtgggtcaacggcaaagaggtgcacagcggcgtgtgtaccgacccccagccactgaaagaacagcccgccctgaacgacagccggtactgcctgagcagcagactgagagtgtccgccaccttctggcagaacccccggaaccacttcagatgccaggtgcagttctacggcctgagcgagaacgacgagtggacccaggacagagccaagcccgtgacccagatcgtgtctgccgaagcctggggcagagccgatgatgtgattaagatccactggcaggaaaagaagtccaacaccatcctgggcagccaggaaggcaacaccatgaagaccaacgacacctacatgaagttcagctggctgaccgtgcccgagaagtccctggacaaagaacacagatgcatcgtgcggcacgaaaacaacaagaacggcgtggaccaggaaatcatcttcccacccatcaagaccgatgtgattacaatggaccccaaggacaactgctccaaggacgccaacgataccctgctgctccagctgaccaacaccagcgcctactacatgtacttgttgctgctgctgaagtccgtggtgtacttcgccatcatcacatgctgcctgctgcggagaaccgccttctgctgcaacggcgagaagtctagggccaagcgatctggatctggagcaacaaacttctcactactcaaacaagcaggtgacgtggaggagaatcccgggcctactagtatggactggatttggcgcatccttttccttgtcggcgctgctaccggcgcgcattccttcgaacaggtgcaactccagcagtctggcgcttccgtgaaggtgtcctgcaaggccagcgaactcgtgcggcctggcacaggctacgccttcaccaattacctgatcgagtgggtcaagcagaggcccggacagggcctggaatggatcggagtgattaacccaggcagcggcggcaccaactacaacgagaagttcaagggcaaggccaccctgaccgccgacaagagcagcagcacagcctacatgcaactgagcagcctgaccagcgacgacagcgccgtgtacttctgcgcccggtacagaagctacgactggtacttcgacgtgtggggagccggcaccaccgtgacagtgtcatctacgcgtatccagaaccctgatcctgccgtgtaccagctgcgggatagcaagagcagcgacaagagcgtgtgtctgttcaccgacttcgacagccagaccaacgtgtcccagagcaaggactccgacgtgtacatcaccgataagtgcgtgctggacatgcggagcatggacttcaagagcaactccgccgtggcctggtccaacaagtccgatttcgcctgcgccaacgccttcaacaacagcattatccccgaggacacattcttcccaagccccgagagcagcgactccaccgaccacgtgaagcccaaagagacagagaacaccaagcagcccagcaagagctgccacaagcccaaggccatcgtgcacaccgagaaagtgaacatgatgagcctgaccgtgctgggcctgcggatgctgttcgccaaaaccgtggccgtgaacttcctgctgaccgccaagctgttcttcctc

SEQ ID NO: 7114 - DNA, 2160 bp, synthetic construct
  source 1..2160: mol_type = other DNA
atggccttaccagtgaccgccttgctcctgccgctggccttgctgctccacgccgccaggccggacatccagatgacccagagcttcagcagcctgagcgccagcgtgggcgacagagtgaccatcacctgtagagccagccaggacatcagcaactacctgaactggtatcagcagaagcccggcaaggcccccaagctgctgatctactacaccagcagactgcacagcggcgtgcccagcagattttctggcagcggctccggcaccgactacaccctgacaatcagctccctgcagcccgaggacttcgctacctacttctgtcagcaaggcaacaccctgccctggacctttggcggaggcaccaagctggaaatcaagagactcgaggacctgaagaacgtgttcccacctgaggtggccgtgttcgagcctagcgaggccgagatcagccacacccagaaagccaccctcgtgtgcctggctaccggcttctaccccgaccatgtggaactgtcttggtgggtcaacggcaaagaggtgcacagcggcgtgtgtaccgacccccagccactgaaagaacagcccgccctgaacgacagccggtactgcctgagcagcagactgagagtgtccgccaccttctggcagaacccccggaaccacttcagatgccaggtgcagttctacggcctgagcgagaacgacgagtggacccaggacagagccaagcccgtgacccagatcgtgtctgccgaagcctggggcagagccgatgatgtgattaagatccactggcaggaaaagaagtccaacaccatcctgggcagccaggaaggcaacaccatgaagaccaacgacacctacatgaagttcagctggctgaccgtgcccgagaagtccctggacaaagaacacagatgcatcgtgcggcacgaaaacaacaagaacggcgtggaccaggaaatcatcttcccacccatcaagaccgatgtgattacaatggaccccaaggacaactgctccaaggacgccaacgataccctgctgctccagctgaccaacaccagcgcctactacatgtacttgttgctgctgctgaagtccgtggtgtacttcgccatcatcacatgctgcctgctgcggagaaccgccttctgctgcaacggcgagaagtctagggccaagcgatctggatctggagcaacaaacttctcactactcaaacaagcaggtgacgtggaggagaatcccgggcctactagtatggactggatttggcgcatccttttccttgtcggcgctgctaccggcgcgcattccttcgaagaagtgcaactggtgcagtccggcggagggctggtgcagagcggaggatctctgagactgagctgcagagccagcggctacaccttcacccggtactggatgctgtgggtgcgccagaggccaggcaagggactggaatgggtggccgagatcaacccccggaacgaccggaccaactacaacgagaagttcaagacccggttcaccatcagcgtggacagaagcaagaacaccctgtacctgcagatggacagcctgcgggccgaggataccgccgtgtacttttgtgctctgggaggcggctacgctatggactactggggccagggaacccttgtgaccgtgtcctctacgcgtatccagaaccctgatcctgccgtgtaccagctgcgggatagcaagagcagcgacaagagcgtgtgtctgttcaccgacttcgacagccagaccaacgtgtcccagagcaaggactccgacgtgtacatcaccgataagtgcgtgctggacatgcggagcatggacttcaagagcaactccgccgtggcctggtccaacaagtccgatttcgcctgcgccaacgccttcaacaacagcattatccccgaggacacattcttcccaagccccgagagcagcgactccaccgaccacgtgaagcccaaagagacagagaacaccaagcagcccagcaagagctgccacaagcccaaggccatcgtgcacaccgagaaagtgaacatgatgagcctgaccgtgctgggcctgcggatgctgttcgccaaaaccgtggccgtgaacttcctgctgaccgccaagctgttcttcctc

SEQ ID NO: 7115 - DNA, 2163 bp, synthetic construct
  source 1..2163: mol_type = other DNA
atggccttaccagtgaccgccttgctcctgccgctggccttgctgctccacgccgccaggccggacatccagatgacacagtctccggcgtcactgtccgcctccgtgggggagactgtgactattatttgtagggcatcagttaacatctactcttatttggcctggtaccagcagaagcaaggcaagagtcctcagctgctggtgtataatgcgaagatcctggcagagggcgtgccgagccggttctccggcagcggctcaggtacccaattttccctcaagatcaattcactgcagccagaggactttggcagttactattgtcaacaccactacggcacattcactttcgggtccggtacaaaattggagattaagcgactcgaggacctgaagaacgtgttcccacctgaggtggccgtgttcgagcctagcgaggccgagatcagccacacccagaaagccaccctcgtgtgcctggctaccggcttctaccccgaccatgtggaactgtcttggtgggtcaacggcaaagaggtgcacagcggcgtgtgtaccgacccccagccactgaaagaacagcccgccctgaacgacagccggtactgcctgagcagcagactgagagtgtccgccaccttctggcagaacccccggaaccacttcagatgccaggtgcagttctacggcctgagcgagaacgacgagtggacccaggacagagccaagcccgtgacccagatcgtgtctgccgaagcctggggcagagccgatgatgtgattaagatccactggcaggaaaagaagtccaacaccatcctgggcagccaggaaggcaacaccatgaagaccaacgacacctacatgaagttcagctggctgaccgtgcccgagaagtccctggacaaagaacacagatgcatcgtgcggcacgaaaacaacaagaacggcgtggaccaggaaatcatcttcccacccatcaagaccgatgtgattacaatggaccccaaggacaactgctccaaggacgccaacgataccctgctgctccagctgaccaacaccagcgcctactacatgtacttgttgctgctgctgaagtccgtggtgtacttcgccatcatcacatgctgcctgctgcggagaaccgccttctgctgcaacggcgagaagtctagggccaagcgatctggatctggagcaacaaacttctcactactcaaacaagcaggtgacgtggaggagaatcccgggcctactagtatggactggatttggcgcatccttttccttgtcggcgctgctaccggcgcgcattccttcgaacaggtacagttgaaagaaagcgggcctggactggtagcgccttcccaatctctctccatcacgtgcaccatctctggcttctccctgacttcctatggagttcactgggtgaggcagccccccggcaagggactggaatggctggtcgtcatctggtccgacgggtccacaacctacaactccgctctgaaaagtcggctctctatttctaaagataatagcaagagccaggtgtttctgaaaatgaactctctgcagaccgatgatacggccatttactactgcgcttcacactatggctcaaccttggcattcgcttcctggggccacggaacactggtgaccgtttccgcagccacgcgtatccagaaccctgatcctgccgtgtaccagctgcgggatagcaagagcagcgacaagagcgtgtgtctgttcaccgacttcgacagccagaccaacgtgtcccagagcaaggactccgacgtgtacatcaccgataagtgcgtgctggacatgcggagcatggacttcaagagcaactccgccgtggcctggtccaacaagtccgatttcgcctgcgccaacgccttcaacaacagcattatccccgaggacacattcttcccaagccccgagagcagcgactccaccgaccacgtgaagcccaaagagacagagaacaccaagcagcccagcaagagctgccacaagcccaaggccatcgtgcacaccgagaaagtgaacatgatgagcctgaccgtgctgggcctgcggatgctgttcgccaaaaccgtggccgtgaacttcctgctgaccgccaagctgttcttcctc

SEQ ID NO: 7116 - DNA, 2187 bp, synthetic construct
  source 1..2187: mol_type = other DNA
atggccttaccagtgaccgccttgctcctgccgctggccttgctgctccacgccgccaggccggacattgtgatgacccagtctcacaaattcatgtccacatcagtaggagacagggtcagcgtcacctgcaaggccagtcagaatgtgggtaataatgtagcctggtatcaacagaaaccagggcaatctcctaaagtactgatttactcggcatcctaccggtacagtggagtccctgatcgcttcacaggcagtggatctgggacagatttcactctcaccatcagtaatgtgcagtctgaagacttggcagagtatttctgtcagcaatataacacctatccattcacgttcggctcggggacaaagttggaaataaaactcgaggacctgaagaacgtgttcccacctgaggtggccgtgttcgagcctagcgaggccgagatcagccacacccagaaagccaccctcgtgtgcctggctaccggcttctaccccgaccatgtggaactgtcttggtgggtcaacggcaaagaggtgcacagcggcgtgtgtaccgacccccagccactgaaagaacagcccgccctgaacgacagccggtactgcctgagcagcagactgagagtgtccgccaccttctggcagaacccccggaaccacttcagatgccaggtgcagttctacggcctgagcgagaacgacgagtggacccaggacagagccaagcccgtgacccagatcgtgtctgccgaagcctggggcagagccgatgatgtgattaagatccactggcaggaaaagaagtccaacaccatcctgggcagccaggaaggcaacaccatgaagaccaacgacacctacatgaagttcagctggctgaccgtgcccgagaagtccctggacaaagaacacagatgcatcgtgcggcacgaaaacaacaagaacggcgtggaccaggaaatcatcttcccacccatcaagaccgatgtgattacaatggaccccaaggacaactgctccaaggacgccaacgataccctgctgctccagctgaccaacaccagcgcctactacatgtacttgttgctgctgctgaagtccgtggtgtacttcgccatcatcacatgctgcctgctgcggagaaccgccttctgctgcaacggcgagaagtctagggccaagcgatctggatctggagcaacaaacttctcactactcaaacaagcaggtgacgtggaggagaatcccgggcctactagtatggactggatttggcgcatccttttccttgtcggcgctgctaccggcgcgcattccttcgaagaggtacagctggaggaaagcggtggaggactggtgcaacctggagggtctatgaagctctcttgcgtagcttctgggttcacgttctccaattactggatgaactgggtgcggcagtcccccgagaaaggcctggaatgggtagcagaaattcggttcaagtcccataactatgctacacactttgccgagtctgtcaaaggccggttcactattagtcgagacgacagcaagtcttcagtctacctgcagatgaataacttgcgggcagaggacacaggtatctactactgcaccaggagaatcggcaactccgactatgactggtggtactttgacgtctggggagcaggcaccagcgtgacggtgagttcagcctcaacgcgtatccagaaccctgatcctgccgtgtaccagctgcgggatagcaagagcagcgacaagagcgtgtgtctgttcaccgacttcgacagccagaccaacgtgtcccagagcaaggactccgacgtgtacatcaccgataagtgcgtgctggacatgcggagcatggacttcaagagcaactccgccgtggcctggtccaacaagtccgatttcgcctgcgccaacgccttcaacaacagcattatccccgaggacacattcttcccaagccccgagagcagcgactccaccgaccacgtgaagcccaaagagacagagaacaccaagcagcccagcaagagctgccacaagcccaaggccatcgtgcacaccgagaaagtgaacatgatgagcctgaccgtgctgggcctgcggatgctgttcgccaaaaccgtggccgtgaacttcctgctgaccgccaagctgttcttcctc

SEQ ID NO: 7117 - DNA, 2166 bp, synthetic construct
  source 1..2166: mol_type = other DNA
atggccttaccagtgaccgccttgctcctgccgctggccttgctgctccacgccgccaggccggaccagatcgtgctgacccagtcccccgctattatgtccgcatcaccgggcgaaaaagtgacgatctcctgtagcgcttcatctagcgtctcctacatgtattggtatcaacagaaacctgggtctagcccaaagccgtggatctacagaaccagtaaccttgccagtggggtgccagcccgcttcagcggtagtggcagtggaacttcctatagcctcacaataagcaacatggaggctgaagatgccgctgcctattactgccagcagtaccacagttacccaaccacgttcggcgggggaactaagctcgaagtaaaactcgaggacctgaagaacgtgttcccacctgaggtggccgtgttcgagcctagcgaggccgagatcagccacacccagaaagccaccctcgtgtgcctggctaccggcttctaccccgaccatgtggaactgtcttggtgggtcaacggcaaagaggtgcacagcggcgtgtgtaccgacccccagccactgaaagaacagcccgccctgaacgacagccggtactgcctgagcagcagactgagagtgtccgccaccttctggcagaacccccggaaccacttcagatgccaggtgcagttctacggcctgagcgagaacgacgagtggacccaggacagagccaagcccgtgacccagatcgtgtctgccgaagcctggggcagagccgatgatgtgattaagatccactggcaggaaaagaagtccaacaccatcctgggcagccaggaaggcaacaccatgaagaccaacgacacctacatgaagttcagctggctgaccgtgcccgagaagtccctggacaaagaacacagatgcatcgtgcggcacgaaaacaacaagaacggcgtggaccaggaaatcatcttcccacccatcaagaccgatgtgattacaatggaccccaaggacaactgctccaaggacgccaacgataccctgctgctccagctgaccaacaccagcgcctactacatgtacttgttgctgctgctgaagtccgtggtgtacttcgccatcatcacatgctgcctgctgcggagaaccgccttctgctgcaacggcgagaagtctagggccaagcgatctggatctggagcaacaaacttctcactactcaaacaagcaggtgacgtggaggagaatcccgggcctactagtatggactggatttggcgcatccttttccttgtcggcgctgctaccggcgcgcattccttcgaagaggtgcagctggtggaatctgggggcggcctggtccaacctaagggatcactcaagctctcttgtgcggccagcggattctctttcaatacctatgctatgaattgggtgagacaggcgcccggaaagggcctcgaatggatagcccatatccggtcaaaatcaaacaatttcgcaacctactatgcggactccgtgaaggaccgattttccatctcccgagatgcctccgagaatattctgttcctgcagatgaataacctcaagacagaggacaccgccatgtactactgtgtgcgccagggcggtgactttcccatggattactgggggcaggggaccagcgtgaccgtgagctctacgcgtatccagaaccctgatcctgccgtgtaccagctgcgggatagcaagagcagcgacaagagcgtgtgtctgttcaccgacttcgacagccagaccaacgtgtcccagagcaaggactccgacgtgtacatcaccgataagtgcgtgctggacatgcggagcatggacttcaagagcaactccgccgtggcctggtccaacaagtccgatttcgcctgcgccaacgccttcaacaacagcattatccccgaggacacattcttcccaagccccgagagcagcgactccaccgaccacgtgaagcccaaagagacagagaacaccaagcagcccagcaagagctgccacaagcccaaggccatcgtgcacaccgagaaagtgaacatgatgagcctgaccgtgctgggcctgcggatgctgttcgccaaaaccgtggccgtgaacttcctgctgaccgccaagctgttcttcctc

SEQ ID NO: 7118 - DNA, 2163 bp, synthetic construct
  source 1..2163: mol_type = other DNA
atggccttaccagtgaccgccttgctcctgccgctggccttgctgctccacgccgccaggccggacgacatccagatgacccagagcagcagcagcttcagcgtgagcctgggcgacagagtgaccatcacctgcatggccagcgaggacatctacatcagactggcctggtaccagcagaagcccggcaacgcccccagactgctgatcagcgccgccaccagcctggagaccggcgtgcccagcagattcagcggcagcggcagcggcaaggactacaccctgagcatcaccagcctgcagaccgaggacgtgggcacctactactgccagcagtactggagcagcccctggaccttcggcggcggcaccaagctggagatcaacctcgaggacctgaagaacgtgttcccacctgaggtggccgtgttcgagcctagcgaggccgagatcagccacacccagaaagccaccctcgtgtgcctggctaccggcttctaccccgaccatgtggaactgtcttggtgggtcaacggcaaagaggtgcacagcggcgtgtgtaccgacccccagccactgaaagaacagcccgccctgaacgacagccggtactgcctgagcagcagactgagagtgtccgccaccttctggcagaacccccggaaccacttcagatgccaggtgcagttctacggcctgagcgagaacgacgagtggacccaggacagagccaagcccgtgacccagatcgtgtctgccgaagcctggggcagagccgatgatgtgattaagatccactggcaggaaaagaagtccaacaccatcctgggcagccaggaaggcaacaccatgaagaccaacgacacctacatgaagttcagctggctgaccgtgcccgagaagtccctggacaaagaacacagatgcatcgtgcggcacgaaaacaacaagaacggcgtggaccaggaaatcatcttcccacccatcaagaccgatgtgattacaatggaccccaaggacaactgctccaaggacgccaacgataccctgctgctccagctgaccaacaccagcgcctactacatgtacttgttgctgctgctgaagtccgtggtgtacttcgccatcatcacatgctgcctgctgcggagaaccgccttctgctgcaacggcgagaagtctagggccaagcgatctggatctggagcaacaaacttctcactactcaaacaagcaggtgacgtggaggagaatcccgggcctactagtatggactggatttggcgcatccttttccttgtcggcgctgctaccggcgcgcattccttcgaagacgtgcagctgcaggagagcggccccggcctggtgaagcccagccagagcctgagcctgacctgcaccgtgaccggctacagcatcaccagcgactacacctggaactggatcagacagttccccggcaacaagctggagtggatgggctacatcacctacagcggcagcaccagctacaaccccagcctgaagagcagaaacagcatcaccagagacaccagcaagaaccagttcttcctgcagctgaacagcgtgaccaccgaggacaccgccacctactactgcgccagactgggcagaagatacacaatggactactggggccagggcaccagcgtgaccgtgagcagcacgcgtatccagaaccctgatcctgccgtgtaccagctgcgggatagcaagagcagcgacaagagcgtgtgtctgttcaccgacttcgacagccagaccaacgtgtcccagagcaaggactccgacgtgtacatcaccgataagtgcgtgctggacatgcggagcatggacttcaagagcaactccgccgtggcctggtccaacaagtccgatttcgcctgcgccaacgccttcaacaacagcattatccccgaggacacattcttcccaagccccgagagcagcgactccaccgaccacgtgaagcccaaagagacagagaacaccaagcagcccagcaagagctgccacaagcccaaggccatcgtgcacaccgagaaagtgaacatgatgagcctgaccgtgctgggcctgcggatgctgttcgccaaaaccgtggccgtgaacttcctgctgaccgccaagctgttcttcctc

SEQ ID NO: 7119 - DNA, 2172 bp, synthetic construct
  source 1..2172: mol_type = other DNA
atggccttaccagtgaccgccttgctcctgccgctggccttgctgctccacgccgccaggccggacgacatccagatgacccagagccccagcagcctgtctgccagcgtgggcgacagagtgaccatcacctgtagagccagccagagcatcagcagctacctgaactggtatcagcagaagcccggcaaggcccccaaactgctgatctacgacgccagcaacctggaaaccggcgtgcccagcagattttccggcagcggctctggcaccgacttcaccttcaccatcagctccctccagcccgaggacattgccacctactactgccagcagtacgacaacctgcccctgacctttggcggaggcaccaaggtggacatcaagagactcgaggacctgaagaacgtgttcccacctgaggtggccgtgttcgagcctagcgaggccgagatcagccacacccagaaagccaccctcgtgtgcctggctaccggcttctaccccgaccatgtggaactgtcttggtgggtcaacggcaaagaggtgcacagcggcgtgtgtaccgacccccagccactgaaagaacagcccgccctgaacgacagccggtactgcctgagcagcagactgagagtgtccgccaccttctggcagaacccccggaaccacttcagatgccaggtgcagttctacggcctgagcgagaacgacgagtggacccaggacagagccaagcccgtgacccagatcgtgtctgccgaagcctggggcagagccgatgatgtgattaagatccactggcaggaaaagaagtccaacaccatcctgggcagccaggaaggcaacaccatgaagaccaacgacacctacatgaagttcagctggctgaccgtgcccgagaagtccctggacaaagaacacagatgcatcgtgcggcacgaaaacaacaagaacggcgtggaccaggaaatcatcttcccacccatcaagaccgatgtgattacaatggaccccaaggacaactgctccaaggacgccaacgataccctgctgctccagctgaccaacaccagcgcctactacatgtacttgttgctgctgctgaagtccgtggtgtacttcgccatcatcacatgctgcctgctgcggagaaccgccttctgctgcaacggcgagaagtctagggccaagcgatctggatctggagcaacaaacttctcactactcaaacaagcaggtgacgtggaggagaatcccgggcctactagtatggactggatttggcgcatccttttccttgtcggcgctgctaccggcgcgcattccttcgaacaggtgcaactggtggaatctggcggcggagtggtgcagcctggcagaagcctgagactgagctgtgccgccagcggcttcacctttagcagctacgccatgcactgggtgcgccaggcccctggaaaaggcctggaatgggtggccgtgatctcctacgacggctccaacaagtattacgccgacagcgtgaagggccggttcaccatctccagagacaacagcaagaacaccctgtacctccagatgaacagcctgcgggccgaggacaccgccgtgtactattgtgccagggctcacaacagcagctcttggagcttcgactactggggccagggcaccctcgtgaccgtgtcatctacgcgtatccagaaccctgatcctgccgtgtaccagctgcgggatagcaagagcagcgacaagagcgtgtgtctgttcaccgacttcgacagccagaccaacgtgtcccagagcaaggactccgacgtgtacatcaccgataagtgcgtgctggacatgcggagcatggacttcaagagcaactccgccgtggcctggtccaacaagtccgatttcgcctgcgccaacgccttcaacaacagcattatccccgaggacacattcttcccaagccccgagagcagcgactccaccgaccacgtgaagcccaaagagacagagaacaccaagcagcccagcaagagctgccacaagcccaaggccatcgtgcacaccgagaaagtgaacatgatgagcctgaccgtgctgggcctgcggatgctgttcgccaaaaccgtggccgtgaacttcctgctgaccgccaagctgttcttcctc

SEQ ID NO: 7120 - DNA, 2199 bp, synthetic construct
  source 1..2199: mol_type = other DNA
atggccttaccagtgaccgccttgctcctgccgctggccttgctgctccacgccgccaggccggacgacgtcgtgatgacccagagccctctgagcctgcctgtgtccctgggcgatcaggccagcatctcctgcagatccagccagagactggtgcacagcaacggcaacacctacctgcactggtatctgcagaagcccggccagagccccaagctgctgatctaccgggtgtccaacagattccccggcgtgcccgatagattcagcggctctggcagcggcaccgacttcaccctgaagatcagccgggtggaagccgaggacctgggcatctatttctgcagccagagcacccacgtgccctacacctttggcggaggcaccaagctggaaatcaagcggctcgaggacctgaagaacgtgttcccacctgaggtggccgtgttcgagcctagcgaggccgagatcagccacacccagaaagccaccctcgtgtgcctggctaccggcttctaccccgaccatgtggaactgtcttggtgggtcaacggcaaagaggtgcacagcggcgtgtgtaccgacccccagccactgaaagaacagcccgccctgaacgacagccggtactgcctgagcagcagactgagagtgtccgccaccttctggcagaacccccggaaccacttcagatgccaggtgcagttctacggcctgagcgagaacgacgagtggacccaggacagagccaagcccgtgacccagatcgtgtctgccgaagcctggggcagagccgatgatgtgattaagatccactggcaggaaaagaagtccaacaccatcctgggcagccaggaaggcaacaccatgaagaccaacgacacctacatgaagttcagctggctgaccgtgcccgagaagtccctggacaaagaacacagatgcatcgtgcggcacgaaaacaacaagaacggcgtggaccaggaaatcatcttcccacccatcaagaccgatgtgattacaatggaccccaaggacaactgctccaaggacgccaacgataccctgctgctccagctgaccaacaccagcgcctactacatgtacttgttgctgctgctgaagtccgtggtgtacttcgccatcatcacatgctgcctgctgcggagaaccgccttctgctgcaacggcgagaagtctagggccaagcgatctggatctggagcaacaaacttctcactactcaaacaagcaggtgacgtggaggagaatcccgggcctactagtatggactggatttggcgcatccttttccttgtcggcgctgctaccggcgcgcattccttcgaagaagtgcggctgcagcagtctggccccgacctgattaagcctggggccagcgtgaagatgagctgcaaggccagcggctacaccttcaccggctacgtgatgcactgggtcaagcagaggccaggccagggcctggaatggatcggcttcatcaacccctacaacgacgacatccagagcaacgagcggttccggggcaaggccaccctgaccagcgataagagcagcaccaccgcctacatggaactgagcagcctgacctccgaggacagcgccgtgtactactgtgctaggggagccggctacaacttcgacggggcctacagattcttcgacttttggggccagggcaccacactgaccgtgtcctctacgcgtatccagaaccctgatcctgccgtgtaccagctgcgggatagcaagagcagcgacaagagcgtgtgtctgttcaccgacttcgacagccagaccaacgtgtcccagagcaaggactccgacgtgtacatcaccgataagtgcgtgctggacatgcggagcatggacttcaagagcaactccgccgtggcctggtccaacaagtccgatttcgcctgcgccaacgccttcaacaacagcattatccccgaggacacattcttcccaagccccgagagcagcgactccaccgaccacgtgaagcccaaagagacagagaacaccaagcagcccagcaagagctgccacaagcccaaggccatcgtgcacaccgagaaagtgaacatgatgagcctgaccgtgctgggcctgcggatgctgttcgccaaaaccgtggccgtgaacttcctgctgaccgccaagctgttcttcctc

SEQ ID NO: 7121 - DNA, 2172 bp, synthetic construct
  source 1..2172: mol_type = other DNA
atggccttaccagtgaccgccttgctcctgccgctggccttgctgctccacgccgccaggccggacagctacgagctgacccagcctcctagcgtgtccgtgtctcctggacagaccgccaccatctcttgcagcggcgatcaactgggcgggaagtacggccactggtatcagaagaagcccggccagagccccgtgctggtgctgtaccaggacagaaaacggcctgccggcatccccgagagattcagcggaagcagcagcggcaacaccatcaccctgaccatcagcggcacccaggccgtggatgaggccgactactactgccaggcttgggacaccaatctgggcggcgtgttcggcggaggcaccaaagtgacagtgctgggacagctcgaggacctgaagaacgtgttcccacctgaggtggccgtgttcgagcctagcgaggccgagatcagccacacccagaaagccaccctcgtgtgcctggctaccggcttctaccccgaccatgtggaactgtcttggtgggtcaacggcaaagaggtgcacagcggcgtgtgtaccgacccccagccactgaaagaacagcccgccctgaacgacagccggtactgcctgagcagcagactgagagtgtccgccaccttctggcagaacccccggaaccacttcagatgccaggtgcagttctacggcctgagcgagaacgacgagtggacccaggacagagccaagcccgtgacccagatcgtgtctgccgaagcctggggcagagccgatgatgtgattaagatccactggcaggaaaagaagtccaacaccatcctgggcagccaggaaggcaacaccatgaagaccaacgacacctacatgaagttcagctggctgaccgtgcccgagaagtccctggacaaagaacacagatgcatcgtgcggcacgaaaacaacaagaacggcgtggaccaggaaatcatcttcccacccatcaagaccgatgtgattacaatggaccccaaggacaactgctccaaggacgccaacgataccctgctgctccagctgaccaacaccagcgcctactacatgtacttgttgctgctgctgaagtccgtggtgtacttcgccatcatcacatgctgcctgctgcggagaaccgccttctgctgcaacggcgagaagtctagggccaagcgatctggatctggagcaacaaacttctcactactcaaacaagcaggtgacgtggaggagaatcccgggcctactagtatggactggatttggcgcatccttttccttgtcggcgctgctaccggcgcgcattccttcgaacaggtgcaactggtggaaagcggagccgaagtgaagaaacctggggccagcgtgaaggtgtcctgcaaggccagcggctacacctttaccggctactacatgcactgggtgcgccaggctccaggccagggactggaatggatgggccggatcaaccccaatagcggcggcaccaactacgcccagaaattccagggcagagtgaccatgaccagagacaccagcatcagcaccgcctacatggaactgagccggctgagaagcgacgacaccgccgtgtactactgcgccagccctagaggcagaggcagcgccttcgatatttggggccagggcacactcgtgaccgtgtcctctacgcgtatccagaaccctgatcctgccgtgtaccagctgcgggatagcaagagcagcgacaagagcgtgtgtctgttcaccgacttcgacagccagaccaacgtgtcccagagcaaggactccgacgtgtacatcaccgataagtgcgtgctggacatgcggagcatggacttcaagagcaactccgccgtggcctggtccaacaagtccgatttcgcctgcgccaacgccttcaacaacagcattatccccgaggacacattcttcccaagccccgagagcagcgactccaccgaccacgtgaagcccaaagagacagagaacaccaagcagcccagcaagagctgccacaagcccaaggccatcgtgcacaccgagaaagtgaacatgatgagcctgaccgtgctgggcctgcggatgctgttcgccaaaaccgtggccgtgaacttcctgctgaccgccaagctgttcttcctc

SEQ ID NO: 7122 - DNA, 2181 bp, synthetic construct
  source 1..2181: mol_type = other DNA
atggccttaccagtgaccgccttgctcctgccgctggccttgctgctccacgccgccaggccggacaacttcatgctgacccagccccacagcgtgtccgagagccctggcaagaccgtgaccatctcctgcaccagaagcagcggctctatcgccagcaaatacgtgcagtggtatcagcagaggcccggcagcagccctaccaccgtgatctacgaggacaaccagaggcctagcggcgtgcccgatagattcagcggcagcatcgacaccagcagcaacagcgccagcctgaccatcagcggcctgagaacagaggacgaggccgactactactgccacagctacgacagcaacaaccactccgtgttcggcggaggcaccaaagtgacagtgctgggacagctcgaggacctgaagaacgtgttcccacctgaggtggccgtgttcgagcctagcgaggccgagatcagccacacccagaaagccaccctcgtgtgcctggctaccggcttctaccccgaccatgtggaactgtcttggtgggtcaacggcaaagaggtgcacagcggcgtgtgtaccgacccccagccactgaaagaacagcccgccctgaacgacagccggtactgcctgagcagcagactgagagtgtccgccaccttctggcagaacccccggaaccacttcagatgccaggtgcagttctacggcctgagcgagaacgacgagtggacccaggacagagccaagcccgtgacccagatcgtgtctgccgaagcctggggcagagccgatgatgtgattaagatccactggcaggaaaagaagtccaacaccatcctgggcagccaggaaggcaacaccatgaagaccaacgacacctacatgaagttcagctggctgaccgtgcccgagaagtccctggacaaagaacacagatgcatcgtgcggcacgaaaacaacaagaacggcgtggaccaggaaatcatcttcccacccatcaagaccgatgtgattacaatggaccccaaggacaactgctccaaggacgccaacgataccctgctgctccagctgaccaacaccagcgcctactacatgtacttgttgctgctgctgaagtccgtggtgtacttcgccatcatcacatgctgcctgctgcggagaaccgccttctgctgcaacggcgagaagtctagggccaagcgatctggatctggagcaacaaacttctcactactcaaacaagcaggtgacgtggaggagaatcccgggcctactagtatggactggatttggcgcatccttttccttgtcggcgctgctaccggcgcgcattccttcgaagaagtgcaactggtggaaagcgggggaggcgtggtgcagccaggcggatctctgagactgagctgtgccgccagcggcttcaccttcagcagctacgccatgagctgggtgcgccaggcccctggaaaaggcctggaatgggtgtccgccatctctggctctggcggcagcacctactacgccgatagcgtgaagggccggttcagcatcagccgggacaacagcaagaacaccctgtacctccagatgaacagcctgcgggccgaggacaccgccgtgtactactgtgccagaaccagaagctccggggccttcgacatctggggccagggaacactcgtgaccgtgtcctctacgcgtatccagaaccctgatcctgccgtgtaccagctgcgggatagcaagagcagcgacaagagcgtgtgtctgttcaccgacttcgacagccagaccaacgtgtcccagagcaaggactccgacgtgtacatcaccgataagtgcgtgctggacatgcggagcatggacttcaagagcaactccgccgtggcctggtccaacaagtccgatttcgcctgcgccaacgccttcaacaacagcattatccccgaggacacattcttcccaagccccgagagcagcgactccaccgaccacgtgaagcccaaagagacagagaacaccaagcagcccagcaagagctgccacaagcccaaggccatcgtgcacaccgagaaagtgaacatgatgagcctgaccgtgctgggcctgcggatgctgttcgccaaaaccgtggccgtgaacttcctgctgaccgccaagctgttcttcctc

SEQ ID NO: 7123 - DNA, 2166 bp, synthetic construct
  source 1..2166: mol_type = other DNA
atggccttaccagtgaccgccttgctcctgccgctggccttgctgctccacgccgccaggccggacatccagatgaaccagagccccagcagcctgagcgccagcctgggcgataccatcaccatcacctgtcacgccagccagaacatcaacgtgtggctgagctggtatcagcagaagcccggcaacatccccaagctgctgatctacaaggccagcaacctgcacaccggcgtgcccagcagattttctggcagcggctctggcaccggcttcaccattaccatcagctccctccagcccgaggacattgccacctactactgccagcagggccagagctacccctggacatttggcggaggcaccaagctggaaatcaagagactcgaggacctgaagaacgtgttcccacctgaggtggccgtgttcgagcctagcgaggccgagatcagccacacccagaaagccaccctcgtgtgcctggctaccggcttctaccccgaccatgtggaactgtcttggtgggtcaacggcaaagaggtgcacagcggcgtgtgtaccgacccccagccactgaaagaacagcccgccctgaacgacagccggtactgcctgagcagcagactgagagtgtccgccaccttctggcagaacccccggaaccacttcagatgccaggtgcagttctacggcctgagcgagaacgacgagtggacccaggacagagccaagcccgtgacccagatcgtgtctgccgaagcctggggcagagccgatgatgtgattaagatccactggcaggaaaagaagtccaacaccatcctgggcagccaggaaggcaacaccatgaagaccaacgacacctacatgaagttcagctggctgaccgtgcccgagaagtccctggacaaagaacacagatgcatcgtgcggcacgaaaacaacaagaacggcgtggaccaggaaatcatcttcccacccatcaagaccgatgtgattacaatggaccccaaggacaactgctccaaggacgccaacgataccctgctgctccagctgaccaacaccagcgcctactacatgtacttgttgctgctgctgaagtccgtggtgtacttcgccatcatcacatgctgcctgctgcggagaaccgccttctgctgcaacggcgagaagtctagggccaagcgatctggatctggagcaacaaacttctcactactcaaacaagcaggtgacgtggaggagaatcccgggcctactagtatggactggatttggcgcatccttttccttgtcggcgctgctaccggcgcgcattccttcgaagaagtgcaactccagcagagcggcccagagcttgtgaagcctggcgcttccgtgaagattagctgcaaagccagcggctacagcttcaccggctacttcatgaactgggtcaagcagagccacggcaagagcctggagtacatcggcagattcaacccctacaacggcgagacactgtacaaccagaagttcaagggcaaggccaccctgaccgtggacaagagcagcagcaccgtgcacatggaactgctgagcgtgaccagcgaggacagcgccgtgtactactgtggcagaagcggcaacgacgacgctatggactattggggccagggcaccagcgtgaccgtgtctagtgctacgcgtatccagaaccctgatcctgccgtgtaccagctgcgggatagcaagagcagcgacaagagcgtgtgtctgttcaccgacttcgacagccagaccaacgtgtcccagagcaaggactccgacgtgtacatcaccgataagtgcgtgctggacatgcggagcatggacttcaagagcaactccgccgtggcctggtccaacaagtccgatttcgcctgcgccaacgccttcaacaacagcattatccccgaggacacattcttcccaagccccgagagcagcgactccaccgaccacgtgaagcccaaagagacagagaacaccaagcagcccagcaagagctgccacaagcccaaggccatcgtgcacaccgagaaagtgaacatgatgagcctgaccgtgctgggcctgcggatgctgttcgccaaaaccgtggccgtgaacttcctgctgaccgccaagctgttcttcctc

SEQ ID NO: 7124 - DNA, 2169 bp, synthetic construct
  source 1..2169: mol_type = other DNA
atggccttaccagtgaccgccttgctcctgccgctggccttgctgctccacgccgccaggccggagatcgtgctgacacagagccctgccaccctgtctctgagccctggcgaaagagccaccctgagctgtagagccagccagagcgtgcggagctacctggcctggtatcagcagaagcctggacaggcccccagactgctgatctacgacgccagcaatcgggccacaggcatccccgccagattttctggctctggcagcggcaccgacttcaccctgacaatcagcagcctggaacccgaggacttcgccgtgtactactgccagcagcggagcaactggccccctacctttggacagggcaccaaggtggaaatcaagctcgaggacctgaagaacgtgttcccacctgaggtggccgtgttcgagcctagcgaggccgagatcagccacacccagaaagccaccctcgtgtgcctggctaccggcttctaccccgaccatgtggaactgtcttggtgggtcaacggcaaagaggtgcacagcggcgtgtgtaccgacccccagccactgaaagaacagcccgccctgaacgacagccggtactgcctgagcagcagactgagagtgtccgccaccttctggcagaacccccggaaccacttcagatgccaggtgcagttctacggcctgagcgagaacgacgagtggacccaggacagagccaagcccgtgacccagatcgtgtctgccgaagcctggggcagagccgatgatgtgattaagatccactggcaggaaaagaagtccaacaccatcctgggcagccaggaaggcaacaccatgaagaccaacgacacctacatgaagttcagctggctgaccgtgcccgagaagtccctggacaaagaacacagatgcatcgtgcggcacgaaaacaacaagaacggcgtggaccaggaaatcatcttcccacccatcaagaccgatgtgattacaatggaccccaaggacaactgctccaaggacgccaacgataccctgctgctccagctgaccaacaccagcgcctactacatgtacttgttgctgctgctgaagtccgtggtgtacttcgccatcatcacatgctgcctgctgcggagaaccgccttctgctgcaacggcgagaagtctagggccaagcgatctggatctggagcaacaaacttctcactactcaaacaagcaggtgacgtggaggagaatcccgggcctactagtatggactggatttggcgcatccttttccttgtcggcgctgctaccggcgcgcattccttcgaacaactccaggtgcaggaatctggccccggactcgtgaagcccagcgagacactgagcctgacctgtaccgtgtccggcggcagcatcagcaacagctacttctcctggggctggatcagacagccccctggcaagggcctggaatggatcggcagcttctactacggcgagaaaacctactacaaccccagcctgaagtccagagccaccatcagcatcgacaccagcaagagccagttctccctgaagctgagcagcgtgacagccgccgacaccgccgtgtattattgccccagaggccccaccatgatccggggcgtgatcgactcttggggccagggaacactcgtgaccgtgtcctctacgcgtatccagaaccctgatcctgccgtgtaccagctgcgggatagcaagagcagcgacaagagcgtgtgtctgttcaccgacttcgacagccagaccaacgtgtcccagagcaaggactccgacgtgtacatcaccgataagtgcgtgctggacatgcggagcatggacttcaagagcaactccgccgtggcctggtccaacaagtccgatttcgcctgcgccaacgccttcaacaacagcattatccccgaggacacattcttcccaagccccgagagcagcgactccaccgaccacgtgaagcccaaagagacagagaacaccaagcagcccagcaagagctgccacaagcccaaggccatcgtgcacaccgagaaagtgaacatgatgagcctgaccgtgctgggcctgcggatgctgttcgccaaaaccgtggccgtgaacttcctgctgaccgccaagctgttcttcctc

SEQ ID NO: 7125 - DNA, 2196 bp, synthetic construct
  source 1..2196: mol_type = other DNA
atggccttaccagtgaccgccttgctcctgccgctggccttgctgctccacgccgccaggccggacatcgtgatgacccagacccccctgagcctgcctgtgacacctggcgagcctgccagcatctcctgcagaagcagcagaagcctgctggacagcgacgacggcaacacctacctggactggtatctgcagaaacccggccagagcccccaactgctgatctacaccctgagctacagagccagcggcgtgcccgatagattttccggctctggcagcggcaccgacttcaccctgaagatcagccgggtggaagccgaggacgtgggcgtgtactactgtatgcagcgggtggaatttcccatcaccttcggccagggcaccagactggaaatcaagagactcgaggacctgaagaacgtgttcccacctgaggtggccgtgttcgagcctagcgaggccgagatcagccacacccagaaagccaccctcgtgtgcctggctaccggcttctaccccgaccatgtggaactgtcttggtgggtcaacggcaaagaggtgcacagcggcgtgtgtaccgacccccagccactgaaagaacagcccgccctgaacgacagccggtactgcctgagcagcagactgagagtgtccgccaccttctggcagaacccccggaaccacttcagatgccaggtgcagttctacggcctgagcgagaacgacgagtggacccaggacagagccaagcccgtgacccagatcgtgtctgccgaagcctggggcagagccgatgatgtgattaagatccactggcaggaaaagaagtccaacaccatcctgggcagccaggaaggcaacaccatgaagaccaacgacacctacatgaagttcagctggctgaccgtgcccgagaagtccctggacaaagaacacagatgcatcgtgcggcacgaaaacaacaagaacggcgtggaccaggaaatcatcttcccacccatcaagaccgatgtgattacaatggaccccaaggacaactgctccaaggacgccaacgataccctgctgctccagctgaccaacaccagcgcctactacatgtacttgttgctgctgctgaagtccgtggtgtacttcgccatcatcacatgctgcctgctgcggagaaccgccttctgctgcaacggcgagaagtctagggccaagcgatctggatctggagcaacaaacttctcactactcaaacaagcaggtgacgtggaggagaatcccgggcctactagtatggactggatttggcgcatccttttccttgtcggcgctgctaccggcgcgcattccttcgaacaggtgcaactggtggaatctggcgggggagtggtgcagcctggcagatccctgagactgagctgtgccgccagcggcttcatcttcagcagatacggaatgcactgggtgcgccaggcccctggcaagggactgaaatgggtggccgtgatttggtacgacggcagcaacaagctgtacgccgacagcgtgaagggccggttcaccatcagcagagacaacagcaagaacaccctgtacctgcagatgaacagcctgcgggccgaggacaccgccgtgtactattgcgccagagactactacgacaacagccggcaccactggggcttcgactattggggccagggaacccttgtgaccgtgtcctctacgcgtatccagaaccctgatcctgccgtgtaccagctgcgggatagcaagagcagcgacaagagcgtgtgtctgttcaccgacttcgacagccagaccaacgtgtcccagagcaaggactccgacgtgtacatcaccgataagtgcgtgctggacatgcggagcatggacttcaagagcaactccgccgtggcctggtccaacaagtccgatttcgcctgcgccaacgccttcaacaacagcattatccccgaggacacattcttcccaagccccgagagcagcgactccaccgaccacgtgaagcccaaagagacagagaacaccaagcagcccagcaagagctgccacaagcccaaggccatcgtgcacaccgagaaagtgaacatgatgagcctgaccgtgctgggcctgcggatgctgttcgccaaaaccgtggccgtgaacttcctgctgaccgccaagctgttcttcctc

SEQ ID NO: 7126 - DNA, 2166 bp, synthetic construct
  source 1..2166: mol_type = other DNA
atggccttaccagtgaccgccttgctcctgccgctggccttgctgctccacgccgccaggccggagatccagatgacccagagccccagcagcatgtctgccagcctgggcgacaccatcaccatcacatgccaggccacccaggacatcttcaagaacctgaactggtatcagcagaagcccggcaagccccccagcctgctgatctactatgccaccgaactggccgagggcgtgcccagcagattttctggcagcggcagcggctccgactacagcctgaccatcagcaacctggaaagcgaggacttcgccgcctactactgcctccagttcttcgagttcccattcaccttcggctccggcaccaagctggaaatgaagctcgaggacctgaagaacgtgttcccacctgaggtggccgtgttcgagcctagcgaggccgagatcagccacacccagaaagccaccctcgtgtgcctggctaccggcttctaccccgaccatgtggaactgtcttggtgggtcaacggcaaagaggtgcacagcggcgtgtgtaccgacccccagccactgaaagaacagcccgccctgaacgacagccggtactgcctgagcagcagactgagagtgtccgccaccttctggcagaacccccggaaccacttcagatgccaggtgcagttctacggcctgagcgagaacgacgagtggacccaggacagagccaagcccgtgacccagatcgtgtctgccgaagcctggggcagagccgatgatgtgattaagatccactggcaggaaaagaagtccaacaccatcctgggcagccaggaaggcaacaccatgaagaccaacgacacctacatgaagttcagctggctgaccgtgcccgagaagtccctggacaaagaacacagatgcatcgtgcggcacgaaaacaacaagaacggcgtggaccaggaaatcatcttcccacccatcaagaccgatgtgattacaatggaccccaaggacaactgctccaaggacgccaacgataccctgctgctccagctgaccaacaccagcgcctactacatgtacttgttgctgctgctgaagtccgtggtgtacttcgccatcatcacatgctgcctgctgcggagaaccgccttctgctgcaacggcgagaagtctagggccaagcgatctggatctggagcaacaaacttctcactactcaaacaagcaggtgacgtggaggagaatcccgggcctactagtatggactggatttggcgcatccttttccttgtcggcgctgctaccggcgcgcattccttcgaacaggtgcaactccagcagtctggcgctgagcttgtgcggcctggcacctctgtgaaggtgtcctgtaaagccagcggctacgtgttcaccaactactggatcgagtggatcaagcagcggccaggccagggcctggaatggatcggcgtgatgaatccaggcagcggcgagacaacctacaacgagaagttcaagggcaaggccaccctgaccgccgacaagagcagcagcacagcctacatgcaactgtcctccctgaccagcgtggacagcgccgtgtacttctgcgccagggaccacgaccgggactactacgctatggactactggggccagggcaccagcgtgaccgtgtcatctacgcgtatccagaaccctgatcctgccgtgtaccagctgcgggatagcaagagcagcgacaagagcgtgtgtctgttcaccgacttcgacagccagaccaacgtgtcccagagcaaggactccgacgtgtacatcaccgataagtgcgtgctggacatgcggagcatggacttcaagagcaactccgccgtggcctggtccaacaagtccgatttcgcctgcgccaacgccttcaacaacagcattatccccgaggacacattcttcccaagccccgagagcagcgactccaccgaccacgtgaagcccaaagagacagagaacaccaagcagcccagcaagagctgccacaagcccaaggccatcgtgcacaccgagaaagtgaacatgatgagcctgaccgtgctgggcctgcggatgctgttcgccaaaaccgtggccgtgaacttcctgctgaccgccaagctgttcttcctc

SEQ ID NO: 7127 - DNA, 2157 bp, synthetic construct
  source 1..2157: mol_type = other DNA
atggccttaccagtgaccgccttgctcctgccgctggccttgctgctccacgccgccaggccggacatcctgctgacacagagccccgccatcctgtccgtgtctccaggcgagagagtgtcctttagctgccgggccagccagaacatcggcaccagcatccactggtatcagcagcggaccaacggcagccccagactgctgattaagtacgccagcgagtccgtgtccggcatccccagcagattttctggcagcggctccggcaccgacttcaccctgagcatcaacagcgtggaaagcgaggacattgccgactactactgccagcacaccaatagctggcccaccacctttggcggaggcaccaagctggaaatcaagagactcgaggacctgaagaacgtgttcccacctgaggtggccgtgttcgagcctagcgaggccgagatcagccacacccagaaagccaccctcgtgtgcctggctaccggcttctaccccgaccatgtggaactgtcttggtgggtcaacggcaaagaggtgcacagcggcgtgtgtaccgacccccagccactgaaagaacagcccgccctgaacgacagccggtactgcctgagcagcagactgagagtgtccgccaccttctggcagaacccccggaaccacttcagatgccaggtgcagttctacggcctgagcgagaacgacgagtggacccaggacagagccaagcccgtgacccagatcgtgtctgccgaagcctggggcagagccgatgatgtgattaagatccactggcaggaaaagaagtccaacaccatcctgggcagccaggaaggcaacaccatgaagaccaacgacacctacatgaagttcagctggctgaccgtgcccgagaagtccctggacaaagaacacagatgcatcgtgcggcacgaaaacaacaagaacggcgtggaccaggaaatcatcttcccacccatcaagaccgatgtgattacaatggaccccaaggacaactgctccaaggacgccaacgataccctgctgctccagctgaccaacaccagcgcctactacatgtacttgttgctgctgctgaagtccgtggtgtacttcgccatcatcacatgctgcctgctgcggagaaccgccttctgctgcaacggcgagaagtctagggccaagcgatctggatctggagcaacaaacttctcactactcaaacaagcaggtgacgtggaggagaatcccgggcctactagtatggactggatttggcgcatccttttccttgtcggcgctgctaccggcgcgcattccttcgaacaggtgcaactccagcagtccgacgccgagcttgtgaagcctggcgcttccgtgaagattagctgcaaggccagcggctacaccttcaccgaccacgccattcactgggtcaagcagaagcccgagcagggcctggaatggatcggctacttcagccccggcaacggcgacatcaagtacaacgagaagttcaagggcaaggccaccctgaccgccgacaagagcagcagcacagcctacatgcaactgaacagcctgaccagcgaggactccgccgtgtacttctgcaagcggagctacggcaactacgactactggggccagggcaccacactgaccgtgtctagtacgcgtatccagaaccctgatcctgccgtgtaccagctgcgggatagcaagagcagcgacaagagcgtgtgtctgttcaccgacttcgacagccagaccaacgtgtcccagagcaaggactccgacgtgtacatcaccgataagtgcgtgctggacatgcggagcatggacttcaagagcaactccgccgtggcctggtccaacaagtccgatttcgcctgcgccaacgccttcaacaacagcattatccccgaggacacattcttcccaagccccgagagcagcgactccaccgaccacgtgaagcccaaagagacagagaacaccaagcagcccagcaagagctgccacaagcccaaggccatcgtgcacaccgagaaagtgaacatgatgagcctgaccgtgctgggcctgcggatgctgttcgccaaaaccgtggccgtgaacttcctgctgaccgccaagctgttcttcctc

SEQ ID NO: 7128 - DNA, 2172 bp, synthetic construct
  source 1..2172: mol_type = other DNA
atggccttaccagtgaccgccttgctcctgccgctggccttgctgctccacgccgccaggccggacatcgtgatgacccagagccccgatagcctggccgtgtctctgggagagagagccaccatcaactgcaagagcagccagagcctgctgaacagcggcgaccagaagaactacctgacctggtatcagcagaagcccggccagccccccaagctgctgatctactgggccagcaccagagaaagcggcgtgcccgatagattcagcggcagcggaagtggcaccgacttcaccctgaccatcagttctcttcaggccgaggacgtggccgtgtactactgccagaacgactacagctaccccctgaccttcggccagggcaccaaggtggaaatcaagctcgaggacctgaagaacgtgttcccacctgaggtggccgtgttcgagcctagcgaggccgagatcagccacacccagaaagccaccctcgtgtgcctggctaccggcttctaccccgaccatgtggaactgtcttggtgggtcaacggcaaagaggtgcacagcggcgtgtgtaccgacccccagccactgaaagaacagcccgccctgaacgacagccggtactgcctgagcagcagactgagagtgtccgccaccttctggcagaacccccggaaccacttcagatgccaggtgcagttctacggcctgagcgagaacgacgagtggacccaggacagagccaagcccgtgacccagatcgtgtctgccgaagcctggggcagagccgatgatgtgattaagatccactggcaggaaaagaagtccaacaccatcctgggcagccaggaaggcaacaccatgaagaccaacgacacctacatgaagttcagctggctgaccgtgcccgagaagtccctggacaaagaacacagatgcatcgtgcggcacgaaaacaacaagaacggcgtggaccaggaaatcatcttcccacccatcaagaccgatgtgattacaatggaccccaaggacaactgctccaaggacgccaacgataccctgctgctccagctgaccaacaccagcgcctactacatgtacttgttgctgctgctgaagtccgtggtgtacttcgccatcatcacatgctgcctgctgcggagaaccgccttctgctgcaacggcgagaagtctagggccaagcgatctggatctggagcaacaaacttctcactactcaaacaagcaggtgacgtggaggagaatcccgggcctactagtatggactggatttggcgcatccttttccttgtcggcgctgctaccggcgcgcattccttcgaacaggtgcagctggtgcagtctggggccgaagtgaagaaaaccggcagcagcgtgaaggtgtcctgcaaggccagcggctacacctttaccgaccacgccattcacgtgtggcggcaggctccaggacaggccctggaatggatgggccacttcagccccggcaacaccgacatcaagtacaacgacaagttcaagggcagagtgaccctgaccgtggaccgcagcatgagcaccgcctacatggaactgagcagcctgcggagcgaggacaccgccatgtactattgcaagaccagcaccttctttttcgactactggggccagggaacaatggtcaccgtgtccagcacgcgtatccagaaccctgatcctgccgtgtaccagctgcgggatagcaagagcagcgacaagagcgtgtgtctgttcaccgacttcgacagccagaccaacgtgtcccagagcaaggactccgacgtgtacatcaccgataagtgcgtgctggacatgcggagcatggacttcaagagcaactccgccgtggcctggtccaacaagtccgatttcgcctgcgccaacgccttcaacaacagcattatccccgaggacacattcttcccaagccccgagagcagcgactccaccgaccacgtgaagcccaaagagacagagaacaccaagcagcccagcaagagctgccacaagcccaaggccatcgtgcacaccgagaaagtgaacatgatgagcctgaccgtgctgggcctgcggatgctgttcgccaaaaccgtggccgtgaacttcctgctgaccgccaagctgttcttcctc

SEQ ID NO: 7129 - DNA, 2169 bp, synthetic construct
  source 1..2169: mol_type = other DNA
atggccttaccagtgaccgccttgctcctgccgctggccttgctgctccacgccgccaggccggacatccagatgacccagagccccagcagcctgtctgccagcgtgggcgacagagtgaccatcacatgcaaggccagccaggacgtgtccattgccgtggcctggtatcagcagaagcccggcaaggcccccaaggtgctgatctacagcgccagctacagatacaccggcgtgcccgacagattcagcggctctggcagcggcaccgacttcaccttcaccatcagctccctccagcccgaggatattgccgtgtactactgccagcagcactacatcacccccctgacctttggcggaggcaccaaggtggaaatcaagctcgaggacctgaagaacgtgttcccacctgaggtggccgtgttcgagcctagcgaggccgagatcagccacacccagaaagccaccctcgtgtgcctggctaccggcttctaccccgaccatgtggaactgtcttggtgggtcaacggcaaagaggtgcacagcggcgtgtgtaccgacccccagccactgaaagaacagcccgccctgaacgacagccggtactgcctgagcagcagactgagagtgtccgccaccttctggcagaacccccggaaccacttcagatgccaggtgcagttctacggcctgagcgagaacgacgagtggacccaggacagagccaagcccgtgacccagatcgtgtctgccgaagcctggggcagagccgatgatgtgattaagatccactggcaggaaaagaagtccaacaccatcctgggcagccaggaaggcaacaccatgaagaccaacgacacctacatgaagttcagctggctgaccgtgcccgagaagtccctggacaaagaacacagatgcatcgtgcggcacgaaaacaacaagaacggcgtggaccaggaaatcatcttcccacccatcaagaccgatgtgattacaatggaccccaaggacaactgctccaaggacgccaacgataccctgctgctccagctgaccaacaccagcgcctactacatgtacttgttgctgctgctgaagtccgtggtgtacttcgccatcatcacatgctgcctgctgcggagaaccgccttctgctgcaacggcgagaagtctagggccaagcgatctggatctggagcaacaaacttctcactactcaaacaagcaggtgacgtggaggagaatcccgggcctactagtatggactggatttggcgcatccttttccttgtcggcgctgctaccggcgcgcattccttcgaacagatccaactggtgcagagcggccacgaagtgaagaaacctggggccagcgtgaaggtgtcctgcaaagccagcggctacacctttaccaactacggcatgaactgggtgcgccaggcccctggacagggcctggaatggatgggctggatcaacaccaagaccggcgagcccacctacgccgaagagttcaagggcagattcgtgttcagcctggaaaccagcgcctccaccgcctacctccagatcagctctctgaaggccgaggacaccgccatgtacttttgcggcagaggcggctacggcagcagctactggtacttcgatgtgtggggccagggcaccaccgtgaccgtgtcatctacgcgtatccagaaccctgatcctgccgtgtaccagctgcgggatagcaagagcagcgacaagagcgtgtgtctgttcaccgacttcgacagccagaccaacgtgtcccagagcaaggactccgacgtgtacatcaccgataagtgcgtgctggacatgcggagcatggacttcaagagcaactccgccgtggcctggtccaacaagtccgatttcgcctgcgccaacgccttcaacaacagcattatccccgaggacacattcttcccaagccccgagagcagcgactccaccgaccacgtgaagcccaaagagacagagaacaccaagcagcccagcaagagctgccacaagcccaaggccatcgtgcacaccgagaaagtgaacatgatgagcctgaccgtgctgggcctgcggatgctgttcgccaaaaccgtggccgtgaacttcctgctgaccgccaagctgttcttcctc

SEQ ID NO: 7130 - DNA, 2175 bp, synthetic construct
  source 1..2175: mol_type = other DNA
atggccttaccagtgaccgccttgctcctgccgctggccttgctgctccacgccgccaggccggacatcgtgatgacccagagccccgatagcctggccgtgtctctgggagagagagccaccatcaactgccgggccagcaagagcgtgtccaccagcggctacagctacatgcactggtatcagcagaagcccggccagccccccaagctgctgatctacctggcctccaacctggaaagcggcgtgcccgatagattcagcggcagcggctctggcaccgacttcaccctgaccatcagttctcttcaggccgaggacgtggccgtgtactactgccagcacagcagagagctgccctacaccttcggccagggcaccaagctggaaatcaagctcgaggacctgaagaacgtgttcccacctgaggtggccgtgttcgagcctagcgaggccgagatcagccacacccagaaagccaccctcgtgtgcctggctaccggcttctaccccgaccatgtggaactgtcttggtgggtcaacggcaaagaggtgcacagcggcgtgtgtaccgacccccagccactgaaagaacagcccgccctgaacgacagccggtactgcctgagcagcagactgagagtgtccgccaccttctggcagaacccccggaaccacttcagatgccaggtgcagttctacggcctgagcgagaacgacgagtggacccaggacagagccaagcccgtgacccagatcgtgtctgccgaagcctggggcagagccgatgatgtgattaagatccactggcaggaaaagaagtccaacaccatcctgggcagccaggaaggcaacaccatgaagaccaacgacacctacatgaagttcagctggctgaccgtgcccgagaagtccctggacaaagaacacagatgcatcgtgcggcacgaaaacaacaagaacggcgtggaccaggaaatcatcttcccacccatcaagaccgatgtgattacaatggaccccaaggacaactgctccaaggacgccaacgataccctgctgctccagctgaccaacaccagcgcctactacatgtacttgttgctgctgctgaagtccgtggtgtacttcgccatcatcacatgctgcctgctgcggagaaccgccttctgctgcaacggcgagaagtctagggccaagcgatctggatctggagcaacaaacttctcactactcaaacaagcaggtgacgtggaggagaatcccgggcctactagtatggactggatttggcgcatccttttccttgtcggcgctgctaccggcgcgcattccttcgaacaggtgcaactccaggaatctggccctggccttgtgaagcccagcgagacactgagcctgacctgtaccgtgtccggcggcagcatcagctcttacggcgtgcactggattcggcagcctccaggcaagggcctggaatggatcggcgtgatctggacctccggcgtgaccgactacaacagcgccctgatgggcagagtgaccatctccgtggacaccagcaagaaccagttcagcctgaagctgagcagcgtgacagccgccgataccgccgtgtattattgcgccagagatggcgactacgaccgctacacaatggactactggggccagggaacccttgtgaccgtgtcctctacgcgtatccagaaccctgatcctgccgtgtaccagctgcgggatagcaagagcagcgacaagagcgtgtgtctgttcaccgacttcgacagccagaccaacgtgtcccagagcaaggactccgacgtgtacatcaccgataagtgcgtgctggacatgcggagcatggacttcaagagcaactccgccgtggcctggtccaacaagtccgatttcgcctgcgccaacgccttcaacaacagcattatccccgaggacacattcttcccaagccccgagagcagcgactccaccgaccacgtgaagcccaaagagacagagaacaccaagcagcccagcaagagctgccacaagcccaaggccatcgtgcacaccgagaaagtgaacatgatgagcctgaccgtgctgggcctgcggatgctgttcgccaaaaccgtggccgtgaacttcctgctgaccgccaagctgttcttcctc

SEQ ID NO: 7131 - DNA, 2175 bp, synthetic construct
  source 1..2175: mol_type = other DNA
atggccttaccagtgaccgccttgctcctgccgctggccttgctgctccacgccgccaggccggacatccagatgacccagagccccagcagcctgtctgccagcgtgggcgacagagtgaccatcacctgtagagccagccagagcatcggcaccagcctgcactggtatcagcagaagcctggcaaggcccccaagctgctgattaagttcgccagcagactgcagagcggcgtgcccagcagattttctggcagcggctccggcaccgacttcaccctgacaatcagctccctgcagcccgaggacttcgccacctactactgccagcagagccccggcttccctccaacctttggacagggcaccaagctggaaatcaagcggctcgaggacctgaagaacgtgttcccacctgaggtggccgtgttcgagcctagcgaggccgagatcagccacacccagaaagccaccctcgtgtgcctggctaccggcttctaccccgaccatgtggaactgtcttggtgggtcaacggcaaagaggtgcacagcggcgtgtgtaccgacccccagccactgaaagaacagcccgccctgaacgacagccggtactgcctgagcagcagactgagagtgtccgccaccttctggcagaacccccggaaccacttcagatgccaggtgcagttctacggcctgagcgagaacgacgagtggacccaggacagagccaagcccgtgacccagatcgtgtctgccgaagcctggggcagagccgatgatgtgattaagatccactggcaggaaaagaagtccaacaccatcctgggcagccaggaaggcaacaccatgaagaccaacgacacctacatgaagttcagctggctgaccgtgcccgagaagtccctggacaaagaacacagatgcatcgtgcggcacgaaaacaacaagaacggcgtggaccaggaaatcatcttcccacccatcaagaccgatgtgattacaatggaccccaaggacaactgctccaaggacgccaacgataccctgctgctccagctgaccaacaccagcgcctactacatgtacttgttgctgctgctgaagtccgtggtgtacttcgccatcatcacatgctgcctgctgcggagaaccgccttctgctgcaacggcgagaagtctagggccaagcgatctggatctggagcaacaaacttctcactactcaaacaagcaggtgacgtggaggagaatcccgggcctactagtatggactggatttggcgcatccttttccttgtcggcgctgctaccggcgcgcattccttcgaacaggtgcaactggtggaatctggcggcggacttgtgaagccaggcggcagcctgagactgagctgtgccgccagcggcttcagcatcaccaccagcggctactactggacctggatcagacagttccccggcaagggcctggaatggatgggctacatcggctacaacagcaagacctactacaaccccgccctgaagtcccggatcaccatcagcagagacaacgccaagaacagcctgtacctgcagatgaactccctgagagccgaggataccgccgtgtactactgcgccagatccctgtacggcggctacaaggacgccttcgatagctggggccagggaacccttgtgaccgtgtctagcacgcgtatccagaaccctgatcctgccgtgtaccagctgcgggatagcaagagcagcgacaagagcgtgtgtctgttcaccgacttcgacagccagaccaacgtgtcccagagcaaggactccgacgtgtacatcaccgataagtgcgtgctggacatgcggagcatggacttcaagagcaactccgccgtggcctggtccaacaagtccgatttcgcctgcgccaacgccttcaacaacagcattatccccgaggacacattcttcccaagccccgagagcagcgactccaccgaccacgtgaagcccaaagagacagagaacaccaagcagcccagcaagagctgccacaagcccaaggccatcgtgcacaccgagaaagtgaacatgatgagcctgaccgtgctgggcctgcggatgctgttcgccaaaaccgtggccgtgaacttcctgctgaccgccaagctgttcttcctc

SEQ ID NO: 7132 - DNA, 2190 bp, synthetic construct
  source 1..2190: mol_type = other DNA
atggccttaccagtgaccgccttgctcctgccgctggccttgctgctccacgccgccaggccggacgagatcgtgctgacccagagccctctgagcctgcctgtgacacctggcgagcctgccagcatctcctgtagaagcagccagagcctgctgcacagcatcggctacaactacctggactggtatctccagaagcccggccagagcccccaactgctgatctacctgggcagcaacagagccagcggcgtgcccgatagattttccggcagcggctccggcaccgacttcaccctgaagatcagccgggtggaagccgaggacgtgggcgtgtactactgtatgcaggccctccagacccccctgacctttggcggaggcaccaaggtggaaatcaagcggctcgaggacctgaagaacgtgttcccacctgaggtggccgtgttcgagcctagcgaggccgagatcagccacacccagaaagccaccctcgtgtgcctggctaccggcttctaccccgaccatgtggaactgtcttggtgggtcaacggcaaagaggtgcacagcggcgtgtgtaccgacccccagccactgaaagaacagcccgccctgaacgacagccggtactgcctgagcagcagactgagagtgtccgccaccttctggcagaacccccggaaccacttcagatgccaggtgcagttctacggcctgagcgagaacgacgagtggacccaggacagagccaagcccgtgacccagatcgtgtctgccgaagcctggggcagagccgatgatgtgattaagatccactggcaggaaaagaagtccaacaccatcctgggcagccaggaaggcaacaccatgaagaccaacgacacctacatgaagttcagctggctgaccgtgcccgagaagtccctggacaaagaacacagatgcatcgtgcggcacgaaaacaacaagaacggcgtggaccaggaaatcatcttcccacccatcaagaccgatgtgattacaatggaccccaaggacaactgctccaaggacgccaacgataccctgctgctccagctgaccaacaccagcgcctactacatgtacttgttgctgctgctgaagtccgtggtgtacttcgccatcatcacatgctgcctgctgcggagaaccgccttctgctgcaacggcgagaagtctagggccaagcgatctggatctggagcaacaaacttctcactactcaaacaagcaggtgacgtggaggagaatcccgggcctactagtatggactggatttggcgcatccttttccttgtcggcgctgctaccggcgcgcattccttcgaagaagtgcaactggtggaaagcggaggcggcgtggtgcagcctggaagaagcctgagactgagctgtgccgccagcggcttcaccttccggtcctacggaatgcactgggtgcgccaggcccctggcaaaggactggaatgggtggccgtgatctcctacgacggctccaacaagtactacaccgacagcgtgaacggcagattcaccatcagcagagacaacagcaagaacaccctgtacctccagatgaacagcctgcgggccgaggacaccgccgtgtactattgtgctagaggcggaggctactacgagacaagcggccctgattactggggccagggcacactcgtgaccgtgtctagtacgcgtatccagaaccctgatcctgccgtgtaccagctgcgggatagcaagagcagcgacaagagcgtgtgtctgttcaccgacttcgacagccagaccaacgtgtcccagagcaaggactccgacgtgtacatcaccgataagtgcgtgctggacatgcggagcatggacttcaagagcaactccgccgtggcctggtccaacaagtccgatttcgcctgcgccaacgccttcaacaacagcattatccccgaggacacattcttcccaagccccgagagcagcgactccaccgaccacgtgaagcccaaagagacagagaacaccaagcagcccagcaagagctgccacaagcccaaggccatcgtgcacaccgagaaagtgaacatgatgagcctgaccgtgctgggcctgcggatgctgttcgccaaaaccgtggccgtgaacttcctgctgaccgccaagctgttcttcctc

SEQ ID NO: 7133 - DNA, 2184 bp, synthetic construct
  source 1..2184: mol_type = other DNA
atggccttaccagtgaccgccttgctcctgccgctggccttgctgctccacgccgccaggccggacgacgtcgtgatgacccagagccctctgagcctgcctgtgacacctggcgagcctgccagcatctcctgtagaagcagccagagcctgctgcacagcatcggctacaactacctgcactggtttctccagaagcccggccagagcccccaactgctgatctacctgggcagcaacagagccagcggcgtgcccgatagattttccggcagcggctccggcaccgacttcaccctgaagatcagccgggtggaagccgaggacgtgggcgtgtactactgtatgcaggccctccagacccctcccacctttggacagggcaccagactggaaatcaagcggctcgaggacctgaagaacgtgttcccacctgaggtggccgtgttcgagcctagcgaggccgagatcagccacacccagaaagccaccctcgtgtgcctggctaccggcttctaccccgaccatgtggaactgtcttggtgggtcaacggcaaagaggtgcacagcggcgtgtgtaccgacccccagccactgaaagaacagcccgccctgaacgacagccggtactgcctgagcagcagactgagagtgtccgccaccttctggcagaacccccggaaccacttcagatgccaggtgcagttctacggcctgagcgagaacgacgagtggacccaggacagagccaagcccgtgacccagatcgtgtctgccgaagcctggggcagagccgatgatgtgattaagatccactggcaggaaaagaagtccaacaccatcctgggcagccaggaaggcaacaccatgaagaccaacgacacctacatgaagttcagctggctgaccgtgcccgagaagtccctggacaaagaacacagatgcatcgtgcggcacgaaaacaacaagaacggcgtggaccaggaaatcatcttcccacccatcaagaccgatgtgattacaatggaccccaaggacaactgctccaaggacgccaacgataccctgctgctccagctgaccaacaccagcgcctactacatgtacttgttgctgctgctgaagtccgtggtgtacttcgccatcatcacatgctgcctgctgcggagaaccgccttctgctgcaacggcgagaagtctagggccaagcgatctggatctggagcaacaaacttctcactactcaaacaagcaggtgacgtggaggagaatcccgggcctactagtatggactggatttggcgcatccttttccttgtcggcgctgctaccggcgcgcattccttcgaacaactccaactccaggaaagcggccctggcctcgtgaagcctagcggcacactgagcctgacatgtgccgtgtctggcggcagcatcagcagcagcaactggtggtcttgggtgcgccagcctcctggcaagggcctggaatggatcggcgaaatctaccacagcggcagcaccaactacaaccccagcctgaagtccagagtgaccatcagcgtggacaagagcaagaaccagttctccctgaagctgagcagcgtgacagccgccgataccgccgtgtactattgcgtgggcagcccctacggcgactacgtgctggattattggggccagggcaccctcgtgaccgtgtctagtacgcgtatccagaaccctgatcctgccgtgtaccagctgcgggatagcaagagcagcgacaagagcgtgtgtctgttcaccgacttcgacagccagaccaacgtgtcccagagcaaggactccgacgtgtacatcaccgataagtgcgtgctggacatgcggagcatggacttcaagagcaactccgccgtggcctggtccaacaagtccgatttcgcctgcgccaacgccttcaacaacagcattatccccgaggacacattcttcccaagccccgagagcagcgactccaccgaccacgtgaagcccaaagagacagagaacaccaagcagcccagcaagagctgccacaagcccaaggccatcgtgcacaccgagaaagtgaacatgatgagcctgaccgtgctgggcctgcggatgctgttcgccaaaaccgtggccgtgaacttcctgctgaccgccaagctgttcttcctc

SEQ ID NO: 7134 - DNA, 2178 bp, synthetic construct
  source 1..2178: mol_type = other DNA
atggccttaccagtgaccgccttgctcctgccgctggccttgctgctccacgccgccaggccggacgagatcgtgctgacacagagccctggcaccctgagcctgtctctgggagagagagccacactgagctgtcgggccagccagtctatcagcagcagcttcctggcctggtatcagcagaagcccggccaggcccctaagctgctgatctacgccgccagcacaagagccaccggcatccccgatagattcagcggctctggcagcggcaccgacttcaccctgaccatcagcagactggaacccgaggacttcgccgtgtactactgccagcagtacggcagaagcctgagcttcggcggaggcaccaaggtggaagtgaagctcgaggacctgaagaacgtgttcccacctgaggtggccgtgttcgagcctagcgaggccgagatcagccacacccagaaagccaccctcgtgtgcctggctaccggcttctaccccgaccatgtggaactgtcttggtgggtcaacggcaaagaggtgcacagcggcgtgtgtaccgacccccagccactgaaagaacagcccgccctgaacgacagccggtactgcctgagcagcagactgagagtgtccgccaccttctggcagaacccccggaaccacttcagatgccaggtgcagttctacggcctgagcgagaacgacgagtggacccaggacagagccaagcccgtgacccagatcgtgtctgccgaagcctggggcagagccgatgatgtgattaagatccactggcaggaaaagaagtccaacaccatcctgggcagccaggaaggcaacaccatgaagaccaacgacacctacatgaagttcagctggctgaccgtgcccgagaagtccctggacaaagaacacagatgcatcgtgcggcacgaaaacaacaagaacggcgtggaccaggaaatcatcttcccacccatcaagaccgatgtgattacaatggaccccaaggacaactgctccaaggacgccaacgataccctgctgctccagctgaccaacaccagcgcctactacatgtacttgttgctgctgctgaagtccgtggtgtacttcgccatcatcacatgctgcctgctgcggagaaccgccttctgctgcaacggcgagaagtctagggccaagcgatctggatctggagcaacaaacttctcactactcaaacaagcaggtgacgtggaggagaatcccgggcctactagtatggactggatttggcgcatccttttccttgtcggcgctgctaccggcgcgcattccttcgaacaggtgcaactccagcagtctggccccggactcgtgaagcctagccagacactgagcctgacctgcgccatcagcggcgatagcgtgtccggcaatagcgccacctggaactggatcagacagagcccatctcggggcctggaatggctgggccggacctactaccgcagcaagtggaaccacgactacgccgagagcgtgaagtcccggatcaccatcaaccccgacaccagcaagaaccagttctccttgcaactgaacagcgtgacccccgaggacacagccgtgtattattgcgccagaggcgacagcagctcttggtacgccttcgactattggggccagggcaccctcgtgaccgtgtctagtacgcgtatccagaaccctgatcctgccgtgtaccagctgcgggatagcaagagcagcgacaagagcgtgtgtctgttcaccgacttcgacagccagaccaacgtgtcccagagcaaggactccgacgtgtacatcaccgataagtgcgtgctggacatgcggagcatggacttcaagagcaactccgccgtggcctggtccaacaagtccgatttcgcctgcgccaacgccttcaacaacagcattatccccgaggacacattcttcccaagccccgagagcagcgactccaccgaccacgtgaagcccaaagagacagagaacaccaagcagcccagcaagagctgccacaagcccaaggccatcgtgcacaccgagaaagtgaacatgatgagcctgaccgtgctgggcctgcggatgctgttcgccaaaaccgtggccgtgaacttcctgctgaccgccaagctgttcttcctc

SEQ ID NO: 7135 - DNA, 2175 bp, synthetic construct
  source 1..2175: mol_type = other DNA
atggccttaccagtgaccgccttgctcctgccgctggccttgctgctccacgccgccaggccggaccagagcgtcgtgacacagcctcctagcgtgtcagtggcccctggcaagaccgccagaatcacctgtggccggaacaacatcggcagcaagagcgtgcactggtatcagcagaagcccggccaggctcctgtgctggtggtgtacgacgacagcgacagacccagcggcatccccgagagattcagcggcagcaactccggcaataccgccaccctgaccatcagcagagtggaagccggcgacgaggccgactactactgccaagtgtgggacagcagcagcgatcacgtggtgtttggcggaggcaccaagctgacagtgctgggtctcgaggacctgaagaacgtgttcccacctgaggtggccgtgttcgagcctagcgaggccgagatcagccacacccagaaagccaccctcgtgtgcctggctaccggcttctaccccgaccatgtggaactgtcttggtgggtcaacggcaaagaggtgcacagcggcgtgtgtaccgacccccagccactgaaagaacagcccgccctgaacgacagccggtactgcctgagcagcagactgagagtgtccgccaccttctggcagaacccccggaaccacttcagatgccaggtgcagttctacggcctgagcgagaacgacgagtggacccaggacagagccaagcccgtgacccagatcgtgtctgccgaagcctggggcagagccgatgatgtgattaagatccactggcaggaaaagaagtccaacaccatcctgggcagccaggaaggcaacaccatgaagaccaacgacacctacatgaagttcagctggctgaccgtgcccgagaagtccctggacaaagaacacagatgcatcgtgcggcacgaaaacaacaagaacggcgtggaccaggaaatcatcttcccacccatcaagaccgatgtgattacaatggaccccaaggacaactgctccaaggacgccaacgataccctgctgctccagctgaccaacaccagcgcctactacatgtacttgttgctgctgctgaagtccgtggtgtacttcgccatcatcacatgctgcctgctgcggagaaccgccttctgctgcaacggcgagaagtctagggccaagcgatctggatctggagcaacaaacttctcactactcaaacaagcaggtgacgtggaggagaatcccgggcctactagtatggactggatttggcgcatccttttccttgtcggcgctgctaccggcgcgcattccttcgaagtgcaactggtgcagtctggcggaggggtcatgcggcctggcggatctctgagactgtcttgtgccgccagcggcttcaccttcgacgactacggcatgagctgggtgcgccaggcccctggaaaaggcctggaatgggtgtccggcatcaactggaatggcggcagcaccggctacgccgattctgtgcggggcagattcaccatcagccgggacaacgccaagaacagcctgtacctgcagatgaactccctgcgggccgaggacaccgccctgtactattgcgccagagagcggggctacggctaccacgaccctcacgattattggggccagggcacccttgttaccgtgtcctctacgcgtatccagaaccctgatcctgccgtgtaccagctgcgggatagcaagagcagcgacaagagcgtgtgtctgttcaccgacttcgacagccagaccaacgtgtcccagagcaaggactccgacgtgtacatcaccgataagtgcgtgctggacatgcggagcatggacttcaagagcaactccgccgtggcctggtccaacaagtccgatttcgcctgcgccaacgccttcaacaacagcattatccccgaggacacattcttcccaagccccgagagcagcgactccaccgaccacgtgaagcccaaagagacagagaacaccaagcagcccagcaagagctgccacaagcccaaggccatcgtgcacaccgagaaagtgaacatgatgagcctgaccgtgctgggcctgcggatgctgttcgccaaaaccgtggccgtgaacttcctgctgaccgccaagctgttcttcctc

SEQ ID NO: 7136 - DNA, 2214 bp, synthetic construct
  source 1..2214: mol_type = other DNA
atggccttaccagtgaccgccttgctcctgccgctggccttgctgctccacgccgccaggccggaacagaaactcatcagtgaagaagacctggaattccaggctgtcgtgacacagcctcctagcgcctctggcacaccaggccagagagtgaccatctcctgtagcggcagcagcagcaacatcggcagcaacaccgtgaactggtatcagcaggtgcccggcaccgctcccaagctgctgatctacagcaacaaccagcggcccagcggcgtgcccgatagattttctggcagcaagagcggcaccagcgccagcctggctatctctggactccagtccgaggacgaggccgactactattgcgccgcctgggacgatagcctgaacggctgggtgttcggcggaggcaccaagctgacagtgctgctcgaggacctgaagaacgtgttcccacctgaggtggccgtgttcgagcctagcgaggccgagatcagccacacccagaaagccaccctcgtgtgcctggctaccggcttctaccccgaccatgtggaactgtcttggtgggtcaacggcaaagaggtgcacagcggcgtgtgtaccgacccccagccactgaaagaacagcccgccctgaacgacagccggtactgcctgagcagcagactgagagtgtccgccaccttctggcagaacccccggaaccacttcagatgccaggtgcagttctacggcctgagcgagaacgacgagtggacccaggacagagccaagcccgtgacccagatcgtgtctgccgaagcctggggcagagccgatgatgtgattaagatccactggcaggaaaagaagtccaacaccatcctgggcagccaggaaggcaacaccatgaagaccaacgacacctacatgaagttcagctggctgaccgtgcccgagaagtccctggacaaagaacacagatgcatcgtgcggcacgaaaacaacaagaacggcgtggaccaggaaatcatcttcccacccatcaagaccgatgtgattacaatggaccccaaggacaactgctccaaggacgccaacgataccctgctgctccagctgaccaacaccagcgcctactacatgtacttgttgctgctgctgaagtccgtggtgtacttcgccatcatcacatgctgcctgctgcggagaaccgccttctgctgcaacggcgagaagtctagggccaagcgatctggatctggagcaacaaacttctcactactcaaacaagcaggtgacgtggaggagaatcccgggcctactagtatggactggatttggcgcatccttttccttgtcggcgctgctaccggcgcgcattccttcgaacagatgcaactggtgcagagcggagccgaagtgaaagagcctggcgagagcctgcggatctcctgcaagggcagcggctacagcttcaccaatttctggatctcttgggtgcgccagatgcccggcaagggcctggaatggatgggcagagtggaccccggctactcctacagcacctacagccctagcttccagggccacgtgaccatcagcgccgacaagagcaccagcaccgcctacctccagtggaacagcctgaaggccagcgacaccgccatgtactactgcgccagagtgcagtacagcggctattacgattggttcgacccctggggccagggcacactcgtgacagtgtcaagcacgcgtatccagaaccctgatcctgccgtgtaccagctgcgggatagcaagagcagcgacaagagcgtgtgtctgttcaccgacttcgacagccagaccaacgtgtcccagagcaaggactccgacgtgtacatcaccgataagtgcgtgctggacatgcggagcatggacttcaagagcaactccgccgtggcctggtccaacaagtccgatttcgcctgcgccaacgccttcaacaacagcattatccccgaggacacattcttcccaagccccgagagcagcgactccaccgaccacgtgaagcccaaagagacagagaacaccaagcagcccagcaagagctgccacaagcccaaggccatcgtgcacaccgagaaagtgaacatgatgagcctgaccgtgctgggcctgcggatgctgttcgccaaaaccgtggccgtgaacttcctgctgaccgccaagctgttcttcctc

SEQ ID NO: 7137 - DNA, 2196 bp, synthetic construct
  source 1..2196: mol_type = other DNA
atggccttaccagtgaccgccttgctcctgccgctggccttgctgctccacgccgccaggccggaacagaaactcatcagtgaagaagacctggaattcgacatccagatgacccagagccccagcacactgagcgccagcgtgggcgacagagtgaccatcacctgtcgggccagccagaacatcaacaagtggctggcctggtatcagcagaggcccggaaaagccccccagctgctgatctacaaggccagcagcctggaaagcggcgtgcccagcagattttctggcagcggctctggcaccgagtacaccctgaccatcagctccctccagcccgacgacttcgccacctactactgccagcagtacaacagctacgccaccttcggccagggcaccaaggtggaaatcaagagactcgaggacctgaagaacgtgttcccacctgaggtggccgtgttcgagcctagcgaggccgagatcagccacacccagaaagccaccctcgtgtgcctggctaccggcttctaccccgaccatgtggaactgtcttggtgggtcaacggcaaagaggtgcacagcggcgtgtgtaccgacccccagccactgaaagaacagcccgccctgaacgacagccggtactgcctgagcagcagactgagagtgtccgccaccttctggcagaacccccggaaccacttcagatgccaggtgcagttctacggcctgagcgagaacgacgagtggacccaggacagagccaagcccgtgacccagatcgtgtctgccgaagcctggggcagagccgatgatgtgattaagatccactggcaggaaaagaagtccaacaccatcctgggcagccaggaaggcaacaccatgaagaccaacgacacctacatgaagttcagctggctgaccgtgcccgagaagtccctggacaaagaacacagatgcatcgtgcggcacgaaaacaacaagaacggcgtggaccaggaaatcatcttcccacccatcaagaccgatgtgattacaatggaccccaaggacaactgctccaaggacgccaacgataccctgctgctccagctgaccaacaccagcgcctactacatgtacttgttgctgctgctgaagtccgtggtgtacttcgccatcatcacatgctgcctgctgcggagaaccgccttctgctgcaacggcgagaagtctagggccaagcgatctggatctggagcaacaaacttctcactactcaaacaagcaggtgacgtggaggagaatcccgggcctactagtatggactggatttggcgcatccttttccttgtcggcgctgctaccggcgcgcattccttcgaacaggtgcagctggtgcagtctggggccgaagtgaagaagcctggcgagagcctgaagatcagctgcaagggctccggctacaacttctctaacaagtggatcggctgggtgcgccagctgcctggcagaggactggaatggatcgccatcatctaccccggctacagcgacatcacctacagccccagcttccagggccgcgtgacaatcagcgccgacaccagcatcaacaccgcctacctgcactggcacagcctgaaggccagcgacaccgccatgtactactgcgtgcggcatacagccctggctggcttcgattattggggcctgggcaccctcgtgaccgtgtctagtacgcgtatccagaaccctgatcctgccgtgtaccagctgcgggatagcaagagcagcgacaagagcgtgtgtctgttcaccgacttcgacagccagaccaacgtgtcccagagcaaggactccgacgtgtacatcaccgataagtgcgtgctggacatgcggagcatggacttcaagagcaactccgccgtggcctggtccaacaagtccgatttcgcctgcgccaacgccttcaacaacagcattatccccgaggacacattcttcccaagccccgagagcagcgactccaccgaccacgtgaagcccaaagagacagagaacaccaagcagcccagcaagagctgccacaagcccaaggccatcgtgcacaccgagaaagtgaacatgatgagcctgaccgtgctgggcctgcggatgctgttcgccaaaaccgtggccgtgaacttcctgctgaccgccaagctgttcttcctc

SEQ ID NO: 7138 - DNA, 2169 bp, synthetic construct
  source 1..2169: mol_type = other DNA
atggccttaccagtgaccgccttgctcctgccgctggccttgctgctccacgccgccaggccgatcgtgctgacacagagccctgcttctctggccgtgtctctgggacagagagccaccatcagctgtagagccagcgagagcgtggacaactacggcaacaccttcatgcactggtatcagcagaagcccggccagcctcctaagctgctgatctacagagccagcaacctggaaagcggcatccccgccagattttctggcagcggcagcagaaccgacttcaccctgaccatcaatcccgtggaagccgacgacgtggcaacctactactgccagcagagcaacgaggaccctcctacatttggagccggcaccaagctggaactgaaactcgaggacctgaagaacgtgttcccacctgaggtggccgtgttcgagcctagcgaggccgagatcagccacacccagaaagccaccctcgtgtgcctggctaccggcttctaccccgaccatgtggaactgtcttggtgggtcaacggcaaagaggtgcacagcggcgtgtgtaccgacccccagccactgaaagaacagcccgccctgaacgacagccggtactgcctgagcagcagactgagagtgtccgccaccttctggcagaacccccggaaccacttcagatgccaggtgcagttctacggcctgagcgagaacgacgagtggacccaggacagagccaagcccgtgacccagatcgtgtctgccgaagcctggggcagagccgatgatgtgattaagatccactggcaggaaaagaagtccaacaccatcctgggcagccaggaaggcaacaccatgaagaccaacgacacctacatgaagttcagctggctgaccgtgcccgagaagtccctggacaaagaacacagatgcatcgtgcggcacgaaaacaacaagaacggcgtggaccaggaaatcatcttcccacccatcaagaccgatgtgattacaatggaccccaaggacaactgctccaaggacgccaacgataccctgctgctccagctgaccaacaccagcgcctactacatgtacttgttgctgctgctgaagtccgtggtgtacttcgccatcatcacatgctgcctgctgcggagaaccgccttctgctgcaacggcgagaagtctagggccaagcgatctggatctggagcaacaaacttctcactactcaaacaagcaggtgacgtggaggagaatcccgggcctactagtatggactggatttggcgcatccttttccttgtcggcgctgctaccggcgcgcattccttcgaacagattcagctggtgcagtctggccccgagctgaagaaacctggcgagacagtgaagatcagctgcaaggccagcggctacatcttcaccaattacggcatgaactgggtcaagcaggcccctggcaagagcttcaagtggatgggctggatcaacacctacaccggcgagagcacatacagcgccgacttcaagggcagattcgccttcagcctggaaaccagcgccagcacagcctacctgcacatcaacgacctgaagaacgaggacaccgccacctacttttgcgccagaagcggcggctacgaccctatggattattggggccagggcaccagcgtgaccgtttcttctacgcgtatccagaaccctgatcctgccgtgtaccagctgcgggatagcaagagcagcgacaagagcgtgtgtctgttcaccgacttcgacagccagaccaacgtgtcccagagcaaggactccgacgtgtacatcaccgataagtgcgtgctggacatgcggagcatggacttcaagagcaactccgccgtggcctggtccaacaagtccgatttcgcctgcgccaacgccttcaacaacagcattatccccgaggacacattcttcccaagccccgagagcagcgactccaccgaccacgtgaagcccaaagagacagagaacaccaagcagcccagcaagagctgccacaagcccaaggccatcgtgcacaccgagaaagtgaacatgatgagcctgaccgtgctgggcctgcggatgctgttcgccaaaaccgtggccgtgaacttcctgctgaccgccaagctgttcttcctc

SEQ ID NO: 7139 - DNA, 2166 bp, synthetic construct
  source 1..2166: mol_type = other DNA
atggccttaccagtgaccgccttgctcctgccgctggccttgctgctccacgccgccaggccggagatcgtgctgacacagagccctggcaccctgagcctgtctccaggcgaaagagccacactgagctgtcgggccagccagagcgtgtccaatacctacctggcctggtatcaccagaggcccggacaggctccccggctgctgatctatggcgcttctagcagagccaccggcatccccgatagattcagcggctctggcagcggcaccgacttcgccctgacaatcagctccctggaacccgaggacttcgccgtgtactactgccagcagtacagcaactcctggaccttcggccagggcaccaaggtggaaatcaagagactcgaggacctgaagaacgtgttcccacctgaggtggccgtgttcgagcctagcgaggccgagatcagccacacccagaaagccaccctcgtgtgcctggctaccggcttctaccccgaccatgtggaactgtcttggtgggtcaacggcaaagaggtgcacagcggcgtgtgtaccgacccccagccactgaaagaacagcccgccctgaacgacagccggtactgcctgagcagcagactgagagtgtccgccaccttctggcagaacccccggaaccacttcagatgccaggtgcagttctacggcctgagcgagaacgacgagtggacccaggacagagccaagcccgtgacccagatcgtgtctgccgaagcctggggcagagccgatgatgtgattaagatccactggcaggaaaagaagtccaacaccatcctgggcagccaggaaggcaacaccatgaagaccaacgacacctacatgaagttcagctggctgaccgtgcccgagaagtccctggacaaagaacacagatgcatcgtgcggcacgaaaacaacaagaacggcgtggaccaggaaatcatcttcccacccatcaagaccgatgtgattacaatggaccccaaggacaactgctccaaggacgccaacgataccctgctgctccagctgaccaacaccagcgcctactacatgtacttgttgctgctgctgaagtccgtggtgtacttcgccatcatcacatgctgcctgctgcggagaaccgccttctgctgcaacggcgagaagtctagggccaagcgatctggatctggagcaacaaacttctcactactcaaacaagcaggtgacgtggaggagaatcccgggcctactagtatggactggatttggcgcatccttttccttgtcggcgctgctaccggcgcgcattccttcgaacaggtgcaactggtggaatctggcgggggagtggtgcagcctggcagaagcctgagactgtcttgtgccgccagcggcttcaccttcagcagctacgacatgcactgggtgcgccaggcccctggcaaaggactggaatgggtggccgtgatctcctacgacggcaccaacgagtattacgccgacagcgtgaagggccggttcaccatctccagagacaccagcaagaacaccctgtacctccagatgaacagcctgcgggccgaggacacagccgtgtattattgcgccagagagcggtacttcgactggtccttcgactactggggccagggaaccctggtgtccgtgtctagtacgcgtatccagaaccctgatcctgccgtgtaccagctgcgggatagcaagagcagcgacaagagcgtgtgtctgttcaccgacttcgacagccagaccaacgtgtcccagagcaaggactccgacgtgtacatcaccgataagtgcgtgctggacatgcggagcatggacttcaagagcaactccgccgtggcctggtccaacaagtccgatttcgcctgcgccaacgccttcaacaacagcattatccccgaggacacattcttcccaagccccgagagcagcgactccaccgaccacgtgaagcccaaagagacagagaacaccaagcagcccagcaagagctgccacaagcccaaggccatcgtgcacaccgagaaagtgaacatgatgagcctgaccgtgctgggcctgcggatgctgttcgccaaaaccgtggccgtgaacttcctgctgaccgccaagctgttcttcctc

SEQ ID NO: 7140 - DNA, 2163 bp, synthetic construct
  source 1..2163: mol_type = other DNA
atggccttaccagtgaccgccttgctcctgccgctggccttgctgctccacgccgccaggccggagctgacacaggaccctgctgtgtctgttgccctgggccagacagtgcggattacctgtcaaggcgacagcctgagaagcaactacgccaactggtatcagcagaagcccggacaggctcccgtgctggttatctacggccagaacaacagacccagcggcatccccgatagattcagcggctctagctctggcaataccgccagcctgacaatcactggcgctcaggctgccgatgaggccgactactactgcgatagcagagtgtccaccggcaatcacgtggtgtttggcggcggaacaaagctgacagtgctcggacaactcgaggacctgaagaacgtgttcccacctgaggtggccgtgttcgagcctagcgaggccgagatcagccacacccagaaagccaccctcgtgtgcctggctaccggcttctaccccgaccatgtggaactgtcttggtgggtcaacggcaaagaggtgcacagcggcgtgtgtaccgacccccagccactgaaagaacagcccgccctgaacgacagccggtactgcctgagcagcagactgagagtgtccgccaccttctggcagaacccccggaaccacttcagatgccaggtgcagttctacggcctgagcgagaacgacgagtggacccaggacagagccaagcccgtgacccagatcgtgtctgccgaagcctggggcagagccgatgatgtgattaagatccactggcaggaaaagaagtccaacaccatcctgggcagccaggaaggcaacaccatgaagaccaacgacacctacatgaagttcagctggctgaccgtgcccgagaagtccctggacaaagaacacagatgcatcgtgcggcacgaaaacaacaagaacggcgtggaccaggaaatcatcttcccacccatcaagaccgatgtgattacaatggaccccaaggacaactgctccaaggacgccaacgataccctgctgctccagctgaccaacaccagcgcctactacatgtacttgttgctgctgctgaagtccgtggtgtacttcgccatcatcacatgctgcctgctgcggagaaccgccttctgctgcaacggcgagaagtctagggccaagcgatctggatctggagcaacaaacttctcactactcaaacaagcaggtgacgtggaggagaatcccgggcctactagtatggactggatttggcgcatccttttccttgtcggcgctgctaccggcgcgcattccttcgaagaagttcagctggtgcagagcggagccgaagtgaagaaacctggggcctctgtgaaggtgtcctgcaaggcttccggctacacctttaccagctacgccatgcactgggtccgacaggcacctggacaacggcttgaatggatgggctggatcaacgccggcaacggcaacaccaagtacagccagaaattccagggccgcgtgaccatcaccagagatacaagcgccagcaccgcctacatggaactgtctagcctgagatccgaggacaccgccgtgtactactgtgccagagacatcagctacggcagcttcgactattggggccagggcacactggtcaccgttagctctacgcgtatccagaaccctgatcctgccgtgtaccagctgcgggatagcaagagcagcgacaagagcgtgtgtctgttcaccgacttcgacagccagaccaacgtgtcccagagcaaggactccgacgtgtacatcaccgataagtgcgtgctggacatgcggagcatggacttcaagagcaactccgccgtggcctggtccaacaagtccgatttcgcctgcgccaacgccttcaacaacagcattatccccgaggacacattcttcccaagccccgagagcagcgactccaccgaccacgtgaagcccaaagagacagagaacaccaagcagcccagcaagagctgccacaagcccaaggccatcgtgcacaccgagaaagtgaacatgatgagcctgaccgtgctgggcctgcggatgctgttcgccaaaaccgtggccgtgaacttcctgctgaccgccaagctgttcttcctc

SEQ ID NO: 7141 - DNA, 2169 bp, synthetic construct
  source 1..2169: mol_type = other DNA
atggccttaccagtgaccgccttgctcctgccgctggccttgctgctccacgccgccaggccggacatcgtgctgacacagacaccagccacactgagcgtgacacctggcgattctgtgtccctgagctgtagagccagccagagcatcagcaacaacctgcactggtatcagcagaagtcccacgagagccccagactgctgattaagaacgccagccagtctatcagcggcatccccagcaagtttagcggctctggcagcggcaccgacttcaccctgagaatcaacagcgtggaaaccgaggacttcgggatgtacttctgccagcagagcaatagctggccctacacatttggctccggcaccaagctggaaatcaaactcgaggacctgaagaacgtgttcccacctgaggtggccgtgttcgagcctagcgaggccgagatcagccacacccagaaagccaccctcgtgtgcctggctaccggcttctaccccgaccatgtggaactgtcttggtgggtcaacggcaaagaggtgcacagcggcgtgtgtaccgacccccagccactgaaagaacagcccgccctgaacgacagccggtactgcctgagcagcagactgagagtgtccgccaccttctggcagaacccccggaaccacttcagatgccaggtgcagttctacggcctgagcgagaacgacgagtggacccaggacagagccaagcccgtgacccagatcgtgtctgccgaagcctggggcagagccgatgatgtgattaagatccactggcaggaaaagaagtccaacaccatcctgggcagccaggaaggcaacaccatgaagaccaacgacacctacatgaagttcagctggctgaccgtgcccgagaagtccctggacaaagaacacagatgcatcgtgcggcacgaaaacaacaagaacggcgtggaccaggaaatcatcttcccacccatcaagaccgatgtgattacaatggaccccaaggacaactgctccaaggacgccaacgataccctgctgctccagctgaccaacaccagcgcctactacatgtacttgttgctgctgctgaagtccgtggtgtacttcgccatcatcacatgctgcctgctgcggagaaccgccttctgctgcaacggcgagaagtctagggccaagcgatctggatctggagcaacaaacttctcactactcaaacaagcaggtgacgtggaggagaatcccgggcctactagtatggactggatttggcgcatccttttccttgtcggcgctgctaccggcgcgcattccttcgaacaagtgaagctgcaacagagcggacccgagctggttaagccaggcgcttccgtgaagattagctgcaaggccagcggctacagcttcaccggctactacatgcactgggtcaagcagagccacggcaacatcctggactggatcggctacatctacccctacaacggcgtgtccagctacaaccagaagttcaagggcaaagccactctgaccgtggacaagagcagcagcaccgcctacatggaactgagaagcctgaccagcgaggacagcgccgtgtactattgtgccagagagcggggcctgtaccagctcagagcaatggattattggggccagggcaccagcgtgaccgtttcttctacgcgtatccagaaccctgatcctgccgtgtaccagctgcgggatagcaagagcagcgacaagagcgtgtgtctgttcaccgacttcgacagccagaccaacgtgtcccagagcaaggactccgacgtgtacatcaccgataagtgcgtgctggacatgcggagcatggacttcaagagcaactccgccgtggcctggtccaacaagtccgatttcgcctgcgccaacgccttcaacaacagcattatccccgaggacacattcttcccaagccccgagagcagcgactccaccgaccacgtgaagcccaaagagacagagaacaccaagcagcccagcaagagctgccacaagcccaaggccatcgtgcacaccgagaaagtgaacatgatgagcctgaccgtgctgggcctgcggatgctgttcgccaaaaccgtggccgtgaacttcctgctgaccgccaagctgttcttcctc

SEQ ID NO: 7142 - DNA, 2142 bp, synthetic construct
  source 1..2142: mol_type = other DNA
atggccttaccagtgaccgccttgctcctgccgctggccttgctgctccacgccgccaggccggacatcgtgatgacacagacccctgccatcatgagcgcctctccaggccagaaagtgaccatcacatgtagcgccagcagcagcgtgaactacatgcactggtatcagcagaagctgggcagcagccccaagctgtggatctacgataccagcaaactggcccctggcgtgccagccagattttctggttctggcagcggcaccagctacagcctgacaatcagcagcatggaagccgaggatgccgccagctacttctgccatcagtggtctagctacccctacacctttggctccggcaccaagctggaaatcaaactcgaggacctgaagaacgtgttcccacctgaggtggccgtgttcgagcctagcgaggccgagatcagccacacccagaaagccaccctcgtgtgcctggctaccggcttctaccccgaccatgtggaactgtcttggtgggtcaacggcaaagaggtgcacagcggcgtgtgtaccgacccccagccactgaaagaacagcccgccctgaacgacagccggtactgcctgagcagcagactgagagtgtccgccaccttctggcagaacccccggaaccacttcagatgccaggtgcagttctacggcctgagcgagaacgacgagtggacccaggacagagccaagcccgtgacccagatcgtgtctgccgaagcctggggcagagccgatgatgtgattaagatccactggcaggaaaagaagtccaacaccatcctgggcagccaggaaggcaacaccatgaagaccaacgacacctacatgaagttcagctggctgaccgtgcccgagaagtccctggacaaagaacacagatgcatcgtgcggcacgaaaacaacaagaacggcgtggaccaggaaatcatcttcccacccatcaagaccgatgtgattacaatggaccccaaggacaactgctccaaggacgccaacgataccctgctgctccagctgaccaacaccagcgcctactacatgtacttgttgctgctgctgaagtccgtggtgtacttcgccatcatcacatgctgcctgctgcggagaaccgccttctgctgcaacggcgagaagtctagggccaagcgatctggatctggagcaacaaacttctcactactcaaacaagcaggtgacgtggaggagaatcccgggcctactagtatggactggatttggcgcatccttttccttgtcggcgctgctaccggcgcgcattccttcgaagaagttcagctccaagagtctggccccgacctggtcaagcctagccaaagcctgagcctgacctgtaccgtgaccggctacagcatcacaagcggctatggatggcactggatcagacagttccccggcaacaaactggaatggatgggctacatccactacagcggcagcaccacctacaatcccagcctgaagtcccggatcagcatcagcagagacaccagcaagaaccagttcttcctgcaactgaacagcgtgaccaccgaggacaccgccacctactattgtgctcggagcctgagatattggggccagggcacaaccctgaccgtgtcatctacgcgtatccagaaccctgatcctgccgtgtaccagctgcgggatagcaagagcagcgacaagagcgtgtgtctgttcaccgacttcgacagccagaccaacgtgtcccagagcaaggactccgacgtgtacatcaccgataagtgcgtgctggacatgcggagcatggacttcaagagcaactccgccgtggcctggtccaacaagtccgatttcgcctgcgccaacgccttcaacaacagcattatccccgaggacacattcttcccaagccccgagagcagcgactccaccgaccacgtgaagcccaaagagacagagaacaccaagcagcccagcaagagctgccacaagcccaaggccatcgtgcacaccgagaaagtgaacatgatgagcctgaccgtgctgggcctgcggatgctgttcgccaaaaccgtggccgtgaacttcctgctgaccgccaagctgttcttcctc

SEQ ID NO: 7143 - DNA, 2151 bp, synthetic construct
  source 1..2151: mol_type = other DNA
atggccttaccagtgaccgccttgctcctgccgctggccttgctgctccacgccgccaggccggacatccagatgacacagagccctagcagcctgtctgccagcgtgggagacagagtgaccatcacctgtagcgccaccagcagcatcagctacatgcactggtatcagcagaagcccggcaaggcccctaaaggctggatctacgataccagcaaactggcccacggcgtgcccagcagattttctggttctggcagcggcaccgacttcaccctgacaatatctagcctccagcctgaggacttcgccacctactactgccaccagagaagaagctaccccttcaccttcggccagggcaccaaggtggaaatcaaactcgaggacctgaagaacgtgttcccacctgaggtggccgtgttcgagcctagcgaggccgagatcagccacacccagaaagccaccctcgtgtgcctggctaccggcttctaccccgaccatgtggaactgtcttggtgggtcaacggcaaagaggtgcacagcggcgtgtgtaccgacccccagccactgaaagaacagcccgccctgaacgacagccggtactgcctgagcagcagactgagagtgtccgccaccttctggcagaacccccggaaccacttcagatgccaggtgcagttctacggcctgagcgagaacgacgagtggacccaggacagagccaagcccgtgacccagatcgtgtctgccgaagcctggggcagagccgatgatgtgattaagatccactggcaggaaaagaagtccaacaccatcctgggcagccaggaaggcaacaccatgaagaccaacgacacctacatgaagttcagctggctgaccgtgcccgagaagtccctggacaaagaacacagatgcatcgtgcggcacgaaaacaacaagaacggcgtggaccaggaaatcatcttcccacccatcaagaccgatgtgattacaatggaccccaaggacaactgctccaaggacgccaacgataccctgctgctccagctgaccaacaccagcgcctactacatgtacttgttgctgctgctgaagtccgtggtgtacttcgccatcatcacatgctgcctgctgcggagaaccgccttctgctgcaacggcgagaagtctagggccaagcgatctggatctggagcaacaaacttctcactactcaaacaagcaggtgacgtggaggagaatcccgggcctactagtatggactggatttggcgcatccttttccttgtcggcgctgctaccggcgcgcattccttcgaagaagtgcaactggttcagagcggagccgaagtgaagaaacctggggcctctgtgaaggtgtcctgcaaggcttccggctacacctttaccaatttctggattcactgggtccgacaggctccaggccaaggactggaatggatcggagagatcgaccccagcgacagctacaccaactacaaccagaaattcaaaggccgggtcaccatcaccagagacaccagcacaagcaccgcctacctggaactgagcagcctgagaagcgaggacaccgccgtgtactactgcgccagggaaatcaccaccgtggattattggggccagggaaccctggtcaccgtgtcatctacgcgtatccagaaccctgatcctgccgtgtaccagctgcgggatagcaagagcagcgacaagagcgtgtgtctgttcaccgacttcgacagccagaccaacgtgtcccagagcaaggactccgacgtgtacatcaccgataagtgcgtgctggacatgcggagcatggacttcaagagcaactccgccgtggcctggtccaacaagtccgatttcgcctgcgccaacgccttcaacaacagcattatccccgaggacacattcttcccaagccccgagagcagcgactccaccgaccacgtgaagcccaaagagacagagaacaccaagcagcccagcaagagctgccacaagcccaaggccatcgtgcacaccgagaaagtgaacatgatgagcctgaccgtgctgggcctgcggatgctgttcgccaaaaccgtggccgtgaacttcctgctgaccgccaagctgttcttcctc

SEQ ID NO: 7144 - DNA, 2172 bp, synthetic construct
  source 1..2172: mol_type = other DNA
atggccttaccagtgaccgccttgctcctgccgctggccttgctgctccacgccgccaggccggacatccagatgacacagagccctagcagcctgtctgccagcgtgggagacagagtgaccatcacatgcaaggccagccagggcttcaacaaatacgtggcctggtatcagcagaagcccggcaaggctcctaagctgctgatctactacaccagcacactccagcctggcgtgcccagcagattttctggctctggcagcggcagagactacaccctgacaatatccagcctccagccagaggacttcgccacctactactgtctccagtacggcaacctgctgtacgcctttggacagggcaccaaggtggaaatcaagagactcgaggacctgaagaacgtgttcccacctgaggtggccgtgttcgagcctagcgaggccgagatcagccacacccagaaagccaccctcgtgtgcctggctaccggcttctaccccgaccatgtggaactgtcttggtgggtcaacggcaaagaggtgcacagcggcgtgtgtaccgacccccagccactgaaagaacagcccgccctgaacgacagccggtactgcctgagcagcagactgagagtgtccgccaccttctggcagaacccccggaaccacttcagatgccaggtgcagttctacggcctgagcgagaacgacgagtggacccaggacagagccaagcccgtgacccagatcgtgtctgccgaagcctggggcagagccgatgatgtgattaagatccactggcaggaaaagaagtccaacaccatcctgggcagccaggaaggcaacaccatgaagaccaacgacacctacatgaagttcagctggctgaccgtgcccgagaagtccctggacaaagaacacagatgcatcgtgcggcacgaaaacaacaagaacggcgtggaccaggaaatcatcttcccacccatcaagaccgatgtgattacaatggaccccaaggacaactgctccaaggacgccaacgataccctgctgctccagctgaccaacaccagcgcctactacatgtacttgttgctgctgctgaagtccgtggtgtacttcgccatcatcacatgctgcctgctgcggagaaccgccttctgctgcaacggcgagaagtctagggccaagcgatctggatctggagcaacaaacttctcactactcaaacaagcaggtgacgtggaggagaatcccgggcctactagtatggactggatttggcgcatccttttccttgtcggcgctgctaccggcgcgcattccttcgaagaagttcagcttgtgcagagcggagccgaagtgaagaaacctggggcctctgtgaaggtgtcctgcaaagccagcggctacacctttaccagctactggatcggctgggtccgacaggctcctggacaaggactggaatggatcggcgacatctatcccggcggaggctacaccaactacaacgagaagttcaagggccgcgtgacaatcaccagagacacctctacaagcaccgcctacctggaactgagcagcctgagaagcgaggacaccgccgtgtactactgcgccagactggatggcagcagctacagaggcgctatggattcttggggccagggcacactggtcaccgtttcttctacgcgtatccagaaccctgatcctgccgtgtaccagctgcgggatagcaagagcagcgacaagagcgtgtgtctgttcaccgacttcgacagccagaccaacgtgtcccagagcaaggactccgacgtgtacatcaccgataagtgcgtgctggacatgcggagcatggacttcaagagcaactccgccgtggcctggtccaacaagtccgatttcgcctgcgccaacgccttcaacaacagcattatccccgaggacacattcttcccaagccccgagagcagcgactccaccgaccacgtgaagcccaaagagacagagaacaccaagcagcccagcaagagctgccacaagcccaaggccatcgtgcacaccgagaaagtgaacatgatgagcctgaccgtgctgggcctgcggatgctgttcgccaaaaccgtggccgtgaacttcctgctgaccgccaagctgttcttcctc

SEQ ID NO: 7145 - DNA, 2160 bp, synthetic construct
  source 1..2160: mol_type = other DNA
atggccttaccagtgaccgccttgctcctgccgctggccttgctgctccacgccgccaggccggacatccagatgacacagagccctagcagcctgtctgccagcgtgggagacagagtgaccatcacctgtagagccagccaggacatccggtactacctgaactggtatcagcagaagcccggcaaggcccctaagctgctgatctatgtggcctccagcctccagagcggagtgccttctagattttctggcagcggctccggcaccgagtttaccctgacagtgtctagcttgcagcccgaggacttcgccacctactactgcctgcaagtgtacagcacccctcggacctttggacagggcaccaaggtggaaatcaaactcgaggacctgaagaacgtgttcccacctgaggtggccgtgttcgagcctagcgaggccgagatcagccacacccagaaagccaccctcgtgtgcctggctaccggcttctaccccgaccatgtggaactgtcttggtgggtcaacggcaaagaggtgcacagcggcgtgtgtaccgacccccagccactgaaagaacagcccgccctgaacgacagccggtactgcctgagcagcagactgagagtgtccgccaccttctggcagaacccccggaaccacttcagatgccaggtgcagttctacggcctgagcgagaacgacgagtggacccaggacagagccaagcccgtgacccagatcgtgtctgccgaagcctggggcagagccgatgatgtgattaagatccactggcaggaaaagaagtccaacaccatcctgggcagccaggaaggcaacaccatgaagaccaacgacacctacatgaagttcagctggctgaccgtgcccgagaagtccctggacaaagaacacagatgcatcgtgcggcacgaaaacaacaagaacggcgtggaccaggaaatcatcttcccacccatcaagaccgatgtgattacaatggaccccaaggacaactgctccaaggacgccaacgataccctgctgctccagctgaccaacaccagcgcctactacatgtacttgttgctgctgctgaagtccgtggtgtacttcgccatcatcacatgctgcctgctgcggagaaccgccttctgctgcaacggcgagaagtctagggccaagcgatctggatctggagcaacaaacttctcactactcaaacaagcaggtgacgtggaggagaatcccgggcctactagtatggactggatttggcgcatccttttccttgtcggcgctgctaccggcgcgcattccttcgaagaagtgcagcttgttgaatctggcggcggactggctaagcctggcggatctctgagactgtcttgtgccgccagcggcttccggttcaccttcaacaactactacatggactgggtccgacaggcccctggacaaggacttgaatgggtgtccagaatcagcagcagcggcgaccctacttggtacgccgattctgtgaagggcagattcaccatcagcagagagaacgccaagaacaccctgttcctccagatgaactccctgagagccgaggacaccgccgtgtactattgtgcctctctgaccaccggcagcgattcttggggacagggcgtgctggttaccgtgtcatctacgcgtatccagaaccctgatcctgccgtgtaccagctgcgggatagcaagagcagcgacaagagcgtgtgtctgttcaccgacttcgacagccagaccaacgtgtcccagagcaaggactccgacgtgtacatcaccgataagtgcgtgctggacatgcggagcatggacttcaagagcaactccgccgtggcctggtccaacaagtccgatttcgcctgcgccaacgccttcaacaacagcattatccccgaggacacattcttcccaagccccgagagcagcgactccaccgaccacgtgaagcccaaagagacagagaacaccaagcagcccagcaagagctgccacaagcccaaggccatcgtgcacaccgagaaagtgaacatgatgagcctgaccgtgctgggcctgcggatgctgttcgccaaaaccgtggccgtgaacttcctgctgaccgccaagctgttcttcctc

SEQ ID NO: 7146 - DNA, 2163 bp, synthetic construct
  source 1..2163: mol_type = other DNA
atggccttaccagtgaccgccttgctcctgccgctggccttgctgctccacgccgccaggccggagatcgtgatgacacagagccccgccacactgagtgtgtctccaggcgaaagagccacactgtcctgtagagccagccagagcgtgtccagaaacctggcctggtatcagcagaagcctggacaggctccccggctgttgatctacggcgcttctacaagagccaccggcattcccgccagattttctggctctggcagcggcaccgagttcaccctgacaatcggaagcctccagagcgaggacttcgccgtgtactactgccagcagtacaagacctggcctcggacctttggacagggcaccaacgtggaaatcaaactcgaggacctgaagaacgtgttcccacctgaggtggccgtgttcgagcctagcgaggccgagatcagccacacccagaaagccaccctcgtgtgcctggctaccggcttctaccccgaccatgtggaactgtcttggtgggtcaacggcaaagaggtgcacagcggcgtgtgtaccgacccccagccactgaaagaacagcccgccctgaacgacagccggtactgcctgagcagcagactgagagtgtccgccaccttctggcagaacccccggaaccacttcagatgccaggtgcagttctacggcctgagcgagaacgacgagtggacccaggacagagccaagcccgtgacccagatcgtgtctgccgaagcctggggcagagccgatgatgtgattaagatccactggcaggaaaagaagtccaacaccatcctgggcagccaggaaggcaacaccatgaagaccaacgacacctacatgaagttcagctggctgaccgtgcccgagaagtccctggacaaagaacacagatgcatcgtgcggcacgaaaacaacaagaacggcgtggaccaggaaatcatcttcccacccatcaagaccgatgtgattacaatggaccccaaggacaactgctccaaggacgccaacgataccctgctgctccagctgaccaacaccagcgcctactacatgtacttgttgctgctgctgaagtccgtggtgtacttcgccatcatcacatgctgcctgctgcggagaaccgccttctgctgcaacggcgagaagtctagggccaagcgatctggatctggagcaacaaacttctcactactcaaacaagcaggtgacgtggaggagaatcccgggcctactagtatggactggatttggcgcatccttttccttgtcggcgctgctaccggcgcgcattccttcgaacaagttcagctgcaacaatggggagccggcctgctgaagcctagcgaaacactgtctctgacctgcgccgtgttcggcggctctttcagcggctactactggtcctggatcagacagcctcctggcaaaggactggaatggatcggcgagatcaaccaccggggcaacaccaacgacaaccccagcctgaaaagcagagtgaccatcagcgtggacaccagcaagaaccagttcgccctgaagctgagcagcgtgacagccgctgataccgccgtgtattattgcgccagagagcggggctacacctacggcaatttcgatcactggggccagggcaccctggtcacagtttcttctacgcgtatccagaaccctgatcctgccgtgtaccagctgcgggatagcaagagcagcgacaagagcgtgtgtctgttcaccgacttcgacagccagaccaacgtgtcccagagcaaggactccgacgtgtacatcaccgataagtgcgtgctggacatgcggagcatggacttcaagagcaactccgccgtggcctggtccaacaagtccgatttcgcctgcgccaacgccttcaacaacagcattatccccgaggacacattcttcccaagccccgagagcagcgactccaccgaccacgtgaagcccaaagagacagagaacaccaagcagcccagcaagagctgccacaagcccaaggccatcgtgcacaccgagaaagtgaacatgatgagcctgaccgtgctgggcctgcggatgctgttcgccaaaaccgtggccgtgaacttcctgctgaccgccaagctgttcttcctc

SEQ ID NO: 7147 - DNA, 2166 bp, synthetic construct
  source 1..2166: mol_type = other DNA
atggccttaccagtgaccgccttgctcctgccgctggccttgctgctccacgccgccaggccggagatcgtgatgacccctagcagcgccacactgagtgtgtctccaggcgaaagagccacactgtcctgtagagccagccagagcgtgtccagaaacctggcctggtatcagcagaagcctggacaggctccccggctgttgatctacggcgcttctacaagagccaccggcattcccgccagattttctggctctggcagcggcaccgagttcaccctgacaatctctagcctccagagcgaggacttcgccgtgtactactgccaccagtacagcaactggatgtgcagcttcggccagggcaccaagctggaaatcaaactcgaggacctgaagaacgtgttcccacctgaggtggccgtgttcgagcctagcgaggccgagatcagccacacccagaaagccaccctcgtgtgcctggctaccggcttctaccccgaccatgtggaactgtcttggtgggtcaacggcaaagaggtgcacagcggcgtgtgtaccgacccccagccactgaaagaacagcccgccctgaacgacagccggtactgcctgagcagcagactgagagtgtccgccaccttctggcagaacccccggaaccacttcagatgccaggtgcagttctacggcctgagcgagaacgacgagtggacccaggacagagccaagcccgtgacccagatcgtgtctgccgaagcctggggcagagccgatgatgtgattaagatccactggcaggaaaagaagtccaacaccatcctgggcagccaggaaggcaacaccatgaagaccaacgacacctacatgaagttcagctggctgaccgtgcccgagaagtccctggacaaagaacacagatgcatcgtgcggcacgaaaacaacaagaacggcgtggaccaggaaatcatcttcccacccatcaagaccgatgtgattacaatggaccccaaggacaactgctccaaggacgccaacgataccctgctgctccagctgaccaacaccagcgcctactacatgtacttgttgctgctgctgaagtccgtggtgtacttcgccatcatcacatgctgcctgctgcggagaaccgccttctgctgcaacggcgagaagtctagggccaagcgatctggatctggagcaacaaacttctcactactcaaacaagcaggtgacgtggaggagaatcccgggcctactagtatggactggatttggcgcatccttttccttgtcggcgctgctaccggcgcgcattccttcgaagaagttcagctccttgagtcaggtggcggcctggttcaacctggcggatctctgagactgagctgtgccgccagcggcttcacctttagcagatacgccatgaactgggtccgacaggcccctggcaaaggactggaatgggtgtccggcatctctggaagcggcggcagaacctactacgccgattctgtgaagggcagattcaccatcagccgggacaacagcaagaacaccctgtacctccagatgaacagcctgagagccgaggacacagccgtgtattattgcgccaaggaccgggacttttggagcggcccttttgactattggggccagggaaccctggtcaccgttagctctacgcgtatccagaaccctgatcctgccgtgtaccagctgcgggatagcaagagcagcgacaagagcgtgtgtctgttcaccgacttcgacagccagaccaacgtgtcccagagcaaggactccgacgtgtacatcaccgataagtgcgtgctggacatgcggagcatggacttcaagagcaactccgccgtggcctggtccaacaagtccgatttcgcctgcgccaacgccttcaacaacagcattatccccgaggacacattcttcccaagccccgagagcagcgactccaccgaccacgtgaagcccaaagagacagagaacaccaagcagcccagcaagagctgccacaagcccaaggccatcgtgcacaccgagaaagtgaacatgatgagcctgaccgtgctgggcctgcggatgctgttcgccaaaaccgtggccgtgaacttcctgctgaccgccaagctgttcttcctc

SEQ ID NO: 7148 - DNA, 2181 bp, synthetic construct
  source 1..2181: mol_type = other DNA
atggccttaccagtgaccgccttgctcctgccgctggccttgctgctccacgccgccaggccggacatccagatgacccagagccccagcagcctgtctgccagcgtgggcgacagagtgaccatcacatgcaaggccagcaagaacatcagaagctacctggcctggtatcagcagaagcccggcaaggcccccaagctgctgatctacagcggcagcacactgcacagcggcgtgcccagcagattttccggctctggcagcggcaccgacttcaccctgaccatctctagcctccagcccgaggacttcgccacctactactgccagcagcaccacgagtaccccctgacattcggccagggcaccaaggtggaaatcaagagactcgaggacctgaagaacgtgttcccacctgaggtggccgtgttcgagcctagcgaggccgagatcagccacacccagaaagccaccctcgtgtgcctggctaccggcttctaccccgaccatgtggaactgtcttggtgggtcaacggcaaagaggtgcacagcggcgtgtgtaccgacccccagccactgaaagaacagcccgccctgaacgacagccggtactgcctgagcagcagactgagagtgtccgccaccttctggcagaacccccggaaccacttcagatgccaggtgcagttctacggcctgagcgagaacgacgagtggacccaggacagagccaagcccgtgacccagatcgtgtctgccgaagcctggggcagagccgatgatgtgattaagatccactggcaggaaaagaagtccaacaccatcctgggcagccaggaaggcaacaccatgaagaccaacgacacctacatgaagttcagctggctgaccgtgcccgagaagtccctggacaaagaacacagatgcatcgtgcggcacgaaaacaacaagaacggcgtggaccaggaaatcatcttcccacccatcaagaccgatgtgattacaatggaccccaaggacaactgctccaaggacgccaacgataccctgctgctccagctgaccaacaccagcgcctactacatgtacttgttgctgctgctgaagtccgtggtgtacttcgccatcatcacatgctgcctgctgcggagaaccgccttctgctgcaacggcgagaagtctagggccaagcgatctggatctggagcaacaaacttctcactactcaaacaagcaggtgacgtggaggagaatcccgggcctactagtatggactggatttggcgcatccttttccttgtcggcgctgctaccggcgcgcattccttcgaacaggtgcaactccaggaatctggccccggactcgtgaagcccagcgagacactgagcctgacctgtaccgtgtccggctacaccatcaccagcggctacgactggtcctggatcagacagcctcctggcaagggcctggaatggatcggctacatcaactacggcggctccaccaactacaagcccagcctgggaagccgcgtgacaatcagcgtggacacctccaagaaccagttcagcctgaagctgagcagcgtgacagccgccgataccgccgtgtactactgcgcccggtacaacgagtacaagagctacatctacgattggtacttcgacttctggggccagggaaccctcgtgaccgtgtctagtacgcgtatccagaaccctgatcctgccgtgtaccagctgcgggatagcaagagcagcgacaagagcgtgtgtctgttcaccgacttcgacagccagaccaacgtgtcccagagcaaggactccgacgtgtacatcaccgataagtgcgtgctggacatgcggagcatggacttcaagagcaactccgccgtggcctggtccaacaagtccgatttcgcctgcgccaacgccttcaacaacagcattatccccgaggacacattcttcccaagccccgagagcagcgactccaccgaccacgtgaagcccaaagagacagagaacaccaagcagcccagcaagagctgccacaagcccaaggccatcgtgcacaccgagaaagtgaacatgatgagcctgaccgtgctgggcctgcggatgctgttcgccaaaaccgtggccgtgaacttcctgctgaccgccaagctgttcttcctc

SEQ ID NO: 7149 - DNA, 2187 bp, synthetic construct
  source 1..2187: mol_type = other DNA
atggccttaccagtgaccgccttgctcctgccgctggccttgctgctccacgccgccaggccgcagtctgtggtcacacagcctccatccgtgtctgctgcccctggacagaaagtgaccatctcctgtagcggcagcagcagcaacatcggcaacaactacgtgtcctggtatcagcagctccccggcacagctcccaaactgctgatctacgacaacaacaagcggcccagcggcatccccgatagattttctggcagcaagagcggcaccagcgccacactgggaattaccggacttcagacaggcgacgaggccgactactactgtggcacatgggatggcagcctgtacaccatgcttttcggcggaggcaccaagctgacagtgcttctcgaggacctgaagaacgtgttcccacctgaggtggccgtgttcgagcctagcgaggccgagatcagccacacccagaaagccaccctcgtgtgcctggctaccggcttctaccccgaccatgtggaactgtcttggtgggtcaacggcaaagaggtgcacagcggcgtgtgtaccgacccccagccactgaaagaacagcccgccctgaacgacagccggtactgcctgagcagcagactgagagtgtccgccaccttctggcagaacccccggaaccacttcagatgccaggtgcagttctacggcctgagcgagaacgacgagtggacccaggacagagccaagcccgtgacccagatcgtgtctgccgaagcctggggcagagccgatgatgtgattaagatccactggcaggaaaagaagtccaacaccatcctgggcagccaggaaggcaacaccatgaagaccaacgacacctacatgaagttcagctggctgaccgtgcccgagaagtccctggacaaagaacacagatgcatcgtgcggcacgaaaacaacaagaacggcgtggaccaggaaatcatcttcccacccatcaagaccgatgtgattacaatggaccccaaggacaactgctccaaggacgccaacgataccctgctgctccagctgaccaacaccagcgcctactacatgtacttgttgctgctgctgaagtccgtggtgtacttcgccatcatcacatgctgcctgctgcggagaaccgccttctgctgcaacggcgagaagtctagggccaagcgatctggatctggagcaacaaacttctcactactcaaacaagcaggtgacgtggaggagaatcccgggcctactagtatggactggatttggcgcatccttttccttgtcggcgctgctaccggcgcgcattccttcgaagaagtgcaactggtggaatctggcggcggactggttaagcctggcggatctctgagactgtcttgtgccgccagcggcttcaccttcagcaatgcctggatgagctgggttcgacaggcccctggaaaaggactggaatgggtcggattcatccggtccaaagcctacggcggcaccacagaatatgccgcctctgtgaagggcagattcaccatcagccgggacgacagcaagtctatcgcctacctccagatgaacaacctgaaaaccgaggacaccgccgtgtactactgcgccagagatggcctgtacagcagctcttggtacgacagcgattactggggccagggcacactggtcacagtgtcatctacgcgtatccagaaccctgatcctgccgtgtaccagctgcgggatagcaagagcagcgacaagagcgtgtgtctgttcaccgacttcgacagccagaccaacgtgtcccagagcaaggactccgacgtgtacatcaccgataagtgcgtgctggacatgcggagcatggacttcaagagcaactccgccgtggcctggtccaacaagtccgatttcgcctgcgccaacgccttcaacaacagcattatccccgaggacacattcttcccaagccccgagagcagcgactccaccgaccacgtgaagcccaaagagacagagaacaccaagcagcccagcaagagctgccacaagcccaaggccatcgtgcacaccgagaaagtgaacatgatgagcctgaccgtgctgggcctgcggatgctgttcgccaaaaccgtggccgtgaacttcctgctgaccgccaagctgttcttcctc

SEQ ID NO: 7150 - DNA, 2202 bp, synthetic construct
  source 1..2202: mol_type = other DNA
atggccttaccagtgaccgccttgctcctgccgctggccttgctgctccacgccgccaggccgcagtctgtgctgacacagcctcctagtgtgtctggcgctcctggacagagagtgaccatctcttgtaccggcagcagcagcaatatcggagccggctatgacgtgcactggtatcagcagctccctggcacagcccctaaactgctgatcttcggcaacagcaacagacccagcggcgtgcccgatagattcagcggctttaagagcggcacaagcgccagcctggctatcactggactgcaagccgaggacgaggccgactacttctgccagagctacgatagcagcctgagcggcagcggagtgtttggcacaggcaccaaagtgacagtgcttggcctcgaggacctgaagaacgtgttcccacctgaggtggccgtgttcgagcctagcgaggccgagatcagccacacccagaaagccaccctcgtgtgcctggctaccggcttctaccccgaccatgtggaactgtcttggtgggtcaacggcaaagaggtgcacagcggcgtgtgtaccgacccccagccactgaaagaacagcccgccctgaacgacagccggtactgcctgagcagcagactgagagtgtccgccaccttctggcagaacccccggaaccacttcagatgccaggtgcagttctacggcctgagcgagaacgacgagtggacccaggacagagccaagcccgtgacccagatcgtgtctgccgaagcctggggcagagccgatgatgtgattaagatccactggcaggaaaagaagtccaacaccatcctgggcagccaggaaggcaacaccatgaagaccaacgacacctacatgaagttcagctggctgaccgtgcccgagaagtccctggacaaagaacacagatgcatcgtgcggcacgaaaacaacaagaacggcgtggaccaggaaatcatcttcccacccatcaagaccgatgtgattacaatggaccccaaggacaactgctccaaggacgccaacgataccctgctgctccagctgaccaacaccagcgcctactacatgtacttgttgctgctgctgaagtccgtggtgtacttcgccatcatcacatgctgcctgctgcggagaaccgccttctgctgcaacggcgagaagtctagggccaagcgatctggatctggagcaacaaacttctcactactcaaacaagcaggtgacgtggaggagaatcccgggcctactagtatggactggatttggcgcatccttttccttgtcggcgctgctaccggcgcgcattccttcgaacaaatgcaactggttcaaagcggcggtggcctggtgcaacctggaagaagtctgagactgagctgtgccgccagcggcttcaccttcgatgattacgccatgcactgggtccgacaggcccctggaaaaggactggaatgggtgtccggcatctcctggaatagcggctctatcggctacgccgacagcgtgaagggcagattcaccatcagccgggacaacgccaagaacagcctgtacctccagatgaactccctgagagccgaggatacagccctgtactactgcgccaaggacatccacagcggcagctactacggcctgctgtactacgctatggacgtgtggggccagggcacaaccgtgacagtttcttctacgcgtatccagaaccctgatcctgccgtgtaccagctgcgggatagcaagagcagcgacaagagcgtgtgtctgttcaccgacttcgacagccagaccaacgtgtcccagagcaaggactccgacgtgtacatcaccgataagtgcgtgctggacatgcggagcatggacttcaagagcaactccgccgtggcctggtccaacaagtccgatttcgcctgcgccaacgccttcaacaacagcattatccccgaggacacattcttcccaagccccgagagcagcgactccaccgaccacgtgaagcccaaagagacagagaacaccaagcagcccagcaagagctgccacaagcccaaggccatcgtgcacaccgagaaagtgaacatgatgagcctgaccgtgctgggcctgcggatgctgttcgccaaaaccgtggccgtgaacttcctgctgaccgccaagctgttcttcctc

SEQ ID NO: 7151 - DNA, 2202 bp, synthetic construct
  source 1..2202: mol_type = other DNA
atggccttaccagtgaccgccttgctcctgccgctggccttgctgctccacgccgccaggccgctgcctgttctgacacagcctccatctgcctctggcacacctggacagagagtgaccatcagctgtagcggcagaagcagcaacatcggcagcaacagcgtgaactggtacagacagcttcctggcgctgcccctaagctgctgatctacagcaacaaccagcggcctcctggcgtgccagtcagattttctggcagcaagagcggcacaagcgccagcctggctatttctggactccagtctgaggacgaggccacctactactgtgccacctgggacgacaacctgaacgtgcactacgtgttcggcaccggcaccaaagtgacagtgcttggaagtagactcgaggacctgaagaacgtgttcccacctgaggtggccgtgttcgagcctagcgaggccgagatcagccacacccagaaagccaccctcgtgtgcctggctaccggcttctaccccgaccatgtggaactgtcttggtgggtcaacggcaaagaggtgcacagcggcgtgtgtaccgacccccagccactgaaagaacagcccgccctgaacgacagccggtactgcctgagcagcagactgagagtgtccgccaccttctggcagaacccccggaaccacttcagatgccaggtgcagttctacggcctgagcgagaacgacgagtggacccaggacagagccaagcccgtgacccagatcgtgtctgccgaagcctggggcagagccgatgatgtgattaagatccactggcaggaaaagaagtccaacaccatcctgggcagccaggaaggcaacaccatgaagaccaacgacacctacatgaagttcagctggctgaccgtgcccgagaagtccctggacaaagaacacagatgcatcgtgcggcacgaaaacaacaagaacggcgtggaccaggaaatcatcttcccacccatcaagaccgatgtgattacaatggaccccaaggacaactgctccaaggacgccaacgataccctgctgctccagctgaccaacaccagcgcctactacatgtacttgttgctgctgctgaagtccgtggtgtacttcgccatcatcacatgctgcctgctgcggagaaccgccttctgctgcaacggcgagaagtctagggccaagcgatctggatctggagcaacaaacttctcactactcaaacaagcaggtgacgtggaggagaatcccgggcctactagtatggactggatttggcgcatccttttccttgtcggcgctgctaccggcgcgcattccttcgaacttgaaatggctcaggtgcagctggtgcagagcggagccgaagtgaagaaacctggcagcagcgtgaaggtgtcctgcaaagcttctggcggcaccttcagcagctacgccatctcttgggttcgacaggcccctggacaaggactggaatggatgggcagaatcatccccatcctgggaatcgccaactacgcccagaaattccagggcagagtgacaatcaccgccgacaagagcaccagcaccgcctacatggaactgagcagcctgagaagcgaggacaccgccgtgtactattgtgcaagaggcggctactacagccacgacatgtggagcgaagattggggccagggcacactggtcacagtgtcatctacgcgtatccagaaccctgatcctgccgtgtaccagctgcgggatagcaagagcagcgacaagagcgtgtgtctgttcaccgacttcgacagccagaccaacgtgtcccagagcaaggactccgacgtgtacatcaccgataagtgcgtgctggacatgcggagcatggacttcaagagcaactccgccgtggcctggtccaacaagtccgatttcgcctgcgccaacgccttcaacaacagcattatccccgaggacacattcttcccaagccccgagagcagcgactccaccgaccacgtgaagcccaaagagacagagaacaccaagcagcccagcaagagctgccacaagcccaaggccatcgtgcacaccgagaaagtgaacatgatgagcctgaccgtgctgggcctgcggatgctgttcgccaaaaccgtggccgtgaacttcctgctgaccgccaagctgttcttcctc

SEQ ID NO: 7152 - DNA, 2184 bp, synthetic construct
  source 1..2184: mol_type = other DNA
atggccttaccagtgaccgccttgctcctgccgctggccttgctgctccacgccgccaggccggacttcgtgatgacacagagccctgatagcctggccgtgtctctcggcgagcgagtgaccatgagctgcaagtctagccagagcctgctgaacagcggcaaccagaagaactacctgacctggtatcagcagaagcccggccagcctcctaagctgctgatctactgggccagcaccagagaaagcggcgtgcccgatagattttctggctctggcagcggcaccgacttcaccctgacaatttctagcctgcaagccgaggacgtggccgtgtactactgccagaacgactacagctacccctacaccttcggccagggcaccaagctggaaatcaaactcgaggacctgaagaacgtgttcccacctgaggtggccgtgttcgagcctagcgaggccgagatcagccacacccagaaagccaccctcgtgtgcctggctaccggcttctaccccgaccatgtggaactgtcttggtgggtcaacggcaaagaggtgcacagcggcgtgtgtaccgacccccagccactgaaagaacagcccgccctgaacgacagccggtactgcctgagcagcagactgagagtgtccgccaccttctggcagaacccccggaaccacttcagatgccaggtgcagttctacggcctgagcgagaacgacgagtggacccaggacagagccaagcccgtgacccagatcgtgtctgccgaagcctggggcagagccgatgatgtgattaagatccactggcaggaaaagaagtccaacaccatcctgggcagccaggaaggcaacaccatgaagaccaacgacacctacatgaagttcagctggctgaccgtgcccgagaagtccctggacaaagaacacagatgcatcgtgcggcacgaaaacaacaagaacggcgtggaccaggaaatcatcttcccacccatcaagaccgatgtgattacaatggaccccaaggacaactgctccaaggacgccaacgataccctgctgctccagctgaccaacaccagcgcctactacatgtacttgttgctgctgctgaagtccgtggtgtacttcgccatcatcacatgctgcctgctgcggagaaccgccttctgctgcaacggcgagaagtctagggccaagcgatctggatctggagcaacaaacttctcactactcaaacaagcaggtgacgtggaggagaatcccgggcctactagtatggactggatttggcgcatccttttccttgtcggcgctgctaccggcgcgcattccttcgaagaagtgcaactggttcagagcggagccgagctgaagaaacctggggccagcgtgaaggtgtcctgtaaagccagcggctacacctttaccgactactacatgaaatgggtccgacaggccccaggccagggactcgaatggatcggcgatattatccccagcaacggggccaccttctacaaccagaaattcaagggccgcgtgaccatcaccgtggacaagagcacaagcaccgcctacatggaactgagcagcctgagaagcgaggacaccgccgtgtattattgcgccagaagccatctgctgcgggccagttggttcgcctattggggacagggaaccctggtcaccgttagctctacgcgtatccagaaccctgatcctgccgtgtaccagctgcgggatagcaagagcagcgacaagagcgtgtgtctgttcaccgacttcgacagccagaccaacgtgtcccagagcaaggactccgacgtgtacatcaccgataagtgcgtgctggacatgcggagcatggacttcaagagcaactccgccgtggcctggtccaacaagtccgatttcgcctgcgccaacgccttcaacaacagcattatccccgaggacacattcttcccaagccccgagagcagcgactccaccgaccacgtgaagcccaaagagacagagaacaccaagcagcccagcaagagctgccacaagcccaaggccatcgtgcacaccgagaaagtgaacatgatgagcctgaccgtgctgggcctgcggatgctgttcgccaaaaccgtggccgtgaacttcctgctgaccgccaagctgttcttcctc

SEQ ID NO: 7153 - DNA, 2184 bp, synthetic construct
  source 1..2184: mol_type = other DNA
atggccttaccagtgaccgccttgctcctgccgctggccttgctgctccacgccgccaggccggacttcgtgatgacacagagccctgatagcctggccgtgtctctcggcgagcgagtgaccatgagctgcaagtctagccagagcctgctgaacagcggcaaccagaagaactacctgacctggtatcagcagaagcccggccagcctcctaagctgctgatctactgggccagcaccagagaaagcggcgtgcccgatagattttctggctctggcagcggcaccgacttcaccctgacaatttctagcctgcaagccgaggacgtggccgtgtactactgccagaacgactacagctacccctacaccttcggccagggcaccaagctggaaatcaaactcgaggacctgaagaacgtgttcccacctgaggtggccgtgttcgagcctagcgaggccgagatcagccacacccagaaagccaccctcgtgtgcctggctaccggcttctaccccgaccatgtggaactgtcttggtgggtcaacggcaaagaggtgcacagcggcgtgtgtaccgacccccagccactgaaagaacagcccgccctgaacgacagccggtactgcctgagcagcagactgagagtgtccgccaccttctggcagaacccccggaaccacttcagatgccaggtgcagttctacggcctgagcgagaacgacgagtggacccaggacagagccaagcccgtgacccagatcgtgtctgccgaagcctggggcagagccgatgatgtgattaagatccactggcaggaaaagaagtccaacaccatcctgggcagccaggaaggcaacaccatgaagaccaacgacacctacatgaagttcagctggctgaccgtgcccgagaagtccctggacaaagaacacagatgcatcgtgcggcacgaaaacaacaagaacggcgtggaccaggaaatcatcttcccacccatcaagaccgatgtgattacaatggaccccaaggacaactgctccaaggacgccaacgataccctgctgctccagctgaccaacaccagcgcctactacatgtacttgttgctgctgctgaagtccgtggtgtacttcgccatcatcacatgctgcctgctgcggagaaccgccttctgctgcaacggcgagaagtctagggccaagcgatctggatctggagcaacaaacttctcactactcaaacaagcaggtgacgtggaggagaatcccgggcctactagtatggactggatttggcgcatccttttccttgtcggcgctgctaccggcgcgcattccttcgaacaagtgcaactggttcagagcggagccgagctgaagaaacctggggccagcgtgaaggtgtcctgtaaagccagcggctacacctttaccgactactacatgaaatgggtccgacaggccccaggccagggactcgaatggatcggcgatattatccccagcaacggggccaccttctacaaccagaaattcaagggccgcgtgaccatcaccgtggacaagagcacaagcaccgcctacatggaactgagcagcctgagaagcgaggacaccgccgtgtattattgcgccagaagccatctgctgcgggccagttggttcgcctattggggacagggaaccctggtcaccgttagctctacgcgtatccagaaccctgatcctgccgtgtaccagctgcgggatagcaagagcagcgacaagagcgtgtgtctgttcaccgacttcgacagccagaccaacgtgtcccagagcaaggactccgacgtgtacatcaccgataagtgcgtgctggacatgcggagcatggacttcaagagcaactccgccgtggcctggtccaacaagtccgatttcgcctgcgccaacgccttcaacaacagcattatccccgaggacacattcttcccaagccccgagagcagcgactccaccgaccacgtgaagcccaaagagacagagaacaccaagcagcccagcaagagctgccacaagcccaaggccatcgtgcacaccgagaaagtgaacatgatgagcctgaccgtgctgggcctgcggatgctgttcgccaaaaccgtggccgtgaacttcctgctgaccgccaagctgttcttcctc

SEQ ID NO: 7154 - DNA, 2154 bp, synthetic construct
  source 1..2154: mol_type = other DNA
atggccttaccagtgaccgccttgctcctgccgctggccttgctgctccacgccgccaggccggacgtgcagatcacacagagccctagctacctggctgcctctcctggcgagacaatcaccatcaactgtcgggccagcaagagcatcagcaaggacctggcctggtatcaagagaagcccggcaagaccaacaagctgctgatctacagcggcagcacactccagtctggcatccccagcagattttccggctctggcagcggcaccgatttcaccctgaccataagcagcctggaacctgaggacttcgccatgtactactgccagcagcacaacaagtacccctacacctttggcggaggcaccaagctggaaatcaagagactcgaggacctgaagaacgtgttcccacctgaggtggccgtgttcgagcctagcgaggccgagatcagccacacccagaaagccaccctcgtgtgcctggctaccggcttctaccccgaccatgtggaactgtcttggtgggtcaacggcaaagaggtgcacagcggcgtgtgtaccgacccccagccactgaaagaacagcccgccctgaacgacagccggtactgcctgagcagcagactgagagtgtccgccaccttctggcagaacccccggaaccacttcagatgccaggtgcagttctacggcctgagcgagaacgacgagtggacccaggacagagccaagcccgtgacccagatcgtgtctgccgaagcctggggcagagccgatgatgtgattaagatccactggcaggaaaagaagtccaacaccatcctgggcagccaggaaggcaacaccatgaagaccaacgacacctacatgaagttcagctggctgaccgtgcccgagaagtccctggacaaagaacacagatgcatcgtgcggcacgaaaacaacaagaacggcgtggaccaggaaatcatcttcccacccatcaagaccgatgtgattacaatggaccccaaggacaactgctccaaggacgccaacgataccctgctgctccagctgaccaacaccagcgcctactacatgtacttgttgctgctgctgaagtccgtggtgtacttcgccatcatcacatgctgcctgctgcggagaaccgccttctgctgcaacggcgagaagtctagggccaagcgatctggatctggagcaacaaacttctcactactcaaacaagcaggtgacgtggaggagaatcccgggcctactagtatggactggatttggcgcatccttttccttgtcggcgctgctaccggcgcgcattccttcgaacaagttcaactgcaacagcctggggccgagcttgttagacctggcgcttctgtgaagctgagctgcaaggccagcggctacaccttcaccagctactggatgaactgggtcaagcagcggcctgaccagggcctcgaatggatcggcagaatcgacccctacgacagcgagacacactacaaccagaagttcaaggacaaggccatcctgaccgtggacaagagcagctccaccgcctacatgcaactgagcagcctgacctctgaggatagcgccgtgtactattgcgccagaggcaactgggacgactattggggccagggcacaaccctgacagtgtctagtacgcgtatccagaaccctgatcctgccgtgtaccagctgcgggatagcaagagcagcgacaagagcgtgtgtctgttcaccgacttcgacagccagaccaacgtgtcccagagcaaggactccgacgtgtacatcaccgataagtgcgtgctggacatgcggagcatggacttcaagagcaactccgccgtggcctggtccaacaagtccgatttcgcctgcgccaacgccttcaacaacagcattatccccgaggacacattcttcccaagccccgagagcagcgactccaccgaccacgtgaagcccaaagagacagagaacaccaagcagcccagcaagagctgccacaagcccaaggccatcgtgcacaccgagaaagtgaacatgatgagcctgaccgtgctgggcctgcggatgctgttcgccaaaaccgtggccgtgaacttcctgctgaccgccaagctgttcttcctc

SEQ ID NO: 7155 - DNA, 2160 bp, synthetic construct
  source 1..2160: mol_type = other DNA
atggccttaccagtgaccgccttgctcctgccgctggccttgctgctccacgccgccaggccggagatcgtgctgacacagagccctaccagcatgacagcctctccaggcgagcaagtgaccatcacctgtagagccagcagcagcatcaactacatgcactggtatcagcagaagcctggcgcaagccccagaccttggatctacgagacaagcaagctggcctccggcgtgcccgatagattttctggatctgccagcggcaccagctacagcctgaccatcaacaacatggaagccgaggacgccgccacctactactgccagcagtggaattacccctcctggacctttggcggaggcaccaagctggaacttaaactcgaggacctgaagaacgtgttcccacctgaggtggccgtgttcgagcctagcgaggccgagatcagccacacccagaaagccaccctcgtgtgcctggctaccggcttctaccccgaccatgtggaactgtcttggtgggtcaacggcaaagaggtgcacagcggcgtgtgtaccgacccccagccactgaaagaacagcccgccctgaacgacagccggtactgcctgagcagcagactgagagtgtccgccaccttctggcagaacccccggaaccacttcagatgccaggtgcagttctacggcctgagcgagaacgacgagtggacccaggacagagccaagcccgtgacccagatcgtgtctgccgaagcctggggcagagccgatgatgtgattaagatccactggcaggaaaagaagtccaacaccatcctgggcagccaggaaggcaacaccatgaagaccaacgacacctacatgaagttcagctggctgaccgtgcccgagaagtccctggacaaagaacacagatgcatcgtgcggcacgaaaacaacaagaacggcgtggaccaggaaatcatcttcccacccatcaagaccgatgtgattacaatggaccccaaggacaactgctccaaggacgccaacgataccctgctgctccagctgaccaacaccagcgcctactacatgtacttgttgctgctgctgaagtccgtggtgtacttcgccatcatcacatgctgcctgctgcggagaaccgccttctgctgcaacggcgagaagtctagggccaagcgatctggatctggagcaacaaacttctcactactcaaacaagcaggtgacgtggaggagaatcccgggcctactagtatggactggatttggcgcatccttttccttgtcggcgctgctaccggcgcgcattccttcgaagaagtgcagctcgttgagtctggtggcggactggttcagcctggaagaagcctgaagctgagctgtgccgccagcggcttcaccttcagcgactacaatatggcctgggtccgacaggcccctaagaaaggactggaatgggtcgccaccatcctgtacgatggcggcagaacctactaccggggcagcgtgaagggcagattcaccatcagcagagacaacgccaagagcaccctgtacctgcggatggactctctgagaagcgaggataccgccacatattactgtgccacacacagccggggcaccgactactttgattattggggccagggcgtgatggttaccgtgtctagtacgcgtatccagaaccctgatcctgccgtgtaccagctgcgggatagcaagagcagcgacaagagcgtgtgtctgttcaccgacttcgacagccagaccaacgtgtcccagagcaaggactccgacgtgtacatcaccgataagtgcgtgctggacatgcggagcatggacttcaagagcaactccgccgtggcctggtccaacaagtccgatttcgcctgcgccaacgccttcaacaacagcattatccccgaggacacattcttcccaagccccgagagcagcgactccaccgaccacgtgaagcccaaagagacagagaacaccaagcagcccagcaagagctgccacaagcccaaggccatcgtgcacaccgagaaagtgaacatgatgagcctgaccgtgctgggcctgcggatgctgttcgccaaaaccgtggccgtgaacttcctgctgaccgccaagctgttcttcctc

SEQ ID NO: 7156 - DNA, 2187 bp, synthetic construct
  source 1..2187: mol_type = other DNA
atggccttaccagtgaccgccttgctcctgccgctggccttgctgctccacgccgccaggccggacatcgtgatgacacagagcccttctagcctggccgtgtctgagggcgagacagtgaccatcaactgcaagagcagccagagcttcctgtctagcggcgacggcaagaattacgtggcctggtatcagtacaagcccggacagagccccaagctgctgatctactgggccagcacaagacagagcggcgtgcccgatagattcatcggctctggcagcggcaccgacttcaccctgacaatctctacagtgcaggccgaggacctggctatctactactgccagcagtattacgacacccctctgacctttggctccggcaccaagctggaaatcaaactcgaggacctgaagaacgtgttcccacctgaggtggccgtgttcgagcctagcgaggccgagatcagccacacccagaaagccaccctcgtgtgcctggctaccggcttctaccccgaccatgtggaactgtcttggtgggtcaacggcaaagaggtgcacagcggcgtgtgtaccgacccccagccactgaaagaacagcccgccctgaacgacagccggtactgcctgagcagcagactgagagtgtccgccaccttctggcagaacccccggaaccacttcagatgccaggtgcagttctacggcctgagcgagaacgacgagtggacccaggacagagccaagcccgtgacccagatcgtgtctgccgaagcctggggcagagccgatgatgtgattaagatccactggcaggaaaagaagtccaacaccatcctgggcagccaggaaggcaacaccatgaagaccaacgacacctacatgaagttcagctggctgaccgtgcccgagaagtccctggacaaagaacacagatgcatcgtgcggcacgaaaacaacaagaacggcgtggaccaggaaatcatcttcccacccatcaagaccgatgtgattacaatggaccccaaggacaactgctccaaggacgccaacgataccctgctgctccagctgaccaacaccagcgcctactacatgtacttgttgctgctgctgaagtccgtggtgtacttcgccatcatcacatgctgcctgctgcggagaaccgccttctgctgcaacggcgagaagtctagggccaagcgatctggatctggagcaacaaacttctcactactcaaacaagcaggtgacgtggaggagaatcccgggcctactagtatggactggatttggcgcatccttttccttgtcggcgctgctaccggcgcgcattccttcgaagaagtgaagctgcaagagtctggccccagcctggtgcagagtagccaaacactgagcctgacctgtaccgtgtccggctttagcctgaccagctaccacatccactgggtccgacagacccctggcaaaggactggaatggatgggcgtgatgtggagcgacggcgacaccagctataacagcgccctgaagtcccggctgagcatcagcagagatacaagccagagccaggtgttcctgaagatgaacagcctccagaccgaggacaccgccacctactattgtgccagaggctactacagcagctacctgtacctttggttcgcctattggggccagggcaccctggttacagtcagctctacgcgtatccagaaccctgatcctgccgtgtaccagctgcgggatagcaagagcagcgacaagagcgtgtgtctgttcaccgacttcgacagccagaccaacgtgtcccagagcaaggactccgacgtgtacatcaccgataagtgcgtgctggacatgcggagcatggacttcaagagcaactccgccgtggcctggtccaacaagtccgatttcgcctgcgccaacgccttcaacaacagcattatccccgaggacacattcttcccaagccccgagagcagcgactccaccgaccacgtgaagcccaaagagacagagaacaccaagcagcccagcaagagctgccacaagcccaaggccatcgtgcacaccgagaaagtgaacatgatgagcctgaccgtgctgggcctgcggatgctgttcgccaaaaccgtggccgtgaacttcctgctgaccgccaagctgttcttcctc

SEQ ID NO: 7157 - DNA, 2199 bp, synthetic construct
  source 1..2199: mol_type = other DNA
atggccttaccagtgaccgccttgctcctgccgctggccttgctgctccacgccgccaggccggacgtgctgatgacccagacacctgtgtctctgccagtgtctctcggaggccaggtgtccatctcctgtagaagcagccagagcctggtgcactccgacggcgatacctacctgcactggtatctccagaagcctggacagagccctcagctcctgatctaccgggtgtccaacagattcagcggcgtgcccgatagattttccggcagcggctctggcaccgacttcaccctgaagatcagcagagtggaacccgaggacctgggcctgtactactgtctccagaccacacacttcccaccttggacctttggcggaggcaccaagctggaaatgaaactcgaggacctgaagaacgtgttcccacctgaggtggccgtgttcgagcctagcgaggccgagatcagccacacccagaaagccaccctcgtgtgcctggctaccggcttctaccccgaccatgtggaactgtcttggtgggtcaacggcaaagaggtgcacagcggcgtgtgtaccgacccccagccactgaaagaacagcccgccctgaacgacagccggtactgcctgagcagcagactgagagtgtccgccaccttctggcagaacccccggaaccacttcagatgccaggtgcagttctacggcctgagcgagaacgacgagtggacccaggacagagccaagcccgtgacccagatcgtgtctgccgaagcctggggcagagccgatgatgtgattaagatccactggcaggaaaagaagtccaacaccatcctgggcagccaggaaggcaacaccatgaagaccaacgacacctacatgaagttcagctggctgaccgtgcccgagaagtccctggacaaagaacacagatgcatcgtgcggcacgaaaacaacaagaacggcgtggaccaggaaatcatcttcccacccatcaagaccgatgtgattacaatggaccccaaggacaactgctccaaggacgccaacgataccctgctgctccagctgaccaacaccagcgcctactacatgtacttgttgctgctgctgaagtccgtggtgtacttcgccatcatcacatgctgcctgctgcggagaaccgccttctgctgcaacggcgagaagtctagggccaagcgatctggatctggagcaacaaacttctcactactcaaacaagcaggtgacgtggaggagaatcccgggcctactagtatggactggatttggcgcatccttttccttgtcggcgctgctaccggcgcgcattccttcgaacaggttcagctccagcagtctggacccgagcttagaaggccaggatctagcgtcagactgagctgcaaggccagcggctaccggatcaaggacttcctgatccactggattaagaacagacccgagcacggcctggaatggatcggatggattgaccctgaggacggcgagactaagtacgcccagaagttccagaccaaggccacactgaccgccgacacctctagcaacaccgcctacatgcaactgagcagcctgaccagcgaggacaccgccacctacttttgtgctagatggggcgacgtgtactacggcctgatgagaggccatgtgatggatgcctggggccagggaacaagcgtgacagtctcttctacgcgtatccagaaccctgatcctgccgtgtaccagctgcgggatagcaagagcagcgacaagagcgtgtgtctgttcaccgacttcgacagccagaccaacgtgtcccagagcaaggactccgacgtgtacatcaccgataagtgcgtgctggacatgcggagcatggacttcaagagcaactccgccgtggcctggtccaacaagtccgatttcgcctgcgccaacgccttcaacaacagcattatccccgaggacacattcttcccaagccccgagagcagcgactccaccgaccacgtgaagcccaaagagacagagaacaccaagcagcccagcaagagctgccacaagcccaaggccatcgtgcacaccgagaaagtgaacatgatgagcctgaccgtgctgggcctgcggatgctgttcgccaaaaccgtggccgtgaacttcctgctgaccgccaagctgttcttcctc

SEQ ID NO: 7158 - DNA, 2184 bp, synthetic construct
  source 1..2184: mol_type = other DNA
atggccttaccagtgaccgccttgctcctgccgctggccttgctgctccacgccgccaggccggacatcgtgatgacacagagccccgccacactgtcactgtctccaggcgaaagagccacactgagctgtcggagcagcaagagcctccagaacgtgaacggcaacacctacctgtactggttccagcagaagcccggccagtctcctcagctcctgatctacagaatgagcaacctgaacagcggcgtgcccgacagattttctggcagcggaagcggcaccgagttcaccctgaccataagcagcctggaacctgaggacttcgccgtgtactactgtatgcagcacctggaataccccatcaccttcggagccggcaccaagctggaaatcaaactcgaggacctgaagaacgtgttcccacctgaggtggccgtgttcgagcctagcgaggccgagatcagccacacccagaaagccaccctcgtgtgcctggctaccggcttctaccccgaccatgtggaactgtcttggtgggtcaacggcaaagaggtgcacagcggcgtgtgtaccgacccccagccactgaaagaacagcccgccctgaacgacagccggtactgcctgagcagcagactgagagtgtccgccaccttctggcagaacccccggaaccacttcagatgccaggtgcagttctacggcctgagcgagaacgacgagtggacccaggacagagccaagcccgtgacccagatcgtgtctgccgaagcctggggcagagccgatgatgtgattaagatccactggcaggaaaagaagtccaacaccatcctgggcagccaggaaggcaacaccatgaagaccaacgacacctacatgaagttcagctggctgaccgtgcccgagaagtccctggacaaagaacacagatgcatcgtgcggcacgaaaacaacaagaacggcgtggaccaggaaatcatcttcccacccatcaagaccgatgtgattacaatggaccccaaggacaactgctccaaggacgccaacgataccctgctgctccagctgaccaacaccagcgcctactacatgtacttgttgctgctgctgaagtccgtggtgtacttcgccatcatcacatgctgcctgctgcggagaaccgccttctgctgcaacggcgagaagtctagggccaagcgatctggatctggagcaacaaacttctcactactcaaacaagcaggtgacgtggaggagaatcccgggcctactagtatggactggatttggcgcatccttttccttgtcggcgctgctaccggcgcgcattccttcgaagaagtgcaactggttgaatctggcggcggactggttaagcctggcggatctctgaagctgagctgtgccgccagcggctacacctttaccagctacgtgatgcactgggtccgacaggcccctggcaaaggacttgagtggatcggctacatcaacccctacaacgatggcaccaagtacaacgagaagttccagggcagagtgaccatcagctccgacaagagcatcagcaccgcctacatggaactgagcagcctgagaagcgaggataccgccatgtactattgcgccagaggcacctactactacggcaccagagtgttcgactactggggccagggaaccctggtcacagtctcttctacgcgtatccagaaccctgatcctgccgtgtaccagctgcgggatagcaagagcagcgacaagagcgtgtgtctgttcaccgacttcgacagccagaccaacgtgtcccagagcaaggactccgacgtgtacatcaccgataagtgcgtgctggacatgcggagcatggacttcaagagcaactccgccgtggcctggtccaacaagtccgatttcgcctgcgccaacgccttcaacaacagcattatccccgaggacacattcttcccaagccccgagagcagcgactccaccgaccacgtgaagcccaaagagacagagaacaccaagcagcccagcaagagctgccacaagcccaaggccatcgtgcacaccgagaaagtgaacatgatgagcctgaccgtgctgggcctgcggatgctgttcgccaaaaccgtggccgtgaacttcctgctgaccgccaagctgttcttcctc

SEQ ID NO: 7159 - DNA, 2172 bp, synthetic construct
  source 1..2172: mol_type = other DNA
atggccttaccagtgaccgccttgctcctgccgctggccttgctgctccacgccgccaggccggacatccagatgacacagagccctagcagcctgtctgccagcgtgggagacagagtgaccatcacatgcaaggccagcgaccacatcaacaactggctggcctggtatcagcagaagcctggacaggcccctaagctgctgatctacggcgctaccacactggaaacaggcgtgcccagcagattttctggcagcggctctggcaccgactacaccctgacaatatccagcctccagcctgaggacttcgccacctactactgtcagcagagctggaacaccccttggacattcggccagggcaccaagctggaaatcaagagactcgaggacctgaagaacgtgttcccacctgaggtggccgtgttcgagcctagcgaggccgagatcagccacacccagaaagccaccctcgtgtgcctggctaccggcttctaccccgaccatgtggaactgtcttggtgggtcaacggcaaagaggtgcacagcggcgtgtgtaccgacccccagccactgaaagaacagcccgccctgaacgacagccggtactgcctgagcagcagactgagagtgtccgccaccttctggcagaacccccggaaccacttcagatgccaggtgcagttctacggcctgagcgagaacgacgagtggacccaggacagagccaagcccgtgacccagatcgtgtctgccgaagcctggggcagagccgatgatgtgattaagatccactggcaggaaaagaagtccaacaccatcctgggcagccaggaaggcaacaccatgaagaccaacgacacctacatgaagttcagctggctgaccgtgcccgagaagtccctggacaaagaacacagatgcatcgtgcggcacgaaaacaacaagaacggcgtggaccaggaaatcatcttcccacccatcaagaccgatgtgattacaatggaccccaaggacaactgctccaaggacgccaacgataccctgctgctccagctgaccaacaccagcgcctactacatgtacttgttgctgctgctgaagtccgtggtgtacttcgccatcatcacatgctgcctgctgcggagaaccgccttctgctgcaacggcgagaagtctagggccaagcgatctggatctggagcaacaaacttctcactactcaaacaagcaggtgacgtggaggagaatcccgggcctactagtatggactggatttggcgcatccttttccttgtcggcgctgctaccggcgcgcattccttcgaacaagttcagcttcaacagcctggcgctgagctggtcaaacctggcgcttctgtgaagatgagctgcaaagccagcggctacgccttcagcagctactggatcaactggatgaagcagaaacccggccagggactcgaatggatcggccaaatctatcccggcgacggcgacaccaactacaacggcaagttcaagggcagagccacactgaccgccgatacctctagcagcacagcctacatgcagctgagcagcctgaccagcgaagatagcgccgtgtacttctgtgcccggtccatcacaacagtcgtgggctgcgctatggactattggggccagggaacaagcgtgaccgtgtctagtacgcgtatccagaaccctgatcctgccgtgtaccagctgcgggatagcaagagcagcgacaagagcgtgtgtctgttcaccgacttcgacagccagaccaacgtgtcccagagcaaggactccgacgtgtacatcaccgataagtgcgtgctggacatgcggagcatggacttcaagagcaactccgccgtggcctggtccaacaagtccgatttcgcctgcgccaacgccttcaacaacagcattatccccgaggacacattcttcccaagccccgagagcagcgactccaccgaccacgtgaagcccaaagagacagagaacaccaagcagcccagcaagagctgccacaagcccaaggccatcgtgcacaccgagaaagtgaacatgatgagcctgaccgtgctgggcctgcggatgctgttcgccaaaaccgtggccgtgaacttcctgctgaccgccaagctgttcttcctc

SEQ ID NO: 7160 - DNA, 2178 bp, synthetic construct
  source 1..2178: mol_type = other DNA
atggccttaccagtgaccgccttgctcctgccgctggccttgctgctccacgccgccaggccgcagatcgtgctgtctcagtctcctgccatcctgagcgcttccccaggcgagaaagtgaccatgacctgtagagccagcagcagcgtgtcctacatgcactggtatcagcagaagcccggcagcagccctaagccttggatctacgccaccagcaatctggcctctggcgtgccagccagattttctggctctggcagcggcaccagctacagcttcacaatcagcagagtggaagccgaggacgccgccacctactattgtcagcagtggaccttcaatcctcctaccttcggcggaggcacccggctggaaatcaaaagaacagtggctgctctcgaggacctgaagaacgtgttcccacctgaggtggccgtgttcgagcctagcgaggccgagatcagccacacccagaaagccaccctcgtgtgcctggctaccggcttctaccccgaccatgtggaactgtcttggtgggtcaacggcaaagaggtgcacagcggcgtgtgtaccgacccccagccactgaaagaacagcccgccctgaacgacagccggtactgcctgagcagcagactgagagtgtccgccaccttctggcagaacccccggaaccacttcagatgccaggtgcagttctacggcctgagcgagaacgacgagtggacccaggacagagccaagcccgtgacccagatcgtgtctgccgaagcctggggcagagccgatgatgtgattaagatccactggcaggaaaagaagtccaacaccatcctgggcagccaggaaggcaacaccatgaagaccaacgacacctacatgaagttcagctggctgaccgtgcccgagaagtccctggacaaagaacacagatgcatcgtgcggcacgaaaacaacaagaacggcgtggaccaggaaatcatcttcccacccatcaagaccgatgtgattacaatggaccccaaggacaactgctccaaggacgccaacgataccctgctgctccagctgaccaacaccagcgcctactacatgtacttgttgctgctgctgaagtccgtggtgtacttcgccatcatcacatgctgcctgctgcggagaaccgccttctgctgcaacggcgagaagtctagggccaagcgatctggatctggagcaacaaacttctcactactcaaacaagcaggtgacgtggaggagaatcccgggcctactagtatggactggatttggcgcatccttttccttgtcggcgctgctaccggcgcgcattccttcgaacaggcttatctgcaacagagcggagccgaactcgtcagacctggcgcttctgtgaagatgagctgcaaggccagcggctacaccttcaccagctataatatgcactgggtcaagcagacccctcggcagggactcgaatggatcggcggaatctatcccggcaacggcgacacctcctacaaccagaagttcaagggcaaagccacactgaccgtgggcaagagcagcagcaccgcctatatgcagctcagcagcctgaccagcgaggacagcgccgtgtacttctgcgccagatacgactacaactacgctatggactactggggccagggcaccagcgtgacagttagctctgccagcacgcgtatccagaaccctgatcctgccgtgtaccagctgcgggatagcaagagcagcgacaagagcgtgtgtctgttcaccgacttcgacagccagaccaacgtgtcccagagcaaggactccgacgtgtacatcaccgataagtgcgtgctggacatgcggagcatggacttcaagagcaactccgccgtggcctggtccaacaagtccgatttcgcctgcgccaacgccttcaacaacagcattatccccgaggacacattcttcccaagccccgagagcagcgactccaccgaccacgtgaagcccaaagagacagagaacaccaagcagcccagcaagagctgccacaagcccaaggccatcgtgcacaccgagaaagtgaacatgatgagcctgaccgtgctgggcctgcggatgctgttcgccaaaaccgtggccgtgaacttcctgctgaccgccaagctgttcttcctc

SEQ ID NO: 7161 - DNA, 2172 bp, synthetic construct
  source 1..2172: mol_type = other DNA
atggccttaccagtgaccgccttgctcctgccgctggccttgctgctccacgccgccaggccggagatcgtgctgacacagagccctgccaccctgtctctgagccctggcgaaagagccaccctgagctgtagagccagccagagcgtgtccagctacctggcctggtatcagcagaagcccggccaggctccccggctgctgatctacgatgccagcaatagagccaccggcatccccgccagattttccggctctggcagcggcaccgacttcaccctgaccatcagctccctggaacccgaggacttcgccgtgtactactgccagcagcggagcaactggcccatcacattcggccagggcacccggctggaaatcaaactcgaggacctgaagaacgtgttcccacctgaggtggccgtgttcgagcctagcgaggccgagatcagccacacccagaaagccaccctcgtgtgcctggctaccggcttctaccccgaccatgtggaactgtcttggtgggtcaacggcaaagaggtgcacagcggcgtgtgtaccgacccccagccactgaaagaacagcccgccctgaacgacagccggtactgcctgagcagcagactgagagtgtccgccaccttctggcagaacccccggaaccacttcagatgccaggtgcagttctacggcctgagcgagaacgacgagtggacccaggacagagccaagcccgtgacccagatcgtgtctgccgaagcctggggcagagccgatgatgtgattaagatccactggcaggaaaagaagtccaacaccatcctgggcagccaggaaggcaacaccatgaagaccaacgacacctacatgaagttcagctggctgaccgtgcccgagaagtccctggacaaagaacacagatgcatcgtgcggcacgaaaacaacaagaacggcgtggaccaggaaatcatcttcccacccatcaagaccgatgtgattacaatggaccccaaggacaactgctccaaggacgccaacgataccctgctgctccagctgaccaacaccagcgcctactacatgtacttgttgctgctgctgaagtccgtggtgtacttcgccatcatcacatgctgcctgctgcggagaaccgccttctgctgcaacggcgagaagtctagggccaagcgatctggatctggagcaacaaacttctcactactcaaacaagcaggtgacgtggaggagaatcccgggcctactagtatggactggatttggcgcatccttttccttgtcggcgctgctaccggcgcgcattccttcgaagaggtgcagcttgttgagtctggcggaggactggtgcagcccgatagaagcctgagactgtcttgtgccgccagcggcttcaccttccacgattatgccatgcactgggtccgacaggcccctggcaaaggacttgaatgggtgtccaccatctcttggaacagcggcacaatcggctacgccgactctgtgaagggcagattcaccatcagccgggacaacgccaagaacagcctgtacctccagatgaactccctgagagccgaggacacagccctgtactactgcgccaaggacatccagtacggcaactactactacggcatggacgtgtggggccagggcacaacagtgacagtctcttctacgcgtatccagaaccctgatcctgccgtgtaccagctgcgggatagcaagagcagcgacaagagcgtgtgtctgttcaccgacttcgacagccagaccaacgtgtcccagagcaaggactccgacgtgtacatcaccgataagtgcgtgctggacatgcggagcatggacttcaagagcaactccgccgtggcctggtccaacaagtccgatttcgcctgcgccaacgccttcaacaacagcattatccccgaggacacattcttcccaagccccgagagcagcgactccaccgaccacgtgaagcccaaagagacagagaacaccaagcagcccagcaagagctgccacaagcccaaggccatcgtgcacaccgagaaagtgaacatgatgagcctgaccgtgctgggcctgcggatgctgttcgccaaaaccgtggccgtgaacttcctgctgaccgccaagctgttcttcctc

SEQ ID NO: 7162 - DNA, 2157 bp, synthetic construct
  source 1..2157: mol_type = other DNA
atggccttaccagtgaccgccttgctcctgccgctggccttgctgctccacgccgccaggccggacatccagatgacacagagccctagcagcctgtctgccagcgtgggagatagagtgaccatcaactgcaaggccagccaggacatcaacagctacctgagctggttccagcagaagcctggcaaggcccctaagacactgatctaccgggccaacagactggtggatggcgtgccaagcagattttctggcagcggcagcggccaggattacaccctgacaatatccagcctccagcctgaggacttcgccacctactactgcctccagtacgacgagttccctctgacctttggcggaggcaccaaggtggaaatcaaactcgaggacctgaagaacgtgttcccacctgaggtggccgtgttcgagcctagcgaggccgagatcagccacacccagaaagccaccctcgtgtgcctggctaccggcttctaccccgaccatgtggaactgtcttggtgggtcaacggcaaagaggtgcacagcggcgtgtgtaccgacccccagccactgaaagaacagcccgccctgaacgacagccggtactgcctgagcagcagactgagagtgtccgccaccttctggcagaacccccggaaccacttcagatgccaggtgcagttctacggcctgagcgagaacgacgagtggacccaggacagagccaagcccgtgacccagatcgtgtctgccgaagcctggggcagagccgatgatgtgattaagatccactggcaggaaaagaagtccaacaccatcctgggcagccaggaaggcaacaccatgaagaccaacgacacctacatgaagttcagctggctgaccgtgcccgagaagtccctggacaaagaacacagatgcatcgtgcggcacgaaaacaacaagaacggcgtggaccaggaaatcatcttcccacccatcaagaccgatgtgattacaatggaccccaaggacaactgctccaaggacgccaacgataccctgctgctccagctgaccaacaccagcgcctactacatgtacttgttgctgctgctgaagtccgtggtgtacttcgccatcatcacatgctgcctgctgcggagaaccgccttctgctgcaacggcgagaagtctagggccaagcgatctggatctggagcaacaaacttctcactactcaaacaagcaggtgacgtggaggagaatcccgggcctactagtatggactggatttggcgcatccttttccttgtcggcgctgctaccggcgcgcattccttcgaacaggtgcaactggtgcagtctggggccgaagtgaagaaacctggggcctctgtgaaggtgtcctgcaaagccagcggctacacctttaccaactacgacatcaactgggtccgacaggctccaggccaaggactggaatggatcggctggatctatcctggcgacggcagcaccaagtacaacgagaagttcaaggccaaggccacactgaccgccgataccagcacaagcaccgcctacatggaactgcggagcctgagaagcgacgacaccgccgtgtactattgtgcctccggctacgaggacgctatggactattggggccagggcaccaccgtgacagtgtctagtacgcgtatccagaaccctgatcctgccgtgtaccagctgcgggatagcaagagcagcgacaagagcgtgtgtctgttcaccgacttcgacagccagaccaacgtgtcccagagcaaggactccgacgtgtacatcaccgataagtgcgtgctggacatgcggagcatggacttcaagagcaactccgccgtggcctggtccaacaagtccgatttcgcctgcgccaacgccttcaacaacagcattatccccgaggacacattcttcccaagccccgagagcagcgactccaccgaccacgtgaagcccaaagagacagagaacaccaagcagcccagcaagagctgccacaagcccaaggccatcgtgcacaccgagaaagtgaacatgatgagcctgaccgtgctgggcctgcggatgctgttcgccaaaaccgtggccgtgaacttcctgctgaccgccaagctgttcttcctc

SEQ ID NO: 7163 - DNA, 2163 bp, synthetic construct
  source 1..2163: mol_type = other DNA
atggccttaccagtgaccgccttgctcctgccgctggccttgctgctccacgccgccaggccggacatcgtgatgacccagacacctctgagcctgagcgtgacacctggacagcctgccagcattagctgcaagagcagccagtctctgctggacggcgacggcaagacctacctgaattggctgctccagaagcctggacagagccctcagcggctgatctacctggtgtccaagctggatagcggcgtgcccgatagattttctggcagcggctctggcaccgacttcaccctgaagatcagcagagtggaagccgaggacgtgggcgtgtactactgttggcagggcacacacttccccagaacattcggccagggcacaaagctggaaatcaaactcgaggacctgaagaacgtgttcccacctgaggtggccgtgttcgagcctagcgaggccgagatcagccacacccagaaagccaccctcgtgtgcctggctaccggcttctaccccgaccatgtggaactgtcttggtgggtcaacggcaaagaggtgcacagcggcgtgtgtaccgacccccagccactgaaagaacagcccgccctgaacgacagccggtactgcctgagcagcagactgagagtgtccgccaccttctggcagaacccccggaaccacttcagatgccaggtgcagttctacggcctgagcgagaacgacgagtggacccaggacagagccaagcccgtgacccagatcgtgtctgccgaagcctggggcagagccgatgatgtgattaagatccactggcaggaaaagaagtccaacaccatcctgggcagccaggaaggcaacaccatgaagaccaacgacacctacatgaagttcagctggctgaccgtgcccgagaagtccctggacaaagaacacagatgcatcgtgcggcacgaaaacaacaagaacggcgtggaccaggaaatcatcttcccacccatcaagaccgatgtgattacaatggaccccaaggacaactgctccaaggacgccaacgataccctgctgctccagctgaccaacaccagcgcctactacatgtacttgttgctgctgctgaagtccgtggtgtacttcgccatcatcacatgctgcctgctgcggagaaccgccttctgctgcaacggcgagaagtctagggccaagcgatctggatctggagcaacaaacttctcactactcaaacaagcaggtgacgtggaggagaatcccgggcctactagtatggactggatttggcgcatccttttccttgtcggcgctgctaccggcgcgcattccttcgaacaagtgcaactggttcagagcggagccgaagtgaagaaacctggggcctctgtgaaggtgtcctgcaaggccagcggctacaccttcaaggacacctacatccactgggtccgacaggcccctggacaaggacttgagtggatgggcagaatcgaccccgccaacggcaacaccaaatacgaccccaagttccagggcagagtgaccatgaccagagacaccagcatcagcaccgcctacatggaactgagccggctgagatccgatgacaccgccgtgtactattgcgctagaagaggcggagtggattggggccagggaacactggttaccgtgtctagtacgcgtatccagaaccctgatcctgccgtgtaccagctgcgggatagcaagagcagcgacaagagcgtgtgtctgttcaccgacttcgacagccagaccaacgtgtcccagagcaaggactccgacgtgtacatcaccgataagtgcgtgctggacatgcggagcatggacttcaagagcaactccgccgtggcctggtccaacaagtccgatttcgcctgcgccaacgccttcaacaacagcattatccccgaggacacattcttcccaagccccgagagcagcgactccaccgaccacgtgaagcccaaagagacagagaacaccaagcagcccagcaagagctgccacaagcccaaggccatcgtgcacaccgagaaagtgaacatgatgagcctgaccgtgctgggcctgcggatgctgttcgccaaaaccgtggccgtgaacttcctgctgaccgccaagctgttcttcctc

SEQ ID NO: 7164 - DNA, 2166 bp, synthetic construct
  source 1..2166: mol_type = other DNA
atggccttaccagtgaccgccttgctcctgccgctggccttgctgctccacgccgccaggccggacatccagatgacacagagccctagcagcctgtctgccagcgtgggagacagagtgaccatcacatgcaaggccagccaggatgtgtctacagccgtggcctggttccagcagaagcctggaaaagcccctaagctgctgatctacagccccagctacagatacaccggcgtgcccagcagattttctggcagcggctctggcaccgacttcaccctgacaatatccagcctccagcctgaggacttcacctactactgccagcagctctacagcaccccttacacattcggccagggcaccaaggtggaaatcaaactcgaggacctgaagaacgtgttcccacctgaggtggccgtgttcgagcctagcgaggccgagatcagccacacccagaaagccaccctcgtgtgcctggctaccggcttctaccccgaccatgtggaactgtcttggtgggtcaacggcaaagaggtgcacagcggcgtgtgtaccgacccccagccactgaaagaacagcccgccctgaacgacagccggtactgcctgagcagcagactgagagtgtccgccaccttctggcagaacccccggaaccacttcagatgccaggtgcagttctacggcctgagcgagaacgacgagtggacccaggacagagccaagcccgtgacccagatcgtgtctgccgaagcctggggcagagccgatgatgtgattaagatccactggcaggaaaagaagtccaacaccatcctgggcagccaggaaggcaacaccatgaagaccaacgacacctacatgaagttcagctggctgaccgtgcccgagaagtccctggacaaagaacacagatgcatcgtgcggcacgaaaacaacaagaacggcgtggaccaggaaatcatcttcccacccatcaagaccgatgtgattacaatggaccccaaggacaactgctccaaggacgccaacgataccctgctgctccagctgaccaacaccagcgcctactacatgtacttgttgctgctgctgaagtccgtggtgtacttcgccatcatcacatgctgcctgctgcggagaaccgccttctgctgcaacggcgagaagtctagggccaagcgatctggatctggagcaacaaacttctcactactcaaacaagcaggtgacgtggaggagaatcccgggcctactagtatggactggatttggcgcatccttttccttgtcggcgctgctaccggcgcgcattccttcgaagaagtgcaactggttcagagcggagccgaagtgaagaaacctggggcctctgtgaaggtgtcctgcaaagccagcggctacacctttaccgactactacctggacgtggtcgtgcggcaagctcctggacaaggactggaatggatcggcagagtgaacccctacaacggcggcaccatctacaaccagaaattcaagggaagagtgaccctgaccagagacaccagcacctccacagcctacctggaactgagcagcctgagaagcgaagataccgccgtgtactactgcgccagggaccactacagatatgaccctctgctggactactggggccagggaaccctggttacagtgtctagtacgcgtatccagaaccctgatcctgccgtgtaccagctgcgggatagcaagagcagcgacaagagcgtgtgtctgttcaccgacttcgacagccagaccaacgtgtcccagagcaaggactccgacgtgtacatcaccgataagtgcgtgctggacatgcggagcatggacttcaagagcaactccgccgtggcctggtccaacaagtccgatttcgcctgcgccaacgccttcaacaacagcattatccccgaggacacattcttcccaagccccgagagcagcgactccaccgaccacgtgaagcccaaagagacagagaacaccaagcagcccagcaagagctgccacaagcccaaggccatcgtgcacaccgagaaagtgaacatgatgagcctgaccgtgctgggcctgcggatgctgttcgccaaaaccgtggccgtgaacttcctgctgaccgccaagctgttcttcctc

SEQ ID NO: 7165 - DNA, 2184 bp, synthetic construct
  source 1..2184: mol_type = other DNA
atggccttaccagtgaccgccttgctcctgccgctggccttgctgctccacgccgccaggccggacatccagatgacacagagccctagcagcctgtctgccagcgtgggagacagagtgaccatcacctgtagagccagccagagcgtgtccaccagcagctacaactacatgcactggtatcagcagaagcccggcaagcctcctaagctgctgattaagtacgccagcaacctggaaagcggcgtgcccagcagattttctggcagcggctctggcaccgacttcaccctgacaatatccagcctccagcctgaggacttcgccacctactactgtcagcactcctgggagatccctctgacattcggccagggcaccaaggtggaaatcaaactcgaggacctgaagaacgtgttcccacctgaggtggccgtgttcgagcctagcgaggccgagatcagccacacccagaaagccaccctcgtgtgcctggctaccggcttctaccccgaccatgtggaactgtcttggtgggtcaacggcaaagaggtgcacagcggcgtgtgtaccgacccccagccactgaaagaacagcccgccctgaacgacagccggtactgcctgagcagcagactgagagtgtccgccaccttctggcagaacccccggaaccacttcagatgccaggtgcagttctacggcctgagcgagaacgacgagtggacccaggacagagccaagcccgtgacccagatcgtgtctgccgaagcctggggcagagccgatgatgtgattaagatccactggcaggaaaagaagtccaacaccatcctgggcagccaggaaggcaacaccatgaagaccaacgacacctacatgaagttcagctggctgaccgtgcccgagaagtccctggacaaagaacacagatgcatcgtgcggcacgaaaacaacaagaacggcgtggaccaggaaatcatcttcccacccatcaagaccgatgtgattacaatggaccccaaggacaactgctccaaggacgccaacgataccctgctgctccagctgaccaacaccagcgcctactacatgtacttgttgctgctgctgaagtccgtggtgtacttcgccatcatcacatgctgcctgctgcggagaaccgccttctgctgcaacggcgagaagtctagggccaagcgatctggatctggagcaacaaacttctcactactcaaacaagcaggtgacgtggaggagaatcccgggcctactagtatggactggatttggcgcatccttttccttgtcggcgctgctaccggcgcgcattccttcgaagaagtgcaactggttcagagcggagccgaagtgaagaaacctggggcctctgtgaaggtgtcctgcaaggccagcggctacagcttcaccgactattatatgcactgggtccgacaggctccaggccagggacttgagtggatcggcagaatcaacccctacaacggcgctgccttctacagccagaacttcaaggatagagtgaccctgaccgtggacaccagcaccagcacagcctacctggaactgagcagcctgagaagcgaggacaccgccgtgtactactgcgccattgagagaggcgctgacctggaaggctacgctatggattattggggccagggaaccctggtcaccgtgtcatctacgcgtatccagaaccctgatcctgccgtgtaccagctgcgggatagcaagagcagcgacaagagcgtgtgtctgttcaccgacttcgacagccagaccaacgtgtcccagagcaaggactccgacgtgtacatcaccgataagtgcgtgctggacatgcggagcatggacttcaagagcaactccgccgtggcctggtccaacaagtccgatttcgcctgcgccaacgccttcaacaacagcattatccccgaggacacattcttcccaagccccgagagcagcgactccaccgaccacgtgaagcccaaagagacagagaacaccaagcagcccagcaagagctgccacaagcccaaggccatcgtgcacaccgagaaagtgaacatgatgagcctgaccgtgctgggcctgcggatgctgttcgccaaaaccgtggccgtgaacttcctgctgaccgccaagctgttcttcctc

SEQ ID NO: 7166 - DNA, 2178 bp, synthetic construct
  source 1..2178: mol_type = other DNA
atggccttaccagtgaccgccttgctcctgccgctggccttgctgctccacgccgccaggccggagatcgtgctgacacagtctccagccacactgagcgcttctccaggcgagagagtgaccctgacctgtagagccagcagcaacgtgatctccagctacgtgcactggtatcagcagaagcctggcagcagccccagactgtttctgtacagcaccagcaatctggcctccggcgtgccaagcagattttctggctctggcagcggcaccgacttcacctttaccatctctagcctggaagccgaggacgccgccacctactactgtcagcagtacagcggctaccctctgaccttcggccagggcacaagactggaaatcaaactcgaggacctgaagaacgtgttcccacctgaggtggccgtgttcgagcctagcgaggccgagatcagccacacccagaaagccaccctcgtgtgcctggctaccggcttctaccccgaccatgtggaactgtcttggtgggtcaacggcaaagaggtgcacagcggcgtgtgtaccgacccccagccactgaaagaacagcccgccctgaacgacagccggtactgcctgagcagcagactgagagtgtccgccaccttctggcagaacccccggaaccacttcagatgccaggtgcagttctacggcctgagcgagaacgacgagtggacccaggacagagccaagcccgtgacccagatcgtgtctgccgaagcctggggcagagccgatgatgtgattaagatccactggcaggaaaagaagtccaacaccatcctgggcagccaggaaggcaacaccatgaagaccaacgacacctacatgaagttcagctggctgaccgtgcccgagaagtccctggacaaagaacacagatgcatcgtgcggcacgaaaacaacaagaacggcgtggaccaggaaatcatcttcccacccatcaagaccgatgtgattacaatggaccccaaggacaactgctccaaggacgccaacgataccctgctgctccagctgaccaacaccagcgcctactacatgtacttgttgctgctgctgaagtccgtggtgtacttcgccatcatcacatgctgcctgctgcggagaaccgccttctgctgcaacggcgagaagtctagggccaagcgatctggatctggagcaacaaacttctcactactcaaacaagcaggtgacgtggaggagaatcccgggcctactagtatggactggatttggcgcatccttttccttgtcggcgctgctaccggcgcgcattccttcgaacaagttcagctgcaagagtctggccctggcctggtcaagcctagcgaaacactgagcctgacctgcgccgtgtctggctactctatcaccagcgcctactattggaactggatcagacagcctcctggcaaaggactggaatggatcggctacatcagctacgacggcagaaacaactacaaccccagcctgaagaaccggatcaccatcaatcccgacaccagcaagaaccagttcagcctccagctgaacagcgtgacccctgaggataccgccgtgtactactgtgccagagaaggcgactacgacgtgggcaactactacgctatggactactggggccagggaaccctggtcacagtctcttctacgcgtatccagaaccctgatcctgccgtgtaccagctgcgggatagcaagagcagcgacaagagcgtgtgtctgttcaccgacttcgacagccagaccaacgtgtcccagagcaaggactccgacgtgtacatcaccgataagtgcgtgctggacatgcggagcatggacttcaagagcaactccgccgtggcctggtccaacaagtccgatttcgcctgcgccaacgccttcaacaacagcattatccccgaggacacattcttcccaagccccgagagcagcgactccaccgaccacgtgaagcccaaagagacagagaacaccaagcagcccagcaagagctgccacaagcccaaggccatcgtgcacaccgagaaagtgaacatgatgagcctgaccgtgctgggcctgcggatgctgttcgccaaaaccgtggccgtgaacttcctgctgaccgccaagctgttcttcctc

SEQ ID NO: 7167 - DNA, 2178 bp, synthetic construct
  source 1..2178: mol_type = other DNA
atggccttaccagtgaccgccttgctcctgccgctggccttgctgctccacgccgccaggccggagatcgtgctgacacagtctcccgccacactgtcactgtctccaggcgaaagagccacactgagctgtagagccagcagcaacgtgatctccagctacgtgcactggtatcagcagaagcctggacaggcccctcggctgctgatctacagcacaagcaatctggcctctggcatccccgccagattttctggctctggaagcggcaccgacttcaccctgaccataagcagcctggaacctgaggacttcgccgtgtactactgccagcagtatagcggctaccctctgaccttcggccagggcacaagactggaaatcaaactcgaggacctgaagaacgtgttcccacctgaggtggccgtgttcgagcctagcgaggccgagatcagccacacccagaaagccaccctcgtgtgcctggctaccggcttctaccccgaccatgtggaactgtcttggtgggtcaacggcaaagaggtgcacagcggcgtgtgtaccgacccccagccactgaaagaacagcccgccctgaacgacagccggtactgcctgagcagcagactgagagtgtccgccaccttctggcagaacccccggaaccacttcagatgccaggtgcagttctacggcctgagcgagaacgacgagtggacccaggacagagccaagcccgtgacccagatcgtgtctgccgaagcctggggcagagccgatgatgtgattaagatccactggcaggaaaagaagtccaacaccatcctgggcagccaggaaggcaacaccatgaagaccaacgacacctacatgaagttcagctggctgaccgtgcccgagaagtccctggacaaagaacacagatgcatcgtgcggcacgaaaacaacaagaacggcgtggaccaggaaatcatcttcccacccatcaagaccgatgtgattacaatggaccccaaggacaactgctccaaggacgccaacgataccctgctgctccagctgaccaacaccagcgcctactacatgtacttgttgctgctgctgaagtccgtggtgtacttcgccatcatcacatgctgcctgctgcggagaaccgccttctgctgcaacggcgagaagtctagggccaagcgatctggatctggagcaacaaacttctcactactcaaacaagcaggtgacgtggaggagaatcccgggcctactagtatggactggatttggcgcatccttttccttgtcggcgctgctaccggcgcgcattccttcgaagaagtgcaactggtggaaagtggcggcggactggtgcaacctggaagaagcctgagactgtcctgtgccgccagcggctactctatcacaagcgcctactactggaactgggtccgacaggctcctggcaaaggactggaatgggtgtcctacatcagctacgacggcagaaacaactacaaccccagcctgaagaaccgcttcaccatcagccgggacaacgccaagaagtccctgtacctccagatgaacagcctgagagccgaggacacagccctgtactattgcgccaaagagggcgactacgacgtcggcaactactacgctatggactactggggccagggaaccaccgtgactgtctcttctacgcgtatccagaaccctgatcctgccgtgtaccagctgcgggatagcaagagcagcgacaagagcgtgtgtctgttcaccgacttcgacagccagaccaacgtgtcccagagcaaggactccgacgtgtacatcaccgataagtgcgtgctggacatgcggagcatggacttcaagagcaactccgccgtggcctggtccaacaagtccgatttcgcctgcgccaacgccttcaacaacagcattatccccgaggacacattcttcccaagccccgagagcagcgactccaccgaccacgtgaagcccaaagagacagagaacaccaagcagcccagcaagagctgccacaagcccaaggccatcgtgcacaccgagaaagtgaacatgatgagcctgaccgtgctgggcctgcggatgctgttcgccaaaaccgtggccgtgaacttcctgctgaccgccaagctgttcttcctc

SEQ ID NO: 7168 - DNA, 2175 bp, synthetic construct
  source 1..2175: mol_type = other DNA
atggccttaccagtgaccgccttgctcctgccgctggccttgctgctccacgccgccaggccggacgtggtcatgacacagaccccactgagcctgcctgtgtctctgggagatcaggccagcatctcctgtagaagcagccagagcctggtgcacagcaacggcaacacctacctgcggtggtatctccagaagcctggacagagccccaaggtgctgatctacaaggtgtccaacagagtgtccggcgtgcccgatagattttctggcagcggctctggcaccgacttcaccctgaagatcaatagagtggaagccgaggacctgggcgtgtacttctgtagccagagcacccatgtgccttggacctttggcggaggcaccaagctggaaatcaagctcgaggacctgaagaacgtgttcccacctgaggtggccgtgttcgagcctagcgaggccgagatcagccacacccagaaagccaccctcgtgtgcctggctaccggcttctaccccgaccatgtggaactgtcttggtgggtcaacggcaaagaggtgcacagcggcgtgtgtaccgacccccagccactgaaagaacagcccgccctgaacgacagccggtactgcctgagcagcagactgagagtgtccgccaccttctggcagaacccccggaaccacttcagatgccaggtgcagttctacggcctgagcgagaacgacgagtggacccaggacagagccaagcccgtgacccagatcgtgtctgccgaagcctggggcagagccgatgatgtgattaagatccactggcaggaaaagaagtccaacaccatcctgggcagccaggaaggcaacaccatgaagaccaacgacacctacatgaagttcagctggctgaccgtgcccgagaagtccctggacaaagaacacagatgcatcgtgcggcacgaaaacaacaagaacggcgtggaccaggaaatcatcttcccacccatcaagaccgatgtgattacaatggaccccaaggacaactgctccaaggacgccaacgataccctgctgctccagctgaccaacaccagcgcctactacatgtacttgttgctgctgctgaagtccgtggtgtacttcgccatcatcacatgctgcctgctgcggagaaccgccttctgctgcaacggcgagaagtctagggccaagcgatctggatctggagcaacaaacttctcactactcaaacaagcaggtgacgtggaggagaatcccgggcctactagtatggactggatttggcgcatccttttccttgtcggcgctgctaccggcgcgcattccttcgaaggcgtgaagctggacgagacaggcggaggacttgttcaacctggcggagccatgaagctgagctgtgtgaccagcggctttaccttcggccactactggatgaactgggtccgacagtcccctgagaaaggactggaatgggtcgcccagttcagaaacaagccctacaactacgaaacctactacagcgacagcgtgaagggcagattcaccatcagccgggacgacagcaagtccagcgtgtacctccagatgaacaacctgcgcgtggaagataccggcatctactactgtaccggggccagctacggcatggaatatctcggccagggcaccagcgtgaccgtgtctacaacgcgtatccagaaccctgatcctgccgtgtaccagctgcgggatagcaagagcagcgacaagagcgtgtgtctgttcaccgacttcgacagccagaccaacgtgtcccagagcaaggactccgacgtgtacatcaccgataagtgcgtgctggacatgcggagcatggacttcaagagcaactccgccgtggcctggtccaacaagtccgatttcgcctgcgccaacgccttcaacaacagcattatccccgaggacacattcttcccaagccccgagagcagcgactccaccgaccacgtgaagcccaaagagacagagaacaccaagcagcccagcaagagctgccacaagcccaaggccatcgtgcacaccgagaaagtgaacatgatgagcctgaccgtgctgggcctgcggatgctgttcgccaaaaccgtggccgtgaacttcctgctgaccgccaagctgttcttcctc

SEQ ID NO: 7169 - DNA, 2193 bp, synthetic construct
  source 1..2193: mol_type = other DNA
atggccttaccagtgaccgccttgctcctgccgctggccttgctgctccacgccgccaggccgcaggtgcaactggtggaatctggcggcaatctggttcagcctggcggctctctgagactgtcttgtgccgccagcggcttcaccttcggcagcttttctatgagctgggtccgacaagctcctggcggaggacttgaatgggtggcaggactgtctgccagaagcagcctgacacactacgccgactctgtgaagggcagattcaccatcagccgggacaacgccaagaacagcgtgtacctccagatgaacagcctgagagtggaagataccgccgtgtactactgcgccagaagaagctacgacagcagcggctactggggccacttctacagctacatggatgtgtggggccagggcaccctggttacagtttctctcgaggacctgaagaacgtgttcccacctgaggtggccgtgttcgagcctagcgaggccgagatcagccacacccagaaagccaccctcgtgtgcctggctaccggcttctaccccgaccatgtggaactgtcttggtgggtcaacggcaaagaggtgcacagcggcgtgtgtaccgacccccagccactgaaagaacagcccgccctgaacgacagccggtactgcctgagcagcagactgagagtgtccgccaccttctggcagaacccccggaaccacttcagatgccaggtgcagttctacggcctgagcgagaacgacgagtggacccaggacagagccaagcccgtgacccagatcgtgtctgccgaagcctggggcagagccgatgatgtgattaagatccactggcaggaaaagaagtccaacaccatcctgggcagccaggaaggcaacaccatgaagaccaacgacacctacatgaagttcagctggctgaccgtgcccgagaagtccctggacaaagaacacagatgcatcgtgcggcacgaaaacaacaagaacggcgtggaccaggaaatcatcttcccacccatcaagaccgatgtgattacaatggaccccaaggacaactgctccaaggacgccaacgataccctgctgctccagctgaccaacaccagcgcctactacatgtacttgttgctgctgctgaagtccgtggtgtacttcgccatcatcacatgctgcctgctgcggagaaccgccttctgctgcaacggcgagaagtctagggccaagcgatctggatctggagcaacaaacttctcactactcaaacaagcaggtgacgtggaggagaatcccgggcctactagtatggactggatttggcgcatccttttccttgtcggcgctgctaccggcgcgcattccttcgaatctgtgctgacccagcctagctccgtgtctgctgctcctggacagaaagtgaccatctcctgtagcggcagcaccagcaacatcggcaacaactacgtgtcctggtatcagcagcaccccggcaaggcccctaagctgatgatctacgacgtgtccaagaggcccagcggcgtgccagatagattttccggcagcaagagcggcaacagcgccagcctggatattagcggactccagtctgaggacgaggccgactactattgcgccgcctgggatgatagcctgagcgagtttctgtttggcaccggcaccaagctgacagtgcttggaacgcgtatccagaaccctgatcctgccgtgtaccagctgcgggatagcaagagcagcgacaagagcgtgtgtctgttcaccgacttcgacagccagaccaacgtgtcccagagcaaggactccgacgtgtacatcaccgataagtgcgtgctggacatgcggagcatggacttcaagagcaactccgccgtggcctggtccaacaagtccgatttcgcctgcgccaacgccttcaacaacagcattatccccgaggacacattcttcccaagccccgagagcagcgactccaccgaccacgtgaagcccaaagagacagagaacaccaagcagcccagcaagagctgccacaagcccaaggccatcgtgcacaccgagaaagtgaacatgatgagcctgaccgtgctgggcctgcggatgctgttcgccaaaaccgtggccgtgaacttcctgctgaccgccaagctgttcttcctc

SEQ ID NO: 7170 - DNA, 2178 bp, synthetic construct
  source 1..2178: mol_type = other DNA
atggccttaccagtgaccgccttgctcctgccgctggccttgctgctccacgccgccaggccggacgtggtcatgacacagagcccttctagcctgtctgccagcgtgggcgacagagtgacaatcacctgtcagagcagcctggacatcagccactacctgaactggtatcagcagaagcccggcaaggcccctaagctgctgatctacgacgccagcaatctggaaaccggcgtgcccagcagattttctggcagcggaagcggcacccacttcaccttcacaatatccagcctccagcctgaggacttcgccacctactactgccagcagtacgacaacctgcctctgacctttggcggaggcaccaagctggaaatcaagagactcgaggacctgaagaacgtgttcccacctgaggtggccgtgttcgagcctagcgaggccgagatcagccacacccagaaagccaccctcgtgtgcctggctaccggcttctaccccgaccatgtggaactgtcttggtgggtcaacggcaaagaggtgcacagcggcgtgtgtaccgacccccagccactgaaagaacagcccgccctgaacgacagccggtactgcctgagcagcagactgagagtgtccgccaccttctggcagaacccccggaaccacttcagatgccaggtgcagttctacggcctgagcgagaacgacgagtggacccaggacagagccaagcccgtgacccagatcgtgtctgccgaagcctggggcagagccgatgatgtgattaagatccactggcaggaaaagaagtccaacaccatcctgggcagccaggaaggcaacaccatgaagaccaacgacacctacatgaagttcagctggctgaccgtgcccgagaagtccctggacaaagaacacagatgcatcgtgcggcacgaaaacaacaagaacggcgtggaccaggaaatcatcttcccacccatcaagaccgatgtgattacaatggaccccaaggacaactgctccaaggacgccaacgataccctgctgctccagctgaccaacaccagcgcctactacatgtacttgttgctgctgctgaagtccgtggtgtacttcgccatcatcacatgctgcctgctgcggagaaccgccttctgctgcaacggcgagaagtctagggccaagcgatctggatctggagcaacaaacttctcactactcaaacaagcaggtgacgtggaggagaatcccgggcctactagtatggactggatttggcgcatccttttccttgtcggcgctgctaccggcgcgcattccttcgaacaagttcaactggttcaatcaggcggaggcgtggtgcaacctggtggctctctgagagtgtcttgtgctgcctctggcgtgaccctgagcgactatggaatgcactgggtccgacaggcccctggcaaaggacttgagtgggtcgccttcatcagaaacgacggcagcgacaagtattacgccgacagcgtgaagggcagattcaccatcagccgggacaacagcgagaaaaccgtgtctctccagatgtctagcctgagagccgaggacaccgccgtgtactactgtgccaagaatggcgagagcggccctctggactactggtatctggatctgtggggcagaggcaccctggtcacagtctcttctacgcgtatccagaaccctgatcctgccgtgtaccagctgcgggatagcaagagcagcgacaagagcgtgtgtctgttcaccgacttcgacagccagaccaacgtgtcccagagcaaggactccgacgtgtacatcaccgataagtgcgtgctggacatgcggagcatggacttcaagagcaactccgccgtggcctggtccaacaagtccgatttcgcctgcgccaacgccttcaacaacagcattatccccgaggacacattcttcccaagccccgagagcagcgactccaccgaccacgtgaagcccaaagagacagagaacaccaagcagcccagcaagagctgccacaagcccaaggccatcgtgcacaccgagaaagtgaacatgatgagcctgaccgtgctgggcctgcggatgctgttcgccaaaaccgtggccgtgaacttcctgctgaccgccaagctgttcttcctc

SEQ ID NO: 7171 - DNA, 2190 bp, synthetic construct
  source 1..2190: mol_type = other DNA
atggccttaccagtgaccgccttgctcctgccgctggccttgctgctccacgccgccaggccgagctacgagctgacacagcctccatccgtgtctggcacacctggacagagagtggctatctcctgtagcggcagcagcagcaacatcggcaccagaatggtcacctggtatcagcacgtgccaggcacagcccctaagctgctgatcttcaacaacaaccagcggcctagcggcgtgcccgatagattttctgccagcaagagcggcacaagcgccagcctggctatcatcggactccagtctgacgacgaggccgactactactgtgccacctgggacgacaacgtgaagtcctacgtgttcggcaccggcaccaaagtgacagtgcttggaagtagactcgaggacctgaagaacgtgttcccacctgaggtggccgtgttcgagcctagcgaggccgagatcagccacacccagaaagccaccctcgtgtgcctggctaccggcttctaccccgaccatgtggaactgtcttggtgggtcaacggcaaagaggtgcacagcggcgtgtgtaccgacccccagccactgaaagaacagcccgccctgaacgacagccggtactgcctgagcagcagactgagagtgtccgccaccttctggcagaacccccggaaccacttcagatgccaggtgcagttctacggcctgagcgagaacgacgagtggacccaggacagagccaagcccgtgacccagatcgtgtctgccgaagcctggggcagagccgatgatgtgattaagatccactggcaggaaaagaagtccaacaccatcctgggcagccaggaaggcaacaccatgaagaccaacgacacctacatgaagttcagctggctgaccgtgcccgagaagtccctggacaaagaacacagatgcatcgtgcggcacgaaaacaacaagaacggcgtggaccaggaaatcatcttcccacccatcaagaccgatgtgattacaatggaccccaaggacaactgctccaaggacgccaacgataccctgctgctccagctgaccaacaccagcgcctactacatgtacttgttgctgctgctgaagtccgtggtgtacttcgccatcatcacatgctgcctgctgcggagaaccgccttctgctgcaacggcgagaagtctagggccaagcgatctggatctggagcaacaaacttctcactactcaaacaagcaggtgacgtggaggagaatcccgggcctactagtatggactggatttggcgcatccttttccttgtcggcgctgctaccggcgcgcattccttcgaacttgaaatggcccaggttcagctccagcagtggggagctggactgctgaagcctagcgagacactgagcctgacctgtgctgtgtacggcggcagcttcagcggctactactggtcctggatcagacagcctcctggcaaaggactggaatggatcggcgagatcaaccacagcggctccaccaactacaaccccagcctgaagtccagagtgaccatcagcgtggacaccagcaagaaccagttctccctgaagctgagcagcgtgacagccgctgataccgccgtgtactattgcgctagagcccctcagtcttggtacgtgggagatgtgtggggccagggcacactggttacagtgtcatctacgcgtatccagaaccctgatcctgccgtgtaccagctgcgggatagcaagagcagcgacaagagcgtgtgtctgttcaccgacttcgacagccagaccaacgtgtcccagagcaaggactccgacgtgtacatcaccgataagtgcgtgctggacatgcggagcatggacttcaagagcaactccgccgtggcctggtccaacaagtccgatttcgcctgcgccaacgccttcaacaacagcattatccccgaggacacattcttcccaagccccgagagcagcgactccaccgaccacgtgaagcccaaagagacagagaacaccaagcagcccagcaagagctgccacaagcccaaggccatcgtgcacaccgagaaagtgaacatgatgagcctgaccgtgctgggcctgcggatgctgttcgccaaaaccgtggccgtgaacttcctgctgaccgccaagctgttcttcctc

SEQ ID NO: 7172 - DNA, 2181 bp, synthetic construct
  source 1..2181: mol_type = other DNA
atggccttaccagtgaccgccttgctcctgccgctggccttgctgctccacgccgccaggccgcagtctgtgctgacacagcctcctagcctgtctgtggcccctggaaagacagccagcatcacatgcggcggcaacaacatcggcatgaagtccgtgcactggtatcagcagaggccaggacaggctcctgtgctggtcatctactacgacagcgacagaccctctggcatccccggcagattttccggcagcaactctggcaataccgccacactgaccatctccagagtggaagctggcgacgaggccgactactactgccaagtgtgggataccaccggcgatcaccctggctatgtgtttggcaccggcaccaaagtgacagtgcttctcgaggacctgaagaacgtgttcccacctgaggtggccgtgttcgagcctagcgaggccgagatcagccacacccagaaagccaccctcgtgtgcctggctaccggcttctaccccgaccatgtggaactgtcttggtgggtcaacggcaaagaggtgcacagcggcgtgtgtaccgacccccagccactgaaagaacagcccgccctgaacgacagccggtactgcctgagcagcagactgagagtgtccgccaccttctggcagaacccccggaaccacttcagatgccaggtgcagttctacggcctgagcgagaacgacgagtggacccaggacagagccaagcccgtgacccagatcgtgtctgccgaagcctggggcagagccgatgatgtgattaagatccactggcaggaaaagaagtccaacaccatcctgggcagccaggaaggcaacaccatgaagaccaacgacacctacatgaagttcagctggctgaccgtgcccgagaagtccctggacaaagaacacagatgcatcgtgcggcacgaaaacaacaagaacggcgtggaccaggaaatcatcttcccacccatcaagaccgatgtgattacaatggaccccaaggacaactgctccaaggacgccaacgataccctgctgctccagctgaccaacaccagcgcctactacatgtacttgttgctgctgctgaagtccgtggtgtacttcgccatcatcacatgctgcctgctgcggagaaccgccttctgctgcaacggcgagaagtctagggccaagcgatctggatctggagcaacaaacttctcactactcaaacaagcaggtgacgtggaggagaatcccgggcctactagtatggactggatttggcgcatccttttccttgtcggcgctgctaccggcgcgcattccttcgaacaagttcaactggttcagagcggagccgaagtgaagaaacctggcagcagcgtgaaggtgtcctgcaaagcaagcggcggcacctttagcagctacgccatctcttgggtccgacaggcacctggacaaggactggaatggatgggcggcatcatccccatcttcggcacagccaattacgcccagaaattccagggcagagtgaccatcaccgccgacgagtctacaagcaccgcctacatggaactgagcagcctgagaagcgaggacaccgccgtgtactattgtgccagaggcgtgtacggctacagcggctctgccccttatgatgagtggggccagggaaccctggtcaccgtttcttctacgcgtatccagaaccctgatcctgccgtgtaccagctgcgggatagcaagagcagcgacaagagcgtgtgtctgttcaccgacttcgacagccagaccaacgtgtcccagagcaaggactccgacgtgtacatcaccgataagtgcgtgctggacatgcggagcatggacttcaagagcaactccgccgtggcctggtccaacaagtccgatttcgcctgcgccaacgccttcaacaacagcattatccccgaggacacattcttcccaagccccgagagcagcgactccaccgaccacgtgaagcccaaagagacagagaacaccaagcagcccagcaagagctgccacaagcccaaggccatcgtgcacaccgagaaagtgaacatgatgagcctgaccgtgctgggcctgcggatgctgttcgccaaaaccgtggccgtgaacttcctgctgaccgccaagctgttcttcctc

SEQ ID NO: 7173 - DNA, 2175 bp, synthetic construct
  source 1..2175: mol_type = other DNA
atggccttaccagtgaccgccttgctcctgccgctggccttgctgctccacgccgccaggccggaggtgcaactggttgagtctggcggaggactggtgcagcctggaagaagcctgagactgtcttgtgccgccagcggcttcaccttcgacgattatgccatgcactgggtccgacaggcccctggcaaaggacttgaatgggtgtccggcatctcctggaacagcggctctatcggctacgccgattccgtgaagggcagattcaccatcagccgggacaacgccaagaacagcctgtacctccagatgaactccctgagagccgaggacacagccctgtactactgcgccaaagacaaaggcggaggctactacgacttttggagcggcagcgattattggggccagggcacactggtcacagtgtctagcctcgaggacctgaagaacgtgttcccacctgaggtggccgtgttcgagcctagcgaggccgagatcagccacacccagaaagccaccctcgtgtgcctggctaccggcttctaccccgaccatgtggaactgtcttggtgggtcaacggcaaagaggtgcacagcggcgtgtgtaccgacccccagccactgaaagaacagcccgccctgaacgacagccggtactgcctgagcagcagactgagagtgtccgccaccttctggcagaacccccggaaccacttcagatgccaggtgcagttctacggcctgagcgagaacgacgagtggacccaggacagagccaagcccgtgacccagatcgtgtctgccgaagcctggggcagagccgatgatgtgattaagatccactggcaggaaaagaagtccaacaccatcctgggcagccaggaaggcaacaccatgaagaccaacgacacctacatgaagttcagctggctgaccgtgcccgagaagtccctggacaaagaacacagatgcatcgtgcggcacgaaaacaacaagaacggcgtggaccaggaaatcatcttcccacccatcaagaccgatgtgattacaatggaccccaaggacaactgctccaaggacgccaacgataccctgctgctccagctgaccaacaccagcgcctactacatgtacttgttgctgctgctgaagtccgtggtgtacttcgccatcatcacatgctgcctgctgcggagaaccgccttctgctgcaacggcgagaagtctagggccaagcgatctggatctggagcaacaaacttctcactactcaaacaagcaggtgacgtggaggagaatcccgggcctactagtatggactggatttggcgcatccttttccttgtcggcgctgctaccggcgcgcattccttcgaatcttctgagctgacacaggaccctgccgtgtctgttgctctgggccagacagtgcggattacctgtcagggcgatagcctgagaagctactacgcctcctggtatcagcagaagccaggccaggctcctgtgctggtcatctacggcaagaacaacagacccagcggcatccccgatagattcagcggaagcagctctggcaataccgccagcctgacaattactggcgctcaggccgaggacgaggccgactactactgcaacagcagagatagcagcggctgggttttcggcggaggcacaaaactgacagtgctgacgcgtatccagaaccctgatcctgccgtgtaccagctgcgggatagcaagagcagcgacaagagcgtgtgtctgttcaccgacttcgacagccagaccaacgtgtcccagagcaaggactccgacgtgtacatcaccgataagtgcgtgctggacatgcggagcatggacttcaagagcaactccgccgtggcctggtccaacaagtccgatttcgcctgcgccaacgccttcaacaacagcattatccccgaggacacattcttcccaagccccgagagcagcgactccaccgaccacgtgaagcccaaagagacagagaacaccaagcagcccagcaagagctgccacaagcccaaggccatcgtgcacaccgagaaagtgaacatgatgagcctgaccgtgctgggcctgcggatgctgttcgccaaaaccgtggccgtgaacttcctgctgaccgccaagctgttcttcctc

SEQ ID NO: 7174 - DNA, 2202 bp, synthetic construct
  source 1..2202: mol_type = other DNA
atggccttaccagtgaccgccttgctcctgccgctggccttgctgctccacgccgccaggccggaagtgcagctccagcagtctggacctggcctggttaagcctagccagacactgagcctgacctgtgccatcagcggcgatagcgtgctgagcaacagcgacacctggaactggatcagacagagccctagcagaggactggaatggctgggcagaacctaccacagaagcacttggtacgacgactacgccagctctgtgcggggcagagtgtccatcaatgtggacaccagcaagaaccagtacagcctgcaactgaacgccgtgacacctgaggataccggcgtgtactactgcgccagagacagactccaggacggcaactcttggagcgacgcctttgatgtgtggggccagggcacaatggtcaccgtttctagcctcgaggacctgaagaacgtgttcccacctgaggtggccgtgttcgagcctagcgaggccgagatcagccacacccagaaagccaccctcgtgtgcctggctaccggcttctaccccgaccatgtggaactgtcttggtgggtcaacggcaaagaggtgcacagcggcgtgtgtaccgacccccagccactgaaagaacagcccgccctgaacgacagccggtactgcctgagcagcagactgagagtgtccgccaccttctggcagaacccccggaaccacttcagatgccaggtgcagttctacggcctgagcgagaacgacgagtggacccaggacagagccaagcccgtgacccagatcgtgtctgccgaagcctggggcagagccgatgatgtgattaagatccactggcaggaaaagaagtccaacaccatcctgggcagccaggaaggcaacaccatgaagaccaacgacacctacatgaagttcagctggctgaccgtgcccgagaagtccctggacaaagaacacagatgcatcgtgcggcacgaaaacaacaagaacggcgtggaccaggaaatcatcttcccacccatcaagaccgatgtgattacaatggaccccaaggacaactgctccaaggacgccaacgataccctgctgctccagctgaccaacaccagcgcctactacatgtacttgttgctgctgctgaagtccgtggtgtacttcgccatcatcacatgctgcctgctgcggagaaccgccttctgctgcaacggcgagaagtctagggccaagcgatctggatctggagcaacaaacttctcactactcaaacaagcaggtgacgtggaggagaatcccgggcctactagtatggactggatttggcgcatccttttccttgtcggcgctgctaccggcgcgcattccttcgaacaatctgctctgacacagcctgccagcgtgtcaggatctcctggacagagcatcaccatctcttgcaccggcaccagctctgatgtcggcggctacaattacgtgtcctggtatcagcagcaccccggcaaggcccctaagctgatgatctacgacgtgtccaacagacccagcggcgtgtccaatagattctccggcagcaagagcggcaacaccgccagcctgacaatttctggactgcaagccgaggacgaggccgactactactgtagcagctacaccagcagcagcacactggtgtacgtgttcggcacaggcaccaaagtgaccgtgcttacgcgtatccagaaccctgatcctgccgtgtaccagctgcgggatagcaagagcagcgacaagagcgtgtgtctgttcaccgacttcgacagccagaccaacgtgtcccagagcaaggactccgacgtgtacatcaccgataagtgcgtgctggacatgcggagcatggacttcaagagcaactccgccgtggcctggtccaacaagtccgatttcgcctgcgccaacgccttcaacaacagcattatccccgaggacacattcttcccaagccccgagagcagcgactccaccgaccacgtgaagcccaaagagacagagaacaccaagcagcccagcaagagctgccacaagcccaaggccatcgtgcacaccgagaaagtgaacatgatgagcctgaccgtgctgggcctgcggatgctgttcgccaaaaccgtggccgtgaacttcctgctgaccgccaagctgttcttcctc

SEQ ID NO: 7175 - DNA, 2136 bp, synthetic construct
  source 1..2136: mol_type = other DNA
atggccttaccagtgaccgccttgctcctgccgctggccttgctgctccacgccgccaggccgcaggtgcaactggttcagtctggggccgaagtgaagaaacctggggcctctgtgaaggtgtcctgcaaggcttccggctacacctttaccagctacgacatcaactgggtccgacaggccacaggccaaggactggaatggatgggctggatgaaccccaacagcggcaataccggctacgcccagaaattccagggcagagtgaccatgaccagaaacaccagcatcagcaccgcctacatggaactgagcagcctgagaagcgaggacaccgccgtgtactattgcgccagaggcgacagcaccaaggtggaaatcaaactcgaggacctgaagaacgtgttcccacctgaggtggccgtgttcgagcctagcgaggccgagatcagccacacccagaaagccaccctcgtgtgcctggctaccggcttctaccccgaccatgtggaactgtcttggtgggtcaacggcaaagaggtgcacagcggcgtgtgtaccgacccccagccactgaaagaacagcccgccctgaacgacagccggtactgcctgagcagcagactgagagtgtccgccaccttctggcagaacccccggaaccacttcagatgccaggtgcagttctacggcctgagcgagaacgacgagtggacccaggacagagccaagcccgtgacccagatcgtgtctgccgaagcctggggcagagccgatgatgtgattaagatccactggcaggaaaagaagtccaacaccatcctgggcagccaggaaggcaacaccatgaagaccaacgacacctacatgaagttcagctggctgaccgtgcccgagaagtccctggacaaagaacacagatgcatcgtgcggcacgaaaacaacaagaacggcgtggaccaggaaatcatcttcccacccatcaagaccgatgtgattacaatggaccccaaggacaactgctccaaggacgccaacgataccctgctgctccagctgaccaacaccagcgcctactacatgtacttgttgctgctgctgaagtccgtggtgtacttcgccatcatcacatgctgcctgctgcggagaaccgccttctgctgcaacggcgagaagtctagggccaagcgatctggatctggagcaacaaacttctcactactcaaacaagcaggtgacgtggaggagaatcccgggcctactagtatggactggatttggcgcatccttttccttgtcggcgctgctaccggcgcgcattccttcgaacaatctgtgctgacccagcctagatccgtgtctggctctcctggacagagcgtgaccatctcttgtaccggcaccagctctgatgtcggcggctacaattacgtgtcctggtatcagcagcaccccggcgaagcccctaagctgattatctacgacgccgacaagcggcccagcggcatcagcaatagattcagctctggcaagagcggcaacaccgccagcctgacaatcagcggactccaggtggaagatgaggccgactactactgctgctcctatgccggcggaagcacctgggttttcggaggcggtacaaaagtgaccgtgctgacgcgtatccagaaccctgatcctgccgtgtaccagctgcgggatagcaagagcagcgacaagagcgtgtgtctgttcaccgacttcgacagccagaccaacgtgtcccagagcaaggactccgacgtgtacatcaccgataagtgcgtgctggacatgcggagcatggacttcaagagcaactccgccgtggcctggtccaacaagtccgatttcgcctgcgccaacgccttcaacaacagcattatccccgaggacacattcttcccaagccccgagagcagcgactccaccgaccacgtgaagcccaaagagacagagaacaccaagcagcccagcaagagctgccacaagcccaaggccatcgtgcacaccgagaaagtgaacatgatgagcctgaccgtgctgggcctgcggatgctgttcgccaaaaccgtggccgtgaacttcctgctgaccgccaagctgttcttcctc

SEQ ID NO: 7176 - DNA, 2202 bp, synthetic construct
  source 1..2202: mol_type = other DNA
atggccttaccagtgaccgccttgctcctgccgctggccttgctgctccacgccgccaggccggaagtgcagctccagcagtctggacctggcctggttaagcctagccagacactgagcctgacctgtgccatcagcggcgatagcgtgtcctctaatagcgccgcctggaactggatcagacagagccctagcagaggactggaatggctgggcagaacctactaccgcagcaagtggtacagcgactacgccgtgtccgtgaagtcccggatcaccatcaatcccgacaccagcaagaaccagttcagcctgcaactgaacagcgtgacccctgaggataccgccgtgtactactgcgccagagatccctacgacttttggagcggctaccccgacgcctttgacatctggggacagggcacaatggtcaccgtttctagcctcgaggacctgaagaacgtgttcccacctgaggtggccgtgttcgagcctagcgaggccgagatcagccacacccagaaagccaccctcgtgtgcctggctaccggcttctaccccgaccatgtggaactgtcttggtgggtcaacggcaaagaggtgcacagcggcgtgtgtaccgacccccagccactgaaagaacagcccgccctgaacgacagccggtactgcctgagcagcagactgagagtgtccgccaccttctggcagaacccccggaaccacttcagatgccaggtgcagttctacggcctgagcgagaacgacgagtggacccaggacagagccaagcccgtgacccagatcgtgtctgccgaagcctggggcagagccgatgatgtgattaagatccactggcaggaaaagaagtccaacaccatcctgggcagccaggaaggcaacaccatgaagaccaacgacacctacatgaagttcagctggctgaccgtgcccgagaagtccctggacaaagaacacagatgcatcgtgcggcacgaaaacaacaagaacggcgtggaccaggaaatcatcttcccacccatcaagaccgatgtgattacaatggaccccaaggacaactgctccaaggacgccaacgataccctgctgctccagctgaccaacaccagcgcctactacatgtacttgttgctgctgctgaagtccgtggtgtacttcgccatcatcacatgctgcctgctgcggagaaccgccttctgctgcaacggcgagaagtctagggccaagcgatctggatctggagcaacaaacttctcactactcaaacaagcaggtgacgtggaggagaatcccgggcctactagtatggactggatttggcgcatccttttccttgtcggcgctgctaccggcgcgcattccttcgaacaatctgctctgacacagcctgccagcgtgtcaggatctcctggacagagcatcaccatctcttgcaccggcaccagctctgatgtcggcggctacaattacgtgtcctggtatcagcagcaccccggcaaggcccctaaagtgattatcagcgaagtgaacaacagacccagcggcgtgtcccacagattcagcggctctaagtctggcaacaccgccagcctgacaatctctggactgcaagccgaggacgaggccgactacttctgtagcagctacaccagcggcagaaccctgtacgtgttcggcacaggcagcaaagtgacagtgctgggaacgcgtatccagaaccctgatcctgccgtgtaccagctgcgggatagcaagagcagcgacaagagcgtgtgtctgttcaccgacttcgacagccagaccaacgtgtcccagagcaaggactccgacgtgtacatcaccgataagtgcgtgctggacatgcggagcatggacttcaagagcaactccgccgtggcctggtccaacaagtccgatttcgcctgcgccaacgccttcaacaacagcattatccccgaggacacattcttcccaagccccgagagcagcgactccaccgaccacgtgaagcccaaagagacagagaacaccaagcagcccagcaagagctgccacaagcccaaggccatcgtgcacaccgagaaagtgaacatgatgagcctgaccgtgctgggcctgcggatgctgttcgccaaaaccgtggccgtgaacttcctgctgaccgccaagctgttcttcctc

SEQ ID NO: 7177 - DNA, 2199 bp, synthetic construct
  source 1..2199: mol_type = other DNA
atggccttaccagtgaccgccttgctcctgccgctggccttgctgctccacgccgccaggccgcaatctgctctgacacagcctgccagcgcctctggatctcctggacagagcgtgaccatctcctgtaccggcacctcttctgatgtcggcggctacaactacgtgtcctggtatcagcagcaccccggcaaggcccctaagctgatgatctacgacgtgtccaacagacccagcggcgtgtccaatagattctccggcagcaagagcggcaacaccgccagcctgacaatttctggactgcaagccgaggacgaggccgactactactgtagcagctacaccagcagcagcacactgtacgtgttcggcacaggcacccagctcacagttcttctcgaggacctgaagaacgtgttcccacctgaggtggccgtgttcgagcctagcgaggccgagatcagccacacccagaaagccaccctcgtgtgcctggctaccggcttctaccccgaccatgtggaactgtcttggtgggtcaacggcaaagaggtgcacagcggcgtgtgtaccgacccccagccactgaaagaacagcccgccctgaacgacagccggtactgcctgagcagcagactgagagtgtccgccaccttctggcagaacccccggaaccacttcagatgccaggtgcagttctacggcctgagcgagaacgacgagtggacccaggacagagccaagcccgtgacccagatcgtgtctgccgaagcctggggcagagccgatgatgtgattaagatccactggcaggaaaagaagtccaacaccatcctgggcagccaggaaggcaacaccatgaagaccaacgacacctacatgaagttcagctggctgaccgtgcccgagaagtccctggacaaagaacacagatgcatcgtgcggcacgaaaacaacaagaacggcgtggaccaggaaatcatcttcccacccatcaagaccgatgtgattacaatggaccccaaggacaactgctccaaggacgccaacgataccctgctgctccagctgaccaacaccagcgcctactacatgtacttgttgctgctgctgaagtccgtggtgtacttcgccatcatcacatgctgcctgctgcggagaaccgccttctgctgcaacggcgagaagtctagggccaagcgatctggatctggagcaacaaacttctcactactcaaacaagcaggtgacgtggaggagaatcccgggcctactagtatggactggatttggcgcatccttttccttgtcggcgctgctaccggcgcgcattccttcgaagaagtgcagctccagcagtctggacctggcctggttaagcctagccagacactgagcctgacctgtgccatcagcggcgattccatgctgagcaacagcgacacctggaactggatcagacagagccccagcagaggcctggaatggctgggcagaacataccacagaagcacttggtacgacgactacgccagctctgtgcggggcagagtgtccatcaatgtggacaccagcaagaaccagtacagcctgcaactgaacgccgtgacacctgaggataccggcgtgtactactgtgccagagtgcggctccaggacggcaattcttggagcgacgcctttgatgtgtggggccagggcacaatggtcaccgtttctagcacgcgtatccagaaccctgatcctgccgtgtaccagctgcgggatagcaagagcagcgacaagagcgtgtgtctgttcaccgacttcgacagccagaccaacgtgtcccagagcaaggactccgacgtgtacatcaccgataagtgcgtgctggacatgcggagcatggacttcaagagcaactccgccgtggcctggtccaacaagtccgatttcgcctgcgccaacgccttcaacaacagcattatccccgaggacacattcttcccaagccccgagagcagcgactccaccgaccacgtgaagcccaaagagacagagaacaccaagcagcccagcaagagctgccacaagcccaaggccatcgtgcacaccgagaaagtgaacatgatgagcctgaccgtgctgggcctgcggatgctgttcgccaaaaccgtggccgtgaacttcctgctgaccgccaagctgttcttcctc

SEQ ID NO: 7178 - DNA, 2199 bp, synthetic construct
  source 1..2199: mol_type = other DNA
atggccttaccagtgaccgccttgctcctgccgctggccttgctgctccacgccgccaggccggacgtgatgctgacccagacaccactgagcctgcctgtgtctctgggcgatcaggccagcatctcctgtagaagcagccagagcatcctgcacagcaccggcgatacctacctggaatggtatctccagaagcctggacagagccccaagctgctgattaacaaggtgtccaaccggctgagcggcgtgcccgatagattttctggcagcggctctggcaccgacttcaccctgaagatcagcagagtggaagccgaggacctgggcgtgtactactgcttccaaggcagccatgttccttggacctttggcggaggcaccaagctggaaatcaagagagctgacgccgctcctaccgtgtccatctttcctctcgaggacctgaagaacgtgttcccacctgaggtggccgtgttcgagcctagcgaggccgagatcagccacacccagaaagccaccctcgtgtgcctggctaccggcttctaccccgaccatgtggaactgtcttggtgggtcaacggcaaagaggtgcacagcggcgtgtgtaccgacccccagccactgaaagaacagcccgccctgaacgacagccggtactgcctgagcagcagactgagagtgtccgccaccttctggcagaacccccggaaccacttcagatgccaggtgcagttctacggcctgagcgagaacgacgagtggacccaggacagagccaagcccgtgacccagatcgtgtctgccgaagcctggggcagagccgatgatgtgattaagatccactggcaggaaaagaagtccaacaccatcctgggcagccaggaaggcaacaccatgaagaccaacgacacctacatgaagttcagctggctgaccgtgcccgagaagtccctggacaaagaacacagatgcatcgtgcggcacgaaaacaacaagaacggcgtggaccaggaaatcatcttcccacccatcaagaccgatgtgattacaatggaccccaaggacaactgctccaaggacgccaacgataccctgctgctccagctgaccaacaccagcgcctactacatgtacttgttgctgctgctgaagtccgtggtgtacttcgccatcatcacatgctgcctgctgcggagaaccgccttctgctgcaacggcgagaagtctagggccaagcgatctggatctggagcaacaaacttctcactactcaaacaagcaggtgacgtggaggagaatcccgggcctactagtatggactggatttggcgcatccttttccttgtcggcgctgctaccggcgcgcattccttcgaacaagtgaagctccagcagagcggccctagccttgtgaaacctggcgcttccgtgaagatgagctgcaaggccagcggctacaccttcaccgatttctacatgaaatgggtcaagcagagccacggcaagtctctggaatggatcggcgacatcaaccccaacatcggagacaccttctacaaccagaagttcaagggcaaagccacactgaccgtggacaagagcagcagcaccgcctacatgcagctcaacagcctgaccagcgaggacagcgccgtgtacttttgttccgtgggctacttcgacgtgtggggagccggaacaaccgtgacagtctcttctacgcgtatccagaaccctgatcctgccgtgtaccagctgcgggatagcaagagcagcgacaagagcgtgtgtctgttcaccgacttcgacagccagaccaacgtgtcccagagcaaggactccgacgtgtacatcaccgataagtgcgtgctggacatgcggagcatggacttcaagagcaactccgccgtggcctggtccaacaagtccgatttcgcctgcgccaacgccttcaacaacagcattatccccgaggacacattcttcccaagccccgagagcagcgactccaccgaccacgtgaagcccaaagagacagagaacaccaagcagcccagcaagagctgccacaagcccaaggccatcgtgcacaccgagaaagtgaacatgatgagcctgaccgtgctgggcctgcggatgctgttcgccaaaaccgtggccgtgaacttcctgctgaccgccaagctgttcttcctc

SEQ ID NO: 7179 - DNA, 2187 bp, synthetic construct
  source 1..2187: mol_type = other DNA
atggccttaccagtgaccgccttgctcctgccgctggccttgctgctccacgccgccaggccggagatcgtgctgacacagtctcccgccacactgtcactgtctccaggcgaaagagccacactgagctgtagagccagccagagcgtgtccatctacctggcctggtatcagcagaagcctggacaggctccccggctgctgatctacgatgccagcaatagagccacaggcatccccgccagattttctggctctggcagcggcaccgatttcaccctgaccataagcagcctggaacctgaggacttcgccgtgtactactgccagcagagaagcaactggcctcctttcacattcggccctggcaccaaggtggacatcaaactcgaggacctgaagaacgtgttcccacctgaggtggccgtgttcgagcctagcgaggccgagatcagccacacccagaaagccaccctcgtgtgcctggctaccggcttctaccccgaccatgtggaactgtcttggtgggtcaacggcaaagaggtgcacagcggcgtgtgtaccgacccccagccactgaaagaacagcccgccctgaacgacagccggtactgcctgagcagcagactgagagtgtccgccaccttctggcagaacccccggaaccacttcagatgccaggtgcagttctacggcctgagcgagaacgacgagtggacccaggacagagccaagcccgtgacccagatcgtgtctgccgaagcctggggcagagccgatgatgtgattaagatccactggcaggaaaagaagtccaacaccatcctgggcagccaggaaggcaacaccatgaagaccaacgacacctacatgaagttcagctggctgaccgtgcccgagaagtccctggacaaagaacacagatgcatcgtgcggcacgaaaacaacaagaacggcgtggaccaggaaatcatcttcccacccatcaagaccgatgtgattacaatggaccccaaggacaactgctccaaggacgccaacgataccctgctgctccagctgaccaacaccagcgcctactacatgtacttgttgctgctgctgaagtccgtggtgtacttcgccatcatcacatgctgcctgctgcggagaaccgccttctgctgcaacggcgagaagtctagggccaagcgatctggatctggagcaacaaacttctcactactcaaacaagcaggtgacgtggaggagaatcccgggcctactagtatggactggatttggcgcatccttttccttgtcggcgctgctaccggcgcgcattccttcgaacaggtgcagcttgttgaaagcggaggcggagttgtgcagcctggcagaagtctgagactgtcttgtgccgccagcggcttcaccttcagcagctatggaatgcactgggtccgacaggcccctggcaaaggacttgaatgggttgccgtgatctgggacgacggcagcaacaagtattacgtggacagcgtgaagggcagattcaccatcagccgggacaacagcaagaacaccctgtacctccagatgaacagcctgagagccgaggacacagccgtgtattattgcgccagagatgactactacggcagcggctccttcaacagctactatggcacagacgtgtggggccagggcacaacagttaccgttagctctacgcgtatccagaaccctgatcctgccgtgtaccagctgcgggatagcaagagcagcgacaagagcgtgtgtctgttcaccgacttcgacagccagaccaacgtgtcccagagcaaggactccgacgtgtacatcaccgataagtgcgtgctggacatgcggagcatggacttcaagagcaactccgccgtggcctggtccaacaagtccgatttcgcctgcgccaacgccttcaacaacagcattatccccgaggacacattcttcccaagccccgagagcagcgactccaccgaccacgtgaagcccaaagagacagagaacaccaagcagcccagcaagagctgccacaagcccaaggccatcgtgcacaccgagaaagtgaacatgatgagcctgaccgtgctgggcctgcggatgctgttcgccaaaaccgtggccgtgaacttcctgctgaccgccaagctgttcttcctc

SEQ ID NO: 7180 - DNA, 2142 bp, synthetic construct
  source 1..2142: mol_type = other DNA
atggccttaccagtgaccgccttgctcctgccgctggccttgctgctccacgccgccaggccggacatccagatgacacagagccctagcagcctgtctgccagcgtgggagacagagtgaccatcacctgtagagccagccagggcatctcttcttggctggcctggtatcagcagaagcccgagaaggcccctaagagcctgatctatgccgccagctctctccagagcggagtgcctagcagattttctggcagcggctccggcaccgatttcaccctgacaatatccagcctccagcctgaggacttcgccacctactactgccagcagtacaacagctacccctacaccttcggccagggcaccaagctggaaatcaaactcgaggacctgaagaacgtgttcccacctgaggtggccgtgttcgagcctagcgaggccgagatcagccacacccagaaagccaccctcgtgtgcctggctaccggcttctaccccgaccatgtggaactgtcttggtgggtcaacggcaaagaggtgcacagcggcgtgtgtaccgacccccagccactgaaagaacagcccgccctgaacgacagccggtactgcctgagcagcagactgagagtgtccgccaccttctggcagaacccccggaaccacttcagatgccaggtgcagttctacggcctgagcgagaacgacgagtggacccaggacagagccaagcccgtgacccagatcgtgtctgccgaagcctggggcagagccgatgatgtgattaagatccactggcaggaaaagaagtccaacaccatcctgggcagccaggaaggcaacaccatgaagaccaacgacacctacatgaagttcagctggctgaccgtgcccgagaagtccctggacaaagaacacagatgcatcgtgcggcacgaaaacaacaagaacggcgtggaccaggaaatcatcttcccacccatcaagaccgatgtgattacaatggaccccaaggacaactgctccaaggacgccaacgataccctgctgctccagctgaccaacaccagcgcctactacatgtacttgttgctgctgctgaagtccgtggtgtacttcgccatcatcacatgctgcctgctgcggagaaccgccttctgctgcaacggcgagaagtctagggccaagcgatctggatctggagcaacaaacttctcactactcaaacaagcaggtgacgtggaggagaatcccgggcctactagtatggactggatttggcgcatccttttccttgtcggcgctgctaccggcgcgcattccttcgaagaagtgcaactggttcaatctggcggcggactggttcatccaggcggttctctgagactgagctgtgccggctctggcttcaccttcagcacctacctgatgtactgggtccgacaggcccctggcaagacactggaatgggtgtccgctattggcagcggaggcgatacctactacgccgactctgtgaagggcagattcaccatcagccgggacaacgccaagaacagcctgtacctccagatgaactccctgagagccgaggacatggccgtgtactactgtgccagaggactcggctattggggccagggaacactggtcacagtgtcctctacgcgtatccagaaccctgatcctgccgtgtaccagctgcgggatagcaagagcagcgacaagagcgtgtgtctgttcaccgacttcgacagccagaccaacgtgtcccagagcaaggactccgacgtgtacatcaccgataagtgcgtgctggacatgcggagcatggacttcaagagcaactccgccgtggcctggtccaacaagtccgatttcgcctgcgccaacgccttcaacaacagcattatccccgaggacacattcttcccaagccccgagagcagcgactccaccgaccacgtgaagcccaaagagacagagaacaccaagcagcccagcaagagctgccacaagcccaaggccatcgtgcacaccgagaaagtgaacatgatgagcctgaccgtgctgggcctgcggatgctgttcgccaaaaccgtggccgtgaacttcctgctgaccgccaagctgttcttcctc

SEQ ID NO: 7181 - DNA, 2199 bp, synthetic construct
  source 1..2199: mol_type = other DNA
atggccttaccagtgaccgccttgctcctgccgctggccttgctgctccacgccgccaggccgctgcctgttctgacacagcctccatccgtgtctgtggcccctggaaagaccgccagaatcacatgcggcggcaacaacatcggcagcaagagcgtgcactggtatcagcagaagcctggacaggctcctgtgctggtggtgtacgacgacagcgatagacctagcggcatccccgagagattcagcggcagcaattccggcaataccgccacactgaccatcagcagagtggaagctggcgacgaggccgactactactgccaagtgtgggacagcagcagcgactacgtggtgtttggcggcggaacaaagctgacagtgcttctcgaggacctgaagaacgtgttcccacctgaggtggccgtgttcgagcctagcgaggccgagatcagccacacccagaaagccaccctcgtgtgcctggctaccggcttctaccccgaccatgtggaactgtcttggtgggtcaacggcaaagaggtgcacagcggcgtgtgtaccgacccccagccactgaaagaacagcccgccctgaacgacagccggtactgcctgagcagcagactgagagtgtccgccaccttctggcagaacccccggaaccacttcagatgccaggtgcagttctacggcctgagcgagaacgacgagtggacccaggacagagccaagcccgtgacccagatcgtgtctgccgaagcctggggcagagccgatgatgtgattaagatccactggcaggaaaagaagtccaacaccatcctgggcagccaggaaggcaacaccatgaagaccaacgacacctacatgaagttcagctggctgaccgtgcccgagaagtccctggacaaagaacacagatgcatcgtgcggcacgaaaacaacaagaacggcgtggaccaggaaatcatcttcccacccatcaagaccgatgtgattacaatggaccccaaggacaactgctccaaggacgccaacgataccctgctgctccagctgaccaacaccagcgcctactacatgtacttgttgctgctgctgaagtccgtggtgtacttcgccatcatcacatgctgcctgctgcggagaaccgccttctgctgcaacggcgagaagtctagggccaagcgatctggatctggagcaacaaacttctcactactcaaacaagcaggtgacgtggaggagaatcccgggcctactagtatggactggatttggcgcatccttttccttgtcggcgctgctaccggcgcgcattccttcgaagaagttcaactggtgcagagcggagccgaagtgaagaagccaggcgagagcctgaagattagctgcaaaggcagcggctacagcttcaccagctactggatcggctgggtccgacagatgcctggcaaaggactggaatggatgggcatcatctaccccggcgacagcgacaccagatacagccctagctttcagggccaagtgaccatctccgccgacaagagcatcagcacagcctacctccagtggtcctctctgaaggccagcgataccgccatgtactactgcgccagacaagtctggggatggcaaggcggcatgtaccccaggtctaactggtggtacaacctggactcttggggccagggcacactggtcacagtctcttctacgcgtatccagaaccctgatcctgccgtgtaccagctgcgggatagcaagagcagcgacaagagcgtgtgtctgttcaccgacttcgacagccagaccaacgtgtcccagagcaaggactccgacgtgtacatcaccgataagtgcgtgctggacatgcggagcatggacttcaagagcaactccgccgtggcctggtccaacaagtccgatttcgcctgcgccaacgccttcaacaacagcattatccccgaggacacattcttcccaagccccgagagcagcgactccaccgaccacgtgaagcccaaagagacagagaacaccaagcagcccagcaagagctgccacaagcccaaggccatcgtgcacaccgagaaagtgaacatgatgagcctgaccgtgctgggcctgcggatgctgttcgccaaaaccgtggccgtgaacttcctgctgaccgccaagctgttcttcctc

SEQ ID NO: 7182 - DNA, 2178 bp, synthetic construct
  source 1..2178: mol_type = other DNA
atggccttaccagtgaccgccttgctcctgccgctggccttgctgctccacgccgccaggccggagctggtcatgacacagagccctgcttctctggccgtgtcactgggacagagagccaccatctcttgcagagccagcgagagcgtggacagctacggcaagagcttcatgcactggtatcagctcaagcccggccagcctcctaagctgctgatctacagagcctccaacctggaaagcggcgtgccagccagattttctggcagcggcagcagaaccgacttcaccctgaccattgatcccgtggaagccgatgatgccgccacctactactgccagcagaacaacgaggacccctggacatttggcggaggcaccaagctggaaatcaaactcgaggacctgaagaacgtgttcccacctgaggtggccgtgttcgagcctagcgaggccgagatcagccacacccagaaagccaccctcgtgtgcctggctaccggcttctaccccgaccatgtggaactgtcttggtgggtcaacggcaaagaggtgcacagcggcgtgtgtaccgacccccagccactgaaagaacagcccgccctgaacgacagccggtactgcctgagcagcagactgagagtgtccgccaccttctggcagaacccccggaaccacttcagatgccaggtgcagttctacggcctgagcgagaacgacgagtggacccaggacagagccaagcccgtgacccagatcgtgtctgccgaagcctggggcagagccgatgatgtgattaagatccactggcaggaaaagaagtccaacaccatcctgggcagccaggaaggcaacaccatgaagaccaacgacacctacatgaagttcagctggctgaccgtgcccgagaagtccctggacaaagaacacagatgcatcgtgcggcacgaaaacaacaagaacggcgtggaccaggaaatcatcttcccacccatcaagaccgatgtgattacaatggaccccaaggacaactgctccaaggacgccaacgataccctgctgctccagctgaccaacaccagcgcctactacatgtacttgttgctgctgctgaagtccgtggtgtacttcgccatcatcacatgctgcctgctgcggagaaccgccttctgctgcaacggcgagaagtctagggccaagcgatctggatctggagcaacaaacttctcactactcaaacaagcaggtgacgtggaggagaatcccgggcctactagtatggactggatttggcgcatccttttccttgtcggcgctgctaccggcgcgcattccttcgaagaagtgcagctcgaacagtctggccccgagcttgtgaaacctggcgcttccgtgaagatgagctgcaaggccagcggctacaccttcaccaactactacatgaaatgggtcaagcagagccacggcaagtccctggaatggatcggcgatctgaaccccaacaacggcgacaccttctacaaccagaagttcaagggcaaagccacactgaccgtggacaagagcagcaacaccgcctacatgcagctcaactccctgaccagcgaggacagcgccgtgtactactgtgccagaaccggcagatacgaagagaacgctatggactactggggccagggcacaagcgtgacagtctcttctacgcgtatccagaaccctgatcctgccgtgtaccagctgcgggatagcaagagcagcgacaagagcgtgtgtctgttcaccgacttcgacagccagaccaacgtgtcccagagcaaggactccgacgtgtacatcaccgataagtgcgtgctggacatgcggagcatggacttcaagagcaactccgccgtggcctggtccaacaagtccgatttcgcctgcgccaacgccttcaacaacagcattatccccgaggacacattcttcccaagccccgagagcagcgactccaccgaccacgtgaagcccaaagagacagagaacaccaagcagcccagcaagagctgccacaagcccaaggccatcgtgcacaccgagaaagtgaacatgatgagcctgaccgtgctgggcctgcggatgctgttcgccaaaaccgtggccgtgaacttcctgctgaccgccaagctgttcttcctc

SEQ ID NO: 7183 - DNA, 2160 bp, synthetic construct
  source 1..2160: mol_type = other DNA
atggccttaccagtgaccgccttgctcctgccgctggccttgctgctccacgccgccaggccggacgtggtcatgacacagagcccttctagcctgtctgccagcgtgggcgacagagtgaccatcacctgtatggcctccgaggacatctacatccggctggcctggtatcagcagaagcctggaaacgcccctaagctgctgatctacgccgccacctctctggaaacaggcgtgccaagcagattttccggcagcggctctggcaccgatttcaccctgacaatatccagcctccagcctgaggacttcgccacctactactgccagcagtattggagcagcccctggacatttggcggaggcaccaaggtggaaatcaaactcgaggacctgaagaacgtgttcccacctgaggtggccgtgttcgagcctagcgaggccgagatcagccacacccagaaagccaccctcgtgtgcctggctaccggcttctaccccgaccatgtggaactgtcttggtgggtcaacggcaaagaggtgcacagcggcgtgtgtaccgacccccagccactgaaagaacagcccgccctgaacgacagccggtactgcctgagcagcagactgagagtgtccgccaccttctggcagaacccccggaaccacttcagatgccaggtgcagttctacggcctgagcgagaacgacgagtggacccaggacagagccaagcccgtgacccagatcgtgtctgccgaagcctggggcagagccgatgatgtgattaagatccactggcaggaaaagaagtccaacaccatcctgggcagccaggaaggcaacaccatgaagaccaacgacacctacatgaagttcagctggctgaccgtgcccgagaagtccctggacaaagaacacagatgcatcgtgcggcacgaaaacaacaagaacggcgtggaccaggaaatcatcttcccacccatcaagaccgatgtgattacaatggaccccaaggacaactgctccaaggacgccaacgataccctgctgctccagctgaccaacaccagcgcctactacatgtacttgttgctgctgctgaagtccgtggtgtacttcgccatcatcacatgctgcctgctgcggagaaccgccttctgctgcaacggcgagaagtctagggccaagcgatctggatctggagcaacaaacttctcactactcaaacaagcaggtgacgtggaggagaatcccgggcctactagtatggactggatttggcgcatccttttccttgtcggcgctgctaccggcgcgcattccttcgaacaggttcagctgcaagagtctggccccggactggtcaagcctagccaaacactgagcctgacctgtaccgtgtccggctacagcatcaccagcgactacacctggaactggatcagacagcctcctggcaacggactggaatggatcggctacatcacctacagcggcagcaccagctacaaccccagcctgaaaagccgggtgctgatctccgtggacaccagcaagaatcaggtgtccctgaagctgagcagcgtgacagccgctgataccgccgtgtactactgtgccagactggggagaagatacacaatggactactggggccagggcaccaccgtgacagtttcttctacgcgtatccagaaccctgatcctgccgtgtaccagctgcgggatagcaagagcagcgacaagagcgtgtgtctgttcaccgacttcgacagccagaccaacgtgtcccagagcaaggactccgacgtgtacatcaccgataagtgcgtgctggacatgcggagcatggacttcaagagcaactccgccgtggcctggtccaacaagtccgatttcgcctgcgccaacgccttcaacaacagcattatccccgaggacacattcttcccaagccccgagagcagcgactccaccgaccacgtgaagcccaaagagacagagaacaccaagcagcccagcaagagctgccacaagcccaaggccatcgtgcacaccgagaaagtgaacatgatgagcctgaccgtgctgggcctgcggatgctgttcgccaaaaccgtggccgtgaacttcctgctgaccgccaagctgttcttcctc

SEQ ID NO: 7184 - DNA, 2172 bp, synthetic construct
  source 1..2172: mol_type = other DNA
atggccttaccagtgaccgccttgctcctgccgctggccttgctgctccacgccgccaggccggatattgtgctgactcagagccctgccactctgagccttagtccaggcgacagagctaccatctcctgtagggcctctgaatccgtgaccattctgggctctcatctcatatattggtatcaacaaaagccgggccagcctccacggctgctcattcaactggcctctaacgtgcagaccggcgtgccagctagattttctggctctggctcccggaccgactttacactgacaatcagctccgtggaacccgaagattttgccgtctattattgcctccagtccaggaccattcctcggacattcggccagggaacaaaactcgaaatcaagcggctcgaggacctgaagaacgtgttcccacctgaggtggccgtgttcgagcctagcgaggccgagatcagccacacccagaaagccaccctcgtgtgcctggctaccggcttctaccccgaccatgtggaactgtcttggtgggtcaacggcaaagaggtgcacagcggcgtgtgtaccgacccccagccactgaaagaacagcccgccctgaacgacagccggtactgcctgagcagcagactgagagtgtccgccaccttctggcagaacccccggaaccacttcagatgccaggtgcagttctacggcctgagcgagaacgacgagtggacccaggacagagccaagcccgtgacccagatcgtgtctgccgaagcctggggcagagccgatgatgtgattaagatccactggcaggaaaagaagtccaacaccatcctgggcagccaggaaggcaacaccatgaagaccaacgacacctacatgaagttcagctggctgaccgtgcccgagaagtccctggacaaagaacacagatgcatcgtgcggcacgaaaacaacaagaacggcgtggaccaggaaatcatcttcccacccatcaagaccgatgtgattacaatggaccccaaggacaactgctccaaggacgccaacgataccctgctgctccagctgaccaacaccagcgcctactacatgtacttgttgctgctgctgaagtccgtggtgtacttcgccatcatcacatgctgcctgctgcggagaaccgccttctgctgcaacggcgagaagtctagggccaagcgatctggatctggagcaacaaacttctcactactcaaacaagcaggtgacgtggaggagaatcccgggcctactagtatggactggatttggcgcatccttttccttgtcggcgctgctaccggcgcgcattccttcgaacaggtgcagctcgttcagagtggccccgaagtgaaaaagccaggcgagtccgtgaagatttcctgcaaagcctccggctacacattccggcactactctatgaattgggtcaagcaggccccaggccagggccttaagtggatgggacgcatcaataccgagtccggcgtgccaatctacgccgatgacttcaaaggccggttcagcttcaccgtggatacctctgcctccaccgcctacctggaaatcagcagcctgaccagcgaggatacagctgtgtacttctgtagcaacgattacctctacagcctggatttctggggacagggaaccacactgaccgtgtctagcacgcgtatccagaaccctgatcctgccgtgtaccagctgcgggatagcaagagcagcgacaagagcgtgtgtctgttcaccgacttcgacagccagaccaacgtgtcccagagcaaggactccgacgtgtacatcaccgataagtgcgtgctggacatgcggagcatggacttcaagagcaactccgccgtggcctggtccaacaagtccgatttcgcctgcgccaacgccttcaacaacagcattatccccgaggacacattcttcccaagccccgagagcagcgactccaccgaccacgtgaagcccaaagagacagagaacaccaagcagcccagcaagagctgccacaagcccaaggccatcgtgcacaccgagaaagtgaacatgatgagcctgaccgtgctgggcctgcggatgctgttcgccaaaaccgtggccgtgaacttcctgctgaccgccaagctgttcttcctc

SEQ ID NO: 7185 - DNA, 2172 bp, synthetic construct
  source 1..2172: mol_type = other DNA
atggccttaccagtgaccgccttgctcctgccgctggccttgctgctccacgccgccaggccggacatcgtgctgacacagtctcccgccacactgtcactgagccctggcgatagagccacactgagctgtagagccagcgagagcgtgacaatcctgggcagccacctgatctactggtatcagcagaagcccggacaggcccctagactgctgattcagctcgccagcaatgtgcagacaggcatccctgccagattttccggcagcggcagcagaaccgatttcaccctgaccataagcagcctggaacctgaggacttcgccgtgtactactgcctccagagccggacaatccccagaacctttggacagggcaccaagctggaaatcaagagactcgaggacctgaagaacgtgttcccacctgaggtggccgtgttcgagcctagcgaggccgagatcagccacacccagaaagccaccctcgtgtgcctggctaccggcttctaccccgaccatgtggaactgtcttggtgggtcaacggcaaagaggtgcacagcggcgtgtgtaccgacccccagccactgaaagaacagcccgccctgaacgacagccggtactgcctgagcagcagactgagagtgtccgccaccttctggcagaacccccggaaccacttcagatgccaggtgcagttctacggcctgagcgagaacgacgagtggacccaggacagagccaagcccgtgacccagatcgtgtctgccgaagcctggggcagagccgatgatgtgattaagatccactggcaggaaaagaagtccaacaccatcctgggcagccaggaaggcaacaccatgaagaccaacgacacctacatgaagttcagctggctgaccgtgcccgagaagtccctggacaaagaacacagatgcatcgtgcggcacgaaaacaacaagaacggcgtggaccaggaaatcatcttcccacccatcaagaccgatgtgattacaatggaccccaaggacaactgctccaaggacgccaacgataccctgctgctccagctgaccaacaccagcgcctactacatgtacttgttgctgctgctgaagtccgtggtgtacttcgccatcatcacatgctgcctgctgcggagaaccgccttctgctgcaacggcgagaagtctagggccaagcgatctggatctggagcaacaaacttctcactactcaaacaagcaggtgacgtggaggagaatcccgggcctactagtatggactggatttggcgcatccttttccttgtcggcgctgctaccggcgcgcattccttcgaacaggttcagctggtgcagtctggcagcgagctgaagaaacctggcgagagcgtgaagatcagctgcaaggccagcggctacaccttcacacactacagcatgaactgggtccgacaggcccctggacaaggactggaatggatgggcagaatcaacaccgagacaggcgagcccctgtacgccgacgatttcaagggcagattcgtgttcagcctggacaccagcgccagcacagcctatctccagatcagctctctgaaggccgaggacaccgccgtgtactactgctccaacgactacctgtactccctggactattggggccagggcacactggtcacagtgtctagtacgcgtatccagaaccctgatcctgccgtgtaccagctgcgggatagcaagagcagcgacaagagcgtgtgtctgttcaccgacttcgacagccagaccaacgtgtcccagagcaaggactccgacgtgtacatcaccgataagtgcgtgctggacatgcggagcatggacttcaagagcaactccgccgtggcctggtccaacaagtccgatttcgcctgcgccaacgccttcaacaacagcattatccccgaggacacattcttcccaagccccgagagcagcgactccaccgaccacgtgaagcccaaagagacagagaacaccaagcagcccagcaagagctgccacaagcccaaggccatcgtgcacaccgagaaagtgaacatgatgagcctgaccgtgctgggcctgcggatgctgttcgccaaaaccgtggccgtgaacttcctgctgaccgccaagctgttcttcctc

SEQ ID NO: 7186 - DNA, 2175 bp, synthetic construct
  source 1..2175: mol_type = other DNA
atggccttaccagtgaccgccttgctcctgccgctggccttgctgctccacgccgccaggccggacatccagctgactcagagccctagctttctgagcgccagcgtgggcgacagagtgaccattacatgtagagccagccagggcatcagcaccgacctgaactggtatcagcagaagcctggcaaggcccctaagctgctgatctacgccgccagcaatctggaaagcggcgtgccaagcagattttccggctctggcagcggcaccgagttcaccctgacaatatctagcctccagcctgaggacttcgccacctactactgccagcagagctacaactggccctacacctttggcggaggcaccaaggtggaaatcaagagactcgaggacctgaagaacgtgttcccacctgaggtggccgtgttcgagcctagcgaggccgagatcagccacacccagaaagccaccctcgtgtgcctggctaccggcttctaccccgaccatgtggaactgtcttggtgggtcaacggcaaagaggtgcacagcggcgtgtgtaccgacccccagccactgaaagaacagcccgccctgaacgacagccggtactgcctgagcagcagactgagagtgtccgccaccttctggcagaacccccggaaccacttcagatgccaggtgcagttctacggcctgagcgagaacgacgagtggacccaggacagagccaagcccgtgacccagatcgtgtctgccgaagcctggggcagagccgatgatgtgattaagatccactggcaggaaaagaagtccaacaccatcctgggcagccaggaaggcaacaccatgaagaccaacgacacctacatgaagttcagctggctgaccgtgcccgagaagtccctggacaaagaacacagatgcatcgtgcggcacgaaaacaacaagaacggcgtggaccaggaaatcatcttcccacccatcaagaccgatgtgattacaatggaccccaaggacaactgctccaaggacgccaacgataccctgctgctccagctgaccaacaccagcgcctactacatgtacttgttgctgctgctgaagtccgtggtgtacttcgccatcatcacatgctgcctgctgcggagaaccgccttctgctgcaacggcgagaagtctagggccaagcgatctggatctggagcaacaaacttctcactactcaaacaagcaggtgacgtggaggagaatcccgggcctactagtatggactggatttggcgcatccttttccttgtcggcgctgctaccggcgcgcattccttcgaagaagttcagctggttgaatcaggcggaggactcgtgaaacctggcggctctctgagactgtcttgtgccgccagcggcttcaccttcagcaacttcgagatgaactgggtccgacaggccccaggcaaaggactggaatgggtgtccggcatcagctccaatggccggtacatcaactacgccgacagcgtgaagggcagattcaccatcagccgggacaacgccaagaacagcctgtacctccagatgaactccctgagagccgaggacaccgccgtgtactattgtgccagagtggtggacttcgaccaggactacaacggcttcgactattggggccagggcaccctggttaccgttagctctacgcgtatccagaaccctgatcctgccgtgtaccagctgcgggatagcaagagcagcgacaagagcgtgtgtctgttcaccgacttcgacagccagaccaacgtgtcccagagcaaggactccgacgtgtacatcaccgataagtgcgtgctggacatgcggagcatggacttcaagagcaactccgccgtggcctggtccaacaagtccgatttcgcctgcgccaacgccttcaacaacagcattatccccgaggacacattcttcccaagccccgagagcagcgactccaccgaccacgtgaagcccaaagagacagagaacaccaagcagcccagcaagagctgccacaagcccaaggccatcgtgcacaccgagaaagtgaacatgatgagcctgaccgtgctgggcctgcggatgctgttcgccaaaaccgtggccgtgaacttcctgctgaccgccaagctgttcttcctc

SEQ ID NO: 7187 - DNA, 2169 bp, synthetic construct
  source 1..2169: mol_type = other DNA
atggccttaccagtgaccgccttgctcctgccgctggccttgctgctccacgccgccaggccggacatccaactgactcagagccccagctttctgagcgcctctgtgggcgacagagtgaccatcacatgtagtctcagcctgggcatcagcacatggcgggattggtttccgccgaggcttggcaggggccttgagccgctgacctacgccgccagcacactgcaaagcggagtgcctagcagattttccggcagcggctctggcaccgagttcaccctgacaatatccagcctccagcctgaggacttcgccacctactactgccagcagctcaacagctaccctctgacctttggcggaggcaccaaggtggaaatcaagagactcgaggacctgaagaacgtgttcccacctgaggtggccgtgttcgagcctagcgaggccgagatcagccacacccagaaagccaccctcgtgtgcctggctaccggcttctaccccgaccatgtggaactgtcttggtgggtcaacggcaaagaggtgcacagcggcgtgtgtaccgacccccagccactgaaagaacagcccgccctgaacgacagccggtactgcctgagcagcagactgagagtgtccgccaccttctggcagaacccccggaaccacttcagatgccaggtgcagttctacggcctgagcgagaacgacgagtggacccaggacagagccaagcccgtgacccagatcgtgtctgccgaagcctggggcagagccgatgatgtgattaagatccactggcaggaaaagaagtccaacaccatcctgggcagccaggaaggcaacaccatgaagaccaacgacacctacatgaagttcagctggctgaccgtgcccgagaagtccctggacaaagaacacagatgcatcgtgcggcacgaaaacaacaagaacggcgtggaccaggaaatcatcttcccacccatcaagaccgatgtgattacaatggaccccaaggacaactgctccaaggacgccaacgataccctgctgctccagctgaccaacaccagcgcctactacatgtacttgttgctgctgctgaagtccgtggtgtacttcgccatcatcacatgctgcctgctgcggagaaccgccttctgctgcaacggcgagaagtctagggccaagcgatctggatctggagcaacaaacttctcactactcaaacaagcaggtgacgtggaggagaatcccgggcctactagtatggactggatttggcgcatccttttccttgtcggcgctgctaccggcgcgcattccttcgaagaagttcaactggttgagtctggtggcggcctggttaagcctggcggatctctgagactgagctgtgccgccagcggcttcacctttagcacatacggcatgagctgggtccgacaggcccctggaaaaggacttgagtgggtcgcctacatcaacaacggctccggctacatctactacgccgacagcgtgaagggcagattcaccatcagccgggacaacgccaagaacagcctgtacctccagatgaactccctgagagccgaggacaccgccgtgtactattgtgccagaggacagtggtggagcggcggagactttgattattggggccagggcaccctggtcaccgtttcttctacgcgtatccagaaccctgatcctgccgtgtaccagctgcgggatagcaagagcagcgacaagagcgtgtgtctgttcaccgacttcgacagccagaccaacgtgtcccagagcaaggactccgacgtgtacatcaccgataagtgcgtgctggacatgcggagcatggacttcaagagcaactccgccgtggcctggtccaacaagtccgatttcgcctgcgccaacgccttcaacaacagcattatccccgaggacacattcttcccaagccccgagagcagcgactccaccgaccacgtgaagcccaaagagacagagaacaccaagcagcccagcaagagctgccacaagcccaaggccatcgtgcacaccgagaaagtgaacatgatgagcctgaccgtgctgggcctgcggatgctgttcgccaaaaccgtggccgtgaacttcctgctgaccgccaagctgttcttcctc

SEQ ID NO: 7188 - DNA, 2172 bp, synthetic construct
  source 1..2172: mol_type = other DNA
atggccttaccagtgaccgccttgctcctgccgctggccttgctgctccacgccgccaggccggagatcgtgctgacacagtctcccgccacactgtcactgtctccaggcgaaagagccacactgagctgtagcgccagcagcagcgtgtcctacatgtactggtatcagcagaagcccggacaggcccctagactgctgatctacagaaccagcaacctggcctctggcatccccgccagattttctggctctggcagcggcaccgatttcaccctgaccataagcagcctggaacctgaggacttcgccgtgtactactgccagcagtaccacagctaccccaccacctttggacagggcaccaaggtggaaatcaagcggacagttctcgaggacctgaagaacgtgttcccacctgaggtggccgtgttcgagcctagcgaggccgagatcagccacacccagaaagccaccctcgtgtgcctggctaccggcttctaccccgaccatgtggaactgtcttggtgggtcaacggcaaagaggtgcacagcggcgtgtgtaccgacccccagccactgaaagaacagcccgccctgaacgacagccggtactgcctgagcagcagactgagagtgtccgccaccttctggcagaacccccggaaccacttcagatgccaggtgcagttctacggcctgagcgagaacgacgagtggacccaggacagagccaagcccgtgacccagatcgtgtctgccgaagcctggggcagagccgatgatgtgattaagatccactggcaggaaaagaagtccaacaccatcctgggcagccaggaaggcaacaccatgaagaccaacgacacctacatgaagttcagctggctgaccgtgcccgagaagtccctggacaaagaacacagatgcatcgtgcggcacgaaaacaacaagaacggcgtggaccaggaaatcatcttcccacccatcaagaccgatgtgattacaatggaccccaaggacaactgctccaaggacgccaacgataccctgctgctccagctgaccaacaccagcgcctactacatgtacttgttgctgctgctgaagtccgtggtgtacttcgccatcatcacatgctgcctgctgcggagaaccgccttctgctgcaacggcgagaagtctagggccaagcgatctggatctggagcaacaaacttctcactactcaaacaagcaggtgacgtggaggagaatcccgggcctactagtatggactggatttggcgcatccttttccttgtcggcgctgctaccggcgcgcattccttcgaagaagtgcagctggttgaatcaggtggcggcctggttcaacctggcggatctctgagactgtcttgtgccgccagcggcttcagcttcaacacctacgccatgaactgggtccgacaggctcctggcaaaggactggaatgggtgtcccacatcagaagcaagagcaacaacttcgccacctactacgccgacagcgtgaaggacagattcaccatcagccgggacaacgccaagaacagcctgtacctccagatgaactccctgagagccgaggacaccgccgtgtattattgcgccagacaaggcggcgacttccctatggattattggggccagggcaccctggtcaccgtttcttctacgcgtatccagaaccctgatcctgccgtgtaccagctgcgggatagcaagagcagcgacaagagcgtgtgtctgttcaccgacttcgacagccagaccaacgtgtcccagagcaaggactccgacgtgtacatcaccgataagtgcgtgctggacatgcggagcatggacttcaagagcaactccgccgtggcctggtccaacaagtccgatttcgcctgcgccaacgccttcaacaacagcattatccccgaggacacattcttcccaagccccgagagcagcgactccaccgaccacgtgaagcccaaagagacagagaacaccaagcagcccagcaagagctgccacaagcccaaggccatcgtgcacaccgagaaagtgaacatgatgagcctgaccgtgctgggcctgcggatgctgttcgccaaaaccgtggccgtgaacttcctgctgaccgccaagctgttcttcctc

SEQ ID NO: 7189 - DNA, 2160 bp, synthetic construct
  source 1..2160: mol_type = other DNA
atggccttaccagtgaccgccttgctcctgccgctggccttgctgctccacgccgccaggccggacgtggtcatgacacagagcccttctagcctgtctgccagcgtgggcgacagagtgaccatcacctgtaaagccagcgaggacatctacatccggctggcctggtatcagcagaagcctggaaaggcccctaagctgctgatctacgccgccacctctctggaaacaggcgtgccaagcagattttccggcagcggctctggcaccgatttcaccctgacaatatccagcctccagcctgaggacttcgccacctactactgccagcagtattggaccacaccttggacctttggcggaggcaccaaggtggaaatcaaactcgaggacctgaagaacgtgttcccacctgaggtggccgtgttcgagcctagcgaggccgagatcagccacacccagaaagccaccctcgtgtgcctggctaccggcttctaccccgaccatgtggaactgtcttggtgggtcaacggcaaagaggtgcacagcggcgtgtgtaccgacccccagccactgaaagaacagcccgccctgaacgacagccggtactgcctgagcagcagactgagagtgtccgccaccttctggcagaacccccggaaccacttcagatgccaggtgcagttctacggcctgagcgagaacgacgagtggacccaggacagagccaagcccgtgacccagatcgtgtctgccgaagcctggggcagagccgatgatgtgattaagatccactggcaggaaaagaagtccaacaccatcctgggcagccaggaaggcaacaccatgaagaccaacgacacctacatgaagttcagctggctgaccgtgcccgagaagtccctggacaaagaacacagatgcatcgtgcggcacgaaaacaacaagaacggcgtggaccaggaaatcatcttcccacccatcaagaccgatgtgattacaatggaccccaaggacaactgctccaaggacgccaacgataccctgctgctccagctgaccaacaccagcgcctactacatgtacttgttgctgctgctgaagtccgtggtgtacttcgccatcatcacatgctgcctgctgcggagaaccgccttctgctgcaacggcgagaagtctagggccaagcgatctggatctggagcaacaaacttctcactactcaaacaagcaggtgacgtggaggagaatcccgggcctactagtatggactggatttggcgcatccttttccttgtcggcgctgctaccggcgcgcattccttcgaacaggtgcagctccaagagtctggccctggactggtcaagcctagccagacactgagcctgacctgtaccgtgtccggctacagcatcaccatcgactacacctggaactggatcagacagcctcctggcaaaggactggaatggatcggctacatcacctacagcggcagcaccgactacaaccccagcctgaaaagccgggtgctgatctccgtggacaccagcaagaatcaggtgtccctgaagctgagcagcgtgacagccgctgataccgccgtgtactactgtgccagactgggcagaagatacgccctggattattggggccagggcaccaccgtgacagtgtcatctacgcgtatccagaaccctgatcctgccgtgtaccagctgcgggatagcaagagcagcgacaagagcgtgtgtctgttcaccgacttcgacagccagaccaacgtgtcccagagcaaggactccgacgtgtacatcaccgataagtgcgtgctggacatgcggagcatggacttcaagagcaactccgccgtggcctggtccaacaagtccgatttcgcctgcgccaacgccttcaacaacagcattatccccgaggacacattcttcccaagccccgagagcagcgactccaccgaccacgtgaagcccaaagagacagagaacaccaagcagcccagcaagagctgccacaagcccaaggccatcgtgcacaccgagaaagtgaacatgatgagcctgaccgtgctgggcctgcggatgctgttcgccaaaaccgtggccgtgaacttcctgctgaccgccaagctgttcttcctc

SEQ ID NO: 7190 - DNA, 2175 bp, synthetic construct
  source 1..2175: mol_type = other DNA
atggccttaccagtgaccgccttgctcctgccgctggccttgctgctccacgccgccaggccggacatccagatgacccagaccacaagcagcctgtctgccagcctgggcgacagagtgaccatctcttgtagagccagccaggacatcagcaactacctgaactggtatcagcagaaacccgacggcaccgtgaagctgctgatctactacaccagcatcctgcacagcggcgtgcccagcagattttctggctctggcagcggcaccgactacagcctgaccatcagcaatctggaacaagaggacttcgctacctacttctgccagcaaggcaacaccctgccttggacatttggcggaggcaccaagctggaaatcaaagctctcgaggacctgaagaacgtgttcccacctgaggtggccgtgttcgagcctagcgaggccgagatcagccacacccagaaagccaccctcgtgtgcctggctaccggcttctaccccgaccatgtggaactgtcttggtgggtcaacggcaaagaggtgcacagcggcgtgtgtaccgacccccagccactgaaagaacagcccgccctgaacgacagccggtactgcctgagcagcagactgagagtgtccgccaccttctggcagaacccccggaaccacttcagatgccaggtgcagttctacggcctgagcgagaacgacgagtggacccaggacagagccaagcccgtgacccagatcgtgtctgccgaagcctggggcagagccgatgatgtgattaagatccactggcaggaaaagaagtccaacaccatcctgggcagccaggaaggcaacaccatgaagaccaacgacacctacatgaagttcagctggctgaccgtgcccgagaagtccctggacaaagaacacagatgcatcgtgcggcacgaaaacaacaagaacggcgtggaccaggaaatcatcttcccacccatcaagaccgatgtgattacaatggaccccaaggacaactgctccaaggacgccaacgataccctgctgctccagctgaccaacaccagcgcctactacatgtacttgttgctgctgctgaagtccgtggtgtacttcgccatcatcacatgctgcctgctgcggagaaccgccttctgctgcaacggcgagaagtctagggccaagcgatctggatctggagcaacaaacttctcactactcaaacaagcaggtgacgtggaggagaatcccgggcctactagtatggactggatttggcgcatccttttccttgtcggcgctgctaccggcgcgcattccttcgaagaagtgcaactggttgaatctggcggcggactggttaagcctggcggatctctgaagctgagctgtgccgcctctggcttcgccttcagcatctacgatatgagctgggtccgacagacccctgagaagagactggaatgggtcgcctacatctctagcggcggagggacctactatcccgacacagtgaagggcagattcaccatctccagagacaacgccaagaacaccctgtacctccagatgagcagcctgaagtccgaggacaccgccatgtactactgcgccagacacagcggctatggcacacattggggagtgctgtttgcctactggggccagggaacactggtcacagtttctgctacgcgtatccagaaccctgatcctgccgtgtaccagctgcgggatagcaagagcagcgacaagagcgtgtgtctgttcaccgacttcgacagccagaccaacgtgtcccagagcaaggactccgacgtgtacatcaccgataagtgcgtgctggacatgcggagcatggacttcaagagcaactccgccgtggcctggtccaacaagtccgatttcgcctgcgccaacgccttcaacaacagcattatccccgaggacacattcttcccaagccccgagagcagcgactccaccgaccacgtgaagcccaaagagacagagaacaccaagcagcccagcaagagctgccacaagcccaaggccatcgtgcacaccgagaaagtgaacatgatgagcctgaccgtgctgggcctgcggatgctgttcgccaaaaccgtggccgtgaacttcctgctgaccgccaagctgttcttcctc

SEQ ID NO: 7191 - DNA, 2205 bp, synthetic construct
  source 1..2205: mol_type = other DNA
atggccttaccagtgaccgccttgctcctgccgctggccttgctgctccacgccgccaggccggacatcgtgatgacacagagccctgatagcctggccgtgtctctgggagagagagccaccatcaactgcaagagcagccagagcctgctgtacagaagcaaccagaagaactacctggcctggtatcagcagaagcccggccagcctcctaagctgctgatctactgggccagcaccagagaaagcggcgtgcccgatagattttctggctctggcagcggcaccgacttcaccctgacaatttctagcctgcaagccgaggacgtggccgtgtactactgccagcagtattacaactaccccagaaccttcggccagggcaccaaggtggaaatcaagagaacagttctcgaggacctgaagaacgtgttcccacctgaggtggccgtgttcgagcctagcgaggccgagatcagccacacccagaaagccaccctcgtgtgcctggctaccggcttctaccccgaccatgtggaactgtcttggtgggtcaacggcaaagaggtgcacagcggcgtgtgtaccgacccccagccactgaaagaacagcccgccctgaacgacagccggtactgcctgagcagcagactgagagtgtccgccaccttctggcagaacccccggaaccacttcagatgccaggtgcagttctacggcctgagcgagaacgacgagtggacccaggacagagccaagcccgtgacccagatcgtgtctgccgaagcctggggcagagccgatgatgtgattaagatccactggcaggaaaagaagtccaacaccatcctgggcagccaggaaggcaacaccatgaagaccaacgacacctacatgaagttcagctggctgaccgtgcccgagaagtccctggacaaagaacacagatgcatcgtgcggcacgaaaacaacaagaacggcgtggaccaggaaatcatcttcccacccatcaagaccgatgtgattacaatggaccccaaggacaactgctccaaggacgccaacgataccctgctgctccagctgaccaacaccagcgcctactacatgtacttgttgctgctgctgaagtccgtggtgtacttcgccatcatcacatgctgcctgctgcggagaaccgccttctgctgcaacggcgagaagtctagggccaagcgatctggatctggagcaacaaacttctcactactcaaacaagcaggtgacgtggaggagaatcccgggcctactagtatggactggatttggcgcatccttttccttgtcggcgctgctaccggcgcgcattccttcgaagaagttcagctgcttgaatcaggcggcggactggttcaacctggcggatctctgagactgagctgtgccgccagcggctacagcatcacaagcgactatgcctggaactgggtccgacaggcccctggcaaaggactggaatgggtgtcctacatcagcaacagcggcagcaccagctacaaccccagcctgaagtcccggttcaccatcagcagagacaacagcaagaacaccctgtacctccagatgaacagcctgagagctgaggacaccgccgtgtattattgcgccaaagagcggaactacgactacgacgattactactacgctatggactactggggccagggaaccctggtcacagtctcttctacgcgtatccagaaccctgatcctgccgtgtaccagctgcgggatagcaagagcagcgacaagagcgtgtgtctgttcaccgacttcgacagccagaccaacgtgtcccagagcaaggactccgacgtgtacatcaccgataagtgcgtgctggacatgcggagcatggacttcaagagcaactccgccgtggcctggtccaacaagtccgatttcgcctgcgccaacgccttcaacaacagcattatccccgaggacacattcttcccaagccccgagagcagcgactccaccgaccacgtgaagcccaaagagacagagaacaccaagcagcccagcaagagctgccacaagcccaaggccatcgtgcacaccgagaaagtgaacatgatgagcctgaccgtgctgggcctgcggatgctgttcgccaaaaccgtggccgtgaacttcctgctgaccgccaagctgttcttcctc

SEQ ID NO: 7192 - DNA, 2184 bp, synthetic construct
  source 1..2184: mol_type = other DNA
atggccttaccagtgaccgccttgctcctgccgctggccttgctgctccacgccgccaggccggacgtggtcatgacacagagccctctgagcctgcctgtgacacttggacagcctgccagcatcagctgtagaagcagccagagcctgctgcacagcagcggcaatacctacctggaatggtatcagcagaggcccggacagagccccagacctctgatctacaagatcagcacccggttcagcggcgtgcccgatagattttctggctctggcagcggcaccgacttcaccctgaagattagcagagtggaagccgaggacgtgggcgtgtactactgcttccaaggcagccacgtgccatacacctttggcggcggaacaaaggtggaaatcaagagactcgaggacctgaagaacgtgttcccacctgaggtggccgtgttcgagcctagcgaggccgagatcagccacacccagaaagccaccctcgtgtgcctggctaccggcttctaccccgaccatgtggaactgtcttggtgggtcaacggcaaagaggtgcacagcggcgtgtgtaccgacccccagccactgaaagaacagcccgccctgaacgacagccggtactgcctgagcagcagactgagagtgtccgccaccttctggcagaacccccggaaccacttcagatgccaggtgcagttctacggcctgagcgagaacgacgagtggacccaggacagagccaagcccgtgacccagatcgtgtctgccgaagcctggggcagagccgatgatgtgattaagatccactggcaggaaaagaagtccaacaccatcctgggcagccaggaaggcaacaccatgaagaccaacgacacctacatgaagttcagctggctgaccgtgcccgagaagtccctggacaaagaacacagatgcatcgtgcggcacgaaaacaacaagaacggcgtggaccaggaaatcatcttcccacccatcaagaccgatgtgattacaatggaccccaaggacaactgctccaaggacgccaacgataccctgctgctccagctgaccaacaccagcgcctactacatgtacttgttgctgctgctgaagtccgtggtgtacttcgccatcatcacatgctgcctgctgcggagaaccgccttctgctgcaacggcgagaagtctagggccaagcgatctggatctggagcaacaaacttctcactactcaaacaagcaggtgacgtggaggagaatcccgggcctactagtatggactggatttggcgcatccttttccttgtcggcgctgctaccggcgcgcattccttcgaacaagttcagctggttcagagcggagccgaagtgaagaaacctggggcctctgtgaaggtgtcctgcaaagcctctggcctgaccatcgaggactactacatgcactgggtccgacaggcccctggacaaggacttgaatggatgggctggatcgaccccgagaacggcgatacagagtacggccctaagttccagggcagagtgaccatgaccagagacaccagcatcaacaccgcctacatggaactgagccggctgagatccgatgacaccgccgtgtactattgcgccgtgcacaatgcccactacggcacttggtttgcctattggggccagggcacactggtcaccgttagctctacgcgtatccagaaccctgatcctgccgtgtaccagctgcgggatagcaagagcagcgacaagagcgtgtgtctgttcaccgacttcgacagccagaccaacgtgtcccagagcaaggactccgacgtgtacatcaccgataagtgcgtgctggacatgcggagcatggacttcaagagcaactccgccgtggcctggtccaacaagtccgatttcgcctgcgccaacgccttcaacaacagcattatccccgaggacacattcttcccaagccccgagagcagcgactccaccgaccacgtgaagcccaaagagacagagaacaccaagcagcccagcaagagctgccacaagcccaaggccatcgtgcacaccgagaaagtgaacatgatgagcctgaccgtgctgggcctgcggatgctgttcgccaaaaccgtggccgtgaacttcctgctgaccgccaagctgttcttcctc

SEQ ID NO: 7193 - DNA, 2160 bp, synthetic construct
  source 1..2160: mol_type = other DNA
atggccttaccagtgaccgccttgctcctgccgctggccttgctgctccacgccgccaggccggacatccagatgacacagagccctagcagcctgtctgccagcgtgggagacagagtgaccatcacctgtagagccagcgagaacatctacagcaacctggcctggtatcagcagaagcctggcaaggcccctaagctgctgatctacgccgccaccaatctggctgatggcgtgccaagcagattttccggctctggcagcggcaccgatttcaccctgacaatatccagcctccagcctgaggacttcgccacctactactgccagcacttttggggcacccctacattcggccagggcaccaaggtggaaatcaagagaacagttctcgaggacctgaagaacgtgttcccacctgaggtggccgtgttcgagcctagcgaggccgagatcagccacacccagaaagccaccctcgtgtgcctggctaccggcttctaccccgaccatgtggaactgtcttggtgggtcaacggcaaagaggtgcacagcggcgtgtgtaccgacccccagccactgaaagaacagcccgccctgaacgacagccggtactgcctgagcagcagactgagagtgtccgccaccttctggcagaacccccggaaccacttcagatgccaggtgcagttctacggcctgagcgagaacgacgagtggacccaggacagagccaagcccgtgacccagatcgtgtctgccgaagcctggggcagagccgatgatgtgattaagatccactggcaggaaaagaagtccaacaccatcctgggcagccaggaaggcaacaccatgaagaccaacgacacctacatgaagttcagctggctgaccgtgcccgagaagtccctggacaaagaacacagatgcatcgtgcggcacgaaaacaacaagaacggcgtggaccaggaaatcatcttcccacccatcaagaccgatgtgattacaatggaccccaaggacaactgctccaaggacgccaacgataccctgctgctccagctgaccaacaccagcgcctactacatgtacttgttgctgctgctgaagtccgtggtgtacttcgccatcatcacatgctgcctgctgcggagaaccgccttctgctgcaacggcgagaagtctagggccaagcgatctggatctggagcaacaaacttctcactactcaaacaagcaggtgacgtggaggagaatcccgggcctactagtatggactggatttggcgcatccttttccttgtcggcgctgctaccggcgcgcattccttcgaagaagtgcagctggttgaatcaggtggcggcctggttcaacctggcggatctctgagactgagctgtgccgcctctggcttcagcctgacaaattacggcgtgcactgggtccgacaggcccctggaaaaggactggaatgggtgtccgtgatttggagcggcggcagcaccgattacaacgccgccttcatcagccggttcaccatcagcgccgacaccagcaagaataccgcctacctccagatgaactccctgagagccgaggacaccgccgtgtactattgcgccagagaactgatccacgctatggacaactggggccagggaaccctggtcacagtctcttctacgcgtatccagaaccctgatcctgccgtgtaccagctgcgggatagcaagagcagcgacaagagcgtgtgtctgttcaccgacttcgacagccagaccaacgtgtcccagagcaaggactccgacgtgtacatcaccgataagtgcgtgctggacatgcggagcatggacttcaagagcaactccgccgtggcctggtccaacaagtccgatttcgcctgcgccaacgccttcaacaacagcattatccccgaggacacattcttcccaagccccgagagcagcgactccaccgaccacgtgaagcccaaagagacagagaacaccaagcagcccagcaagagctgccacaagcccaaggccatcgtgcacaccgagaaagtgaacatgatgagcctgaccgtgctgggcctgcggatgctgttcgccaaaaccgtggccgtgaacttcctgctgaccgccaagctgttcttcctc

SEQ ID NO: 7194 - DNA, 2181 bp, synthetic construct
  source 1..2181: mol_type = other DNA
atggccttaccagtgaccgccttgctcctgccgctggccttgctgctccacgccgccaggccggacttcgtgatgacacagagccctctgagcctgcctgtgacacctggcgaacctgccagcatcagctgtagaagcagccagagcatcgtgcacagcaacggcaacacctacctggaatggtatctccagaagcctggacagagcccacagctgctgatctacaaggtgtccaacagattcagcggcgtgcccgacagattttctggcagcggctctggcaccgacttcaccctgaagattagcagagtggaagccgaggacgtgggcgtgtactactgcttccaaggctctcacgtgcccctgacctttggacagggcaccaagctggaaatcaagagactcgaggacctgaagaacgtgttcccacctgaggtggccgtgttcgagcctagcgaggccgagatcagccacacccagaaagccaccctcgtgtgcctggctaccggcttctaccccgaccatgtggaactgtcttggtgggtcaacggcaaagaggtgcacagcggcgtgtgtaccgacccccagccactgaaagaacagcccgccctgaacgacagccggtactgcctgagcagcagactgagagtgtccgccaccttctggcagaacccccggaaccacttcagatgccaggtgcagttctacggcctgagcgagaacgacgagtggacccaggacagagccaagcccgtgacccagatcgtgtctgccgaagcctggggcagagccgatgatgtgattaagatccactggcaggaaaagaagtccaacaccatcctgggcagccaggaaggcaacaccatgaagaccaacgacacctacatgaagttcagctggctgaccgtgcccgagaagtccctggacaaagaacacagatgcatcgtgcggcacgaaaacaacaagaacggcgtggaccaggaaatcatcttcccacccatcaagaccgatgtgattacaatggaccccaaggacaactgctccaaggacgccaacgataccctgctgctccagctgaccaacaccagcgcctactacatgtacttgttgctgctgctgaagtccgtggtgtacttcgccatcatcacatgctgcctgctgcggagaaccgccttctgctgcaacggcgagaagtctagggccaagcgatctggatctggagcaacaaacttctcactactcaaacaagcaggtgacgtggaggagaatcccgggcctactagtatggactggatttggcgcatccttttccttgtcggcgctgctaccggcgcgcattccttcgaagaagtgcagctggttgaaagcggagccgaagtgaagaaacctggggcctctgtgaaggtgtcctgcaaggccagcggctacacctttaccagctactggattcactgggtccgacaggcccctggacaaggacttgagtggatgggcgagaacgacccctccaacggcaggaccaactacaacgagaagttcaagaaccgcgtgaccctgaccgtggacaccagcatctctaccgcctacatggaactgagccggctgagatccgatgacaccgccgtgtactattgcgccagaggacccaactacttttacagcatggactactggggccagggcacaatggtcaccgttagctctacgcgtatccagaaccctgatcctgccgtgtaccagctgcgggatagcaagagcagcgacaagagcgtgtgtctgttcaccgacttcgacagccagaccaacgtgtcccagagcaaggactccgacgtgtacatcaccgataagtgcgtgctggacatgcggagcatggacttcaagagcaactccgccgtggcctggtccaacaagtccgatttcgcctgcgccaacgccttcaacaacagcattatccccgaggacacattcttcccaagccccgagagcagcgactccaccgaccacgtgaagcccaaagagacagagaacaccaagcagcccagcaagagctgccacaagcccaaggccatcgtgcacaccgagaaagtgaacatgatgagcctgaccgtgctgggcctgcggatgctgttcgccaaaaccgtggccgtgaacttcctgctgaccgccaagctgttcttcctc

SEQ ID NO: 7195 - DNA, 2160 bp, synthetic construct
  source 1..2160: mol_type = other DNA
atggccttaccagtgaccgccttgctcctgccgctggccttgctgctccacgccgccaggccggacatccagctgactcagagccctagctttctgagcgccagcgtgggcgacagagtgaccatcacatgtagcgccagatccagcatcagcttcatgtactggtatcagcagaagcccggcaaggcccctaagctgctgatctacgacaccagcaatctggcctctggcgtgcccagcagattttctggaagcggcagcggcaccgagttcaccctgacaatctctagcctggaagccgaggatgccgccacctactattgccagcagtggtccagctatcccctgacatttggacagggcaccaagctggaaatcaaactcgaggacctgaagaacgtgttcccacctgaggtggccgtgttcgagcctagcgaggccgagatcagccacacccagaaagccaccctcgtgtgcctggctaccggcttctaccccgaccatgtggaactgtcttggtgggtcaacggcaaagaggtgcacagcggcgtgtgtaccgacccccagccactgaaagaacagcccgccctgaacgacagccggtactgcctgagcagcagactgagagtgtccgccaccttctggcagaacccccggaaccacttcagatgccaggtgcagttctacggcctgagcgagaacgacgagtggacccaggacagagccaagcccgtgacccagatcgtgtctgccgaagcctggggcagagccgatgatgtgattaagatccactggcaggaaaagaagtccaacaccatcctgggcagccaggaaggcaacaccatgaagaccaacgacacctacatgaagttcagctggctgaccgtgcccgagaagtccctggacaaagaacacagatgcatcgtgcggcacgaaaacaacaagaacggcgtggaccaggaaatcatcttcccacccatcaagaccgatgtgattacaatggaccccaaggacaactgctccaaggacgccaacgataccctgctgctccagctgaccaacaccagcgcctactacatgtacttgttgctgctgctgaagtccgtggtgtacttcgccatcatcacatgctgcctgctgcggagaaccgccttctgctgcaacggcgagaagtctagggccaagcgatctggatctggagcaacaaacttctcactactcaaacaagcaggtgacgtggaggagaatcccgggcctactagtatggactggatttggcgcatccttttccttgtcggcgctgctaccggcgcgcattccttcgaacaggttcagctggttcagtctggggccgaagtgaagaaacctggggcctctgtgaaggtgtcctgcaaggcttccggctacacctttaccggctcttggatgaactgggtccgacaggctcctggacagggactcgaatggatcggcagaatctatcctggcgacggcgagacaaactacaacggcaagttcaaggaccgcgtgacaatcaccgccgacaagagcacaagcaccgcctacatggaactgagcagcctgcggagcgaagataccgccgtgtactactgcgcccggatctacggcaacaacgtgtacttcgatgtgtggggccagggcacaaccgtgacagtctcttctacgcgtatccagaaccctgatcctgccgtgtaccagctgcgggatagcaagagcagcgacaagagcgtgtgtctgttcaccgacttcgacagccagaccaacgtgtcccagagcaaggactccgacgtgtacatcaccgataagtgcgtgctggacatgcggagcatggacttcaagagcaactccgccgtggcctggtccaacaagtccgatttcgcctgcgccaacgccttcaacaacagcattatccccgaggacacattcttcccaagccccgagagcagcgactccaccgaccacgtgaagcccaaagagacagagaacaccaagcagcccagcaagagctgccacaagcccaaggccatcgtgcacaccgagaaagtgaacatgatgagcctgaccgtgctgggcctgcggatgctgttcgccaaaaccgtggccgtgaacttcctgctgaccgccaagctgttcttcctc

SEQ ID NO: 7196 - DNA, 2184 bp, synthetic construct
  source 1..2184: mol_type = other DNA
atggccttaccagtgaccgccttgctcctgccgctggccttgctgctccacgccgccaggccgcagctggtgctgacacagtctccaagcgcctctgccagcctgggatctagcgtgaagctgacctgtacactgagcagcggccacaagaccgacaccatcgactggtatcagcagcagcctggcaaggcccctagatacctgatgaagctggaaggcagcggcagctacaacaaaggctctggcgtgcccgatagattcagcggcagttcttctggcgctgattggtatctgaccatcagcagcctccagagcgaggacgaggccgattactactgcggcacagactaccccggcaactacctgtttggcggcggaacacagctgacagtgcttggcctcgaggacctgaagaacgtgttcccacctgaggtggccgtgttcgagcctagcgaggccgagatcagccacacccagaaagccaccctcgtgtgcctggctaccggcttctaccccgaccatgtggaactgtcttggtgggtcaacggcaaagaggtgcacagcggcgtgtgtaccgacccccagccactgaaagaacagcccgccctgaacgacagccggtactgcctgagcagcagactgagagtgtccgccaccttctggcagaacccccggaaccacttcagatgccaggtgcagttctacggcctgagcgagaacgacgagtggacccaggacagagccaagcccgtgacccagatcgtgtctgccgaagcctggggcagagccgatgatgtgattaagatccactggcaggaaaagaagtccaacaccatcctgggcagccaggaaggcaacaccatgaagaccaacgacacctacatgaagttcagctggctgaccgtgcccgagaagtccctggacaaagaacacagatgcatcgtgcggcacgaaaacaacaagaacggcgtggaccaggaaatcatcttcccacccatcaagaccgatgtgattacaatggaccccaaggacaactgctccaaggacgccaacgataccctgctgctccagctgaccaacaccagcgcctactacatgtacttgttgctgctgctgaagtccgtggtgtacttcgccatcatcacatgctgcctgctgcggagaaccgccttctgctgcaacggcgagaagtctagggccaagcgatctggatctggagcaacaaacttctcactactcaaacaagcaggtgacgtggaggagaatcccgggcctactagtatggactggatttggcgcatccttttccttgtcggcgctgctaccggcgcgcattccttcgaacaagaacagctggttgaaagcggcggaggactggttcaacctggcggttctctgagactgagctgtgccgccagcggcttcaccttcagcgactactacatgagctggatcagacaggccccaggcaaaggactggaatgggtcgccacaatctaccccagcagcggcaagacctactacgccgattctgccaagggcagactgaccatctccagcgacaacgccaaggacagcctgtacctccagatgaacagcctgagagccgaggacaccgccgtgtactactgcaccagagatagctacgccgacgacgccgctctgtttgacatttggggccagggcaccaccgtgaccgtttcttctacgcgtatccagaaccctgatcctgccgtgtaccagctgcgggatagcaagagcagcgacaagagcgtgtgtctgttcaccgacttcgacagccagaccaacgtgtcccagagcaaggactccgacgtgtacatcaccgataagtgcgtgctggacatgcggagcatggacttcaagagcaactccgccgtggcctggtccaacaagtccgatttcgcctgcgccaacgccttcaacaacagcattatccccgaggacacattcttcccaagccccgagagcagcgactccaccgaccacgtgaagcccaaagagacagagaacaccaagcagcccagcaagagctgccacaagcccaaggccatcgtgcacaccgagaaagtgaacatgatgagcctgaccgtgctgggcctgcggatgctgttcgccaaaaccgtggccgtgaacttcctgctgaccgccaagctgttcttcctc

SEQ ID NO: 7197 - DNA, 2160 bp, synthetic construct; identical to SEQ ID NO: 7193
  source 1..2160: mol_type = other DNA

SEQ ID NO: 7198 - DNA, 2181 bp, synthetic construct; identical to SEQ ID NO: 7194
  source 1..2181: mol_type = other DNA

SEQ ID NO: 7199 - DNA, 2160 bp, synthetic construct; identical to SEQ ID NO: 7195
  source 1..2160: mol_type = other DNA

SEQ ID NO: 7200 - DNA, 2184 bp, synthetic construct; identical to SEQ ID NO: 7196
  source 1..2184: mol_type = other DNA

SEQ ID NO: 7201 - DNA, 2181 bp, synthetic construct
  source 1..2181: mol_type = other DNA
atggccttaccagtgaccgccttgctcctgccgctggccttgctgctccacgccgccaggccggatatccagctcactcaaagcccctctagtctctctgcctcagtgggggatcgggtcagttttacttgtcaagcttcacaggatatcaacaacttccttaattggtatcagcagaagccaggaaaagcacccaagctgctcatctatgatgcctcaaatttggagacgggtgttcccagtcgattctctgggtcagggtccgggaccgactttacgtttacgatctcctctctgcagcccgaagacatcgccacatactattgtcaacagtacggcaacttgcctttcacatttgggggcgggactaaggttgaaatcaagaggctcgaggacctgaagaacgtgttcccacctgaggtggccgtgttcgagcctagcgaggccgagatcagccacacccagaaagccaccctcgtgtgcctggctaccggcttctaccccgaccatgtggaactgtcttggtgggtcaacggcaaagaggtgcacagcggcgtgtgtaccgacccccagccactgaaagaacagcccgccctgaacgacagccggtactgcctgagcagcagactgagagtgtccgccaccttctggcagaacccccggaaccacttcagatgccaggtgcagttctacggcctgagcgagaacgacgagtggacccaggacagagccaagcccgtgacccagatcgtgtctgccgaagcctggggcagagccgatgatgtgattaagatccactggcaggaaaagaagtccaacaccatcctgggcagccaggaaggcaacaccatgaagaccaacgacacctacatgaagttcagctggctgaccgtgcccgagaagtccctggacaaagaacacagatgcatcgtgcggcacgaaaacaacaagaacggcgtggaccaggaaatcatcttcccacccatcaagaccgatgtgattacaatggaccccaaggacaactgctccaaggacgccaacgataccctgctgctccagctgaccaacaccagcgcctactacatgtacttgttgctgctgctgaagtccgtggtgtacttcgccatcatcacatgctgcctgctgcggagaaccgccttctgctgcaacggcgagaagtctagggccaagcgatctggatctggagcaacaaacttctcactactcaaacaagcaggtgacgtggaggagaatcccgggcctactagtatggactggatttggcgcatccttttccttgtcggcgctgctaccggcgcgcattccttcgaacaggtacagctgcaggaatctgggcccggacttgtcaagccaagtcagacactttctcttacatgtaccgtgagcggcggaagtataagcagtggaggcttttactggtcttggatacggcagcacccaggcaaaggcttggagtggattggatacattcatcattcaggatctacacactataatccatcccttaagtcccgggtcaccattagcattgatacgtctaagaatctgttcagtctcaggctgtcctccgtcactgctgccgacacagccgtgtactactgcgcctccttggtttactgcggaggcgactgttatagcggctttgattattgggggcaggggaccctcgtaaccgtgagctctacgcgtatccagaaccctgatcctgccgtgtaccagctgcgggatagcaagagcagcgacaagagcgtgtgtctgttcaccgacttcgacagccagaccaacgtgtcccagagcaaggactccgacgtgtacatcaccgataagtgcgtgctggacatgcggagcatggacttcaagagcaactccgccgtggcctggtccaacaagtccgatttcgcctgcgccaacgccttcaacaacagcattatccccgaggacacattcttcccaagccccgagagcagcgactccaccgaccacgtgaagcccaaagagacagagaacaccaagcagcccagcaagagctgccacaagcccaaggccatcgtgcacaccgagaaagtgaacatgatgagcctgaccgtgctgggcctgcggatgctgttcgccaaaaccgtggccgtgaacttcctgctgaccgccaagctgttcttcctc

SEQ ID NO: 7202 - DNA, 2169 bp, synthetic construct
  source 1..2169: mol_type = other DNA
atggccttaccagtgaccgccttgctcctgccgctggccttgctgctccacgccgccaggccggacattcagatgacacagagccctagcagcctgagcgcctctgtgggagacagagtgaccatcacatgcaagagcagccagagcgtgctgtactccagcaatcagaagaactacctggcctggttccagcagaagcctggcaaggctcctaagctgctgatctactgggccagcaccagagaaagcggcgtgccaagcagattttctggcagcggctctggcaccgacttcaccctgacaatatccagcctccagcctgaggacttcgccacctacttttgccaccagtacctgagcagctacacattcggacagggcaccaaggtggaaatcaagcggctcgaggacctgaagaacgtgttcccacctgaggtggccgtgttcgagcctagcgaggccgagatcagccacacccagaaagccaccctcgtgtgcctggctaccggcttctaccccgaccatgtggaactgtcttggtgggtcaacggcaaagaggtgcacagcggcgtgtgtaccgacccccagccactgaaagaacagcccgccctgaacgacagccggtactgcctgagcagcagactgagagtgtccgccaccttctggcagaacccccggaaccacttcagatgccaggtgcagttctacggcctgagcgagaacgacgagtggacccaggacagagccaagcccgtgacccagatcgtgtctgccgaagcctggggcagagccgatgatgtgattaagatccactggcaggaaaagaagtccaacaccatcctgggcagccaggaaggcaacaccatgaagaccaacgacacctacatgaagttcagctggctgaccgtgcccgagaagtccctggacaaagaacacagatgcatcgtgcggcacgaaaacaacaagaacggcgtggaccaggaaatcatcttcccacccatcaagaccgatgtgattacaatggaccccaaggacaactgctccaaggacgccaacgataccctgctgctccagctgaccaacaccagcgcctactacatgtacttgttgctgctgctgaagtccgtggtgtacttcgccatcatcacatgctgcctgctgcggagaaccgccttctgctgcaacggcgagaagtctagggccaagcgatctggatctggagcaacaaacttctcactactcaaacaagcaggtgacgtggaggagaatcccgggcctactagtatggactggatttggcgcatccttttccttgtcggcgctgctaccggcgcgcattccttcgaagaggtgcagctggttgaatctggcggaggactggttcagcctggcggatctctgagactgtcttgtgccgccagcggctacaccttcaccacctattggatgcactgggtccgacaggcccctggcaaaggacttgagtgggtcggatatatcaggcccagcaccggctacacagagtacaaccagaagttcaaggaccgcttcaccatcagcgccgacaccagcaagaataccgcctacctccagatgaacagcctgagagccgaggacaccgccgtgtactactgtgccagatccagatggctgctggactattggggccagggcacactggttacagtttctacgcgtatccagaaccctgatcctgccgtgtaccagctgcgggatagcaagagcagcgacaagagcgtgtgtctgttcaccgacttcgacagccagaccaacgtgtcccagagcaaggactccgacgtgtacatcaccgataagtgcgtgctggacatgcggagcatggacttcaagagcaactccgccgtggcctggtccaacaagtccgatttcgcctgcgccaacgccttcaacaacagcattatccccgaggacacattcttcccaagccccgagagcagcgactccaccgaccacgtgaagcccaaagagacagagaacaccaagcagcccagcaagagctgccacaagcccaaggccatcgtgcacaccgagaaagtgaacatgatgagcctgaccgtgctgggcctgcggatgctgttcgccaaaaccgtggccgtgaacttcctgctgaccgccaagctgttcttcctc

SEQ ID NO: 7203 - DNA, 2160 bp, synthetic construct
  source 1..2160: mol_type = other DNA
atggccttaccagtgaccgccttgctcctgccgctggccttgctgctccacgccgccaggccggacatccagatgacacagagccctagcagcctgtctgccagcgtgggagacagagtgaccatcacctgtagagccagccaggacatcagcaactacctgaactggtatcagcagaagcccggcaaggcccctaagctgctgatctactacaccagcagactgcacagcggcgtgcccagcagattttctggctctggcagcggcaccgacttcaccctgacaatatctagcctccagcctgaggacttcgccacctactattgccagcagggcaacaccctgccttacacatttggacagggcaccaaggtggaaatcaagagactcgaggacctgaagaacgtgttcccacctgaggtggccgtgttcgagcctagcgaggccgagatcagccacacccagaaagccaccctcgtgtgcctggctaccggcttctaccccgaccatgtggaactgtcttggtgggtcaacggcaaagaggtgcacagcggcgtgtgtaccgacccccagccactgaaagaacagcccgccctgaacgacagccggtactgcctgagcagcagactgagagtgtccgccaccttctggcagaacccccggaaccacttcagatgccaggtgcagttctacggcctgagcgagaacgacgagtggacccaggacagagccaagcccgtgacccagatcgtgtctgccgaagcctggggcagagccgatgatgtgattaagatccactggcaggaaaagaagtccaacaccatcctgggcagccaggaaggcaacaccatgaagaccaacgacacctacatgaagttcagctggctgaccgtgcccgagaagtccctggacaaagaacacagatgcatcgtgcggcacgaaaacaacaagaacggcgtggaccaggaaatcatcttcccacccatcaagaccgatgtgattacaatggaccccaaggacaactgctccaaggacgccaacgataccctgctgctccagctgaccaacaccagcgcctactacatgtacttgttgctgctgctgaagtccgtggtgtacttcgccatcatcacatgctgcctgctgcggagaaccgccttctgctgcaacggcgagaagtctagggccaagcgatctggatctggagcaacaaacttctcactactcaaacaagcaggtgacgtggaggagaatcccgggcctactagtatggactggatttggcgcatccttttccttgtcggcgctgctaccggcgcgcattccttcgaagaagtgcagctggttgaatcaggtggcggcctggttcaacctggcggatctctgagactgagctgtgccgccagcggcttcaccttcagcgactactttatgagctgggtccgacaggcccctggcaaaggacttgaatgggtcgccaccatcagcaatggcggcacctacacttactaccccgacagcgtgaagggcagattcaccatctccagagacaacagcaagaacaccctgtacctccagatgaactccctgagagccgaggacaccgccgtgtactactgcgccagattcgacggctacatcttcgactattggggccagggcaccctggtcacagtctcttctacgcgtatccagaaccctgatcctgccgtgtaccagctgcgggatagcaagagcagcgacaagagcgtgtgtctgttcaccgacttcgacagccagaccaacgtgtcccagagcaaggactccgacgtgtacatcaccgataagtgcgtgctggacatgcggagcatggacttcaagagcaactccgccgtggcctggtccaacaagtccgatttcgcctgcgccaacgccttcaacaacagcattatccccgaggacacattcttcccaagccccgagagcagcgactccaccgaccacgtgaagcccaaagagacagagaacaccaagcagcccagcaagagctgccacaagcccaaggccatcgtgcacaccgagaaagtgaacatgatgagcctgaccgtgctgggcctgcggatgctgttcgccaaaaccgtggccgtgaacttcctgctgaccgccaagctgttcttcctc

SEQ ID NO: 7204 - DNA, 2175 bp, synthetic construct
  source 1..2175: mol_type = other DNA
atggccttaccagtgaccgccttgctcctgccgctggccttgctgctccacgccgccaggccggacatccagatgacacagactacatcctccctgtctgcctctctgggagacagagtcaccatcagttgcagggcaagtcaggacattagtaagtacctgaactggtatcagcagaaaccagatggaactgttaaactcctgatctaccatacatcaagattacactcaggagtcccatcaaggttcagtggcagtgggtctggaacagattattctctcaccattagcaacctggagcaagaagatattgccacttacttttgccaacagggtaatacgcttccgtacacgttcggaggggggaccaagctggagatcacactcgagatccagaaccctgatcctgccgtgtaccagctgcgggatagcaagagcagcgacaagagcgtgtgtctgttcaccgacttcgacagccagaccaacgtgtcccagagcaaggactccgacgtgtacatcaccgataagtgcgtgctggacatgcggagcatggacttcaagagcaactccgccgtggcctggtccaacaagtccgatttcgcctgcgccaacgccttcaacaacagcattatccccgaggacacattcttcccaagccccgagagcagcgactccaccgaccacgtgaagcccaaagagacagagaacaccaagcagcccagcaagagctgccacaagcccaaggccatcgtgcacaccgagaaagtgaacatgatgagcctgaccgtgctgggcctgcggatgctgttcgccaaaaccgtggccgtgaacttcctgctgaccgccaagctgttcttcctccgcgccaagagaagcggatctggcgtgaagcagaccctgaatttcgacctgctgaagctggctggcgacgtggaatccaacccaggccctactagtatggactggatttggcgcatccttttccttgtcggcgctgctaccggcgcgcattccttcgaagtgaaactgcaggagtcaggacctggcctggtggcgccctcacagagcctgtccgtcacatgcactgtctcaggggtctcattacccgactatggtgtaagctggattcgccagcctccacgaaagggtctggagtggctgggagtaatatggggtagtgaaaccacatactataattcagctctcaaatccagactgaccatcatcaaggacaactccaagagccaagttttcttaaaaatgaacagtctgcaaactgatgacacagccatttactactgtgccaaacattattactacggtggtagctatgctatggactactggggccaaggaacctcagtcaccgtctcctcaacgcgtgaggacctgaagaacgtgttcccacctgaggtggccgtgttcgagcctagcgaggccgagatcagccacacccagaaagccaccctcgtgtgcctggctaccggcttctaccccgaccatgtggaactgtcttggtgggtcaacggcaaagaggtgcacagcggcgtgtgtaccgacccccagccactgaaagaacagcccgccctgaacgacagccggtactgcctgagcagcagactgagagtgtccgccaccttctggcagaacccccggaaccacttcagatgccaggtgcagttctacggcctgagcgagaacgacgagtggacccaggacagagccaagcccgtgacccagatcgtgtctgccgaagcctggggcagagccgatgatgtgattaagatccactggcaggaaaagaagtccaacaccatcctgggcagccaggaaggcaacaccatgaagaccaacgacacctacatgaagttcagctggctgaccgtgcccgagaagtccctggacaaagaacacagatgcatcgtgcggcacgaaaacaacaagaacggcgtggaccaggaaatcatcttcccacccatcaagaccgatgtgattacaatggaccccaaggacaactgctccaaggacgccaacgataccctgctgctccagctgaccaacaccagcgcctactacatgtacttgttgctgctgctgaagtccgtggtgtacttcgccatcatcacatgctgcctgctgcggagaaccgccttctgctgcaacggcgagaagtct

SEQ ID NO: 7205 - DNA, 2178 bp, synthetic construct
  source 1..2178: mol_type = other DNA
atggccttaccagtgaccgccttgctcctgccgctggccttgctgctccacgccgccaggccggagatcgtgatgacccagagccctgccaccctgtctctgagccctggcgaaagagccaccctgagctgtagagccagccaggacatcagcaagtacctgaactggtatcagcagaagcccggccaggcccccagactgctgatctaccacaccagcagactgcacagcggcatccccgccagattttctggctctggcagcggcaccgactacaccctgacaatcagcagcctccagcccgaggacttcgccgtgtacttctgtcagcaaggcaacaccctgccctacaccttcggccagggcaccaagctggaaatcaagctcgagatccagaaccctgatcctgccgtgtaccagctgcgggatagcaagagcagcgacaagagcgtgtgtctgttcaccgacttcgacagccagaccaacgtgtcccagagcaaggactccgacgtgtacatcaccgataagtgcgtgctggacatgcggagcatggacttcaagagcaactccgccgtggcctggtccaacaagtccgatttcgcctgcgccaacgccttcaacaacagcattatccccgaggacacattcttcccaagccccgagagcagcgactccaccgaccacgtgaagcccaaagagacagagaacaccaagcagcccagcaagagctgccacaagcccaaggccatcgtgcacaccgagaaagtgaacatgatgagcctgaccgtgctgggcctgcggatgctgttcgccaaaaccgtggccgtgaacttcctgctgaccgccaagctgttcttcctccgcgccaagagaagcggatctggcgtgaagcagaccctgaatttcgacctgctgaagctggctggcgacgtggaatccaacccaggccctactagtatggactggatttggcgcatccttttccttgtcggcgctgctaccggcgcgcattccttcgaacaggtgcaactccaggaatctggccctggcctcgtgaagcccagcgagacactgagcctgacctgtaccgtgtccggcgtgtccctgcctgactatggcgtgtcctggatcagacagccccctggcaagggcctggaatggatcggagtgatttggggcagcgaaaccacctactacaacagctccctgaagtccagagtgaccatctccaaggacaactccaagaaccaggtgtccctgaagctgagcagcgtgacagccgccgacaccgccgtgtattactgcgccaagcactactactacggcggcagctacgctatggactactggggccagggaaccctcgtgaccgtgtctagtacgcgtgaggacctgaagaacgtgttcccacctgaggtggccgtgttcgagcctagcgaggccgagatcagccacacccagaaagccaccctcgtgtgcctggctaccggcttctaccccgaccatgtggaactgtcttggtgggtcaacggcaaagaggtgcacagcggcgtgtgtaccgacccccagccactgaaagaacagcccgccctgaacgacagccggtactgcctgagcagcagactgagagtgtccgccaccttctggcagaacccccggaaccacttcagatgccaggtgcagttctacggcctgagcgagaacgacgagtggacccaggacagagccaagcccgtgacccagatcgtgtctgccgaagcctggggcagagccgatgatgtgattaagatccactggcaggaaaagaagtccaacaccatcctgggcagccaggaaggcaacaccatgaagaccaacgacacctacatgaagttcagctggctgaccgtgcccgagaagtccctggacaaagaacacagatgcatcgtgcggcacgaaaacaacaagaacggcgtggaccaggaaatcatcttcccacccatcaagaccgatgtgattacaatggaccccaaggacaactgctccaaggacgccaacgataccctgctgctccagctgaccaacaccagcgcctactacatgtacttgttgctgctgctgaagtccgtggtgtacttcgccatcatcacatgctgcctgctgcggagaaccgccttctgctgcaacggcgagaagtct

SEQ ID NO: 7206 - DNA, 2181 bp, synthetic construct
  source 1..2181: mol_type = other DNA
atggccttaccagtgaccgccttgctcctgccgctggccttgctgctccacgccgccaggccggacgagatcgtgctgacacagagccccgccaccctgtcactgtctccaggcgaaagagccaccctgagctgtagcgccagcagcagcgtgtcctacatgcactggtatcagcagaagcccggccaggcccccagactgctgatctacgataccagcaagctggcctccggcatccccgccagattttctggcagcggctccggcaccgacttcaccctgacaatcagcagcctggaacccgaggacgtggccgtgtactactgttttcaaggcagcgtgtaccccttcaccttcggccagggcaccaagctggaaatcaagagactcgagatccagaaccctgatcctgccgtgtaccagctgcgggatagcaagagcagcgacaagagcgtgtgtctgttcaccgacttcgacagccagaccaacgtgtcccagagcaaggactccgacgtgtacatcaccgataagtgcgtgctggacatgcggagcatggacttcaagagcaactccgccgtggcctggtccaacaagtccgatttcgcctgcgccaacgccttcaacaacagcattatccccgaggacacattcttcccaagccccgagagcagcgactccaccgaccacgtgaagcccaaagagacagagaacaccaagcagcccagcaagagctgccacaagcccaaggccatcgtgcacaccgagaaagtgaacatgatgagcctgaccgtgctgggcctgcggatgctgttcgccaaaaccgtggccgtgaacttcctgctgaccgccaagctgttcttcctccgcgccaagagaagcggatctggcgtgaagcagaccctgaatttcgacctgctgaagctggctggcgacgtggaatccaacccaggccctactagtatggactggatttggcgcatccttttccttgtcggcgctgctaccggcgcgcattccttcgaacaggtgcagctccaggaatctggccctggcctcgtgaagcctagccagaccctgagcctgacctgtaccgtgtctggcggcagcatcagcacaagcggcatgggcgtgggctggatcagacagcaccctggcaagggcctggaatggatcggccacatttggtgggacgacgacaagcggtacaaccccgccctgaagtccagagtgaccatcagcgtggacaccagcaagaaccagttcagcctgaagctgagcagcgtgacagccgccgataccgccgtgtattattgcgcccggatggaactgtggtcctactacttcgactactggggccagggaaccctcgtgaccgtgtctagtacgcgtgaggacctgaagaacgtgttcccacctgaggtggccgtgttcgagcctagcgaggccgagatcagccacacccagaaagccaccctcgtgtgcctggctaccggcttctaccccgaccatgtggaactgtcttggtgggtcaacggcaaagaggtgcacagcggcgtgtgtaccgacccccagccactgaaagaacagcccgccctgaacgacagccggtactgcctgagcagcagactgagagtgtccgccaccttctggcagaacccccggaaccacttcagatgccaggtgcagttctacggcctgagcgagaacgacgagtggacccaggacagagccaagcccgtgacccagatcgtgtctgccgaagcctggggcagagccgatgatgtgattaagatccactggcaggaaaagaagtccaacaccatcctgggcagccaggaaggcaacaccatgaagaccaacgacacctacatgaagttcagctggctgaccgtgcccgagaagtccctggacaaagaacacagatgcatcgtgcggcacgaaaacaacaagaacggcgtggaccaggaaatcatcttcccacccatcaagaccgatgtgattacaatggaccccaaggacaactgctccaaggacgccaacgataccctgctgctccagctgaccaacaccagcgcctactacatgtacttgttgctgctgctgaagtccgtggtgtacttcgccatcatcacatgctgcctgctgcggagaaccgccttctgctgcaacggcgagaagtct

SEQ ID NO: 7207 - DNA, 2175 bp, synthetic construct
  source 1..2175: mol_type = other DNA
atggccttaccagtgaccgccttgctcctgccgctggccttgctgctccacgccgccaggccggactacatccacgtgacacagagccctagcagcctgtccgtgtccatcggcgatagagtgaccatcaactgccagacctctcaaggcgtgggcagcgacctgcactggtatcagcacaaacctggcagagcccctaagctgctgatccaccatgccagctctgtggaagatggcgtgcccagcagattttccggcaccggatttcacaccagcttcaacctgacaatcaacgacctccaggccgacgacatcggcacctactactgtcaagtgctccagagcttcggcagaggcagcagactggatacaaaactcgagatccagaaccctgatcctgccgtgtaccagctgcgggatagcaagagcagcgacaagagcgtgtgtctgttcaccgacttcgacagccagaccaacgtgtcccagagcaaggactccgacgtgtacatcaccgataagtgcgtgctggacatgcggagcatggacttcaagagcaactccgccgtggcctggtccaacaagtccgatttcgcctgcgccaacgccttcaacaacagcattatccccgaggacacattcttcccaagccccgagagcagcgactccaccgaccacgtgaagcccaaagagacagagaacaccaagcagcccagcaagagctgccacaagcccaaggccatcgtgcacaccgagaaagtgaacatgatgagcctgaccgtgctgggcctgcggatgctgttcgccaaaaccgtggccgtgaacttcctgctgaccgccaagctgttcttcctccgcgccaagagaagcggatctggcgtgaagcagaccctgaatttcgacctgctgaagctggctggcgacgtggaatccaacccaggccctactagtatggactggatttggcgcatccttttccttgtcggcgctgctaccggcgcgcattccttcgaaagggcacacctggtgcagtctggcaccgccatgaagaaacctggcgcttccgtcagagtgtcctgtcagacaagcggctacaccttcacagcccacatcctgttctggttcagacaggccccaggcagaggactggaatgggtcggatggatcaagccccagtacggggccgtgaatttcggcggaggcttcagagacagagtgaccctgaccagggacgtgtaccgggaaatcgcctacatggacatccggggcctgaagcctgatgacaccgccgtgtactactgcgccagggatagaagctacggcgacagctcttgggctctcgatgcttggggacagggcacaacagtggtggtgtctgctacgcgtgaggacctgaagaacgtgttcccacctgaggtggccgtgttcgagcctagcgaggccgagatcagccacacccagaaagccaccctcgtgtgcctggctaccggcttctaccccgaccatgtggaactgtcttggtgggtcaacggcaaagaggtgcacagcggcgtgtgtaccgacccccagccactgaaagaacagcccgccctgaacgacagccggtactgcctgagcagcagactgagagtgtccgccaccttctggcagaacccccggaaccacttcagatgccaggtgcagttctacggcctgagcgagaacgacgagtggacccaggacagagccaagcccgtgacccagatcgtgtctgccgaagcctggggcagagccgatgatgtgattaagatccactggcaggaaaagaagtccaacaccatcctgggcagccaggaaggcaacaccatgaagaccaacgacacctacatgaagttcagctggctgaccgtgcccgagaagtccctggacaaagaacacagatgcatcgtgcggcacgaaaacaacaagaacggcgtggaccaggaaatcatcttcccacccatcaagaccgatgtgattacaatggaccccaaggacaactgctccaaggacgccaacgataccctgctgctccagctgaccaacaccagcgcctactacatgtacttgttgctgctgctgaagtccgtggtgtacttcgccatcatcacatgctgcctgctgcggagaaccgccttctgctgcaacggcgagaagtct

SEQ ID NO: 7208 - DNA, 2205 bp, synthetic construct
  source 1..2205: mol_type = other DNA
atggccttaccagtgaccgccttgctcctgccgctggccttgctgctccacgccgccaggccggacgtgcagatgatccagacccccgatagcctggccgtgtccctgggacagagagccaccatctcttgcagagccagcgagagcgtggacaactacggcatcagcttcatgcactggtatcagcagaagcccggccagagccccaagctgctgatctacagagcctccaacctggaaagcggcatccccgccagattttccggcagcggcagcagaaccgacttcaccctgaccatcaaccccgtggaaaccgacgacgtggcaacctactactgccagcagaacaacaaggacccccccacctttggcggaggcaccaagctggaaatcaagctcgagatccagaaccctgatcctgccgtgtaccagctgcgggatagcaagagcagcgacaagagcgtgtgtctgttcaccgacttcgacagccagaccaacgtgtcccagagcaaggactccgacgtgtacatcaccgataagtgcgtgctggacatgcggagcatggacttcaagagcaactccgccgtggcctggtccaacaagtccgatttcgcctgcgccaacgccttcaacaacagcattatccccgaggacacattcttcccaagccccgagagcagcgactccaccgaccacgtgaagcccaaagagacagagaacaccaagcagcccagcaagagctgccacaagcccaaggccatcgtgcacaccgagaaagtgaacatgatgagcctgaccgtgctgggcctgcggatgctgttcgccaaaaccgtggccgtgaacttcctgctgaccgccaagctgttcttcctccgcgccaagagaagcggatctggcgtgaagcagaccctgaatttcgacctgctgaagctggctggcgacgtggaatccaacccaggccctactagtatggactggatttggcgcatccttttccttgtcggcgctgctaccggcgcgcattccttcgaagggggaggcggctctcaggtgcaactccagcagtctggcgctgagcttgtgaagcctggggccagcgtgaagattagctgcaaggccagcggctacgccttcagcagctactggatgaactgggtcaagcagcggcctggcaagggcctggaatggatcggccaaatctaccccggcgacggcgacaccacctacaacggcaagttcaagggcaaggccaccctgacagccgacaagagcagcagcaccgtgtacatgcaactgaacagcctgaccagcgaggacagcgccgtgtacttctgcgtgcggtactactacggcagctccggctacttcgactattggggccagggcaccacactgaccgtgtcctctacgcgtgaggacctgaagaacgtgttcccacctgaggtggccgtgttcgagcctagcgaggccgagatcagccacacccagaaagccaccctcgtgtgcctggctaccggcttctaccccgaccatgtggaactgtcttggtgggtcaacggcaaagaggtgcacagcggcgtgtgtaccgacccccagccactgaaagaacagcccgccctgaacgacagccggtactgcctgagcagcagactgagagtgtccgccaccttctggcagaacccccggaaccacttcagatgccaggtgcagttctacggcctgagcgagaacgacgagtggacccaggacagagccaagcccgtgacccagatcgtgtctgccgaagcctggggcagagccgatgatgtgattaagatccactggcaggaaaagaagtccaacaccatcctgggcagccaggaaggcaacaccatgaagaccaacgacacctacatgaagttcagctggctgaccgtgcccgagaagtccctggacaaagaacacagatgcatcgtgcggcacgaaaacaacaagaacggcgtggaccaggaaatcatcttcccacccatcaagaccgatgtgattacaatggaccccaaggacaactgctccaaggacgccaacgataccctgctgctccagctgaccaacaccagcgcctactacatgtacttgttgctgctgctgaagtccgtggtgtacttcgccatcatcacatgctgcctgctgcggagaaccgccttctgctgcaacggcgagaagtct

SEQ ID NO: 7209 - DNA, 2178 bp, synthetic construct
  source 1..2178: mol_type = other DNA
atggccttaccagtgaccgccttgctcctgccgctggccttgctgctccacgccgccaggccggacgtgcagatgatccagacccccagcagcctgtctgccagcctgggcgatagagtgaccatcagctgtcgggccagccaggacatcggcaactacctgaactggtatcagcagaaacccgacggcaccgtgaagctgctgatctactacaccagcagactgcacagcggcgtgcccagcagattttctggcagcggctctggcaccgagtacagcctgaccatctccaacctggaacaggaagatattgctacctacttctgtcagcaaggcagcgccctgccccctacatttggcggcggaacaaagctggaaatcaacctcgagatccagaaccctgatcctgccgtgtaccagctgcgggatagcaagagcagcgacaagagcgtgtgtctgttcaccgacttcgacagccagaccaacgtgtcccagagcaaggactccgacgtgtacatcaccgataagtgcgtgctggacatgcggagcatggacttcaagagcaactccgccgtggcctggtccaacaagtccgatttcgcctgcgccaacgccttcaacaacagcattatccccgaggacacattcttcccaagccccgagagcagcgactccaccgaccacgtgaagcccaaagagacagagaacaccaagcagcccagcaagagctgccacaagcccaaggccatcgtgcacaccgagaaagtgaacatgatgagcctgaccgtgctgggcctgcggatgctgttcgccaaaaccgtggccgtgaacttcctgctgaccgccaagctgttcttcctccgcgccaagagaagcggatctggcgtgaagcagaccctgaatttcgacctgctgaagctggctggcgacgtggaatccaacccaggccctactagtatggactggatttggcgcatccttttccttgtcggcgctgctaccggcgcgcattccttcgaagctctccagctccagcagtctggcgcagaactcgtgcggcctggcgcttctgtgaccctgagctgtaaagccagcggctacaccttcaccgactacgagatgcactgggtcaagcagacccctgtgcacggcctggaatggatcggagccatcgaccctgagacaggcggcaccgcctacaaccagaagttcgagggcaaggccatcctgaccgccgacaagagcagcagcacagcctacatggaactgcggagcctgacctccgaggacagccccgtgtactactgtgccagacggcggtactacggcagcagctccttcgactattggggccagggcaccaccctgaccgtgtctagtacgcgtgaggacctgaagaacgtgttcccacctgaggtggccgtgttcgagcctagcgaggccgagatcagccacacccagaaagccaccctcgtgtgcctggctaccggcttctaccccgaccatgtggaactgtcttggtgggtcaacggcaaagaggtgcacagcggcgtgtgtaccgacccccagccactgaaagaacagcccgccctgaacgacagccggtactgcctgagcagcagactgagagtgtccgccaccttctggcagaacccccggaaccacttcagatgccaggtgcagttctacggcctgagcgagaacgacgagtggacccaggacagagccaagcccgtgacccagatcgtgtctgccgaagcctggggcagagccgatgatgtgattaagatccactggcaggaaaagaagtccaacaccatcctgggcagccaggaaggcaacaccatgaagaccaacgacacctacatgaagttcagctggctgaccgtgcccgagaagtccctggacaaagaacacagatgcatcgtgcggcacgaaaacaacaagaacggcgtggaccaggaaatcatcttcccacccatcaagaccgatgtgattacaatggaccccaaggacaactgctccaaggacgccaacgataccctgctgctccagctgaccaacaccagcgcctactacatgtacttgttgctgctgctgaagtccgtggtgtacttcgccatcatcacatgctgcctgctgcggagaaccgccttctgctgcaacggcgagaagtct

SEQ ID NO: 7210 - DNA, 2190 bp, synthetic construct
  source 1..2190: mol_type = other DNA
atggccttaccagtgaccgccttgctcctgccgctggccttgctgctccacgccgccaggccggacatcgtcctgacccagtccccagccagcctggcggtgtccctgggtcaacgagctaccatttcctgcagagcctctaagtccgtatccacttccggctatagttacctgcattggtaccaacagaaaccagggcagccacccaagctgctcatctatctggcctcaaacctggagtccggcgtgcccgccagattctccggaagtgggagcggcaccgactttacattgaacatccacccagtcgaagaggaagatgctgccacttattactgtcagcactccagggagctgccatttacatttggctctggcacaaaactggagatcaaactcgagatccagaaccctgatcctgccgtgtaccagctgcgggatagcaagagcagcgacaagagcgtgtgtctgttcaccgacttcgacagccagaccaacgtgtcccagagcaaggactccgacgtgtacatcaccgataagtgcgtgctggacatgcggagcatggacttcaagagcaactccgccgtggcctggtccaacaagtccgatttcgcctgcgccaacgccttcaacaacagcattatccccgaggacacattcttcccaagccccgagagcagcgactccaccgaccacgtgaagcccaaagagacagagaacaccaagcagcccagcaagagctgccacaagcccaaggccatcgtgcacaccgagaaagtgaacatgatgagcctgaccgtgctgggcctgcggatgctgttcgccaaaaccgtggccgtgaacttcctgctgaccgccaagctgttcttcctccgcgccaagagaagcggatctggcgtgaagcagaccctgaatttcgacctgctgaagctggctggcgacgtggaatccaacccaggccctactagtatggactggatttggcgcatccttttccttgtcggcgctgctaccggcgcgcattccttcgaacaggttcagctggtcgagtccgggggaggtctggtacagccgggtggcagcctcaagctgtcatgtgccgcatctggttttgactttagcaggtattggatgagctgggtccgccaggccccgggcaagggacttgagtggattggagaaataaaccctacttccagcacaatcaacttcacaccttctttgaaagataaggtttttatctctcgggataacgctaaaaacacactgtacttgcagatgtctaaggtgcgaagcgaagacaccgccctctattattgcgcccggggtaattactaccgctatggggatgcgatggactattgggggcaaggtacctccgtcacggtctcaacgcgtgaggacctgaagaacgtgttcccacctgaggtggccgtgttcgagcctagcgaggccgagatcagccacacccagaaagccaccctcgtgtgcctggctaccggcttctaccccgaccatgtggaactgtcttggtgggtcaacggcaaagaggtgcacagcggcgtgtgtaccgacccccagccactgaaagaacagcccgccctgaacgacagccggtactgcctgagcagcagactgagagtgtccgccaccttctggcagaacccccggaaccacttcagatgccaggtgcagttctacggcctgagcgagaacgacgagtggacccaggacagagccaagcccgtgacccagatcgtgtctgccgaagcctggggcagagccgatgatgtgattaagatccactggcaggaaaagaagtccaacaccatcctgggcagccaggaaggcaacaccatgaagaccaacgacacctacatgaagttcagctggctgaccgtgcccgagaagtccctggacaaagaacacagatgcatcgtgcggcacgaaaacaacaagaacggcgtggaccaggaaatcatcttcccacccatcaagaccgatgtgattacaatggaccccaaggacaactgctccaaggacgccaacgataccctgctgctccagctgaccaacaccagcgcctactacatgtacttgttgctgctgctgaagtccgtggtgtacttcgccatcatcacatgctgcctgctgcggagaaccgccttctgctgcaacggcgagaagtct

SEQ ID NO: 7211 - DNA, 2184 bp, synthetic construct
  source 1..2184: mol_type = other DNA
atggccttaccagtgaccgccttgctcctgccgctggccttgctgctccacgccgccaggccggacatccagatgacccagagccctagctcactgagcgccagcgtgggcgacagggtgaccattacctgctccgccagccaggacatcagcaactacctgaactggtaccagcagaagcccggcaaggcccccaagctgctgatctactacacctccaacctgcactccggcgtgcccagcaggttcagcggaagcggcagcggcaccgatttcaccctgaccatctccagcctgcagcccgaggacttcgccacctactactgccagcagtacaggaagctcccctggactttcggccagggcaccaaactggagatcaagcgtctcgagatccagaaccctgatcctgccgtgtaccagctgcgggatagcaagagcagcgacaagagcgtgtgtctgttcaccgacttcgacagccagaccaacgtgtcccagagcaaggactccgacgtgtacatcaccgataagtgcgtgctggacatgcggagcatggacttcaagagcaactccgccgtggcctggtccaacaagtccgatttcgcctgcgccaacgccttcaacaacagcattatccccgaggacacattcttcccaagccccgagagcagcgactccaccgaccacgtgaagcccaaagagacagagaacaccaagcagcccagcaagagctgccacaagcccaaggccatcgtgcacaccgagaaagtgaacatgatgagcctgaccgtgctgggcctgcggatgctgttcgccaaaaccgtggccgtgaacttcctgctgaccgccaagctgttcttcctccgcgccaagagaagcggatctggcgtgaagcagaccctgaatttcgacctgctgaagctggctggcgacgtggaatccaacccaggccctactagtatggactggatttggcgcatccttttccttgtcggcgctgctaccggcgcgcattccttcgaacaggtgcagctggtccagagcggcgccgaagtgaagaagcccggcagctccgtgaaagtgagctgcaaggccagcggcggcaccttcagcaactactggatgcactgggtgaggcaggcccccggacagggcctggagtggatgggcgccacctacaggggccacagcgacacctactacaaccagaagttcaagggccgggtgaccatcaccgccgacaagagcaccagcaccgcctacatggaactgagcagcctcaggagcgaggacaccgctgtgtattactgcgccaggggcgccatctacgacggctacgacgtgctggacaactggggccagggcacactggtgaccgtgtccagcacgcgtgaggacctgaagaacgtgttcccacctgaggtggccgtgttcgagcctagcgaggccgagatcagccacacccagaaagccaccctcgtgtgcctggctaccggcttctaccccgaccatgtggaactgtcttggtgggtcaacggcaaagaggtgcacagcggcgtgtgtaccgacccccagccactgaaagaacagcccgccctgaacgacagccggtactgcctgagcagcagactgagagtgtccgccaccttctggcagaacccccggaaccacttcagatgccaggtgcagttctacggcctgagcgagaacgacgagtggacccaggacagagccaagcccgtgacccagatcgtgtctgccgaagcctggggcagagccgatgatgtgattaagatccactggcaggaaaagaagtccaacaccatcctgggcagccaggaaggcaacaccatgaagaccaacgacacctacatgaagttcagctggctgaccgtgcccgagaagtccctggacaaagaacacagatgcatcgtgcggcacgaaaacaacaagaacggcgtggaccaggaaatcatcttcccacccatcaagaccgatgtgattacaatggaccccaaggacaactgctccaaggacgccaacgataccctgctgctccagctgaccaacaccagcgcctactacatgtacttgttgctgctgctgaagtccgtggtgtacttcgccatcatcacatgctgcctgctgcggagaaccgccttctgctgcaacggcgagaagtct

SEQ ID NO: 7212 - DNA, 2184 bp, synthetic construct
  source 1..2184: mol_type = other DNA
atggccttaccagtgaccgccttgctcctgccgctggccttgctgctccacgccgccaggccggacatcgtgctgacacagagccctgccaccctgtctctgagccctggcgatagagccaccatcagctgtagagccagcgagagcgtgaccatcctgggcagccacctgatctactggtatcagcagaagcccggccagccccccagactgctgattcagctggcctccaatgtgcagaccggcgtgccagccagattttccggcagcggcagcagaaccgacttcaccctgaccatcagcagcgtggaacccgaggacttcgccgtgtactactgcctccagagccggaccatccccagaacattcggccagggcaccaagctggaaatcaagagactcgagatccagaaccctgatcctgccgtgtaccagctgcgggatagcaagagcagcgacaagagcgtgtgtctgttcaccgacttcgacagccagaccaacgtgtcccagagcaaggactccgacgtgtacatcaccgataagtgcgtgctggacatgcggagcatggacttcaagagcaactccgccgtggcctggtccaacaagtccgatttcgcctgcgccaacgccttcaacaacagcattatccccgaggacacattcttcccaagccccgagagcagcgactccaccgaccacgtgaagcccaaagagacagagaacaccaagcagcccagcaagagctgccacaagcccaaggccatcgtgcacaccgagaaagtgaacatgatgagcctgaccgtgctgggcctgcggatgctgttcgccaaaaccgtggccgtgaacttcctgctgaccgccaagctgttcttcctccgcgccaagagaagcggatctggcgtgaagcagaccctgaatttcgacctgctgaagctggctggcgacgtggaatccaacccaggccctactagtatggactggatttggcgcatccttttccttgtcggcgctgctaccggcgcgcattccttcgaacaggtgcagctggtgcagtctggccccgaagtgaagaaacccggcgagtccgtgaagatcagctgcaaggccagcggctacaccttccggcactacagcatgaactgggtcaagcaggccccaggccagggcctgaagtggatgggcagaatcaacaccgagagcggcgtgcccatctacgccgacgacttcaagggccggttcagcttcaccgtggacaccagcgccagcaccgcctacctggaaatctccagcctgaccagcgaggataccgccgtgtatttctgctccaacgactacctgtacagcctggatttctggggccagggaaccaccctgacagtgtcctctacgcgtgaggacctgaagaacgtgttcccacctgaggtggccgtgttcgagcctagcgaggccgagatcagccacacccagaaagccaccctcgtgtgcctggctaccggcttctaccccgaccatgtggaactgtcttggtgggtcaacggcaaagaggtgcacagcggcgtgtgtaccgacccccagccactgaaagaacagcccgccctgaacgacagccggtactgcctgagcagcagactgagagtgtccgccaccttctggcagaacccccggaaccacttcagatgccaggtgcagttctacggcctgagcgagaacgacgagtggacccaggacagagccaagcccgtgacccagatcgtgtctgccgaagcctggggcagagccgatgatgtgattaagatccactggcaggaaaagaagtccaacaccatcctgggcagccaggaaggcaacaccatgaagaccaacgacacctacatgaagttcagctggctgaccgtgcccgagaagtccctggacaaagaacacagatgcatcgtgcggcacgaaaacaacaagaacggcgtggaccaggaaatcatcttcccacccatcaagaccgatgtgattacaatggaccccaaggacaactgctccaaggacgccaacgataccctgctgctccagctgaccaacaccagcgcctactacatgtacttgttgctgctgctgaagtccgtggtgtacttcgccatcatcacatgctgcctgctgcggagaaccgccttctgctgcaacggcgagaagtct

SEQ ID NO: 7213 - DNA, 2187 bp, synthetic construct
  source 1..2187: mol_type = other DNA
atggccttaccagtgaccgccttgctcctgccgctggccttgctgctccacgccgccaggccgcagtctgtgctgacacagcctcctagtgtgtctggcgctcctggacagagagtgaccatcagctgtacaggcagcagcagcaatatcggagccggctttgacgtgcactggtatcagcagctgcctggcacagcccctaaactgctgatctacggcaacagcaacagacccagcggcgtgcccgatagattttccggctctaagagcggcacaagcgccagcctggctattactggactccaggccgaggacgaggccgactactactgtcagagctacgacagcagcctgagcggctacgttttcggcaccggcaccaaagtgacagtgcttggtctcgagatccagaaccctgatcctgccgtgtaccagctgcgggatagcaagagcagcgacaagagcgtgtgtctgttcaccgacttcgacagccagaccaacgtgtcccagagcaaggactccgacgtgtacatcaccgataagtgcgtgctggacatgcggagcatggacttcaagagcaactccgccgtggcctggtccaacaagtccgatttcgcctgcgccaacgccttcaacaacagcattatccccgaggacacattcttcccaagccccgagagcagcgactccaccgaccacgtgaagcccaaagagacagagaacaccaagcagcccagcaagagctgccacaagcccaaggccatcgtgcacaccgagaaagtgaacatgatgagcctgaccgtgctgggcctgcggatgctgttcgccaaaaccgtggccgtgaacttcctgctgaccgccaagctgttcttcctccgcgccaagagaagcggatctggcgtgaagcagaccctgaatttcgacctgctgaagctggctggcgacgtggaatccaacccaggccctactagtatggactggatttggcgcatccttttccttgtcggcgctgctaccggcgcgcattccttcgaacaagttcagctggttcagagcggagccgaagtgaagaaacctggggcctctgtgaaggtgtcctgcaaggcttccggctacacctttaccgattactacatgcactgggtccgacaggctcccggccaaagacttgaatggatgggctggatcaaccccaacagcggcggcacaaattacgcccagaagttccaggaccggatcaccgtgaccagagacaccagctccaacaccggctacatggaactgacccggctgagatccgatgacaccgccgtgtactactgcgctagaagcccttactccggcgtgctggataagtggggacagggcacactggtcaccgtgtcatctacgcgtgaggacctgaagaacgtgttcccacctgaggtggccgtgttcgagcctagcgaggccgagatcagccacacccagaaagccaccctcgtgtgcctggctaccggcttctaccccgaccatgtggaactgtcttggtgggtcaacggcaaagaggtgcacagcggcgtgtgtaccgacccccagccactgaaagaacagcccgccctgaacgacagccggtactgcctgagcagcagactgagagtgtccgccaccttctggcagaacccccggaaccacttcagatgccaggtgcagttctacggcctgagcgagaacgacgagtggacccaggacagagccaagcccgtgacccagatcgtgtctgccgaagcctggggcagagccgatgatgtgattaagatccactggcaggaaaagaagtccaacaccatcctgggcagccaggaaggcaacaccatgaagaccaacgacacctacatgaagttcagctggctgaccgtgcccgagaagtccctggacaaagaacacagatgcatcgtgcggcacgaaaacaacaagaacggcgtggaccaggaaatcatcttcccacccatcaagaccgatgtgattacaatggaccccaaggacaactgctccaaggacgccaacgataccctgctgctccagctgaccaacaccagcgcctactacatgtacttgttgctgctgctgaagtccgtggtgtacttcgccatcatcacatgctgcctgctgcggagaaccgccttctgctgcaacggcgagaagtct

SEQ ID NO: 7214 - DNA, 2178 bp, synthetic construct
  source 1..2178: mol_type = other DNA
atggccttaccagtgaccgccttgctcctgccgctggccttgctgctccacgccgccaggccgcaggctgttctgacacagcctccatctgcctctggcacacctggacagagagtgaccatctcctgtagcggcagcagcagcaacatcggcagctacaccgtgtcctggtatcagcagctccctggaacagcccctaagttcctgatctacagcaacaaccagcggcctagcggcgtgcccgatagattttctggcagcaagagcggcacaagcgccagcctggctatttctggactccagtctgaggacgaggccgactactattgtgccgcctgggacgatagcctgaacggctatgtgtttggcaccggcaccaaagtgacagtgcttggtctcgagatccagaaccctgatcctgccgtgtaccagctgcgggatagcaagagcagcgacaagagcgtgtgtctgttcaccgacttcgacagccagaccaacgtgtcccagagcaaggactccgacgtgtacatcaccgataagtgcgtgctggacatgcggagcatggacttcaagagcaactccgccgtggcctggtccaacaagtccgatttcgcctgcgccaacgccttcaacaacagcattatccccgaggacacattcttcccaagccccgagagcagcgactccaccgaccacgtgaagcccaaagagacagagaacaccaagcagcccagcaagagctgccacaagcccaaggccatcgtgcacaccgagaaagtgaacatgatgagcctgaccgtgctgggcctgcggatgctgttcgccaaaaccgtggccgtgaacttcctgctgaccgccaagctgttcttcctccgcgccaagagaagcggatctggcgtgaagcagaccctgaatttcgacctgctgaagctggctggcgacgtggaatccaacccaggccctactagtatggactggatttggcgcatccttttccttgtcggcgctgctaccggcgcgcattccttcgaagttcaactggttcagagcggagccgaagtgaagaagcctggcgagagcctgaagattagctgcaaaggcagcggctacgacttcaccacctactggatcggctgggtccgacagatgcctggcaaaggactggaatggatgggcatcatctaccccggcgacagcgacaccagatacagccctagcgttagaggccgcgtgaccatcagcgccgacaagtctatcaacaccgcctacctccagtggtccagcctggaagcctctgacaccgccatgtactactgcgccagaatgtggaccttcagccaggatggatggggccagggaacactggtcacagtgtcatctacgcgtgaggacctgaagaacgtgttcccacctgaggtggccgtgttcgagcctagcgaggccgagatcagccacacccagaaagccaccctcgtgtgcctggctaccggcttctaccccgaccatgtggaactgtcttggtgggtcaacggcaaagaggtgcacagcggcgtgtgtaccgacccccagccactgaaagaacagcccgccctgaacgacagccggtactgcctgagcagcagactgagagtgtccgccaccttctggcagaacccccggaaccacttcagatgccaggtgcagttctacggcctgagcgagaacgacgagtggacccaggacagagccaagcccgtgacccagatcgtgtctgccgaagcctggggcagagccgatgatgtgattaagatccactggcaggaaaagaagtccaacaccatcctgggcagccaggaaggcaacaccatgaagaccaacgacacctacatgaagttcagctggctgaccgtgcccgagaagtccctggacaaagaacacagatgcatcgtgcggcacgaaaacaacaagaacggcgtggaccaggaaatcatcttcccacccatcaagaccgatgtgattacaatggaccccaaggacaactgctccaaggacgccaacgataccctgctgctccagctgaccaacaccagcgcctactacatgtacttgttgctgctgctgaagtccgtggtgtacttcgccatcatcacatgctgcctgctgcggagaaccgccttctgctgcaacggcgagaagtct

SEQ ID NO: 7215 - DNA, 2187 bp, synthetic construct
  source 1..2187: mol_type = other DNA
atggccttaccagtgaccgccttgctcctgccgctggccttgctgctccacgccgccaggccggacatcgtgatgacccagagccccgatagcctggccgtgtctctgggagagagagccaccatcaactgcaagagcagccagagcatcctgtacagcagcaaccagaagaactacctggcctggtatcagcagaagcccggccagagccctaagctgctgatctactgggccagcaccagagaaagcggcgtgcccgatagattcagcggcagcggctctggcaccgacttcaccctgaccatcagttctcttcaggccgaggacgtggccgtgtactactgccaccagtacatcagctcctacaccttcggccagggcaccaagctggaaatcaagctcgagatccagaaccctgatcctgccgtgtaccagctgcgggatagcaagagcagcgacaagagcgtgtgtctgttcaccgacttcgacagccagaccaacgtgtcccagagcaaggactccgacgtgtacatcaccgataagtgcgtgctggacatgcggagcatggacttcaagagcaactccgccgtggcctggtccaacaagtccgatttcgcctgcgccaacgccttcaacaacagcattatccccgaggacacattcttcccaagccccgagagcagcgactccaccgaccacgtgaagcccaaagagacagagaacaccaagcagcccagcaagagctgccacaagcccaaggccatcgtgcacaccgagaaagtgaacatgatgagcctgaccgtgctgggcctgcggatgctgttcgccaaaaccgtggccgtgaacttcctgctgaccgccaagctgttcttcctccgcgccaagagaagcggatctggcgtgaagcagaccctgaatttcgacctgctgaagctggctggcgacgtggaatccaacccaggccctactagtatggactggatttggcgcatccttttccttgtcggcgctgctaccggcgcgcattccttcgaacaggtgcagctggtgcagtctggcgctgaagtgaagaaacctggggccagcgtgaaggtgtcctgcaaggccagcggctacacctttgccagccagtggatgcactggatgagacaggcccctggacagggcctggaatggatcggctggatcaaccccggcaacgtgaacaccaagtacaacgagaagttcaagggcagagccaccctgacagtggacaccagcaccaacaccgcctacatggaactgagcagcctgcggagcgaggacaccgccgtgtattattgcgccagaagcacctggtacagacccctggattattggggccagggaacccttgtgaccgtgtcctctacgcgtgaggacctgaagaacgtgttcccacctgaggtggccgtgttcgagcctagcgaggccgagatcagccacacccagaaagccaccctcgtgtgcctggctaccggcttctaccccgaccatgtggaactgtcttggtgggtcaacggcaaagaggtgcacagcggcgtgtgtaccgacccccagccactgaaagaacagcccgccctgaacgacagccggtactgcctgagcagcagactgagagtgtccgccaccttctggcagaacccccggaaccacttcagatgccaggtgcagttctacggcctgagcgagaacgacgagtggacccaggacagagccaagcccgtgacccagatcgtgtctgccgaagcctggggcagagccgatgatgtgattaagatccactggcaggaaaagaagtccaacaccatcctgggcagccaggaaggcaacaccatgaagaccaacgacacctacatgaagttcagctggctgaccgtgcccgagaagtccctggacaaagaacacagatgcatcgtgcggcacgaaaacaacaagaacggcgtggaccaggaaatcatcttcccacccatcaagaccgatgtgattacaatggaccccaaggacaactgctccaaggacgccaacgataccctgctgctccagctgaccaacaccagcgcctactacatgtacttgttgctgctgctgaagtccgtggtgtacttcgccatcatcacatgctgcctgctgcggagaaccgccttctgctgcaacggcgagaagtct

SEQ ID NO: 7216 - DNA, 2187 bp, synthetic construct
  source 1..2187: mol_type = other DNA
atggccttaccagtgaccgccttgctcctgccgctggccttgctgctccacgccgccaggccggaccacatcgtgctgacccagagccctagcagcctgtctgccagcctgggcgacagagtgaccatcagctgtagagccagccaggacatcagcacctacctgaactggtatcagcagaaacccgacggcaccgtgaagctgctgatcttctacaccagcagactgcacgccggggtgcccagcagattttctggcagcggctctggcacccaccacagcctgaccatctccaacctggaacaggaagatattgctacctacttctgtcagcaaggcaacagcctgcccttcaccttcggcagcggcaccaagctggaaatcaagagactcgagatccagaaccctgatcctgccgtgtaccagctgcgggatagcaagagcagcgacaagagcgtgtgtctgttcaccgacttcgacagccagaccaacgtgtcccagagcaaggactccgacgtgtacatcaccgataagtgcgtgctggacatgcggagcatggacttcaagagcaactccgccgtggcctggtccaacaagtccgatttcgcctgcgccaacgccttcaacaacagcattatccccgaggacacattcttcccaagccccgagagcagcgactccaccgaccacgtgaagcccaaagagacagagaacaccaagcagcccagcaagagctgccacaagcccaaggccatcgtgcacaccgagaaagtgaacatgatgagcctgaccgtgctgggcctgcggatgctgttcgccaaaaccgtggccgtgaacttcctgctgaccgccaagctgttcttcctccgcgccaagagaagcggatctggcgtgaagcagaccctgaatttcgacctgctgaagctggctggcgacgtggaatccaacccaggccctactagtatggactggatttggcgcatccttttccttgtcggcgctgctaccggcgcgcattccttcgaacaggtgcagctgaaagagagcggccctgagctggaaaagcctggggccagcgtgaagattagctgcaaggccagcggctacagcttcaccgcctacagcatgaactgggtcaagcagaacaacggcatgagcctggaatggatcggcagcatcgacccctactacggcgacaccaaatacgcccagaagttcaagggcaaggccaccctgaccgtggataaggccagcagcaccgcctacctccagctgaagtctctgaccagcgaggacagcgccgtgtactactgcgccagacggatgattaccaccggcgactggtacttcgacgtgtggggagccggaaccaccgtgacagtgtctagcacgcgtgaggacctgaagaacgtgttcccacctgaggtggccgtgttcgagcctagcgaggccgagatcagccacacccagaaagccaccctcgtgtgcctggctaccggcttctaccccgaccatgtggaactgtcttggtgggtcaacggcaaagaggtgcacagcggcgtgtgtaccgacccccagccactgaaagaacagcccgccctgaacgacagccggtactgcctgagcagcagactgagagtgtccgccaccttctggcagaacccccggaaccacttcagatgccaggtgcagttctacggcctgagcgagaacgacgagtggacccaggacagagccaagcccgtgacccagatcgtgtctgccgaagcctggggcagagccgatgatgtgattaagatccactggcaggaaaagaagtccaacaccatcctgggcagccaggaaggcaacaccatgaagaccaacgacacctacatgaagttcagctggctgaccgtgcccgagaagtccctggacaaagaacacagatgcatcgtgcggcacgaaaacaacaagaacggcgtggaccaggaaatcatcttcccacccatcaagaccgatgtgattacaatggaccccaaggacaactgctccaaggacgccaacgataccctgctgctccagctgaccaacaccagcgcctactacatgtacttgttgctgctgctgaagtccgtggtgtacttcgccatcatcacatgctgcctgctgcggagaaccgccttctgctgcaacggcgagaagtct

SEQ ID NO: 7217 - DNA, 2187 bp, synthetic construct; identical to SEQ ID NO: 7216
  source 1..2187: mol_type = other DNA

SEQ ID NO: 7218 - DNA, 2187 bp, synthetic construct
  source 1..2187: mol_type = other DNA
atggccttaccagtgaccgccttgctcctgccgctggccttgctgctccacgccgccaggccggacgagatcgtgctgacacagagccctgccaccctgtctctgagccctggcgaaagagccaccctgagctgtagagccagccagagcgtgtccagctacctggcctggtatcagcagaagcccggccaggctccccggctgctgatctacgatgccagcaatagagccaccggcatccccgccagattttccggctctggcagcggcaccgacttcaccctgaccatcagctccctggaacccgaggacttcgccgtgtactactgccagcagcggagcaactggcccatcacattcggccagggcacccggctggaaatcaaactcgagatccagaaccctgatcctgccgtgtaccagctgcgggatagcaagagcagcgacaagagcgtgtgtctgttcaccgacttcgacagccagaccaacgtgtcccagagcaaggactccgacgtgtacatcaccgataagtgcgtgctggacatgcggagcatggacttcaagagcaactccgccgtggcctggtccaacaagtccgatttcgcctgcgccaacgccttcaacaacagcattatccccgaggacacattcttcccaagccccgagagcagcgactccaccgaccacgtgaagcccaaagagacagagaacaccaagcagcccagcaagagctgccacaagcccaaggccatcgtgcacaccgagaaagtgaacatgatgagcctgaccgtgctgggcctgcggatgctgttcgccaaaaccgtggccgtgaacttcctgctgaccgccaagctgttcttcctccgcgccaagagaagcggatctggcgtgaagcagaccctgaatttcgacctgctgaagctggctggcgacgtggaatccaacccaggccctactagtatggactggatttggcgcatccttttccttgtcggcgctgctaccggcgcgcattccttcgaagaagtgcagctggtggaatcaggcggcggactggtgcagcctggcagaagcctgagactgagctgtgccgccagcggcttcaccttcaacgactacgccatgcactgggtgcgccaggcccctggaaaaggactggaatgggtgtccacaatcagctggaacagcggcagcatcggctacgccgatagcgtgaagggccggttcaccatcagccgggacaacgccaagaagtccctgtacctccagatgaacagcctgcgggccgaggacacagccctgtactattgcgccaaggacatccagtacggcaactactactacggcatggacgtgtggggccagggaaccaccgtgaccgtgtcatctacgcgtgaggacctgaagaacgtgttcccacctgaggtggccgtgttcgagcctagcgaggccgagatcagccacacccagaaagccaccctcgtgtgcctggctaccggcttctaccccgaccatgtggaactgtcttggtgggtcaacggcaaagaggtgcacagcggcgtgtgtaccgacccccagccactgaaagaacagcccgccctgaacgacagccggtactgcctgagcagcagactgagagtgtccgccaccttctggcagaacccccggaaccacttcagatgccaggtgcagttctacggcctgagcgagaacgacgagtggacccaggacagagccaagcccgtgacccagatcgtgtctgccgaagcctggggcagagccgatgatgtgattaagatccactggcaggaaaagaagtccaacaccatcctgggcagccaggaaggcaacaccatgaagaccaacgacacctacatgaagttcagctggctgaccgtgcccgagaagtccctggacaaagaacacagatgcatcgtgcggcacgaaaacaacaagaacggcgtggaccaggaaatcatcttcccacccatcaagaccgatgtgattacaatggaccccaaggacaactgctccaaggacgccaacgataccctgctgctccagctgaccaacaccagcgcctactacatgtacttgttgctgctgctgaagtccgtggtgtacttcgccatcatcacatgctgcctgctgcggagaaccgccttctgctgcaacggcgagaagtct

SEQ ID NO: 7219 - DNA, 2193 bp, synthetic construct
  source 1..2193: mol_type = other DNA
atggccttaccagtgaccgccttgctcctgccgctggccttgctgctccacgccgccaggccggacatcgtgatgacccagacccccctgagcctgcctgtgacacctggcgagcctgccagcatctcctgcagaagcagcaagagcctgctgcacagcaacggcatcacctacctgtactggtatctgcagaaacccggccagagcccccaactgctgatctaccagatgagcaacctggtgtccggcgtgcccgacagattttctggcagcggctccggcaccgacttcaccctgaagatcagccgggtggaagccgaggacgtgggcgtgtactactgcgcccagaacctggaactgccctacacctttggcggcggaacaaaggtggaaatcaagcggctcgagatccagaaccctgatcctgccgtgtaccagctgcgggatagcaagagcagcgacaagagcgtgtgtctgttcaccgacttcgacagccagaccaacgtgtcccagagcaaggactccgacgtgtacatcaccgataagtgcgtgctggacatgcggagcatggacttcaagagcaactccgccgtggcctggtccaacaagtccgatttcgcctgcgccaacgccttcaacaacagcattatccccgaggacacattcttcccaagccccgagagcagcgactccaccgaccacgtgaagcccaaagagacagagaacaccaagcagcccagcaagagctgccacaagcccaaggccatcgtgcacaccgagaaagtgaacatgatgagcctgaccgtgctgggcctgcggatgctgttcgccaaaaccgtggccgtgaacttcctgctgaccgccaagctgttcttcctccgcgccaagagaagcggatctggcgtgaagcagaccctgaatttcgacctgctgaagctggctggcgacgtggaatccaacccaggccctactagtatggactggatttggcgcatccttttccttgtcggcgctgctaccggcgcgcattccttcgaacaggtgcaactggtgcagagcggagccgaagtgaaaaagcccggcagcagcgtgaaggtgtcctgcaaggccagcggctacgccttcagctactcctggatcaactgggtgcgccaggcccctggacagggcctggaatggatgggcagaatcttccccggcgacggcgacaccgactacaacggcaagttcaagggcagagtgaccatcaccgccgacaagagcaccagcaccgcctacatggaactgagcagcctgcggagcgaggataccgccgtgtactattgtgccagaaacgtgttcgacggctactggctggtgtactggggccagggaacacttgtgaccgtgtccagcacgcgtgaggacctgaagaacgtgttcccacctgaggtggccgtgttcgagcctagcgaggccgagatcagccacacccagaaagccaccctcgtgtgcctggctaccggcttctaccccgaccatgtggaactgtcttggtgggtcaacggcaaagaggtgcacagcggcgtgtgtaccgacccccagccactgaaagaacagcccgccctgaacgacagccggtactgcctgagcagcagactgagagtgtccgccaccttctggcagaacccccggaaccacttcagatgccaggtgcagttctacggcctgagcgagaacgacgagtggacccaggacagagccaagcccgtgacccagatcgtgtctgccgaagcctggggcagagccgatgatgtgattaagatccactggcaggaaaagaagtccaacaccatcctgggcagccaggaaggcaacaccatgaagaccaacgacacctacatgaagttcagctggctgaccgtgcccgagaagtccctggacaaagaacacagatgcatcgtgcggcacgaaaacaacaagaacggcgtggaccaggaaatcatcttcccacccatcaagaccgatgtgattacaatggaccccaaggacaactgctccaaggacgccaacgataccctgctgctccagctgaccaacaccagcgcctactacatgtacttgttgctgctgctgaagtccgtggtgtacttcgccatcatcacatgctgcctgctgcggagaaccgccttctgctgcaacggcgagaagtct

SEQ ID NO: 7220 - DNA, 2196 bp, synthetic construct
  source 1..2196: mol_type = other DNA
atggccttaccagtgaccgccttgctcctgccgctggccttgctgctccacgccgccaggccggacatccagatgacccagagccccagcagcctgtctgccagcgtgggcgacagagtgaccatcacctgtcggagcagccagagcatcgtgcactccgtgggcaacaccttcctggaatggtatcagcagaagcccggcaaggcccccaagctgctgatctacaaggtgtccaacagattcagcggcgtgcccagcaggtttagcggctctggcagcggcaccgacttcaccctgaccatctctagcctccagcccgaggacttcgccacctactactgttttcaaggcagccagttcccctacaccttcggccagggaacaaaggtggaaatcaagcggctcgagatccagaaccctgatcctgccgtgtaccagctgcgggatagcaagagcagcgacaagagcgtgtgtctgttcaccgacttcgacagccagaccaacgtgtcccagagcaaggactccgacgtgtacatcaccgataagtgcgtgctggacatgcggagcatggacttcaagagcaactccgccgtggcctggtccaacaagtccgatttcgcctgcgccaacgccttcaacaacagcattatccccgaggacacattcttcccaagccccgagagcagcgactccaccgaccacgtgaagcccaaagagacagagaacaccaagcagcccagcaagagctgccacaagcccaaggccatcgtgcacaccgagaaagtgaacatgatgagcctgaccgtgctgggcctgcggatgctgttcgccaaaaccgtggccgtgaacttcctgctgaccgccaagctgttcttcctccgcgccaagagaagcggatctggcgtgaagcagaccctgaatttcgacctgctgaagctggctggcgacgtggaatccaacccaggccctactagtatggactggatttggcgcatccttttccttgtcggcgctgctaccggcgcgcattccttcgaagaagtgcaactggtggaaagcggaggcggcctggtgcagcctggcggatctctgagactgagctgtgccgccagcggctacgagttcagccggtcctggatgaactgggtgcgccaggcccctggcaagggactggaatgggtgggaagaatctaccccggcgacggcgacaccaactacagcggcaagttcaagggccggttcaccatcagcgccgacaccagcaagaacaccgcctacctccagatgaacagcctgcgggccgaggataccgccgtgtactactgtgccagagatggcagctcctgggactggtacttcgacgtgtggggacagggaacccttgtgaccgtgtccagcacgcgtgaggacctgaagaacgtgttcccacctgaggtggccgtgttcgagcctagcgaggccgagatcagccacacccagaaagccaccctcgtgtgcctggctaccggcttctaccccgaccatgtggaactgtcttggtgggtcaacggcaaagaggtgcacagcggcgtgtgtaccgacccccagccactgaaagaacagcccgccctgaacgacagccggtactgcctgagcagcagactgagagtgtccgccaccttctggcagaacccccggaaccacttcagatgccaggtgcagttctacggcctgagcgagaacgacgagtggacccaggacagagccaagcccgtgacccagatcgtgtctgccgaagcctggggcagagccgatgatgtgattaagatccactggcaggaaaagaagtccaacaccatcctgggcagccaggaaggcaacaccatgaagaccaacgacacctacatgaagttcagctggctgaccgtgcccgagaagtccctggacaaagaacacagatgcatcgtgcggcacgaaaacaacaagaacggcgtggaccaggaaatcatcttcccacccatcaagaccgatgtgattacaatggaccccaaggacaactgctccaaggacgccaacgataccctgctgctccagctgaccaacaccagcgcctactacatgtacttgttgctgctgctgaagtccgtggtgtacttcgccatcatcacatgctgcctgctgcggagaaccgccttctgctgcaacggcgagaagtct

SEQ ID NO: 7221 - DNA, 2190 bp, synthetic construct
  source 1..2190: mol_type = other DNA
atggccttaccagtgaccgccttgctcctgccgctggccttgctgctccacgccgccaggccggacatccagatgacccagagccccagcagcctgtctgccagcgtgggcgacagagtgaccatcacctgtagagccagccagaccatctggtcctacctgaactggtatcagcagaggcccggcaaggcccccaacctgctgatctatgccgccagctctctccagagcggcgtgcccagcagattttccggcagaggcagcggcaccgacttcaccctgaccatcagttccttgcaggccgaggacttcgccacctactactgccagcagagctacagcatcccccagattttcggccagggcaccaagctggaaatcaagctcgagatccagaaccctgatcctgccgtgtaccagctgcgggatagcaagagcagcgacaagagcgtgtgtctgttcaccgacttcgacagccagaccaacgtgtcccagagcaaggactccgacgtgtacatcaccgataagtgcgtgctggacatgcggagcatggacttcaagagcaactccgccgtggcctggtccaacaagtccgatttcgcctgcgccaacgccttcaacaacagcattatccccgaggacacattcttcccaagccccgagagcagcgactccaccgaccacgtgaagcccaaagagacagagaacaccaagcagcccagcaagagctgccacaagcccaaggccatcgtgcacaccgagaaagtgaacatgatgagcctgaccgtgctgggcctgcggatgctgttcgccaaaaccgtggccgtgaacttcctgctgaccgccaagctgttcttcctccgcgccaagagaagcggatctggcgtgaagcagaccctgaatttcgacctgctgaagctggctggcgacgtggaatccaacccaggccctactagtatggactggatttggcgcatccttttccttgtcggcgctgctaccggcgcgcattccttcgaacaggtgcagctccagcagtctggacccggcctcgtgaagcctagccagacactgagcctgacctgcgccatcagcggcgatagcgtgtccagcaatagcgccgcctggaactggatcagacagtccccctctcggggcctggaatggctgggccggacctactaccgcagcaagtggtacaacgactacgccgtgtccgtgaagtcccggatcaccatcaaccccgacaccagcaagaaccagttctccttgcaactgaacagcgtgacccccgaggacaccgccgtgtactactgcgccagagaagtgaccggcgacctggaagatgccttcgacatctggggccagggaacaatggtcacagtgtccagcacgcgtgaggacctgaagaacgtgttcccacctgaggtggccgtgttcgagcctagcgaggccgagatcagccacacccagaaagccaccctcgtgtgcctggctaccggcttctaccccgaccatgtggaactgtcttggtgggtcaacggcaaagaggtgcacagcggcgtgtgtaccgacccccagccactgaaagaacagcccgccctgaacgacagccggtactgcctgagcagcagactgagagtgtccgccaccttctggcagaacccccggaaccacttcagatgccaggtgcagttctacggcctgagcgagaacgacgagtggacccaggacagagccaagcccgtgacccagatcgtgtctgccgaagcctggggcagagccgatgatgtgattaagatccactggcaggaaaagaagtccaacaccatcctgggcagccaggaaggcaacaccatgaagaccaacgacacctacatgaagttcagctggctgaccgtgcccgagaagtccctggacaaagaacacagatgcatcgtgcggcacgaaaacaacaagaacggcgtggaccaggaaatcatcttcccacccatcaagaccgatgtgattacaatggaccccaaggacaactgctccaaggacgccaacgataccctgctgctccagctgaccaacaccagcgcctactacatgtacttgttgctgctgctgaagtccgtggtgtacttcgccatcatcacatgctgcctgctgcggagaaccgccttctgctgcaacggcgagaagtct

SEQ ID NO: 7222 - DNA, 2169 bp, synthetic construct
  source 1..2169: mol_type = other DNA
atggccttaccagtgaccgccttgctcctgccgctggccttgctgctccacgccgccaggccggacatccagatgacccagagccccgccaccatcgagaacacaagcctgtctgccagcgtgggcgacagagtgaccatcacctgtagagccagccagggcatcagctcttggctgacctggtatcagcagaagcccgagaaggcccccaagagcctgatctacgccgccagctctctgcagtctggcgtgcccagcagattttccggcagcggctctggcaccgacttcaccctgacaatcagcagcctgcagcccgaggacttcgccacctactactgccagcagtacgacagctaccccatcaccttcggccagggcacccggctggaaatcaagctcgagatccagaaccctgatcctgccgtgtaccagctgcgggatagcaagagcagcgacaagagcgtgtgtctgttcaccgacttcgacagccagaccaacgtgtcccagagcaaggactccgacgtgtacatcaccgataagtgcgtgctggacatgcggagcatggacttcaagagcaactccgccgtggcctggtccaacaagtccgatttcgcctgcgccaacgccttcaacaacagcattatccccgaggacacattcttcccaagccccgagagcagcgactccaccgaccacgtgaagcccaaagagacagagaacaccaagcagcccagcaagagctgccacaagcccaaggccatcgtgcacaccgagaaagtgaacatgatgagcctgaccgtgctgggcctgcggatgctgttcgccaaaaccgtggccgtgaacttcctgctgaccgccaagctgttcttcctccgcgccaagagaagcggatctggcgtgaagcagaccctgaatttcgacctgctgaagctggctggcgacgtggaatccaacccaggccctactagtatggactggatttggcgcatccttttccttgtcggcgctgctaccggcgcgcattccttcgaacaggtgcaactgcagcagtggggagccggactgctgaagcctagcgagacactgagcctgacctgcgccgtgtacggcggcagcttcagcgcctactattggagctggatcagacagccccctggcaagggcctggaatggatcggcgacatcaatcacggcggaggcaccaactacaaccccagcctgaagtcccgcgtgaccatctccgtggacaccagcaagaaccagttctccctgaagctgaacagcgtgacagccgccgacacagccgtgtactactgtgccagcctgaccgcctattggggccagggatctcttgtgaccgtgtccagcacgcgtgaggacctgaagaacgtgttcccacctgaggtggccgtgttcgagcctagcgaggccgagatcagccacacccagaaagccaccctcgtgtgcctggctaccggcttctaccccgaccatgtggaactgtcttggtgggtcaacggcaaagaggtgcacagcggcgtgtgtaccgacccccagccactgaaagaacagcccgccctgaacgacagccggtactgcctgagcagcagactgagagtgtccgccaccttctggcagaacccccggaaccacttcagatgccaggtgcagttctacggcctgagcgagaacgacgagtggacccaggacagagccaagcccgtgacccagatcgtgtctgccgaagcctggggcagagccgatgatgtgattaagatccactggcaggaaaagaagtccaacaccatcctgggcagccaggaaggcaacaccatgaagaccaacgacacctacatgaagttcagctggctgaccgtgcccgagaagtccctggacaaagaacacagatgcatcgtgcggcacgaaaacaacaagaacggcgtggaccaggaaatcatcttcccacccatcaagaccgatgtgattacaatggaccccaaggacaactgctccaaggacgccaacgataccctgctgctccagctgaccaacaccagcgcctactacatgtacttgttgctgctgctgaagtccgtggtgtacttcgccatcatcacatgctgcctgctgcggagaaccgccttctgctgcaacggcgagaagtct

SEQ ID NO: 7223 - DNA, 2184 bp, synthetic construct
  source 1..2184: mol_type = other DNA
atggccttaccagtgaccgccttgctcctgccgctggccttgctgctccacgccgccaggccggacgagatcgtgctgacccagagccctgatagcctggccgtgtctctgggcgagagagccaccatcaactgcaaggccagccagagcgtggacttcgacggcgacagctacctgaactggtatcagcagaagcccggccagccccccaaggtgctgatctatgccgccagcacactgcagagcggcgtgcccagcagattttctggcagcggctccggcaccgacttcaccctgaccatcaacagcctggaagccgaggacgccgccacctactactgccagcagagcaacgaggacccctggacctttggcggcggaacaaaggtggaaatcaagctcgagatccagaaccctgatcctgccgtgtaccagctgcgggatagcaagagcagcgacaagagcgtgtgtctgttcaccgacttcgacagccagaccaacgtgtcccagagcaaggactccgacgtgtacatcaccgataagtgcgtgctggacatgcggagcatggacttcaagagcaactccgccgtggcctggtccaacaagtccgatttcgcctgcgccaacgccttcaacaacagcattatccccgaggacacattcttcccaagccccgagagcagcgactccaccgaccacgtgaagcccaaagagacagagaacaccaagcagcccagcaagagctgccacaagcccaaggccatcgtgcacaccgagaaagtgaacatgatgagcctgaccgtgctgggcctgcggatgctgttcgccaaaaccgtggccgtgaacttcctgctgaccgccaagctgttcttcctccgcgccaagagaagcggatctggcgtgaagcagaccctgaatttcgacctgctgaagctggctggcgacgtggaatccaacccaggccctactagtatggactggatttggcgcatccttttccttgtcggcgctgctaccggcgcgcattccttcgaacaggtgcaactggtgcagtccggcgctgaagtgaagaaacctggggccagcgtgaaggtgtcctgcaaggtgtccggctacacctttaccgactactacattacctgggtgcgccaggcccctggacaggccctggaatggatgggctggatctaccccggcagcggcaacaccaagtacagccagaagttccagggcagattcgtgttcagcgtggacaccagcgccagcaccgcctacctgcaactgtctagcctgaaggccgaagataccgccgtgtactactgcgccaactacggcaactattggttcgcctattggggccagggaacccttgtgaccgtgtcctctacgcgtgaggacctgaagaacgtgttcccacctgaggtggccgtgttcgagcctagcgaggccgagatcagccacacccagaaagccaccctcgtgtgcctggctaccggcttctaccccgaccatgtggaactgtcttggtgggtcaacggcaaagaggtgcacagcggcgtgtgtaccgacccccagccactgaaagaacagcccgccctgaacgacagccggtactgcctgagcagcagactgagagtgtccgccaccttctggcagaacccccggaaccacttcagatgccaggtgcagttctacggcctgagcgagaacgacgagtggacccaggacagagccaagcccgtgacccagatcgtgtctgccgaagcctggggcagagccgatgatgtgattaagatccactggcaggaaaagaagtccaacaccatcctgggcagccaggaaggcaacaccatgaagaccaacgacacctacatgaagttcagctggctgaccgtgcccgagaagtccctggacaaagaacacagatgcatcgtgcggcacgaaaacaacaagaacggcgtggaccaggaaatcatcttcccacccatcaagaccgatgtgattacaatggaccccaaggacaactgctccaaggacgccaacgataccctgctgctccagctgaccaacaccagcgcctactacatgtacttgttgctgctgctgaagtccgtggtgtacttcgccatcatcacatgctgcctgctgcggagaaccgccttctgctgcaacggcgagaagtct

SEQ ID NO: 7224 - DNA, 2175 bp, synthetic construct
  source 1..2175: mol_type = other DNA
atggccttaccagtgaccgccttgctcctgccgctggccttgctgctccacgccgccaggccggacatccagatgacccagagccccagcagcctgtctgccagcgtgggcgacagagtgaccatcacctgtagagccagccagggcatcagctcttggctggcctggtatcagcagaagcccgagaaggcccccaagagcctgatctacgccgcctctagtctccagagcggcgtgcccagcagattttctggcagcggctccggcaccgacttcaccctgacaatcagctccctccagcccgaggacttcgccacctactactgccagcagtacaacagctaccctcccacctttggcggaggcaccaaggtggaaatcaagctcgagatccagaaccctgatcctgccgtgtaccagctgcgggatagcaagagcagcgacaagagcgtgtgtctgttcaccgacttcgacagccagaccaacgtgtcccagagcaaggactccgacgtgtacatcaccgataagtgcgtgctggacatgcggagcatggacttcaagagcaactccgccgtggcctggtccaacaagtccgatttcgcctgcgccaacgccttcaacaacagcattatccccgaggacacattcttcccaagccccgagagcagcgactccaccgaccacgtgaagcccaaagagacagagaacaccaagcagcccagcaagagctgccacaagcccaaggccatcgtgcacaccgagaaagtgaacatgatgagcctgaccgtgctgggcctgcggatgctgttcgccaaaaccgtggccgtgaacttcctgctgaccgccaagctgttcttcctccgcgccaagagaagcggatctggcgtgaagcagaccctgaatttcgacctgctgaagctggctggcgacgtggaatccaacccaggccctactagtatggactggatttggcgcatccttttccttgtcggcgctgctaccggcgcgcattccttcgaagaagtgcaactggtgcagtctggcggagggctggtgcatcctgggggaagcctgagactgagctgtgccggctctggcttcgccttcagcagcagcaccatgcactggatcagacaggcccctggcaagggcctggaatggatcagcctgatcggaagcggagggggcatctactacggcgacagcgtgaagggccggttcaccatcagccgggacaacgccaagaacagcctgtacctccagatgaactccctgcgggccgaggacatggccgtgtactattgtgtgcggggctacttcgactgggtggactacttcgattactggggccagggcaccctcgtgaccgtgtcatctacgcgtgaggacctgaagaacgtgttcccacctgaggtggccgtgttcgagcctagcgaggccgagatcagccacacccagaaagccaccctcgtgtgcctggctaccggcttctaccccgaccatgtggaactgtcttggtgggtcaacggcaaagaggtgcacagcggcgtgtgtaccgacccccagccactgaaagaacagcccgccctgaacgacagccggtactgcctgagcagcagactgagagtgtccgccaccttctggcagaacccccggaaccacttcagatgccaggtgcagttctacggcctgagcgagaacgacgagtggacccaggacagagccaagcccgtgacccagatcgtgtctgccgaagcctggggcagagccgatgatgtgattaagatccactggcaggaaaagaagtccaacaccatcctgggcagccaggaaggcaacaccatgaagaccaacgacacctacatgaagttcagctggctgaccgtgcccgagaagtccctggacaaagaacacagatgcatcgtgcggcacgaaaacaacaagaacggcgtggaccaggaaatcatcttcccacccatcaagaccgatgtgattacaatggaccccaaggacaactgctccaaggacgccaacgataccctgctgctccagctgaccaacaccagcgcctactacatgtacttgttgctgctgctgaagtccgtggtgtacttcgccatcatcacatgctgcctgctgcggagaaccgccttctgctgcaacggcgagaagtct

SEQ ID NO: 7225 - DNA, 2205 bp, synthetic construct
  source 1..2205: mol_type = other DNA
atggccttaccagtgaccgccttgctcctgccgctggccttgctgctccacgccgccaggccggacgacatcgtgatgacacagtcaccagatagcctcaccgtctccctgggggagcggaccaccattaattgtaaatccagccaaagcgtgctggactcaagcaagaacaagaatagcctcgcctggtatcagcagaagcccggtcagcctccaaagctgctgctttcttgggcctccaccagagagtccgggattcctgataggtttagtggttcaggctccggcacagattttactctgaccattgattctctccagccagaggattctgcaacttattactgccagcaaagcgcccactttcctataacttttggccagggaacccgacttgaaatcaagctcgagatccagaaccctgatcctgccgtgtaccagctgcgggatagcaagagcagcgacaagagcgtgtgtctgttcaccgacttcgacagccagaccaacgtgtcccagagcaaggactccgacgtgtacatcaccgataagtgcgtgctggacatgcggagcatggacttcaagagcaactccgccgtggcctggtccaacaagtccgatttcgcctgcgccaacgccttcaacaacagcattatccccgaggacacattcttcccaagccccgagagcagcgactccaccgaccacgtgaagcccaaagagacagagaacaccaagcagcccagcaagagctgccacaagcccaaggccatcgtgcacaccgagaaagtgaacatgatgagcctgaccgtgctgggcctgcggatgctgttcgccaaaaccgtggccgtgaacttcctgctgaccgccaagctgttcttcctccgcgccaagagaagcggatctggcgtgaagcagaccctgaatttcgacctgctgaagctggctggcgacgtggaatccaacccaggccctactagtatggactggatttggcgcatccttttccttgtcggcgctgctaccggcgcgcattccttcgaacaggtgcagctggtgcagagcggtgccgaagtgaagaaaccaggtgcatccgttaaagtttcatgtaaggctagtggatataccttcaccaattacggaatgaactgggtgaaacaggcccctggccagggactgaagtggatggggtggattaacacctacaccggggagccgacttatgcagacgactttaaggggcgggtcacgatgacctccgacacctccaccagtaccgcctacctggagctgcacaaccttaggtcagacgataccgccgtgtattactgtgcccgatggtcttggtccgacggatactatgtctacttcgactattggggccaggggaccacagttaccgtgtcctctacgcgtgaggacctgaagaacgtgttcccacctgaggtggccgtgttcgagcctagcgaggccgagatcagccacacccagaaagccaccctcgtgtgcctggctaccggcttctaccccgaccatgtggaactgtcttggtgggtcaacggcaaagaggtgcacagcggcgtgtgtaccgacccccagccactgaaagaacagcccgccctgaacgacagccggtactgcctgagcagcagactgagagtgtccgccaccttctggcagaacccccggaaccacttcagatgccaggtgcagttctacggcctgagcgagaacgacgagtggacccaggacagagccaagcccgtgacccagatcgtgtctgccgaagcctggggcagagccgatgatgtgattaagatccactggcaggaaaagaagtccaacaccatcctgggcagccaggaaggcaacaccatgaagaccaacgacacctacatgaagttcagctggctgaccgtgcccgagaagtccctggacaaagaacacagatgcatcgtgcggcacgaaaacaacaagaacggcgtggaccaggaaatcatcttcccacccatcaagaccgatgtgattacaatggaccccaaggacaactgctccaaggacgccaacgataccctgctgctccagctgaccaacaccagcgcctactacatgtacttgttgctgctgctgaagtccgtggtgtacttcgccatcatcacatgctgcctgctgcggagaaccgccttctgctgcaacggcgagaagtct

SEQ ID NO: 7226 - DNA, 2193 bp, synthetic construct
  source 1..2193: mol_type = other DNA
atggccttaccagtgaccgccttgctcctgccgctggccttgctgctccacgccgccaggccggacgagatcgtgctgacacagagccctggaagcctggccgtgtctcctggcgagcgcgtgacaatgagctgcaagagcagccagagcgtgttcttcagcagctcccagaagaactacctggcctggtatcagcagatccccggccagagccccagactgctgatctactgggccagcaccagagaaagcggcgtgcccgatagattcaccggcagcggctctggcaccgacttcaccctgacaatcagcagcgtgcagcccgaggacctggctatctactactgccaccagtacctgagcagccggaccttcggccagggcaccaagctggaaatcaagagactcgagatccagaaccctgatcctgccgtgtaccagctgcgggatagcaagagcagcgacaagagcgtgtgtctgttcaccgacttcgacagccagaccaacgtgtcccagagcaaggactccgacgtgtacatcaccgataagtgcgtgctggacatgcggagcatggacttcaagagcaactccgccgtggcctggtccaacaagtccgatttcgcctgcgccaacgccttcaacaacagcattatccccgaggacacattcttcccaagccccgagagcagcgactccaccgaccacgtgaagcccaaagagacagagaacaccaagcagcccagcaagagctgccacaagcccaaggccatcgtgcacaccgagaaagtgaacatgatgagcctgaccgtgctgggcctgcggatgctgttcgccaaaaccgtggccgtgaacttcctgctgaccgccaagctgttcttcctccgcgccaagagaagcggatctggcgtgaagcagaccctgaatttcgacctgctgaagctggctggcgacgtggaatccaacccaggccctactagtatggactggatttggcgcatccttttccttgtcggcgctgctaccggcgcgcattccttcgaacaggtgcaactgcagcagcctggcgctgaggtcgtgaagccaggcgcttccgtgaagatgtcctgcaaggccagcggctacaccttcaccagctactacatccactggatcaagcagacccctggacagggcctggaatgggtgggagtgatctaccccggcaacgacgacatcagctacaaccagaagttccagggcaaggccaccctgaccgccgacaagtctagcaccaccgcctacatgcaactgtccagcctgaccagcgaggacagcgccgtgtactactgcgccagagaagtgcggctgcggtacttcgatgtgtggggccagggaaccaccgtgaccgtgtcatctacgcgtgaggacctgaagaacgtgttcccacctgaggtggccgtgttcgagcctagcgaggccgagatcagccacacccagaaagccaccctcgtgtgcctggctaccggcttctaccccgaccatgtggaactgtcttggtgggtcaacggcaaagaggtgcacagcggcgtgtgtaccgacccccagccactgaaagaacagcccgccctgaacgacagccggtactgcctgagcagcagactgagagtgtccgccaccttctggcagaacccccggaaccacttcagatgccaggtgcagttctacggcctgagcgagaacgacgagtggacccaggacagagccaagcccgtgacccagatcgtgtctgccgaagcctggggcagagccgatgatgtgattaagatccactggcaggaaaagaagtccaacaccatcctgggcagccaggaaggcaacaccatgaagaccaacgacacctacatgaagttcagctggctgaccgtgcccgagaagtccctggacaaagaacacagatgcatcgtgcggcacgaaaacaacaagaacggcgtggaccaggaaatcatcttcccacccatcaagaccgatgtgattacaatggaccccaaggacaactgctccaaggacgccaacgataccctgctgctccagctgaccaacaccagcgcctactacatgtacttgttgctgctgctgaagtccgtggtgtacttcgccatcatcacatgctgcctgctgcggagaaccgccttctgctgcaacggcgagaagtct

SEQ ID NO: 7227 - DNA, 2205 bp, synthetic construct
  source 1..2205: mol_type = other DNA
atggccttaccagtgaccgccttgctcctgccgctggccttgctgctccacgccgccaggccggatgtgctgctgacccagagccctctgagcctgcctgtgacactgggacagcctgccagcatctcctgtcggagcagccagaccatcgtgcacagcaacggcaacacctacctggaatggttccagcagcggccaggccagagccccagactgctgatctaccaggtgtccaacagattcagcggcgtgcccgacagattctccggcagcggctctggcaccgacttcaccctgaagatcagccgggtggaagccgaggacgtgggcgtgtactactgttttcaaggcagccacgtgccccggacctttggcggaggaacaaaggtggaaatcaagagagccctcgagatccagaaccctgatcctgccgtgtaccagctgcgggatagcaagagcagcgacaagagcgtgtgtctgttcaccgacttcgacagccagaccaacgtgtcccagagcaaggactccgacgtgtacatcaccgataagtgcgtgctggacatgcggagcatggacttcaagagcaactccgccgtggcctggtccaacaagtccgatttcgcctgcgccaacgccttcaacaacagcattatccccgaggacacattcttcccaagccccgagagcagcgactccaccgaccacgtgaagcccaaagagacagagaacaccaagcagcccagcaagagctgccacaagcccaaggccatcgtgcacaccgagaaagtgaacatgatgagcctgaccgtgctgggcctgcggatgctgttcgccaaaaccgtggccgtgaacttcctgctgaccgccaagctgttcttcctccgcgccaagagaagcggatctggcgtgaagcagaccctgaatttcgacctgctgaagctggctggcgacgtggaatccaacccaggccctactagtatggactggatttggcgcatccttttccttgtcggcgctgctaccggcgcgcattccttcgaacagatccaactggtgcagagcggcagcgagctgaagaaacctggggccagcgtgaaggtgtcctgcaaggccagcggctacacctttaccaactacggcatgaactgggtgcgccaggcccctggacagggcctgaaatggatgggctggatcaacaccaacaccggcgagcctaagtacgccgaagagttcaagggcagattcgccctgagcctggacaccagcgtgtccacagcctacctccagatcaacagcctgaaggccgaggataccgccgtgtacttctgcgccagaggctacggcaactacgccagaggggcttggctggcctattggggccagggaacactcgtgaccgtgtcctctacgcgtgaggacctgaagaacgtgttcccacctgaggtggccgtgttcgagcctagcgaggccgagatcagccacacccagaaagccaccctcgtgtgcctggctaccggcttctaccccgaccatgtggaactgtcttggtgggtcaacggcaaagaggtgcacagcggcgtgtgtaccgacccccagccactgaaagaacagcccgccctgaacgacagccggtactgcctgagcagcagactgagagtgtccgccaccttctggcagaacccccggaaccacttcagatgccaggtgcagttctacggcctgagcgagaacgacgagtggacccaggacagagccaagcccgtgacccagatcgtgtctgccgaagcctggggcagagccgatgatgtgattaagatccactggcaggaaaagaagtccaacaccatcctgggcagccaggaaggcaacaccatgaagaccaacgacacctacatgaagttcagctggctgaccgtgcccgagaagtccctggacaaagaacacagatgcatcgtgcggcacgaaaacaacaagaacggcgtggaccaggaaatcatcttcccacccatcaagaccgatgtgattacaatggaccccaaggacaactgctccaaggacgccaacgataccctgctgctccagctgaccaacaccagcgcctactacatgtacttgttgctgctgctgaagtccgtggtgtacttcgccatcatcacatgctgcctgctgcggagaaccgccttctgctgcaacggcgagaagtct

SEQ ID NO: 7228 - DNA, 2160 bp, synthetic construct
  source 1..2160: mol_type = other DNA
atggccttaccagtgaccgccttgctcctgccgctggccttgctgctccacgccgccaggccggacgagatcgtgctgacacagagccctgccacactctctctgagccctggcgaaagagccaccctgagctgtagcgccagcagcagcatcaactacatctactggctccagcagaagcccggccaggcccccagaatcctgatctacctgaccagcaacctggcctccggcgtgccagccagattttctggcagcggctccggcaccgacttcaccctgacaatcagcagcctggaacccgaggacttcgccgtgtactactgcctccagtggtccagcaaccccctgacctttggcggaggcaccaaggtggaaatcaagctcgagatccagaaccctgatcctgccgtgtaccagctgcgggatagcaagagcagcgacaagagcgtgtgtctgttcaccgacttcgacagccagaccaacgtgtcccagagcaaggactccgacgtgtacatcaccgataagtgcgtgctggacatgcggagcatggacttcaagagcaactccgccgtggcctggtccaacaagtccgatttcgcctgcgccaacgccttcaacaacagcattatccccgaggacacattcttcccaagccccgagagcagcgactccaccgaccacgtgaagcccaaagagacagagaacaccaagcagcccagcaagagctgccacaagcccaaggccatcgtgcacaccgagaaagtgaacatgatgagcctgaccgtgctgggcctgcggatgctgttcgccaaaaccgtggccgtgaacttcctgctgaccgccaagctgttcttcctccgcgccaagagaagcggatctggcgtgaagcagaccctgaatttcgacctgctgaagctggctggcgacgtggaatccaacccaggccctactagtatggactggatttggcgcatccttttccttgtcggcgctgctaccggcgcgcattccttcgaagaagtgcaactggtggaaagcgggggaggacttgtgaagcctggcggctctctgagactgagctgtgccgcctctggcttcaccttcagcagctacgacatgagctgggtgcgccaggctcctggcaagggactggaatgggtgtccaccatcagcagcggcggcagctacacctactacctggacagcatcaagggccggttcaccatctccagagacaacgccaagaacagcctgtacctccagatgaactccctgcgggccgaggacacagccgtgtattattgcgccagacagggcctggattactggggcagaggcacccttgtgaccgtgtcctctacgcgtgaggacctgaagaacgtgttcccacctgaggtggccgtgttcgagcctagcgaggccgagatcagccacacccagaaagccaccctcgtgtgcctggctaccggcttctaccccgaccatgtggaactgtcttggtgggtcaacggcaaagaggtgcacagcggcgtgtgtaccgacccccagccactgaaagaacagcccgccctgaacgacagccggtactgcctgagcagcagactgagagtgtccgccaccttctggcagaacccccggaaccacttcagatgccaggtgcagttctacggcctgagcgagaacgacgagtggacccaggacagagccaagcccgtgacccagatcgtgtctgccgaagcctggggcagagccgatgatgtgattaagatccactggcaggaaaagaagtccaacaccatcctgggcagccaggaaggcaacaccatgaagaccaacgacacctacatgaagttcagctggctgaccgtgcccgagaagtccctggacaaagaacacagatgcatcgtgcggcacgaaaacaacaagaacggcgtggaccaggaaatcatcttcccacccatcaagaccgatgtgattacaatggaccccaaggacaactgctccaaggacgccaacgataccctgctgctccagctgaccaacaccagcgcctactacatgtacttgttgctgctgctgaagtccgtggtgtacttcgccatcatcacatgctgcctgctgcggagaaccgccttctgctgcaacggcgagaagtct

SEQ ID NO: 7229 - DNA, 2187 bp, synthetic construct
  source 1..2187: mol_type = other DNA
atggccttaccagtgaccgccttgctcctgccgctggccttgctgctccacgccgccaggccggacatcgtgatgacccagagccccgatagcctggccgtgtctctgggagagagagccaccatcaactgccgggccagcaagagcgtgtccaccagcggctacagcttcatgcactggtatcagcagaagcccggccagccccccaagctgctgatctacctggcctccaacctggaaagcggcgtgcccgatagattcagcggcagcggctctggcaccgacttcaccctgaccatcagttctcttcaggccgaggacgtggccgtgtactactgccagcacagcagagaggtgccctggacattcggccagggcacaaaggtggaaatcaagcggctcgagatccagaaccctgatcctgccgtgtaccagctgcgggatagcaagagcagcgacaagagcgtgtgtctgttcaccgacttcgacagccagaccaacgtgtcccagagcaaggactccgacgtgtacatcaccgataagtgcgtgctggacatgcggagcatggacttcaagagcaactccgccgtggcctggtccaacaagtccgatttcgcctgcgccaacgccttcaacaacagcattatccccgaggacacattcttcccaagccccgagagcagcgactccaccgaccacgtgaagcccaaagagacagagaacaccaagcagcccagcaagagctgccacaagcccaaggccatcgtgcacaccgagaaagtgaacatgatgagcctgaccgtgctgggcctgcggatgctgttcgccaaaaccgtggccgtgaacttcctgctgaccgccaagctgttcttcctccgcgccaagagaagcggatctggcgtgaagcagaccctgaatttcgacctgctgaagctggctggcgacgtggaatccaacccaggccctactagtatggactggatttggcgcatccttttccttgtcggcgctgctaccggcgcgcattccttcgaacaggtgcagctggtgcagtctggggccgaagtgaagaaacctggggccagcgtgaaggtgtcctgcaaggccagcggatacacctttaccaactacggcatgaactgggtgcgccaggcccctggacagggcctggaatggatgggctggatcaacacctacaccggcgagcccacatacgccgacgccttcaagggcagattcgccttcagcctggacaccagcacctccaccgcctacctccagatcaacagcctgcggagcgacgacaccgccgtgtattattgcgccagagattacggcgactacgggatggactattggggccagggaaccaccgtgaccgtgtcctctacgcgtgaggacctgaagaacgtgttcccacctgaggtggccgtgttcgagcctagcgaggccgagatcagccacacccagaaagccaccctcgtgtgcctggctaccggcttctaccccgaccatgtggaactgtcttggtgggtcaacggcaaagaggtgcacagcggcgtgtgtaccgacccccagccactgaaagaacagcccgccctgaacgacagccggtactgcctgagcagcagactgagagtgtccgccaccttctggcagaacccccggaaccacttcagatgccaggtgcagttctacggcctgagcgagaacgacgagtggacccaggacagagccaagcccgtgacccagatcgtgtctgccgaagcctggggcagagccgatgatgtgattaagatccactggcaggaaaagaagtccaacaccatcctgggcagccaggaaggcaacaccatgaagaccaacgacacctacatgaagttcagctggctgaccgtgcccgagaagtccctggacaaagaacacagatgcatcgtgcggcacgaaaacaacaagaacggcgtggaccaggaaatcatcttcccacccatcaagaccgatgtgattacaatggaccccaaggacaactgctccaaggacgccaacgataccctgctgctccagctgaccaacaccagcgcctactacatgtacttgttgctgctgctgaagtccgtggtgtacttcgccatcatcacatgctgcctgctgcggagaaccgccttctgctgcaacggcgagaagtct

SEQ ID NO: 7230 - DNA, 2175 bp, synthetic construct
  source 1..2175: mol_type = other DNA
atggccttaccagtgaccgccttgctcctgccgctggccttgctgctccacgccgccaggccggacatcgtgatgacccagacccccctgaccctgagcgtgacaatcggacagcctgccagcatctcctgcaagagcagccagagcctgctggacagcgacggcaagacctacctgaactggctgctgcagaggccaggccagagccccgagagactgatctacctggtgtccaagctggactccggcgtgcccgatagattcacaggcagcggctccggcaccgacttcaccctgaagatcagccgggtggaagccgaggacctgggcgtgtactgttgttggcagggcacccacttcccttacaccttcggcggagggaccaaggtggaaatcaagggcctcgagatccagaaccctgatcctgccgtgtaccagctgcgggatagcaagagcagcgacaagagcgtgtgtctgttcaccgacttcgacagccagaccaacgtgtcccagagcaaggactccgacgtgtacatcaccgataagtgcgtgctggacatgcggagcatggacttcaagagcaactccgccgtggcctggtccaacaagtccgatttcgcctgcgccaacgccttcaacaacagcattatccccgaggacacattcttcccaagccccgagagcagcgactccaccgaccacgtgaagcccaaagagacagagaacaccaagcagcccagcaagagctgccacaagcccaaggccatcgtgcacaccgagaaagtgaacatgatgagcctgaccgtgctgggcctgcggatgctgttcgccaaaaccgtggccgtgaacttcctgctgaccgccaagctgttcttcctccgcgccaagagaagcggatctggcgtgaagcagaccctgaatttcgacctgctgaagctggctggcgacgtggaatccaacccaggccctactagtatggactggatttggcgcatccttttccttgtcggcgctgctaccggcgcgcattccttcgaacaggtgcaactgcagcagcctggcgctgaacttgtgcggccaggcgcctctgtgaagctgagctgtaaagccagcggctacaccttcaccagctactggatgaactgggtcaagcagcgcccaggccagggcctggaatggatcggaatgatcgaccccagcgacagcgagacacactacaaccacatcttcaaggacaaggccaccctgaccgtggacaagtccagcagcacagcctacctgcaactgtccagcctgaccagcgaggacagcgccgtgtactactgcgcccggaacctgtatctgtggggccagggaacaagcgtgaccgtgtctagcacgcgtgaggacctgaagaacgtgttcccacctgaggtggccgtgttcgagcctagcgaggccgagatcagccacacccagaaagccaccctcgtgtgcctggctaccggcttctaccccgaccatgtggaactgtcttggtgggtcaacggcaaagaggtgcacagcggcgtgtgtaccgacccccagccactgaaagaacagcccgccctgaacgacagccggtactgcctgagcagcagactgagagtgtccgccaccttctggcagaacccccggaaccacttcagatgccaggtgcagttctacggcctgagcgagaacgacgagtggacccaggacagagccaagcccgtgacccagatcgtgtctgccgaagcctggggcagagccgatgatgtgattaagatccactggcaggaaaagaagtccaacaccatcctgggcagccaggaaggcaacaccatgaagaccaacgacacctacatgaagttcagctggctgaccgtgcccgagaagtccctggacaaagaacacagatgcatcgtgcggcacgaaaacaacaagaacggcgtggaccaggaaatcatcttcccacccatcaagaccgatgtgattacaatggaccccaaggacaactgctccaaggacgccaacgataccctgctgctccagctgaccaacaccagcgcctactacatgtacttgttgctgctgctgaagtccgtggtgtacttcgccatcatcacatgctgcctgctgcggagaaccgccttctgctgcaacggcgagaagtct

SEQ ID NO: 7231 - DNA, 2199 bp, synthetic construct
  source 1..2199: mol_type = other DNA
atggccttaccagtgaccgccttgctcctgccgctggccttgctgctccacgccgccaggccggacatcgtgatgacccagagccccgatagcctggccgtgtctctgggagagagagccaccatcaactgcgagagcagccagagcctgctgaacagcggcaaccagaagaactacctgacctggtatcagcagaagcccggccagccccccaagcccctgatctattgggccagcaccagagaaagcggcgtgcccgatagattcagcggcagcggaagcggcaccgacttcaccctgaccatcagttctcttcaggccgaggacgtggccgtgtactactgccagaacgactacagctacccctacaccttcggccagggcaccaagctggaaatcaagagactcgagatccagaaccctgatcctgccgtgtaccagctgcgggatagcaagagcagcgacaagagcgtgtgtctgttcaccgacttcgacagccagaccaacgtgtcccagagcaaggactccgacgtgtacatcaccgataagtgcgtgctggacatgcggagcatggacttcaagagcaactccgccgtggcctggtccaacaagtccgatttcgcctgcgccaacgccttcaacaacagcattatccccgaggacacattcttcccaagccccgagagcagcgactccaccgaccacgtgaagcccaaagagacagagaacaccaagcagcccagcaagagctgccacaagcccaaggccatcgtgcacaccgagaaagtgaacatgatgagcctgaccgtgctgggcctgcggatgctgttcgccaaaaccgtggccgtgaacttcctgctgaccgccaagctgttcttcctccgcgccaagagaagcggatctggcgtgaagcagaccctgaatttcgacctgctgaagctggctggcgacgtggaatccaacccaggccctactagtatggactggatttggcgcatccttttccttgtcggcgctgctaccggcgcgcattccttcgaagaagtgcagctggtgcagtctggggccgaagtgaagaagcctggcgagagcctgaagatcagctgcaagggcagcggctacagcttcaccgactactacatgaagtgggccagacagatgcccggcaagggcctggaatggatgggcgacatcatccccagcaacggggccaccttctacaaccagaaattcaagggccaagtgaccatctccgccgacaagagcatcagcaccacctacctccagtggtccagcctgaaggccagcgacaccgccatgtactattgcgccagaagccatctgctgcgggccagttggttcgcctattggggccagggaacaatggtcacagtgtccagcacgcgtgaggacctgaagaacgtgttcccacctgaggtggccgtgttcgagcctagcgaggccgagatcagccacacccagaaagccaccctcgtgtgcctggctaccggcttctaccccgaccatgtggaactgtcttggtgggtcaacggcaaagaggtgcacagcggcgtgtgtaccgacccccagccactgaaagaacagcccgccctgaacgacagccggtactgcctgagcagcagactgagagtgtccgccaccttctggcagaacccccggaaccacttcagatgccaggtgcagttctacggcctgagcgagaacgacgagtggacccaggacagagccaagcccgtgacccagatcgtgtctgccgaagcctggggcagagccgatgatgtgattaagatccactggcaggaaaagaagtccaacaccatcctgggcagccaggaaggcaacaccatgaagaccaacgacacctacatgaagttcagctggctgaccgtgcccgagaagtccctggacaaagaacacagatgcatcgtgcggcacgaaaacaacaagaacggcgtggaccaggaaatcatcttcccacccatcaagaccgatgtgattacaatggaccccaaggacaactgctccaaggacgccaacgataccctgctgctccagctgaccaacaccagcgcctactacatgtacttgttgctgctgctgaagtccgtggtgtacttcgccatcatcacatgctgcctgctgcggagaaccgccttctgctgcaacggcgagaagtct

SEQ ID NO: 7232 - DNA, 2184 bp, synthetic construct
  source 1..2184: mol_type = other DNA
atggccttaccagtgaccgccttgctcctgccgctggccttgctgctccacgccgccaggccggacatccagatgacccagtctaccagttccctgagtgcatccctcggagacagggtgacgatcagttgcagcgcaagccaagggatcaataactatctgaactggtatcagcagaaaccggacggaacagtcgaactcctgatttattacaccagcacccttcagagtggcgtcccttcccggttcagtggctccggaagcgggaccgattactccctgaccatttctaatctggagccagaggacataggaacgtattattgccagcagtatagtaaactgccacgaacttttggaggggggacgaaactggagatcaaactcgagatccagaaccctgatcctgccgtgtaccagctgcgggatagcaagagcagcgacaagagcgtgtgtctgttcaccgacttcgacagccagaccaacgtgtcccagagcaaggactccgacgtgtacatcaccgataagtgcgtgctggacatgcggagcatggacttcaagagcaactccgccgtggcctggtccaacaagtccgatttcgcctgcgccaacgccttcaacaacagcattatccccgaggacacattcttcccaagccccgagagcagcgactccaccgaccacgtgaagcccaaagagacagagaacaccaagcagcccagcaagagctgccacaagcccaaggccatcgtgcacaccgagaaagtgaacatgatgagcctgaccgtgctgggcctgcggatgctgttcgccaaaaccgtggccgtgaacttcctgctgaccgccaagctgttcttcctccgcgccaagagaagcggatctggcgtgaagcagaccctgaatttcgacctgctgaagctggctggcgacgtggaatccaacccaggccctactagtatggactggatttggcgcatccttttccttgtcggcgctgctaccggcgcgcattccttcgaacaggtgcaactccagcagtccggaagcgagcttatgatgccaggggcatcagtgaagatcagctgcaaggctactggctacaccttctctaattactggatagagtgggttaaacaaaggccagggcacggcctggaatggatcggcgagatcctgcctgggacaggccgaaccatttataacgagaagttcaaaggcaaggctactttcaccgcagatataagctctaatacagtgcaaatgcagctctcttccctgacaagtgaggatagtgccgtgtattattgcgcacgaagagattactatggaaatttttattacgctatggattattggggtcaaggaacaagtgtgaccgttagcagcacgcgtgaggacctgaagaacgtgttcccacctgaggtggccgtgttcgagcctagcgaggccgagatcagccacacccagaaagccaccctcgtgtgcctggctaccggcttctaccccgaccatgtggaactgtcttggtgggtcaacggcaaagaggtgcacagcggcgtgtgtaccgacccccagccactgaaagaacagcccgccctgaacgacagccggtactgcctgagcagcagactgagagtgtccgccaccttctggcagaacccccggaaccacttcagatgccaggtgcagttctacggcctgagcgagaacgacgagtggacccaggacagagccaagcccgtgacccagatcgtgtctgccgaagcctggggcagagccgatgatgtgattaagatccactggcaggaaaagaagtccaacaccatcctgggcagccaggaaggcaacaccatgaagaccaacgacacctacatgaagttcagctggctgaccgtgcccgagaagtccctggacaaagaacacagatgcatcgtgcggcacgaaaacaacaagaacggcgtggaccaggaaatcatcttcccacccatcaagaccgatgtgattacaatggaccccaaggacaactgctccaaggacgccaacgataccctgctgctccagctgaccaacaccagcgcctactacatgtacttgttgctgctgctgaagtccgtggtgtacttcgccatcatcacatgctgcctgctgcggagaaccgccttctgctgcaacggcgagaagtct

SEQ ID NO: 7233 - DNA, 2169 bp, synthetic construct
  source 1..2169: mol_type = other DNA
atggccttaccagtgaccgccttgctcctgccgctggccttgctgctccacgccgccaggccggacatccagatgacccagagccctgccagcctgtccgtgtctgtgggcgagacagtgaccatcacctgtcgggccagcgagaacatctacagcaacctggcctggtatcagcagaagcagggcaagagcccccaactgctggtgtacgccgccaccaatctggccgatggcgtgcccagcagattttccggctctggcagcggcacccagtacagcctgaagatcaacagcctccagagcgaggacttcggcagctactactgccagcacttctggggcacctggacctttggaggaggcaccaccctggaaatcaagctcgagatccagaaccctgatcctgccgtgtaccagctgcgggatagcaagagcagcgacaagagcgtgtgtctgttcaccgacttcgacagccagaccaacgtgtcccagagcaaggactccgacgtgtacatcaccgataagtgcgtgctggacatgcggagcatggacttcaagagcaactccgccgtggcctggtccaacaagtccgatttcgcctgcgccaacgccttcaacaacagcattatccccgaggacacattcttcccaagccccgagagcagcgactccaccgaccacgtgaagcccaaagagacagagaacaccaagcagcccagcaagagctgccacaagcccaaggccatcgtgcacaccgagaaagtgaacatgatgagcctgaccgtgctgggcctgcggatgctgttcgccaaaaccgtggccgtgaacttcctgctgaccgccaagctgttcttcctccgcgccaagagaagcggatctggcgtgaagcagaccctgaatttcgacctgctgaagctggctggcgacgtggaatccaacccaggccctactagtatggactggatttggcgcatccttttccttgtcggcgctgctaccggcgcgcattccttcgaagaagtgcaactccagcagagcggccctgagcttgtgaagcctggcgcttccgtgaagatgagctgcaaggccagcggctacaccttcaccgactactacatgaagtggatgaagcagagccacggcaagtccctggaatggatcggcgacatcaaccccaacaacggcggcaccacctacaaccagaagttcaagggcaaggccaccctgaccgtggacaagagcagcagcaccgcctacatgcaactgaacagcctgaccagcgaggacagcgccgtgtactactgcgccagagactacggctacggctatttcgactactggggccagggcacaaccctgacagtgtcctctacgcgtgaggacctgaagaacgtgttcccacctgaggtggccgtgttcgagcctagcgaggccgagatcagccacacccagaaagccaccctcgtgtgcctggctaccggcttctaccccgaccatgtggaactgtcttggtgggtcaacggcaaagaggtgcacagcggcgtgtgtaccgacccccagccactgaaagaacagcccgccctgaacgacagccggtactgcctgagcagcagactgagagtgtccgccaccttctggcagaacccccggaaccacttcagatgccaggtgcagttctacggcctgagcgagaacgacgagtggacccaggacagagccaagcccgtgacccagatcgtgtctgccgaagcctggggcagagccgatgatgtgattaagatccactggcaggaaaagaagtccaacaccatcctgggcagccaggaaggcaacaccatgaagaccaacgacacctacatgaagttcagctggctgaccgtgcccgagaagtccctggacaaagaacacagatgcatcgtgcggcacgaaaacaacaagaacggcgtggaccaggaaatcatcttcccacccatcaagaccgatgtgattacaatggaccccaaggacaactgctccaaggacgccaacgataccctgctgctccagctgaccaacaccagcgcctactacatgtacttgttgctgctgctgaagtccgtggtgtacttcgccatcatcacatgctgcctgctgcggagaaccgccttctgctgcaacggcgagaagtct

SEQ ID NO: 7234 - DNA, 2178 bp, synthetic construct
  source 1..2178: mol_type = other DNA
atggccttaccagtgaccgccttgctcctgccgctggccttgctgctccacgccgccaggccggagatcgtgctgacacagagccctggcaccctgagcctgtctccaggcgaaagagccacactgagctgtcgggcctctcagagcgtgggaggctacctggcttggtatcagcagaagccaggccaggcccccagactgctgatctacgacgccagcaatcgggccacaggcatccccgccagattttctggcagcggctccggcaccgacttcaccctgacaatcagcagcctggaacccgaggacttcgccgtgtactactgccagcagcggaacaactggccccccatgtacacattcggccagggcaccaagctggaaatcaagagactcgagatccagaaccctgatcctgccgtgtaccagctgcgggatagcaagagcagcgacaagagcgtgtgtctgttcaccgacttcgacagccagaccaacgtgtcccagagcaaggactccgacgtgtacatcaccgataagtgcgtgctggacatgcggagcatggacttcaagagcaactccgccgtggcctggtccaacaagtccgatttcgcctgcgccaacgccttcaacaacagcattatccccgaggacacattcttcccaagccccgagagcagcgactccaccgaccacgtgaagcccaaagagacagagaacaccaagcagcccagcaagagctgccacaagcccaaggccatcgtgcacaccgagaaagtgaacatgatgagcctgaccgtgctgggcctgcggatgctgttcgccaaaaccgtggccgtgaacttcctgctgaccgccaagctgttcttcctccgcgccaagagaagcggatctggcgtgaagcagaccctgaatttcgacctgctgaagctggctggcgacgtggaatccaacccaggccctactagtatggactggatttggcgcatccttttccttgtcggcgctgctaccggcgcgcattccttcgaacaggtgcaactggtgcagagcggagccgaagtgaagaaacccggcagcagcgtgaaggtgtcctgcaaggcttccggcggcaccttcagcagctacgccatttcttgggtgcgccaggctcctggacagggcctggaatggatgggcggcatcatccctatcctgggcaccgccaactacgcccagaaattccagggcagagtgaccatcaccgccgacgagagcaccagcaccgcctacatggaactgagcagcctgcggagcgaggacacagccgtgtattattgcgccagatggggcggaggggccttcgacatttggggccagggaacaatggtcaccgtgtccagcacgcgtgaggacctgaagaacgtgttcccacctgaggtggccgtgttcgagcctagcgaggccgagatcagccacacccagaaagccaccctcgtgtgcctggctaccggcttctaccccgaccatgtggaactgtcttggtgggtcaacggcaaagaggtgcacagcggcgtgtgtaccgacccccagccactgaaagaacagcccgccctgaacgacagccggtactgcctgagcagcagactgagagtgtccgccaccttctggcagaacccccggaaccacttcagatgccaggtgcagttctacggcctgagcgagaacgacgagtggacccaggacagagccaagcccgtgacccagatcgtgtctgccgaagcctggggcagagccgatgatgtgattaagatccactggcaggaaaagaagtccaacaccatcctgggcagccaggaaggcaacaccatgaagaccaacgacacctacatgaagttcagctggctgaccgtgcccgagaagtccctggacaaagaacacagatgcatcgtgcggcacgaaaacaacaagaacggcgtggaccaggaaatcatcttcccacccatcaagaccgatgtgattacaatggaccccaaggacaactgctccaaggacgccaacgataccctgctgctccagctgaccaacaccagcgcctactacatgtacttgttgctgctgctgaagtccgtggtgtacttcgccatcatcacatgctgcctgctgcggagaaccgccttctgctgcaacggcgagaagtct

SEQ ID NO: 7235 - DNA, 2163 bp, synthetic construct
  source 1..2163: mol_type = other DNA
atggccttaccagtgaccgccttgctcctgccgctggccttgctgctccacgccgccaggccgcagatcgtgctgacacagagccctgccctgatgagcgccagccctggcgagaaagtgaccatgacctgtagcgccagcagcagcgtgcgctacatgtactggtatcagcagaagcccagaagcagccccaagccctggattcacctgaccagcaatctggcctctggcgtgcccgctagattttccggctctggcagcggcaccagctacagcctgaccatcagcagcatggaagccgaggacgccgccacctactactgccagcagtggtccagccaccccttcacatttggctccggcaccaagctggaaatcaagctcgagatccagaaccctgatcctgccgtgtaccagctgcgggatagcaagagcagcgacaagagcgtgtgtctgttcaccgacttcgacagccagaccaacgtgtcccagagcaaggactccgacgtgtacatcaccgataagtgcgtgctggacatgcggagcatggacttcaagagcaactccgccgtggcctggtccaacaagtccgatttcgcctgcgccaacgccttcaacaacagcattatccccgaggacacattcttcccaagccccgagagcagcgactccaccgaccacgtgaagcccaaagagacagagaacaccaagcagcccagcaagagctgccacaagcccaaggccatcgtgcacaccgagaaagtgaacatgatgagcctgaccgtgctgggcctgcggatgctgttcgccaaaaccgtggccgtgaacttcctgctgaccgccaagctgttcttcctccgcgccaagagaagcggatctggcgtgaagcagaccctgaatttcgacctgctgaagctggctggcgacgtggaatccaacccaggccctactagtatggactggatttggcgcatccttttccttgtcggcgctgctaccggcgcgcattccttcgaagatgtgcaactccaggaaagcggccctggccttgtgaagcctagccagagcctgtccctgacctgtaccgtgaccggcttcagcatcaccagcgactactcttggaactggatcagacagttccctggcaacaaactggaatggatgggctacatcagctactccggccacacctcctacaaccccagcctggaaagccggatctccatcaccagagacaccagcaagaaccagttcttcttgcaactgaacagcgtgaccaccgaggataccgccacatattactgtaccagaggcaactgggacgtggtgtactggggccagggcacacttgtgaccgtgtctgctacgcgtgaggacctgaagaacgtgttcccacctgaggtggccgtgttcgagcctagcgaggccgagatcagccacacccagaaagccaccctcgtgtgcctggctaccggcttctaccccgaccatgtggaactgtcttggtgggtcaacggcaaagaggtgcacagcggcgtgtgtaccgacccccagccactgaaagaacagcccgccctgaacgacagccggtactgcctgagcagcagactgagagtgtccgccaccttctggcagaacccccggaaccacttcagatgccaggtgcagttctacggcctgagcgagaacgacgagtggacccaggacagagccaagcccgtgacccagatcgtgtctgccgaagcctggggcagagccgatgatgtgattaagatccactggcaggaaaagaagtccaacaccatcctgggcagccaggaaggcaacaccatgaagaccaacgacacctacatgaagttcagctggctgaccgtgcccgagaagtccctggacaaagaacacagatgcatcgtgcggcacgaaaacaacaagaacggcgtggaccaggaaatcatcttcccacccatcaagaccgatgtgattacaatggaccccaaggacaactgctccaaggacgccaacgataccctgctgctccagctgaccaacaccagcgcctactacatgtacttgttgctgctgctgaagtccgtggtgtacttcgccatcatcacatgctgcctgctgcggagaaccgccttctgctgcaacggcgagaagtct

SEQ ID NO: 7236 - DNA, 2193 bp, synthetic construct
  source 1..2193: mol_type = other DNA
atggccttaccagtgaccgccttgctcctgccgctggccttgctgctccacgccgccaggccggacgtcgtgatgacccagagccctctgagcctgcctgtgacactgggacagcctgccagcatctcctgtcggagcagccagagcatcgtgcacagcgacggcaacacctacctggaatggtatcagcagcggccaggccagagccccagacggctgatctacaaggtgtccaacagattcagcggcgtgcccgacagattctccggcagcggctctggcaccgacttcaccctgaagatcagcagagtggaagccgaggacgtgggcgtgtactactgttttcaaggcagccacgccccctggacctttggcggaggaacaaaggtggaaatcaagctcgagatccagaaccctgatcctgccgtgtaccagctgcgggatagcaagagcagcgacaagagcgtgtgtctgttcaccgacttcgacagccagaccaacgtgtcccagagcaaggactccgacgtgtacatcaccgataagtgcgtgctggacatgcggagcatggacttcaagagcaactccgccgtggcctggtccaacaagtccgatttcgcctgcgccaacgccttcaacaacagcattatccccgaggacacattcttcccaagccccgagagcagcgactccaccgaccacgtgaagcccaaagagacagagaacaccaagcagcccagcaagagctgccacaagcccaaggccatcgtgcacaccgagaaagtgaacatgatgagcctgaccgtgctgggcctgcggatgctgttcgccaaaaccgtggccgtgaacttcctgctgaccgccaagctgttcttcctccgcgccaagagaagcggatctggcgtgaagcagaccctgaatttcgacctgctgaagctggctggcgacgtggaatccaacccaggccctactagtatggactggatttggcgcatccttttccttgtcggcgctgctaccggcgcgcattccttcgaagaagtgcaactggtggaatcaggcggcggactggtgcagcctggcggatctctgagactgagctgtgccgccagcggcttcaccttcagcagctacggaatgcactgggtgcgccaggcccctggcaaaggactggaatgggtggcctacatcaccaccagaagcagcaccatctactacgccgacagcgtgaagggccggttcaccatctccagagacaacgccaagaacagcctgtacctccagatgaactccctgcgggccgaggacaccgccgtgtactattgcaccagagagcccctgaccggctactacgctatggactattggggccagggcaccagcgtgaccgtgtctagtacgcgtgaggacctgaagaacgtgttcccacctgaggtggccgtgttcgagcctagcgaggccgagatcagccacacccagaaagccaccctcgtgtgcctggctaccggcttctaccccgaccatgtggaactgtcttggtgggtcaacggcaaagaggtgcacagcggcgtgtgtaccgacccccagccactgaaagaacagcccgccctgaacgacagccggtactgcctgagcagcagactgagagtgtccgccaccttctggcagaacccccggaaccacttcagatgccaggtgcagttctacggcctgagcgagaacgacgagtggacccaggacagagccaagcccgtgacccagatcgtgtctgccgaagcctggggcagagccgatgatgtgattaagatccactggcaggaaaagaagtccaacaccatcctgggcagccaggaaggcaacaccatgaagaccaacgacacctacatgaagttcagctggctgaccgtgcccgagaagtccctggacaaagaacacagatgcatcgtgcggcacgaaaacaacaagaacggcgtggaccaggaaatcatcttcccacccatcaagaccgatgtgattacaatggaccccaaggacaactgctccaaggacgccaacgataccctgctgctccagctgaccaacaccagcgcctactacatgtacttgttgctgctgctgaagtccgtggtgtacttcgccatcatcacatgctgcctgctgcggagaaccgccttctgctgcaacggcgagaagtct

SEQ ID NO: 7237 - DNA, 2169 bp, synthetic construct
  source 1..2169: mol_type = other DNA
atggccttaccagtgaccgccttgctcctgccgctggccttgctgctccacgccgccaggccggacatccagatgacccagagccccagcagcctgtctgccagcgtgggcgacagagtgaccatcacctgtagagccagccagagcatcagcctgtggctgaactggtatcagcagaagcccggcaaggcccccaagctgctgatctacgccgccagcacactccagagcggcgtgccaagcagattttccggcagcggctccggcaccgacttcaccctgacaatcagctccctccagcccgaggacttcgccacctactactgccagcagtactacaccagcccctacaccttcggccagggcaccaaggtggaaatcaagagactcgagatccagaaccctgatcctgccgtgtaccagctgcgggatagcaagagcagcgacaagagcgtgtgtctgttcaccgacttcgacagccagaccaacgtgtcccagagcaaggactccgacgtgtacatcaccgataagtgcgtgctggacatgcggagcatggacttcaagagcaactccgccgtggcctggtccaacaagtccgatttcgcctgcgccaacgccttcaacaacagcattatccccgaggacacattcttcccaagccccgagagcagcgactccaccgaccacgtgaagcccaaagagacagagaacaccaagcagcccagcaagagctgccacaagcccaaggccatcgtgcacaccgagaaagtgaacatgatgagcctgaccgtgctgggcctgcggatgctgttcgccaaaaccgtggccgtgaacttcctgctgaccgccaagctgttcttcctccgcgccaagagaagcggatctggcgtgaagcagaccctgaatttcgacctgctgaagctggctggcgacgtggaatccaacccaggccctactagtatggactggatttggcgcatccttttccttgtcggcgctgctaccggcgcgcattccttcgaacaggtgcaactgctggaatctggcggcggactggtgcagcctggcggatctctgagactgagctgtgccgccagcggcttcaccttcagcagctacgccatgagctgggtgcgccaggcccctggaaaaggactggaatgggtgtccgtgatccggtccagcggcagcagcacctattacgccgatagcgtgaagggccggttcaccatcagccgggacaacagcaagaacaccctgtacctccagatgaacagcctgcgggccgaggacaccgccgtgtactattgtgctaggggaggcggctacttcgactactggggccagggaacactcgtgaccgtgtcctctacgcgtgaggacctgaagaacgtgttcccacctgaggtggccgtgttcgagcctagcgaggccgagatcagccacacccagaaagccaccctcgtgtgcctggctaccggcttctaccccgaccatgtggaactgtcttggtgggtcaacggcaaagaggtgcacagcggcgtgtgtaccgacccccagccactgaaagaacagcccgccctgaacgacagccggtactgcctgagcagcagactgagagtgtccgccaccttctggcagaacccccggaaccacttcagatgccaggtgcagttctacggcctgagcgagaacgacgagtggacccaggacagagccaagcccgtgacccagatcgtgtctgccgaagcctggggcagagccgatgatgtgattaagatccactggcaggaaaagaagtccaacaccatcctgggcagccaggaaggcaacaccatgaagaccaacgacacctacatgaagttcagctggctgaccgtgcccgagaagtccctggacaaagaacacagatgcatcgtgcggcacgaaaacaacaagaacggcgtggaccaggaaatcatcttcccacccatcaagaccgatgtgattacaatggaccccaaggacaactgctccaaggacgccaacgataccctgctgctccagctgaccaacaccagcgcctactacatgtacttgttgctgctgctgaagtccgtggtgtacttcgccatcatcacatgctgcctgctgcggagaaccgccttctgctgcaacggcgagaagtct

SEQ ID NO: 7238 - DNA, 2178 bp, synthetic construct
  source 1..2178: mol_type = other DNA
atggccttaccagtgaccgccttgctcctgccgctggccttgctgctccacgccgccaggccggacatccagatgacccagagccccagcagcctgtctgccagcgtgggcgacagagtgaccatcacctgtagagccagccagagcatcagcagctacctgaactggtatcagcagaagcccggcaaggcccccaaactgctgatctacgccgtgtccacactccagagcggcgtgcccagcagattttctggcagcggctccggcaccgacttcaccctgacaatcagctccctccagcccgaggacttcgccacctactactgtcagcagagcggcaccttccctcccaccacatttggacagggcaccaaggtggaaatcaagagactcgagatccagaaccctgatcctgccgtgtaccagctgcgggatagcaagagcagcgacaagagcgtgtgtctgttcaccgacttcgacagccagaccaacgtgtcccagagcaaggactccgacgtgtacatcaccgataagtgcgtgctggacatgcggagcatggacttcaagagcaactccgccgtggcctggtccaacaagtccgatttcgcctgcgccaacgccttcaacaacagcattatccccgaggacacattcttcccaagccccgagagcagcgactccaccgaccacgtgaagcccaaagagacagagaacaccaagcagcccagcaagagctgccacaagcccaaggccatcgtgcacaccgagaaagtgaacatgatgagcctgaccgtgctgggcctgcggatgctgttcgccaaaaccgtggccgtgaacttcctgctgaccgccaagctgttcttcctccgcgccaagagaagcggatctggcgtgaagcagaccctgaatttcgacctgctgaagctggctggcgacgtggaatccaacccaggccctactagtatggactggatttggcgcatccttttccttgtcggcgctgctaccggcgcgcattccttcgaacaggtgcaactgctggaatctggcggcggactggtgcagcctggcggatctctgagactgagctgtgccgccagcggcttcaccttcagcagccacggaatgcactgggtgcgccaggcccctggaaagggactggaatgggtgtccgtgatctccggcagcggcagcaataccggctacgccgatagcgtgaagggccggttcaccatcagccgggacaacagcaagaacaccctgtacctccagatgaacagcctgcgggccgaggacaccgccgtgtactattgtgccagacagtggggcagctacgccttcgattcttggggccagggcaccctcgtgaccgtgtcatctacgcgtgaggacctgaagaacgtgttcccacctgaggtggccgtgttcgagcctagcgaggccgagatcagccacacccagaaagccaccctcgtgtgcctggctaccggcttctaccccgaccatgtggaactgtcttggtgggtcaacggcaaagaggtgcacagcggcgtgtgtaccgacccccagccactgaaagaacagcccgccctgaacgacagccggtactgcctgagcagcagactgagagtgtccgccaccttctggcagaacccccggaaccacttcagatgccaggtgcagttctacggcctgagcgagaacgacgagtggacccaggacagagccaagcccgtgacccagatcgtgtctgccgaagcctggggcagagccgatgatgtgattaagatccactggcaggaaaagaagtccaacaccatcctgggcagccaggaaggcaacaccatgaagaccaacgacacctacatgaagttcagctggctgaccgtgcccgagaagtccctggacaaagaacacagatgcatcgtgcggcacgaaaacaacaagaacggcgtggaccaggaaatcatcttcccacccatcaagaccgatgtgattacaatggaccccaaggacaactgctccaaggacgccaacgataccctgctgctccagctgaccaacaccagcgcctactacatgtacttgttgctgctgctgaagtccgtggtgtacttcgccatcatcacatgctgcctgctgcggagaaccgccttctgctgcaacggcgagaagtct

SEQ ID NO: 7239 - DNA, 2208 bp, synthetic construct
  source 1..2208: mol_type = other DNA
atggccttaccagtgaccgccttgctcctgccgctggccttgctgctccacgccgccaggccggacatcgtgatgagccagagccctagcagcctggccgtgtccgtgggcgagaaagtgaccatgagctgcaagagcagccagtccctgctgcacagcagcaaccagaagaactacctggcctggtatcagcagaagcccggccagtcccccaaggtgctgatctactgggccagcaccagagaaagcggcgtgcccgatagattcaccggcagcggctctggcaccgacttcaccctgaccatcaccagcgtgaagtccgaggacctggctgtgtactactgccagcagtattacagctacccctggaccttcggcggaggcacccggctggaaatcaaaagactcgagatccagaaccctgatcctgccgtgtaccagctgcgggatagcaagagcagcgacaagagcgtgtgtctgttcaccgacttcgacagccagaccaacgtgtcccagagcaaggactccgacgtgtacatcaccgataagtgcgtgctggacatgcggagcatggacttcaagagcaactccgccgtggcctggtccaacaagtccgatttcgcctgcgccaacgccttcaacaacagcattatccccgaggacacattcttcccaagccccgagagcagcgactccaccgaccacgtgaagcccaaagagacagagaacaccaagcagcccagcaagagctgccacaagcccaaggccatcgtgcacaccgagaaagtgaacatgatgagcctgaccgtgctgggcctgcggatgctgttcgccaaaaccgtggccgtgaacttcctgctgaccgccaagctgttcttcctccgcgccaagagaagcggatctggcgtgaagcagaccctgaatttcgacctgctgaagctggctggcgacgtggaatccaacccaggccctactagtatggactggatttggcgcatccttttccttgtcggcgctgctaccggcgcgcattccttcgaagaagtgcaactccagcagagcgtggccgagcttgtgaagcctggcgcttccgtgaagatgtcctgcaaggtgtccggctacaccctgacagaccacaccatccactggatgaagcagcggcctgagcagggcctggaatggatcggctacatctaccccagggacggcatcaccggctacaacgagaagttcaagggcaaggccacactgaccgccgacaccagcagcagcacagcctacatgcaactgaacagcctgaccagcgaggacagcgccgtgtacttctgtgccagatggggctacagctacagaaactacgcctactactacgactactggggccagggcacaaccctgaccgtgtctagtacgcgtgaggacctgaagaacgtgttcccacctgaggtggccgtgttcgagcctagcgaggccgagatcagccacacccagaaagccaccctcgtgtgcctggctaccggcttctaccccgaccatgtggaactgtcttggtgggtcaacggcaaagaggtgcacagcggcgtgtgtaccgacccccagccactgaaagaacagcccgccctgaacgacagccggtactgcctgagcagcagactgagagtgtccgccaccttctggcagaacccccggaaccacttcagatgccaggtgcagttctacggcctgagcgagaacgacgagtggacccaggacagagccaagcccgtgacccagatcgtgtctgccgaagcctggggcagagccgatgatgtgattaagatccactggcaggaaaagaagtccaacaccatcctgggcagccaggaaggcaacaccatgaagaccaacgacacctacatgaagttcagctggctgaccgtgcccgagaagtccctggacaaagaacacagatgcatcgtgcggcacgaaaacaacaagaacggcgtggaccaggaaatcatcttcccacccatcaagaccgatgtgattacaatggaccccaaggacaactgctccaaggacgccaacgataccctgctgctccagctgaccaacaccagcgcctactacatgtacttgttgctgctgctgaagtccgtggtgtacttcgccatcatcacatgctgcctgctgcggagaaccgccttctgctgcaacggcgagaagtct

SEQ ID NO: 7240 - DNA, 2199 bp, synthetic construct
  source 1..2199: mol_type = other DNA
atggccttaccagtgaccgccttgctcctgccgctggccttgctgctccacgccgccaggccggagatcgtgctgacacagagccctggcaccctgagcctgtctccaggcgaaagagccacactgagctgtcgggccagccagagcgtgtccagctcttacctggcctggtatcagcagaagcccggccaggctccccggctgctgatctacggaacaagcagcagagccaccggcatccccgacagattttctggcagcggctccggcaccgacttcaccctgacaatcagcagactggaacccgaggacttcgccgtgtactactgccagcagtacggcagcagccccttcacctttggcggaggcaccaaggtggaaatcaagagactcgagatccagaaccctgatcctgccgtgtaccagctgcgggatagcaagagcagcgacaagagcgtgtgtctgttcaccgacttcgacagccagaccaacgtgtcccagagcaaggactccgacgtgtacatcaccgataagtgcgtgctggacatgcggagcatggacttcaagagcaactccgccgtggcctggtccaacaagtccgatttcgcctgcgccaacgccttcaacaacagcattatccccgaggacacattcttcccaagccccgagagcagcgactccaccgaccacgtgaagcccaaagagacagagaacaccaagcagcccagcaagagctgccacaagcccaaggccatcgtgcacaccgagaaagtgaacatgatgagcctgaccgtgctgggcctgcggatgctgttcgccaaaaccgtggccgtgaacttcctgctgaccgccaagctgttcttcctccgcgccaagagaagcggatctggcgtgaagcagaccctgaatttcgacctgctgaagctggctggcgacgtggaatccaacccaggccctactagtatggactggatttggcgcatccttttccttgtcggcgctgctaccggcgcgcattccttcgaacaggtgcaactccaggaatctggccccggactggctaagcccagcgagacactgagcctgacctgtaccgtgtccggcgacagcatcaccagctactactggtcctggatcagacagccccctggcaagggcctggaatggatcggctacatctactacagcggcagcaccaactacaaccccagcctgaagtccagagtgaccatcagcgtggacaccagcaagaaccagttctccctgaagctgagcagcgtgacagccgccgacaccgccgtgtattattgcgccagagatcagcggagaatcgccgctgccggcacccacttttacggcatggatgtgtggggccagggcaccaccgtgaccgtgtcatctacgcgtgaggacctgaagaacgtgttcccacctgaggtggccgtgttcgagcctagcgaggccgagatcagccacacccagaaagccaccctcgtgtgcctggctaccggcttctaccccgaccatgtggaactgtcttggtgggtcaacggcaaagaggtgcacagcggcgtgtgtaccgacccccagccactgaaagaacagcccgccctgaacgacagccggtactgcctgagcagcagactgagagtgtccgccaccttctggcagaacccccggaaccacttcagatgccaggtgcagttctacggcctgagcgagaacgacgagtggacccaggacagagccaagcccgtgacccagatcgtgtctgccgaagcctggggcagagccgatgatgtgattaagatccactggcaggaaaagaagtccaacaccatcctgggcagccaggaaggcaacaccatgaagaccaacgacacctacatgaagttcagctggctgaccgtgcccgagaagtccctggacaaagaacacagatgcatcgtgcggcacgaaaacaacaagaacggcgtggaccaggaaatcatcttcccacccatcaagaccgatgtgattacaatggaccccaaggacaactgctccaaggacgccaacgataccctgctgctccagctgaccaacaccagcgcctactacatgtacttgttgctgctgctgaagtccgtggtgtacttcgccatcatcacatgctgcctgctgcggagaaccgccttctgctgcaacggcgagaagtct

SEQ ID NO: 7241 - DNA, 2175 bp, synthetic construct
  source 1..2175: mol_type = other DNA
atggccttaccagtgaccgccttgctcctgccgctggccttgctgctccacgccgccaggccggacatcctgctgacccagagccccgtgatcctgtccgtgtctcctggcgagagagtgtccttcagctgtcgggccagccagagcatcggcaccaacatccactggtatcagcagcggaccaacggcagccccagactgctgattaagtacgccagcgagtccatcagcggcatccccagcagattttccggcagcggctccggcaccgacttcaccctgagcatcaacagcgtggaaagcgaggacattgccgactactactgccagcagaacaacaactggcccaccaccttcggagccggcaccaagctggaactgaagctcgagatccagaaccctgatcctgccgtgtaccagctgcgggatagcaagagcagcgacaagagcgtgtgtctgttcaccgacttcgacagccagaccaacgtgtcccagagcaaggactccgacgtgtacatcaccgataagtgcgtgctggacatgcggagcatggacttcaagagcaactccgccgtggcctggtccaacaagtccgatttcgcctgcgccaacgccttcaacaacagcattatccccgaggacacattcttcccaagccccgagagcagcgactccaccgaccacgtgaagcccaaagagacagagaacaccaagcagcccagcaagagctgccacaagcccaaggccatcgtgcacaccgagaaagtgaacatgatgagcctgaccgtgctgggcctgcggatgctgttcgccaaaaccgtggccgtgaacttcctgctgaccgccaagctgttcttcctccgcgccaagagaagcggatctggcgtgaagcagaccctgaatttcgacctgctgaagctggctggcgacgtggaatccaacccaggccctactagtatggactggatttggcgcatccttttccttgtcggcgctgctaccggcgcgcattccttcgaacaggtgcagctgaagcagagcggacctggcctggtgcagcctagccagagcctgtccatcacctgtaccgtgtccggcttcagcctgaccaactacggcgtgcactgggtgcgccagagccctggaaaaggactggaatggctgggagtgatttggagcggcggcaacaccgactacaacacccccttcaccagcagactgtctatcaacaaggacaacagcaagagccaggtgttcttcaagatgaacagcctccagagcaacgacaccgccatctactactgtgctagagccctgacctactatgactacgagttcgcctactggggccagggcacactcgtgacagtgtctgctacgcgtgaggacctgaagaacgtgttcccacctgaggtggccgtgttcgagcctagcgaggccgagatcagccacacccagaaagccaccctcgtgtgcctggctaccggcttctaccccgaccatgtggaactgtcttggtgggtcaacggcaaagaggtgcacagcggcgtgtgtaccgacccccagccactgaaagaacagcccgccctgaacgacagccggtactgcctgagcagcagactgagagtgtccgccaccttctggcagaacccccggaaccacttcagatgccaggtgcagttctacggcctgagcgagaacgacgagtggacccaggacagagccaagcccgtgacccagatcgtgtctgccgaagcctggggcagagccgatgatgtgattaagatccactggcaggaaaagaagtccaacaccatcctgggcagccaggaaggcaacaccatgaagaccaacgacacctacatgaagttcagctggctgaccgtgcccgagaagtccctggacaaagaacacagatgcatcgtgcggcacgaaaacaacaagaacggcgtggaccaggaaatcatcttcccacccatcaagaccgatgtgattacaatggaccccaaggacaactgctccaaggacgccaacgataccctgctgctccagctgaccaacaccagcgcctactacatgtacttgttgctgctgctgaagtccgtggtgtacttcgccatcatcacatgctgcctgctgcggagaaccgccttctgctgcaacggcgagaagtct

SEQ ID NO: 7242 - DNA, 2154 bp, synthetic construct
  source 1..2154: mol_type = other DNA
atggccttaccagtgaccgccttgctcctgccgctggccttgctgctccacgccgccaggccgatgacccagagccccaagttcctgctggtgtctgccggcgacagagtgaccctgacatgcaaggccagccagagcgtgaacaacgacgtgtactggtatcagcaggaacccggccagtcccccaagctgctgatctactgggccagcaccagagaaagcggcgtgcccgatagattcaccggcagcggctctggcaccgacttcaccctgacaatcagcagcgtgcaggccgaggacctggccgtgtactactgcaagcagagctacaacctgtacaccttcggcggaggcaccaagctggaaatcaagagactcgagatccagaaccctgatcctgccgtgtaccagctgcgggatagcaagagcagcgacaagagcgtgtgtctgttcaccgacttcgacagccagaccaacgtgtcccagagcaaggactccgacgtgtacatcaccgataagtgcgtgctggacatgcggagcatggacttcaagagcaactccgccgtggcctggtccaacaagtccgatttcgcctgcgccaacgccttcaacaacagcattatccccgaggacacattcttcccaagccccgagagcagcgactccaccgaccacgtgaagcccaaagagacagagaacaccaagcagcccagcaagagctgccacaagcccaaggccatcgtgcacaccgagaaagtgaacatgatgagcctgaccgtgctgggcctgcggatgctgttcgccaaaaccgtggccgtgaacttcctgctgaccgccaagctgttcttcctccgcgccaagagaagcggatctggcgtgaagcagaccctgaatttcgacctgctgaagctggctggcgacgtggaatccaacccaggccctactagtatggactggatttggcgcatccttttccttgtcggcgctgctaccggcgcgcattccttcgaagaatctggaagaggactggtgcagcctggcggcagcagaaagctgtcttgtgccgccagcggcttcaccttcagcaccagcggaatgcactgggtgcgccaggcccctgagaagggactggaatgggtggcctacatcagctccggcagcaccaccatctaccacgccgataccgtgaagggccggttcaccatcagccgggacaaccccaagaataccctgttcctccagatgaccagcctgcggagcgaggacaccgccatgtactattgctgcgccagaagcggccagttcggcaactacttcgactactggggccagggcaccaccctgaccgtgtcatctacgcgtgaggacctgaagaacgtgttcccacctgaggtggccgtgttcgagcctagcgaggccgagatcagccacacccagaaagccaccctcgtgtgcctggctaccggcttctaccccgaccatgtggaactgtcttggtgggtcaacggcaaagaggtgcacagcggcgtgtgtaccgacccccagccactgaaagaacagcccgccctgaacgacagccggtactgcctgagcagcagactgagagtgtccgccaccttctggcagaacccccggaaccacttcagatgccaggtgcagttctacggcctgagcgagaacgacgagtggacccaggacagagccaagcccgtgacccagatcgtgtctgccgaagcctggggcagagccgatgatgtgattaagatccactggcaggaaaagaagtccaacaccatcctgggcagccaggaaggcaacaccatgaagaccaacgacacctacatgaagttcagctggctgaccgtgcccgagaagtccctggacaaagaacacagatgcatcgtgcggcacgaaaacaacaagaacggcgtggaccaggaaatcatcttcccacccatcaagaccgatgtgattacaatggaccccaaggacaactgctccaaggacgccaacgataccctgctgctccagctgaccaacaccagcgcctactacatgtacttgttgctgctgctgaagtccgtggtgtacttcgccatcatcacatgctgcctgctgcggagaaccgccttctgctgcaacggcgagaagtct

SEQ ID NO: 7243 - DNA, 2169 bp, synthetic construct
  source 1..2169: mol_type = other DNA
atggccttaccagtgaccgccttgctcctgccgctggccttgctgctccacgccgccaggccgcagagcccatctagcctggctgtgtctgccggcgagaaagtgaccatgagctgcaagagcagccagagcctgctgaacagccggacccggaagaactacctggcctggtatcagcagaagcccggccagagccccaagctgctgatctactgggccagcaccagagaaagcggcgtgcccgatagattcaccggctctggcagcggcaccgacttcaccctgacaatcagcagcgtgcaggccgaggacctggccgtgtactactgcaagcagagcaacctgtacaccttcggcggaggcaccaagctggaaatcaagctcgagatccagaaccctgatcctgccgtgtaccagctgcgggatagcaagagcagcgacaagagcgtgtgtctgttcaccgacttcgacagccagaccaacgtgtcccagagcaaggactccgacgtgtacatcaccgataagtgcgtgctggacatgcggagcatggacttcaagagcaactccgccgtggcctggtccaacaagtccgatttcgcctgcgccaacgccttcaacaacagcattatccccgaggacacattcttcccaagccccgagagcagcgactccaccgaccacgtgaagcccaaagagacagagaacaccaagcagcccagcaagagctgccacaagcccaaggccatcgtgcacaccgagaaagtgaacatgatgagcctgaccgtgctgggcctgcggatgctgttcgccaaaaccgtggccgtgaacttcctgctgaccgccaagctgttcttcctccgcgccaagagaagcggatctggcgtgaagcagaccctgaatttcgacctgctgaagctggctggcgacgtggaatccaacccaggccctactagtatggactggatttggcgcatccttttccttgtcggcgctgctaccggcgcgcattccttcgaacaggtgcagctggaagagtctggacccgagcttgtgaagcctggggccagcgtgaagctgtcctgtaaagccagcggctacaccttcaccgagtacatcatccactgggtcaagcagcggagcggccagggcctggaatggatcggctggttttaccctggctccggcagcatcaagtacaacgagaagttcaaggacaaggccaccctgaccgccgacaagtccagcagcaccgtgtacatggaactgagcggcctgaccagcgaggacagcgccgtgtatttctgcgccagacacgacggctacagctacttcgactattggggccagggcaccacactgaccgtgtcctctacgcgtgaggacctgaagaacgtgttcccacctgaggtggccgtgttcgagcctagcgaggccgagatcagccacacccagaaagccaccctcgtgtgcctggctaccggcttctaccccgaccatgtggaactgtcttggtgggtcaacggcaaagaggtgcacagcggcgtgtgtaccgacccccagccactgaaagaacagcccgccctgaacgacagccggtactgcctgagcagcagactgagagtgtccgccaccttctggcagaacccccggaaccacttcagatgccaggtgcagttctacggcctgagcgagaacgacgagtggacccaggacagagccaagcccgtgacccagatcgtgtctgccgaagcctggggcagagccgatgatgtgattaagatccactggcaggaaaagaagtccaacaccatcctgggcagccaggaaggcaacaccatgaagaccaacgacacctacatgaagttcagctggctgaccgtgcccgagaagtccctggacaaagaacacagatgcatcgtgcggcacgaaaacaacaagaacggcgtggaccaggaaatcatcttcccacccatcaagaccgatgtgattacaatggaccccaaggacaactgctccaaggacgccaacgataccctgctgctccagctgaccaacaccagcgcctactacatgtacttgttgctgctgctgaagtccgtggtgtacttcgccatcatcacatgctgcctgctgcggagaaccgccttctgctgcaacggcgagaagtct

SEQ ID NO: 7244 - DNA, 2178 bp, synthetic construct
  source 1..2178: mol_type = other DNA
atggccttaccagtgaccgccttgctcctgccgctggccttgctgctccacgccgccaggccggacatccagatgacccagagccccagcagcctgtctgcctctctgggcgagagagtgtccctgacctgtcgggccacacaggaactgagcggctacctgtcttggctgcagcagaagcccgacggcaccatcaagcggctgatctacgccgccagcaccctggatagcggcgtgcccaagagattcagcggcaacagaagcggcagcgactacagcctgaccatcagctccctggaaagcgaggacttcgccgactactactgcctgcagtacgccatctacccctacaccttcggcggaggcaccaagctggaaatcaagctcgagatccagaaccctgatcctgccgtgtaccagctgcgggatagcaagagcagcgacaagagcgtgtgtctgttcaccgacttcgacagccagaccaacgtgtcccagagcaaggactccgacgtgtacatcaccgataagtgcgtgctggacatgcggagcatggacttcaagagcaactccgccgtggcctggtccaacaagtccgatttcgcctgcgccaacgccttcaacaacagcattatccccgaggacacattcttcccaagccccgagagcagcgactccaccgaccacgtgaagcccaaagagacagagaacaccaagcagcccagcaagagctgccacaagcccaaggccatcgtgcacaccgagaaagtgaacatgatgagcctgaccgtgctgggcctgcggatgctgttcgccaaaaccgtggccgtgaacttcctgctgaccgccaagctgttcttcctccgcgccaagagaagcggatctggcgtgaagcagaccctgaatttcgacctgctgaagctggctggcgacgtggaatccaacccaggccctactagtatggactggatttggcgcatccttttccttgtcggcgctgctaccggcgcgcattccttcgaagaggtgcaactgcagcagtctggccccgagcttgtgaagcctggcgcctccgtgaagatgagctgcaaggccagcggctacacctttaccagctacttcatccactgggtcaagcagaaacccggccagggcctggaatggatcggcttcatcaacccttacaacgacggcagcaagtacaacgagaagttcaagggcaaggccaccctgaccagcgacaagagcagcagcaccgcctacatggaactgtccagcctgacatccgaggacagcgccgtgtactactgcaccagggacgacggctactacggctacgccatggactactggggccagggaacaagcgtcaccgtgtcctctacgcgtgaggacctgaagaacgtgttcccacctgaggtggccgtgttcgagcctagcgaggccgagatcagccacacccagaaagccaccctcgtgtgcctggctaccggcttctaccccgaccatgtggaactgtcttggtgggtcaacggcaaagaggtgcacagcggcgtgtgtaccgacccccagccactgaaagaacagcccgccctgaacgacagccggtactgcctgagcagcagactgagagtgtccgccaccttctggcagaacccccggaaccacttcagatgccaggtgcagttctacggcctgagcgagaacgacgagtggacccaggacagagccaagcccgtgacccagatcgtgtctgccgaagcctggggcagagccgatgatgtgattaagatccactggcaggaaaagaagtccaacaccatcctgggcagccaggaaggcaacaccatgaagaccaacgacacctacatgaagttcagctggctgaccgtgcccgagaagtccctggacaaagaacacagatgcatcgtgcggcacgaaaacaacaagaacggcgtggaccaggaaatcatcttcccacccatcaagaccgatgtgattacaatggaccccaaggacaactgctccaaggacgccaacgataccctgctgctccagctgaccaacaccagcgcctactacatgtacttgttgctgctgctgaagtccgtggtgtacttcgccatcatcacatgctgcctgctgcggagaaccgccttctgctgcaacggcgagaagtct

SEQ ID NO: 7245 - DNA, 2193 bp, synthetic construct
  source 1..2193: mol_type = other DNA
atggccttaccagtgaccgccttgctcctgccgctggccttgctgctccacgccgccaggccggacaccatcgtgctgacacagagccctgcttccctggccgtgtccctgggacagagagccaccatctcttgcagagccagcgagagcgtggacagctacggcaacagcttcatgcactggtatcagcagaagcccggccagccccccaagctgctgatctacctggcctccaacctggaaagcggcgtgcccgccagattttctggcagcggcagcagaaccgacttcaccctgaccatcgaccccgtggaagccgatgatgccgccacctactactgccagcagaacaactacgacccctggaccttcggcggaggcaccaagctggaaatcaagctcgagatccagaaccctgatcctgccgtgtaccagctgcgggatagcaagagcagcgacaagagcgtgtgtctgttcaccgacttcgacagccagaccaacgtgtcccagagcaaggactccgacgtgtacatcaccgataagtgcgtgctggacatgcggagcatggacttcaagagcaactccgccgtggcctggtccaacaagtccgatttcgcctgcgccaacgccttcaacaacagcattatccccgaggacacattcttcccaagccccgagagcagcgactccaccgaccacgtgaagcccaaagagacagagaacaccaagcagcccagcaagagctgccacaagcccaaggccatcgtgcacaccgagaaagtgaacatgatgagcctgaccgtgctgggcctgcggatgctgttcgccaaaaccgtggccgtgaacttcctgctgaccgccaagctgttcttcctccgcgccaagagaagcggatctggcgtgaagcagaccctgaatttcgacctgctgaagctggctggcgacgtggaatccaacccaggccctactagtatggactggatttggcgcatccttttccttgtcggcgctgctaccggcgcgcattccttcgaagaagtgcaactccagcagagcggccctgagcttgtgaagcctggcgcttccgtgaagatgagctgcaaggccagcggctacaccttcaccagctacgtgatgcactgggtcaagcagaaacctggacagggcctggaatggatcggctacatcaacccctacaacgacggcaccaagtacaacgagaagttcaagggcaaggccaccctgacaagcgacaccagcagcagcaccgcctacatggaactgaacagcctgaccagcgaggacagcgccgtgtacttctgcgccagacccatctacttcgacaacgactacttcgattactggggccagggcaccaccctgaaggtgtcctctacgcgtgaggacctgaagaacgtgttcccacctgaggtggccgtgttcgagcctagcgaggccgagatcagccacacccagaaagccaccctcgtgtgcctggctaccggcttctaccccgaccatgtggaactgtcttggtgggtcaacggcaaagaggtgcacagcggcgtgtgtaccgacccccagccactgaaagaacagcccgccctgaacgacagccggtactgcctgagcagcagactgagagtgtccgccaccttctggcagaacccccggaaccacttcagatgccaggtgcagttctacggcctgagcgagaacgacgagtggacccaggacagagccaagcccgtgacccagatcgtgtctgccgaagcctggggcagagccgatgatgtgattaagatccactggcaggaaaagaagtccaacaccatcctgggcagccaggaaggcaacaccatgaagaccaacgacacctacatgaagttcagctggctgaccgtgcccgagaagtccctggacaaagaacacagatgcatcgtgcggcacgaaaacaacaagaacggcgtggaccaggaaatcatcttcccacccatcaagaccgatgtgattacaatggaccccaaggacaactgctccaaggacgccaacgataccctgctgctccagctgaccaacaccagcgcctactacatgtacttgttgctgctgctgaagtccgtggtgtacttcgccatcatcacatgctgcctgctgcggagaaccgccttctgctgcaacggcgagaagtct

SEQ ID NO: 7246 - DNA, 2178 bp, synthetic construct
  source 1..2178: mol_type = other DNA
atggccttaccagtgaccgccttgctcctgccgctggccttgctgctccacgccgccaggccggacatccagatgacccagagccccagcagcctgtctgccagcgtgggcgacagagtgaccatcacatgcaaggccagccaggacgtgggaatcgccgtggcctggtatcagcagaaacccggcaaggtgcccaagctgctgatctactgggccagcaccagacacaccggcgtgcccgatagattttccggcagcggctccggcaccgacttcaccctgacaatcagctccctccagcccgaggacgtggcaacctactactgccagcagtacagcagctacccctacaccttcggccagggcaccaaggtggaaatcaagagactcgagatccagaaccctgatcctgccgtgtaccagctgcgggatagcaagagcagcgacaagagcgtgtgtctgttcaccgacttcgacagccagaccaacgtgtcccagagcaaggactccgacgtgtacatcaccgataagtgcgtgctggacatgcggagcatggacttcaagagcaactccgccgtggcctggtccaacaagtccgatttcgcctgcgccaacgccttcaacaacagcattatccccgaggacacattcttcccaagccccgagagcagcgactccaccgaccacgtgaagcccaaagagacagagaacaccaagcagcccagcaagagctgccacaagcccaaggccatcgtgcacaccgagaaagtgaacatgatgagcctgaccgtgctgggcctgcggatgctgttcgccaaaaccgtggccgtgaacttcctgctgaccgccaagctgttcttcctccgcgccaagagaagcggatctggcgtgaagcagaccctgaatttcgacctgctgaagctggctggcgacgtggaatccaacccaggccctactagtatggactggatttggcgcatccttttccttgtcggcgctgctaccggcgcgcattccttcgaagaagtgcaactggtggaatcaggcggcggactggtgcagcctggcggatctctgagactgagctgtgccgccagcggcttcgacttcagccggtactggatgagctgggtgcgccaggcccctggcaaaggactggaatggatcggcgagatcaaccccgacagcagcaccatcaactacgcccccagcctgaaggacaagttcatcatcagccgggacaacgccaagaacagcctgtacctccagatgaactccctgcgggccgaggacaccgccgtgtactattgcgccagacccgacggcaactactggtacttcgacgtgtggggccagggaaccctcgtgaccgtgtcatctacgcgtgaggacctgaagaacgtgttcccacctgaggtggccgtgttcgagcctagcgaggccgagatcagccacacccagaaagccaccctcgtgtgcctggctaccggcttctaccccgaccatgtggaactgtcttggtgggtcaacggcaaagaggtgcacagcggcgtgtgtaccgacccccagccactgaaagaacagcccgccctgaacgacagccggtactgcctgagcagcagactgagagtgtccgccaccttctggcagaacccccggaaccacttcagatgccaggtgcagttctacggcctgagcgagaacgacgagtggacccaggacagagccaagcccgtgacccagatcgtgtctgccgaagcctggggcagagccgatgatgtgattaagatccactggcaggaaaagaagtccaacaccatcctgggcagccaggaaggcaacaccatgaagaccaacgacacctacatgaagttcagctggctgaccgtgcccgagaagtccctggacaaagaacacagatgcatcgtgcggcacgaaaacaacaagaacggcgtggaccaggaaatcatcttcccacccatcaagaccgatgtgattacaatggaccccaaggacaactgctccaaggacgccaacgataccctgctgctccagctgaccaacaccagcgcctactacatgtacttgttgctgctgctgaagtccgtggtgtacttcgccatcatcacatgctgcctgctgcggagaaccgccttctgctgcaacggcgagaagtct

SEQ ID NO: 7247 - DNA, 2178 bp, synthetic construct
  source 1..2178: mol_type = other DNA
atggccttaccagtgaccgccttgctcctgccgctggccttgctgctccacgccgccaggccggacatcgtgatgacccagagccagaagagcatgagcaccagcgtgggcgacagagtgagcatcacctgcaaggccagccaggacgtgatcaccggcgtggcctggtaccagcagaagcccggccagagccccaagctgctgatctacagcgccagctacagatacaccggcgtgcccgacagattcaccggcagcggcagcggcaccgacttcaccttcaccatcagcaacgtgcaggccgaggacctggccgtgtactactgccagcagcactacagcacccccctgaccttcggcgccggcaccaagctggagctgaagctcgagatccagaaccctgatcctgccgtgtaccagctgcgggatagcaagagcagcgacaagagcgtgtgtctgttcaccgacttcgacagccagaccaacgtgtcccagagcaaggactccgacgtgtacatcaccgataagtgcgtgctggacatgcggagcatggacttcaagagcaactccgccgtggcctggtccaacaagtccgatttcgcctgcgccaacgccttcaacaacagcattatccccgaggacacattcttcccaagccccgagagcagcgactccaccgaccacgtgaagcccaaagagacagagaacaccaagcagcccagcaagagctgccacaagcccaaggccatcgtgcacaccgagaaagtgaacatgatgagcctgaccgtgctgggcctgcggatgctgttcgccaaaaccgtggccgtgaacttcctgctgaccgccaagctgttcttcctccgcgccaagagaagcggatctggcgtgaagcagaccctgaatttcgacctgctgaagctggctggcgacgtggaatccaacccaggccctactagtatggactggatttggcgcatccttttccttgtcggcgctgctaccggcgcgcattccttcgaacaggtgcagctgcagcagcccggcgccgagctggtgagacccggcgccagcgtgaagctgagctgcaaggccagcggctacagcttcaccacctactggatgaactgggtgaagcagagacccggccagggcctggagtggatcggcatgatccaccccagcgacagcgagaccagactgaaccagaagttcaaggacaaggccaccctgaccgtggacaagagcagcagcaccgcctacatgcagctgagcagccccaccagcgaggacagcgccgtgtactactgcgccagaagcaccatgatcgccaccagagccatggactactggggccagggcaccagcgtgaccgtgagcagcacgcgtgaggacctgaagaacgtgttcccacctgaggtggccgtgttcgagcctagcgaggccgagatcagccacacccagaaagccaccctcgtgtgcctggctaccggcttctaccccgaccatgtggaactgtcttggtgggtcaacggcaaagaggtgcacagcggcgtgtgtaccgacccccagccactgaaagaacagcccgccctgaacgacagccggtactgcctgagcagcagactgagagtgtccgccaccttctggcagaacccccggaaccacttcagatgccaggtgcagttctacggcctgagcgagaacgacgagtggacccaggacagagccaagcccgtgacccagatcgtgtctgccgaagcctggggcagagccgatgatgtgattaagatccactggcaggaaaagaagtccaacaccatcctgggcagccaggaaggcaacaccatgaagaccaacgacacctacatgaagttcagctggctgaccgtgcccgagaagtccctggacaaagaacacagatgcatcgtgcggcacgaaaacaacaagaacggcgtggaccaggaaatcatcttcccacccatcaagaccgatgtgattacaatggaccccaaggacaactgctccaaggacgccaacgataccctgctgctccagctgaccaacaccagcgcctactacatgtacttgttgctgctgctgaagtccgtggtgtacttcgccatcatcacatgctgcctgctgcggagaaccgccttctgctgcaacggcgagaagtct

SEQ ID NO: 7248 - DNA, 2196 bp, synthetic construct
  source 1..2196: mol_type = other DNA
atggccttaccagtgaccgccttgctcctgccgctggccttgctgctccacgccgccaggccgcagagcgtgctgacacagcctccatccgtgtctggcgctccaggccagagagtgaccatctcctgtaccggcagcggcagcaacatcggagccccctacgacgtgtcctggtatcagcaactgcctggcaccgcccccaagctgctgatctaccacaacaacaagcggcccagcggcgtgcccgatagattcagcggctctaagagcggcaccagcgccagcctggctatcactggactccaggccgaggacgaggccgactactactgtgccacagtggaagccggcctgagcggctctgtgtttggcggcggaacaaagctgaccgtgctgggagctctcgagatccagaaccctgatcctgccgtgtaccagctgcgggatagcaagagcagcgacaagagcgtgtgtctgttcaccgacttcgacagccagaccaacgtgtcccagagcaaggactccgacgtgtacatcaccgataagtgcgtgctggacatgcggagcatggacttcaagagcaactccgccgtggcctggtccaacaagtccgatttcgcctgcgccaacgccttcaacaacagcattatccccgaggacacattcttcccaagccccgagagcagcgactccaccgaccacgtgaagcccaaagagacagagaacaccaagcagcccagcaagagctgccacaagcccaaggccatcgtgcacaccgagaaagtgaacatgatgagcctgaccgtgctgggcctgcggatgctgttcgccaaaaccgtggccgtgaacttcctgctgaccgccaagctgttcttcctccgcgccaagagaagcggatctggcgtgaagcagaccctgaatttcgacctgctgaagctggctggcgacgtggaatccaacccaggccctactagtatggactggatttggcgcatccttttccttgtcggcgctgctaccggcgcgcattccttcgaacaggtgcaactggtgcagagcggagccgaagtgaagaaacctggggccagcgtgaaggtgtcctgcaaggtgtccggctacaccctgaccgagctgagcattcactgggtgcgccaggcccctggcaagggactggaatggatgggcggcttcgaccccgaagagaacgagatcgtgtacgcccagcggttccagggcagagtgacaatgaccgaggacaccagcaccgacaccgcctacatggaactgagcagcctgcggagcgaggataccgccgtgtactactgcgccatcgtgggcagcttcagccctctgacactgggcctgtggggccagggaactatggtcaccgtgtccagcacgcgtgaggacctgaagaacgtgttcccacctgaggtggccgtgttcgagcctagcgaggccgagatcagccacacccagaaagccaccctcgtgtgcctggctaccggcttctaccccgaccatgtggaactgtcttggtgggtcaacggcaaagaggtgcacagcggcgtgtgtaccgacccccagccactgaaagaacagcccgccctgaacgacagccggtactgcctgagcagcagactgagagtgtccgccaccttctggcagaacccccggaaccacttcagatgccaggtgcagttctacggcctgagcgagaacgacgagtggacccaggacagagccaagcccgtgacccagatcgtgtctgccgaagcctggggcagagccgatgatgtgattaagatccactggcaggaaaagaagtccaacaccatcctgggcagccaggaaggcaacaccatgaagaccaacgacacctacatgaagttcagctggctgaccgtgcccgagaagtccctggacaaagaacacagatgcatcgtgcggcacgaaaacaacaagaacggcgtggaccaggaaatcatcttcccacccatcaagaccgatgtgattacaatggaccccaaggacaactgctccaaggacgccaacgataccctgctgctccagctgaccaacaccagcgcctactacatgtacttgttgctgctgctgaagtccgtggtgtacttcgccatcatcacatgctgcctgctgcggagaaccgccttctgctgcaacggcgagaagtct

SEQ ID NO: 7249 - DNA, 2196 bp, synthetic construct
  source 1..2196: mol_type = other DNA
atggccttaccagtgaccgccttgctcctgccgctggccttgctgctccacgccgccaggccgcagagcgtgctgacacagcctccatccgtgtctggcgctccaggccagagagtgaccatctcctgtaccggcagcggcagcaacatcggagccccctacgacgtgtcctggtatcagcaactgcctggcaccgcccccaagctgctgatctaccacaacaacaagcggcccagcggcgtgcccgatagattcagcggctctaagagcggcaccagcgccagcctggctatcactggactccaggccgaggacgaggccgactactactgccagagctacgacagcagcagcatcagcaccatcttcggcggaggcaccaagctgacagtgctgggagctctcgagatccagaaccctgatcctgccgtgtaccagctgcgggatagcaagagcagcgacaagagcgtgtgtctgttcaccgacttcgacagccagaccaacgtgtcccagagcaaggactccgacgtgtacatcaccgataagtgcgtgctggacatgcggagcatggacttcaagagcaactccgccgtggcctggtccaacaagtccgatttcgcctgcgccaacgccttcaacaacagcattatccccgaggacacattcttcccaagccccgagagcagcgactccaccgaccacgtgaagcccaaagagacagagaacaccaagcagcccagcaagagctgccacaagcccaaggccatcgtgcacaccgagaaagtgaacatgatgagcctgaccgtgctgggcctgcggatgctgttcgccaaaaccgtggccgtgaacttcctgctgaccgccaagctgttcttcctccgcgccaagagaagcggatctggcgtgaagcagaccctgaatttcgacctgctgaagctggctggcgacgtggaatccaacccaggccctactagtatggactggatttggcgcatccttttccttgtcggcgctgctaccggcgcgcattccttcgaacaggtgcaactggtgcagagcggagccgaagtgaagaaacctggggccagcgtgaaggtgtcctgcaaggtgtccggctacaccctgaccgagctgagcattcactgggtgcgccaggcccctggcaagggactggaatggatgggcggcttcgaccccgaagagaacgagatcgtgtacgcccagcggttccagggcagagtgacaatgaccgaggacaccagcaccgacaccgcctacatggaactgagcagcctgcggagcgaggataccgccgtgtactactgtgccatcgtgggcagcttcagcggaatcgcctacagaccttggggccagggcacaatggtcaccgtgtctagcacgcgtgaggacctgaagaacgtgttcccacctgaggtggccgtgttcgagcctagcgaggccgagatcagccacacccagaaagccaccctcgtgtgcctggctaccggcttctaccccgaccatgtggaactgtcttggtgggtcaacggcaaagaggtgcacagcggcgtgtgtaccgacccccagccactgaaagaacagcccgccctgaacgacagccggtactgcctgagcagcagactgagagtgtccgccaccttctggcagaacccccggaaccacttcagatgccaggtgcagttctacggcctgagcgagaacgacgagtggacccaggacagagccaagcccgtgacccagatcgtgtctgccgaagcctggggcagagccgatgatgtgattaagatccactggcaggaaaagaagtccaacaccatcctgggcagccaggaaggcaacaccatgaagaccaacgacacctacatgaagttcagctggctgaccgtgcccgagaagtccctggacaaagaacacagatgcatcgtgcggcacgaaaacaacaagaacggcgtggaccaggaaatcatcttcccacccatcaagaccgatgtgattacaatggaccccaaggacaactgctccaaggacgccaacgataccctgctgctccagctgaccaacaccagcgcctactacatgtacttgttgctgctgctgaagtccgtggtgtacttcgccatcatcacatgctgcctgctgcggagaaccgccttctgctgcaacggcgagaagtct

SEQ ID NO: 7250 - DNA, 2160 bp, synthetic construct
  source 1..2160: mol_type = other DNA
atggccttaccagtgaccgccttgctcctgccgctggccttgctgctccacgccgccaggccggacatccagatgacccagagccccagcagcctgtctgccagcgtgggcgacagagtgaccatcacctgtagagccagccagggcatcagaaacaacctggcctggtatcagcagaagcccggcaaggcccccaagcggctgatctacgccgccagcaatctccagagcggcgtgcccagcagattcacaggctctggcagcggcaccgagttcaccctgatcgtgtctagcctccagcccgaggacttcgccacctactactgcctccagcaccacagctaccccctgacatctggcggaggcaccaaggtggaactcgagatccagaaccctgatcctgccgtgtaccagctgcgggatagcaagagcagcgacaagagcgtgtgtctgttcaccgacttcgacagccagaccaacgtgtcccagagcaaggactccgacgtgtacatcaccgataagtgcgtgctggacatgcggagcatggacttcaagagcaactccgccgtggcctggtccaacaagtccgatttcgcctgcgccaacgccttcaacaacagcattatccccgaggacacattcttcccaagccccgagagcagcgactccaccgaccacgtgaagcccaaagagacagagaacaccaagcagcccagcaagagctgccacaagcccaaggccatcgtgcacaccgagaaagtgaacatgatgagcctgaccgtgctgggcctgcggatgctgttcgccaaaaccgtggccgtgaacttcctgctgaccgccaagctgttcttcctccgcgccaagagaagcggatctggcgtgaagcagaccctgaatttcgacctgctgaagctggctggcgacgtggaatccaacccaggccctactagtatggactggatttggcgcatccttttccttgtcggcgctgctaccggcgcgcattccttcgaagaggtgcaggtgctggaaagtggcggaggactggtgcagcctggcggctctctgagactgtcttgtgccgccagcggcttcaccttcagcagctacgccatgagctgggtgcgccaggcccctggaaaaggactggaatgggtgtccgccatcagcggctctggcgggtctaccaactacgccgatagcgtgaagggccggttcaccatcagccgggacaacagcaagaacaccctgtacctccagatgaacagcctgcgggccgaggacaccgccgtgtattattgtgccggcagcagcgggtggagcgagtattggggacagggcaccctcgtgaccgtgtcctctacgcgtgaggacctgaagaacgtgttcccacctgaggtggccgtgttcgagcctagcgaggccgagatcagccacacccagaaagccaccctcgtgtgcctggctaccggcttctaccccgaccatgtggaactgtcttggtgggtcaacggcaaagaggtgcacagcggcgtgtgtaccgacccccagccactgaaagaacagcccgccctgaacgacagccggtactgcctgagcagcagactgagagtgtccgccaccttctggcagaacccccggaaccacttcagatgccaggtgcagttctacggcctgagcgagaacgacgagtggacccaggacagagccaagcccgtgacccagatcgtgtctgccgaagcctggggcagagccgatgatgtgattaagatccactggcaggaaaagaagtccaacaccatcctgggcagccaggaaggcaacaccatgaagaccaacgacacctacatgaagttcagctggctgaccgtgcccgagaagtccctggacaaagaacacagatgcatcgtgcggcacgaaaacaacaagaacggcgtggaccaggaaatcatcttcccacccatcaagaccgatgtgattacaatggaccccaaggacaactgctccaaggacgccaacgataccctgctgctccagctgaccaacaccagcgcctactacatgtacttgttgctgctgctgaagtccgtggtgtacttcgccatcatcacatgctgcctgctgcggagaaccgccttctgctgcaacggcgagaagtct

SEQ ID NO: 7251 - DNA, 2178 bp, synthetic construct
  source 1..2178: mol_type = other DNA
atggccttaccagtgaccgccttgctcctgccgctggccttgctgctccacgccgccaggccggacgagatccagctggtgcagagcggagccgaagtgaagaagcctggcgagagcctgcggatcagctgcaagggcagcggcttcaacatcgaggactactacatccactgggtgcgccagatgcccggcaagggcctggaatggatgggcagaatcgaccccgagaacgacgagactaagtacggccccatcttccagggccacgtgaccatcagcgccgacaccagcatcaacaccgtgtacctccagtggtccagcctgaaggccagcgacaccgccatgtactactgcgcctttagaggcggcgtgtactggggccagggcaccacagtgacagtgtctagcctcgagatccagaaccctgatcctgccgtgtaccagctgcgggatagcaagagcagcgacaagagcgtgtgtctgttcaccgacttcgacagccagaccaacgtgtcccagagcaaggactccgacgtgtacatcaccgataagtgcgtgctggacatgcggagcatggacttcaagagcaactccgccgtggcctggtccaacaagtccgatttcgcctgcgccaacgccttcaacaacagcattatccccgaggacacattcttcccaagccccgagagcagcgactccaccgaccacgtgaagcccaaagagacagagaacaccaagcagcccagcaagagctgccacaagcccaaggccatcgtgcacaccgagaaagtgaacatgatgagcctgaccgtgctgggcctgcggatgctgttcgccaaaaccgtggccgtgaacttcctgctgaccgccaagctgttcttcctccgcgccaagagaagcggatctggcgtgaagcagaccctgaatttcgacctgctgaagctggctggcgacgtggaatccaacccaggccctactagtatggactggatttggcgcatccttttccttgtcggcgctgctaccggcgcgcattccttcgaagatgtcgtgatgacccagagccccgacagcctggctgtgtctctgggagagagagccaccatcaactgcaagtccagccagtccctgctggacagcgacggcaagacctacctgaactggctccagcagaagcccggccagccccccaagagactgatctccctggtgtccaagctggactccggcgtgcccgatagattttccggctctggcagcggcaccgacttcaccctgacaatcagctcccttcaggccgaggacgtggccgtgtactattgctggcagggcacacacttccccggcacctttggcggaggcaccaaggtggaaatcaagacgcgtgaggacctgaagaacgtgttcccacctgaggtggccgtgttcgagcctagcgaggccgagatcagccacacccagaaagccaccctcgtgtgcctggctaccggcttctaccccgaccatgtggaactgtcttggtgggtcaacggcaaagaggtgcacagcggcgtgtgtaccgacccccagccactgaaagaacagcccgccctgaacgacagccggtactgcctgagcagcagactgagagtgtccgccaccttctggcagaacccccggaaccacttcagatgccaggtgcagttctacggcctgagcgagaacgacgagtggacccaggacagagccaagcccgtgacccagatcgtgtctgccgaagcctggggcagagccgatgatgtgattaagatccactggcaggaaaagaagtccaacaccatcctgggcagccaggaaggcaacaccatgaagaccaacgacacctacatgaagttcagctggctgaccgtgcccgagaagtccctggacaaagaacacagatgcatcgtgcggcacgaaaacaacaagaacggcgtggaccaggaaatcatcttcccacccatcaagaccgatgtgattacaatggaccccaaggacaactgctccaaggacgccaacgataccctgctgctccagctgaccaacaccagcgcctactacatgtacttgttgctgctgctgaagtccgtggtgtacttcgccatcatcacatgctgcctgctgcggagaaccgccttctgctgcaacggcgagaagtct

SEQ ID NO: 7252 - DNA, 2199 bp, synthetic construct
  source 1..2199: mol_type = other DNA
atggccttaccagtgaccgccttgctcctgccgctggccttgctgctccacgccgccaggccggacgagcttgtgatgacccagagccccagcagcctgacagtgacagccggcgagaaagtgaccatgagctgcaagagcagccagagcctgctgaacagcggcaaccagaagaactacctgacctggtatcagcagaagcccggccagccccccaagctgctgatctactgggccagcaccagagaaagcggcgtgcccgatagattcaccggctctggcagcggcaccgacttcaccctgacaatcagcagcgtgcaggccgaggacctggccgtgtactactgccagaacgactacagctaccccctgaccttcggagccggcaccaagctggaaatcaagctcgagatccagaaccctgatcctgccgtgtaccagctgcgggatagcaagagcagcgacaagagcgtgtgtctgttcaccgacttcgacagccagaccaacgtgtcccagagcaaggactccgacgtgtacatcaccgataagtgcgtgctggacatgcggagcatggacttcaagagcaactccgccgtggcctggtccaacaagtccgatttcgcctgcgccaacgccttcaacaacagcattatccccgaggacacattcttcccaagccccgagagcagcgactccaccgaccacgtgaagcccaaagagacagagaacaccaagcagcccagcaagagctgccacaagcccaaggccatcgtgcacaccgagaaagtgaacatgatgagcctgaccgtgctgggcctgcggatgctgttcgccaaaaccgtggccgtgaacttcctgctgaccgccaagctgttcttcctccgcgccaagagaagcggatctggcgtgaagcagaccctgaatttcgacctgctgaagctggctggcgacgtggaatccaacccaggccctactagtatggactggatttggcgcatccttttccttgtcggcgctgctaccggcgcgcattccttcgaagaagtgcagctgctggaacagtctggcgccgaacttgtgcggcctggcaccagcgtgaagatcagctgtaaagccagcggctacgccttcaccaactactggctgggctgggtcaagcagaggcctggacacggcctggaatggatcggcgacatctttcccggctccggcaacatccactacaacgagaagttcaagggcaaggccaccctgaccgccgacaagtctagcagcaccgcctacatgcagctgtccagcctgacctttgaggacagcgccgtgtatttctgtgcccggctgcggaactgggacgagcccatggattattggggccagggcaccaccgtgaccgtgtctagtacgcgtgaggacctgaagaacgtgttcccacctgaggtggccgtgttcgagcctagcgaggccgagatcagccacacccagaaagccaccctcgtgtgcctggctaccggcttctaccccgaccatgtggaactgtcttggtgggtcaacggcaaagaggtgcacagcggcgtgtgtaccgacccccagccactgaaagaacagcccgccctgaacgacagccggtactgcctgagcagcagactgagagtgtccgccaccttctggcagaacccccggaaccacttcagatgccaggtgcagttctacggcctgagcgagaacgacgagtggacccaggacagagccaagcccgtgacccagatcgtgtctgccgaagcctggggcagagccgatgatgtgattaagatccactggcaggaaaagaagtccaacaccatcctgggcagccaggaaggcaacaccatgaagaccaacgacacctacatgaagttcagctggctgaccgtgcccgagaagtccctggacaaagaacacagatgcatcgtgcggcacgaaaacaacaagaacggcgtggaccaggaaatcatcttcccacccatcaagaccgatgtgattacaatggaccccaaggacaactgctccaaggacgccaacgataccctgctgctccagctgaccaacaccagcgcctactacatgtacttgttgctgctgctgaagtccgtggtgtacttcgccatcatcacatgctgcctgctgcggagaaccgccttctgctgcaacggcgagaagtct

SEQ ID NO: 7253 - DNA, 2202 bp, synthetic construct
  source 1..2202: mol_type = other DNA
atggccttaccagtgaccgccttgctcctgccgctggccttgctgctccacgccgccaggccggacgagctgcagatgacccagagccctagcagcctgtctgccagcgtgggcgacagagtgaccatcacctgtagagccagccagagcatcagcagctacctgaactggtatcagcagaagcccggccagccccccaaactgctgatctactgggccagcaccagagaaagcggcgtgcccgatagattcagcggcagcgagagcggcaccaactacaccctgaccatcagctccctgcagcccgaggacttcgccacctacttttgccagcagagcgacagcctgcccatcacctttggacagggcacccggctggacattcagctcgagatccagaaccctgatcctgccgtgtaccagctgcgggatagcaagagcagcgacaagagcgtgtgtctgttcaccgacttcgacagccagaccaacgtgtcccagagcaaggactccgacgtgtacatcaccgataagtgcgtgctggacatgcggagcatggacttcaagagcaactccgccgtggcctggtccaacaagtccgatttcgcctgcgccaacgccttcaacaacagcattatccccgaggacacattcttcccaagccccgagagcagcgactccaccgaccacgtgaagcccaaagagacagagaacaccaagcagcccagcaagagctgccacaagcccaaggccatcgtgcacaccgagaaagtgaacatgatgagcctgaccgtgctgggcctgcggatgctgttcgccaaaaccgtggccgtgaacttcctgctgaccgccaagctgttcttcctccgcgccaagagaagcggatctggcgtgaagcagaccctgaatttcgacctgctgaagctggctggcgacgtggaatccaacccaggccctactagtatggactggatttggcgcatccttttccttgtcggcgctgctaccggcgcgcattccttcgaagaggtgcaactgctggaatctgggggcggagtggtgcagcctggcagaagcctgagactgagctgtgccgccagcggcttcaccttcagctcctacggaatgcactgggtgcgccaggcccctggcaaaggactggaatgggtggccgtgatctcctacgacggcagcaacaagtactacgccgacagcgtgaagggccggttcaccatcagccgggacaacagcaagaacaccctgtacctgcagatgaacagcctgcgggccgaggacaccgccgtgtactactgcgccaaggatatgggctggggcagcggctggcggccttactactactacggcatggacgtgtggggccagggcaccaccgtgacagtgtcatctacgcgtgaggacctgaagaacgtgttcccacctgaggtggccgtgttcgagcctagcgaggccgagatcagccacacccagaaagccaccctcgtgtgcctggctaccggcttctaccccgaccatgtggaactgtcttggtgggtcaacggcaaagaggtgcacagcggcgtgtgtaccgacccccagccactgaaagaacagcccgccctgaacgacagccggtactgcctgagcagcagactgagagtgtccgccaccttctggcagaacccccggaaccacttcagatgccaggtgcagttctacggcctgagcgagaacgacgagtggacccaggacagagccaagcccgtgacccagatcgtgtctgccgaagcctggggcagagccgatgatgtgattaagatccactggcaggaaaagaagtccaacaccatcctgggcagccaggaaggcaacaccatgaagaccaacgacacctacatgaagttcagctggctgaccgtgcccgagaagtccctggacaaagaacacagatgcatcgtgcggcacgaaaacaacaagaacggcgtggaccaggaaatcatcttcccacccatcaagaccgatgtgattacaatggaccccaaggacaactgctccaaggacgccaacgataccctgctgctccagctgaccaacaccagcgcctactacatgtacttgttgctgctgctgaagtccgtggtgtacttcgccatcatcacatgctgcctgctgcggagaaccgccttctgctgcaacggcgagaagtct

SEQ ID NO: 7254 - DNA, 2193 bp, synthetic construct
  source 1..2193: mol_type = other DNA
atggccttaccagtgaccgccttgctcctgccgctggccttgctgctccacgccgccaggccggacgacatccaaatgacacagagtccttctagtttgagtgcgagcgtgggggacagggtgaccattacctgcagggccagccagagcataagctcataccttaattggtaccagcaaaaaccaggtaaggcccctaagctcctgatctacgcggcctcttcacttcaatctggggtcccttcccgcttcagtggctccggcagcggcaccgacttcacgctcactatatcaagtctgcagcctgaggatctcgccacctattactgtcaacaaagttattccacccctttcacctttggaccgggcacgaaagtggatattaagctcgagatccagaaccctgatcctgccgtgtaccagctgcgggatagcaagagcagcgacaagagcgtgtgtctgttcaccgacttcgacagccagaccaacgtgtcccagagcaaggactccgacgtgtacatcaccgataagtgcgtgctggacatgcggagcatggacttcaagagcaactccgccgtggcctggtccaacaagtccgatttcgcctgcgccaacgccttcaacaacagcattatccccgaggacacattcttcccaagccccgagagcagcgactccaccgaccacgtgaagcccaaagagacagagaacaccaagcagcccagcaagagctgccacaagcccaaggccatcgtgcacaccgagaaagtgaacatgatgagcctgaccgtgctgggcctgcggatgctgttcgccaaaaccgtggccgtgaacttcctgctgaccgccaagctgttcttcctccgcgccaagagaagcggatctggcgtgaagcagaccctgaatttcgacctgctgaagctggctggcgacgtggaatccaacccaggccctactagtatggactggatttggcgcatccttttccttgtcggcgctgctaccggcgcgcattccttcgaagtgcacgaggtccagcttgtgcagtccggggcagaggtcaagaagcctggttctagcgtaaaagtgagttgcaaagcctcaggtgggacattttcatcctacgcgatcagttgggttagacaggctcctggtcaagggctggaatggatgggcggaattattccaatcttcggaacagcgaattacgcgcagaagttccagggtagagtaaccatcactgctgacaagtccacctccaccgcatacatggaattgtctagtctccggagcgaggatacggcggtgtattattgtgctacgttcgccctgtttggcttccgcgaacaggctttcgacatctgggggcagggcacgacagtcacggttagtagtacgcgtgaggacctgaagaacgtgttcccacctgaggtggccgtgttcgagcctagcgaggccgagatcagccacacccagaaagccaccctcgtgtgcctggctaccggcttctaccccgaccatgtggaactgtcttggtgggtcaacggcaaagaggtgcacagcggcgtgtgtaccgacccccagccactgaaagaacagcccgccctgaacgacagccggtactgcctgagcagcagactgagagtgtccgccaccttctggcagaacccccggaaccacttcagatgccaggtgcagttctacggcctgagcgagaacgacgagtggacccaggacagagccaagcccgtgacccagatcgtgtctgccgaagcctggggcagagccgatgatgtgattaagatccactggcaggaaaagaagtccaacaccatcctgggcagccaggaaggcaacaccatgaagaccaacgacacctacatgaagttcagctggctgaccgtgcccgagaagtccctggacaaagaacacagatgcatcgtgcggcacgaaaacaacaagaacggcgtggaccaggaaatcatcttcccacccatcaagaccgatgtgattacaatggaccccaaggacaactgctccaaggacgccaacgataccctgctgctccagctgaccaacaccagcgcctactacatgtacttgttgctgctgctgaagtccgtggtgtacttcgccatcatcacatgctgcctgctgcggagaaccgccttctgctgcaacggcgagaagtct

SEQ ID NO: 7255 - DNA, 2187 bp, synthetic construct
  source 1..2187: mol_type = other DNA
atggccttaccagtgaccgccttgctcctgccgctggccttgctgctccacgccgccaggccggacatcgtgctgacccagagccctctgagcctggccgtgtctctgggacagcctgccatcatcagctgcaaggccagccagagcgtgtcctttgccggcacctctctgatgcactggtatcaccagaagcccggccagcagcccagactgctgatctacagagccagcaacctggaagccggcgtgcccgatagattttccggcagcggcagcaagaccgacttcaccctgaccatcagccccgtggaagccgaagatgccgccacctactactgccagcagagcagagagtacccctacaccttcggcggaggcaccaagctggaaatcaagaggctcgagatccagaaccctgatcctgccgtgtaccagctgcgggatagcaagagcagcgacaagagcgtgtgtctgttcaccgacttcgacagccagaccaacgtgtcccagagcaaggactccgacgtgtacatcaccgataagtgcgtgctggacatgcggagcatggacttcaagagcaactccgccgtggcctggtccaacaagtccgatttcgcctgcgccaacgccttcaacaacagcattatccccgaggacacattcttcccaagccccgagagcagcgactccaccgaccacgtgaagcccaaagagacagagaacaccaagcagcccagcaagagctgccacaagcccaaggccatcgtgcacaccgagaaagtgaacatgatgagcctgaccgtgctgggcctgcggatgctgttcgccaaaaccgtggccgtgaacttcctgctgaccgccaagctgttcttcctccgcgccaagagaagcggatctggcgtgaagcagaccctgaatttcgacctgctgaagctggctggcgacgtggaatccaacccaggccctactagtatggactggatttggcgcatccttttccttgtcggcgctgctaccggcgcgcattccttcgaacaggtccaactggtgcagagcggagccgaggtcgtgaagcctggcgcttccgtgaagattagctgcaaagccagcggctacacctttaccggctactttatgaactgggtcaagcagagccctggccagagcctggaatggatcggcagaatccacccctacgacggcgacaccttctacaaccagaagttccagggcaaggccaccctgacagtggacaagagcagcaacaccgcccacatggaactgctgagcctgaccagcgaggacttcgccgtgtactactgcaccagatacgacggcagccgggctatggactattggggccagggcaccaccgtgaccgtgtctagtacgcgtgaggacctgaagaacgtgttcccacctgaggtggccgtgttcgagcctagcgaggccgagatcagccacacccagaaagccaccctcgtgtgcctggctaccggcttctaccccgaccatgtggaactgtcttggtgggtcaacggcaaagaggtgcacagcggcgtgtgtaccgacccccagccactgaaagaacagcccgccctgaacgacagccggtactgcctgagcagcagactgagagtgtccgccaccttctggcagaacccccggaaccacttcagatgccaggtgcagttctacggcctgagcgagaacgacgagtggacccaggacagagccaagcccgtgacccagatcgtgtctgccgaagcctggggcagagccgatgatgtgattaagatccactggcaggaaaagaagtccaacaccatcctgggcagccaggaaggcaacaccatgaagaccaacgacacctacatgaagttcagctggctgaccgtgcccgagaagtccctggacaaagaacacagatgcatcgtgcggcacgaaaacaacaagaacggcgtggaccaggaaatcatcttcccacccatcaagaccgatgtgattacaatggaccccaaggacaactgctccaaggacgccaacgataccctgctgctccagctgaccaacaccagcgcctactacatgtacttgttgctgctgctgaagtccgtggtgtacttcgccatcatcacatgctgcctgctgcggagaaccgccttctgctgcaacggcgagaagtct

SEQ ID NO: 7256 - DNA, 2178 bp, synthetic construct
  source 1..2178: mol_type = other DNA
atggccttaccagtgaccgccttgctcctgccgctggccttgctgctccacgccgccaggccggacgacgttgtgatgacccagacccccctgagcctgcctgtgacacctggcgaacctgccagcatcagctgtcggagcagccagagcctggtgcacagaaacggcaacacctacctgcactggtatctccagaagcccggccagagccccaagctgctgatccacaaggtgtccaacagattcagcggcgtgcccgacagattctccggcagcggctctggcaccgacttcaccctgaagatcagccgggtggaagccgaggacctgggcgtgtacttctgtagccagagcacccatgtgccccccctgacatttggagccggcaccaagctggaactgaagctcgagatccagaaccctgatcctgccgtgtaccagctgcgggatagcaagagcagcgacaagagcgtgtgtctgttcaccgacttcgacagccagaccaacgtgtcccagagcaaggactccgacgtgtacatcaccgataagtgcgtgctggacatgcggagcatggacttcaagagcaactccgccgtggcctggtccaacaagtccgatttcgcctgcgccaacgccttcaacaacagcattatccccgaggacacattcttcccaagccccgagagcagcgactccaccgaccacgtgaagcccaaagagacagagaacaccaagcagcccagcaagagctgccacaagcccaaggccatcgtgcacaccgagaaagtgaacatgatgagcctgaccgtgctgggcctgcggatgctgttcgccaaaaccgtggccgtgaacttcctgctgaccgccaagctgttcttcctccgcgccaagagaagcggatctggcgtgaagcagaccctgaatttcgacctgctgaagctggctggcgacgtggaatccaacccaggccctactagtatggactggatttggcgcatccttttccttgtcggcgctgctaccggcgcgcattccttcgaagaagtgcagctggtgcagtctggcgctgaggtggaaaagcctggggccagcgtgaagattagctgcaaggccagcggcagcagcttcaccggctacaacatgaactgggtgcgccagaacatcggcaagagcctggaatggatcggagccatcgacccctactacggcggcaccagctacaaccagaagttcaagggcagagccaccctgaccgtggacaagagcaccagcaccgcctacatgcacctgaagtccctgcggagcgaggacaccgccgtgtactactgtgtgtccggcatggaatattggggccagggcaccagcgtgaccgtgtctagtacgcgtgaggacctgaagaacgtgttcccacctgaggtggccgtgttcgagcctagcgaggccgagatcagccacacccagaaagccaccctcgtgtgcctggctaccggcttctaccccgaccatgtggaactgtcttggtgggtcaacggcaaagaggtgcacagcggcgtgtgtaccgacccccagccactgaaagaacagcccgccctgaacgacagccggtactgcctgagcagcagactgagagtgtccgccaccttctggcagaacccccggaaccacttcagatgccaggtgcagttctacggcctgagcgagaacgacgagtggacccaggacagagccaagcccgtgacccagatcgtgtctgccgaagcctggggcagagccgatgatgtgattaagatccactggcaggaaaagaagtccaacaccatcctgggcagccaggaaggcaacaccatgaagaccaacgacacctacatgaagttcagctggctgaccgtgcccgagaagtccctggacaaagaacacagatgcatcgtgcggcacgaaaacaacaagaacggcgtggaccaggaaatcatcttcccacccatcaagaccgatgtgattacaatggaccccaaggacaactgctccaaggacgccaacgataccctgctgctccagctgaccaacaccagcgcctactacatgtacttgttgctgctgctgaagtccgtggtgtacttcgccatcatcacatgctgcctgctgcggagaaccgccttctgctgcaacggcgagaagtct

SEQ ID NO: 7257 - DNA, 2172 bp, synthetic construct
  source 1..2172: mol_type = other DNA
atggccttaccagtgaccgccttgctcctgccgctggccttgctgctccacgccgccaggccggacgagatcgtgatgacccagacccctgccaccctgtctgtgtctgccggcgagagagtgaccattacctgcaaggccagccagagcgtgtccaacgacgtgacctggtatcagcagaagcccggccaggcccccagactgctgatctacagcgccagcaacagatacagcggcgtgcccgccagattttccggcagcggctacggcaccgagttcaccttcaccatcagcagcgtgcagagcgaggacttcgccgtgtacttctgtcagcaagactacagcagcttcggccagggcaccaagctggaaatcaagaggctcgagatccagaaccctgatcctgccgtgtaccagctgcgggatagcaagagcagcgacaagagcgtgtgtctgttcaccgacttcgacagccagaccaacgtgtcccagagcaaggactccgacgtgtacatcaccgataagtgcgtgctggacatgcggagcatggacttcaagagcaactccgccgtggcctggtccaacaagtccgatttcgcctgcgccaacgccttcaacaacagcattatccccgaggacacattcttcccaagccccgagagcagcgactccaccgaccacgtgaagcccaaagagacagagaacaccaagcagcccagcaagagctgccacaagcccaaggccatcgtgcacaccgagaaagtgaacatgatgagcctgaccgtgctgggcctgcggatgctgttcgccaaaaccgtggccgtgaacttcctgctgaccgccaagctgttcttcctccgcgccaagagaagcggatctggcgtgaagcagaccctgaatttcgacctgctgaagctggctggcgacgtggaatccaacccaggccctactagtatggactggatttggcgcatccttttccttgtcggcgctgctaccggcgcgcattccttcgaacaggtgcagctggtggaatctggacctggcgtggtgcagcctggcagaagcctgagaatcagctgtgccgtgtccggcttcagcgtgaccaactacggcgtgcactgggtgcgccagccacctggaaaaggactggaatggctgggcgtgatctgggctggcggcatcaccaactacaacagcgccttcatgtcccggctgaccatctccaaggacaacagcaagaacaccgtgtacctccagatgaacagcctgcgggccgaggacaccgccatgtactactgtgcttccagaggcggccactacggctacgccctggattattggggccagggaaccctcgtgaccgtgtcctctacgcgtgaggacctgaagaacgtgttcccacctgaggtggccgtgttcgagcctagcgaggccgagatcagccacacccagaaagccaccctcgtgtgcctggctaccggcttctaccccgaccatgtggaactgtcttggtgggtcaacggcaaagaggtgcacagcggcgtgtgtaccgacccccagccactgaaagaacagcccgccctgaacgacagccggtactgcctgagcagcagactgagagtgtccgccaccttctggcagaacccccggaaccacttcagatgccaggtgcagttctacggcctgagcgagaacgacgagtggacccaggacagagccaagcccgtgacccagatcgtgtctgccgaagcctggggcagagccgatgatgtgattaagatccactggcaggaaaagaagtccaacaccatcctgggcagccaggaaggcaacaccatgaagaccaacgacacctacatgaagttcagctggctgaccgtgcccgagaagtccctggacaaagaacacagatgcatcgtgcggcacgaaaacaacaagaacggcgtggaccaggaaatcatcttcccacccatcaagaccgatgtgattacaatggaccccaaggacaactgctccaaggacgccaacgataccctgctgctccagctgaccaacaccagcgcctactacatgtacttgttgctgctgctgaagtccgtggtgtacttcgccatcatcacatgctgcctgctgcggagaaccgccttctgctgcaacggcgagaagtct

SEQ ID NO: 7258 - DNA, 2178 bp, synthetic construct
  source 1..2178: mol_type = other DNA
atggccttaccagtgaccgccttgctcctgccgctggccttgctgctccacgccgccaggccggacatccagatgacccagaccgccagcagcctgcctgcctctctgggcgacagagtgaccatctcctgtagcgccagccaggacatcagcaactacctgaactggtatcagcagaaacccgacggcaccgtgaagctgctgatcttctacagcagcaacctgcacagcggcgtgcccagcagattttctggcggcggaagcggcaccgactacagcctgaccatcagcaatctggaacccgaggacattgccacctacttttgccaccagtacagcaagctgccctggacctttggcggaggcaccaagctggaaatcaagagactcgagatccagaaccctgatcctgccgtgtaccagctgcgggatagcaagagcagcgacaagagcgtgtgtctgttcaccgacttcgacagccagaccaacgtgtcccagagcaaggactccgacgtgtacatcaccgataagtgcgtgctggacatgcggagcatggacttcaagagcaactccgccgtggcctggtccaacaagtccgatttcgcctgcgccaacgccttcaacaacagcattatccccgaggacacattcttcccaagccccgagagcagcgactccaccgaccacgtgaagcccaaagagacagagaacaccaagcagcccagcaagagctgccacaagcccaaggccatcgtgcacaccgagaaagtgaacatgatgagcctgaccgtgctgggcctgcggatgctgttcgccaaaaccgtggccgtgaacttcctgctgaccgccaagctgttcttcctccgcgccaagagaagcggatctggcgtgaagcagaccctgaatttcgacctgctgaagctggctggcgacgtggaatccaacccaggccctactagtatggactggatttggcgcatccttttccttgtcggcgctgctaccggcgcgcattccttcgaagaagtgaccctggtggaaagcggcggagacttcgtgaagcctggcggctctctgaaggtgtcctgtgccgccagcggcttcgcctttagccactacgccatgagctgggtgcgccagacccctgccaagagactggaatgggtggcctacatcagcagcggcggctccggcacctactactccgatagcgtgaagggccggttcaccatcagccgggacaacgccaagaacaccctgtacctccagatgcggagcctgcggagcgaggacagcgccatgtatttctgcaccagagtgaagctgggcacctattacttcgactcttggggccagggcaccaccctgaccgtgtcatctacgcgtgaggacctgaagaacgtgttcccacctgaggtggccgtgttcgagcctagcgaggccgagatcagccacacccagaaagccaccctcgtgtgcctggctaccggcttctaccccgaccatgtggaactgtcttggtgggtcaacggcaaagaggtgcacagcggcgtgtgtaccgacccccagccactgaaagaacagcccgccctgaacgacagccggtactgcctgagcagcagactgagagtgtccgccaccttctggcagaacccccggaaccacttcagatgccaggtgcagttctacggcctgagcgagaacgacgagtggacccaggacagagccaagcccgtgacccagatcgtgtctgccgaagcctggggcagagccgatgatgtgattaagatccactggcaggaaaagaagtccaacaccatcctgggcagccaggaaggcaacaccatgaagaccaacgacacctacatgaagttcagctggctgaccgtgcccgagaagtccctggacaaagaacacagatgcatcgtgcggcacgaaaacaacaagaacggcgtggaccaggaaatcatcttcccacccatcaagaccgatgtgattacaatggaccccaaggacaactgctccaaggacgccaacgataccctgctgctccagctgaccaacaccagcgcctactacatgtacttgttgctgctgctgaagtccgtggtgtacttcgccatcatcacatgctgcctgctgcggagaaccgccttctgctgcaacggcgagaagtct

SEQ ID NO: 7259 - DNA, 2184 bp, synthetic construct
  source 1..2184: mol_type = other DNA
atggccttaccagtgaccgccttgctcctgccgctggccttgctgctccacgccgccaggccgcagttcgtgctgacccagagcccttctgcctctgctgccctgggagcctctgccaagctgacctgtacactgagcagcgcccacaagacctacaccatcgactggtatcagcagcagaagggaaaggcccccagatacctgatccaagtgaagtccgacggcacctacacaaaggccaccggcgtgcccgatagattcagcggcagtagcagcggagccgatagatacctgattatccccagcgtgcaggccgacgacgaggccgattactactgcggcaccgattacaccggcggctacgtgttcggcggaggcacacaactgaccgtgacactcgagatccagaaccctgatcctgccgtgtaccagctgcgggatagcaagagcagcgacaagagcgtgtgtctgttcaccgacttcgacagccagaccaacgtgtcccagagcaaggactccgacgtgtacatcaccgataagtgcgtgctggacatgcggagcatggacttcaagagcaactccgccgtggcctggtccaacaagtccgatttcgcctgcgccaacgccttcaacaacagcattatccccgaggacacattcttcccaagccccgagagcagcgactccaccgaccacgtgaagcccaaagagacagagaacaccaagcagcccagcaagagctgccacaagcccaaggccatcgtgcacaccgagaaagtgaacatgatgagcctgaccgtgctgggcctgcggatgctgttcgccaaaaccgtggccgtgaacttcctgctgaccgccaagctgttcttcctccgcgccaagagaagcggatctggcgtgaagcagaccctgaatttcgacctgctgaagctggctggcgacgtggaatccaacccaggccctactagtatggactggatttggcgcatccttttccttgtcggcgctgctaccggcgcgcattccttcgaagagcaactgaaagagtctggcggcggactgttcaagcccaccgataccctgaccctgacctgcaccgtgtccggcttcagcctgagctactacggcgtgaactgggtgcgccaggcccctggcaatggcctggaatggatcggcacaatcggcggcagcggcgacacctactatgcctcttgggccaagtccagaagcaccatcatcagaaacaccaacgagaacaccgtgaccctgaagatgaccagcctgacagccgccgacaccgccacctacttttgcgtcagatacgccaacatcggctacgagtatttcaacgtgtggggacccggcaccctcgtgaccgtgtcatctacgcgtgaggacctgaagaacgtgttcccacctgaggtggccgtgttcgagcctagcgaggccgagatcagccacacccagaaagccaccctcgtgtgcctggctaccggcttctaccccgaccatgtggaactgtcttggtgggtcaacggcaaagaggtgcacagcggcgtgtgtaccgacccccagccactgaaagaacagcccgccctgaacgacagccggtactgcctgagcagcagactgagagtgtccgccaccttctggcagaacccccggaaccacttcagatgccaggtgcagttctacggcctgagcgagaacgacgagtggacccaggacagagccaagcccgtgacccagatcgtgtctgccgaagcctggggcagagccgatgatgtgattaagatccactggcaggaaaagaagtccaacaccatcctgggcagccaggaaggcaacaccatgaagaccaacgacacctacatgaagttcagctggctgaccgtgcccgagaagtccctggacaaagaacacagatgcatcgtgcggcacgaaaacaacaagaacggcgtggaccaggaaatcatcttcccacccatcaagaccgatgtgattacaatggaccccaaggacaactgctccaaggacgccaacgataccctgctgctccagctgaccaacaccagcgcctactacatgtacttgttgctgctgctgaagtccgtggtgtacttcgccatcatcacatgctgcctgctgcggagaaccgccttctgctgcaacggcgagaagtct

SEQ ID NO: 7260 - DNA, 2199 bp, synthetic construct
  source 1..2199: mol_type = other DNA
atggccttaccagtgaccgccttgctcctgccgctggccttgctgctccacgccgccaggccgcagttcgtgctgacccagagcccttctgtgtctgccgccctgggagcctctgccaagctgacctgtacactgagcagcgcccacaagacctacaccatcgactggtatcagcagcagcagggcgaggcccccagatacctgatgcaagtgaagtccgacggcagctacaccaagggcaccggcgtgcccgatagattcagcggcagtagcagcggagccgatagatacctgattatccccagcgtgcaggccgacgacgaggccggatatgtgtgcggcgctgacgacaatggcggctacgtgttcggcggaggcacccaactgacagtgacactcgagatccagaaccctgatcctgccgtgtaccagctgcgggatagcaagagcagcgacaagagcgtgtgtctgttcaccgacttcgacagccagaccaacgtgtcccagagcaaggactccgacgtgtacatcaccgataagtgcgtgctggacatgcggagcatggacttcaagagcaactccgccgtggcctggtccaacaagtccgatttcgcctgcgccaacgccttcaacaacagcattatccccgaggacacattcttcccaagccccgagagcagcgactccaccgaccacgtgaagcccaaagagacagagaacaccaagcagcccagcaagagctgccacaagcccaaggccatcgtgcacaccgagaaagtgaacatgatgagcctgaccgtgctgggcctgcggatgctgttcgccaaaaccgtggccgtgaacttcctgctgaccgccaagctgttcttcctccgcgccaagagaagcggatctggcgtgaagcagaccctgaatttcgacctgctgaagctggctggcgacgtggaatccaacccaggccctactagtatggactggatttggcgcatccttttccttgtcggcgctgctaccggcgcgcattccttcgaacagagcgtgaaagagtctgagggcggcctgttcaagcccaccgataccctgaccctgacctgcaccgtgtccggcttcagcctgagcagacacgccctgacatgggtgcgccaggcccctggaaatggcctggaatggatcggagccatcgacaacgccggcaccacctactatgcctcttgggccaagtccagaagcaccatcacccggaacaccgacctgcacaccgtgaccctgaagatgaccagcctgaccgccagcgacaccgccacctacttttgcgccagagtgttctacgacatcaacagcggctactacctggacggcatggacctgtggggacctggcacacttgtgaccgtgtccagcacgcgtgaggacctgaagaacgtgttcccacctgaggtggccgtgttcgagcctagcgaggccgagatcagccacacccagaaagccaccctcgtgtgcctggctaccggcttctaccccgaccatgtggaactgtcttggtgggtcaacggcaaagaggtgcacagcggcgtgtgtaccgacccccagccactgaaagaacagcccgccctgaacgacagccggtactgcctgagcagcagactgagagtgtccgccaccttctggcagaacccccggaaccacttcagatgccaggtgcagttctacggcctgagcgagaacgacgagtggacccaggacagagccaagcccgtgacccagatcgtgtctgccgaagcctggggcagagccgatgatgtgattaagatccactggcaggaaaagaagtccaacaccatcctgggcagccaggaaggcaacaccatgaagaccaacgacacctacatgaagttcagctggctgaccgtgcccgagaagtccctggacaaagaacacagatgcatcgtgcggcacgaaaacaacaagaacggcgtggaccaggaaatcatcttcccacccatcaagaccgatgtgattacaatggaccccaaggacaactgctccaaggacgccaacgataccctgctgctccagctgaccaacaccagcgcctactacatgtacttgttgctgctgctgaagtccgtggtgtacttcgccatcatcacatgctgcctgctgcggagaaccgccttctgctgcaacggcgagaagtct

SEQ ID NO: 7261 - DNA, 2181 bp, synthetic construct
  source 1..2181: mol_type = other DNA
atggccttaccagtgaccgccttgctcctgccgctggccttgctgctccacgccgccaggccggacatccagatgacccagagccccagcagcctgtctgccagcgtgggcgacagagtgaccatcacctgtagagccagccagggcatcagctcttggctggcctggtatcagcagaagcccgagaaggcccccaagagcctgatctacgccgcctctagtctccagagcggcgtgcccagcagattttctggcagcggctccggcaccgacttcaccctgacaatcagctccctccagcccgaggacttcgccacctactactgccagcagtacaacagctacccccccacctttggcggaggcaccaaggtggaaatcaagctcgagatccagaaccctgatcctgccgtgtaccagctgcgggatagcaagagcagcgacaagagcgtgtgtctgttcaccgacttcgacagccagaccaacgtgtcccagagcaaggactccgacgtgtacatcaccgataagtgcgtgctggacatgcggagcatggacttcaagagcaactccgccgtggcctggtccaacaagtccgatttcgcctgcgccaacgccttcaacaacagcattatccccgaggacacattcttcccaagccccgagagcagcgactccaccgaccacgtgaagcccaaagagacagagaacaccaagcagcccagcaagagctgccacaagcccaaggccatcgtgcacaccgagaaagtgaacatgatgagcctgaccgtgctgggcctgcggatgctgttcgccaaaaccgtggccgtgaacttcctgctgaccgccaagctgttcttcctccgcgccaagagaagcggatctggcgtgaagcagaccctgaatttcgacctgctgaagctggctggcgacgtggaatccaacccaggccctactagtatggactggatttggcgcatccttttccttgtcggcgctgctaccggcgcgcattccttcgaagaagtgcaactggtggaatcaggcggcggactggtgcagcctggcgagtctctgagactgagctgtgtggcctccggcttcaccttcagccggtacaagatgaactgggtgcgccaggcccctggcaagggactggaatgggtgtcctacatcagccgcagcggcagagacatctactacgccgacagcgtgaagggccggttcaccatcagcagagacaacgccaagaacagcctgtacctccagatgaactccctgcgggacgaggacaccgccgtgtactactgtgccggaaccgtgaccacctattactacttcggcatggacgtgtggggccacggcaccaccgtgacagtgtcatctacgcgtgaggacctgaagaacgtgttcccacctgaggtggccgtgttcgagcctagcgaggccgagatcagccacacccagaaagccaccctcgtgtgcctggctaccggcttctaccccgaccatgtggaactgtcttggtgggtcaacggcaaagaggtgcacagcggcgtgtgtaccgacccccagccactgaaagaacagcccgccctgaacgacagccggtactgcctgagcagcagactgagagtgtccgccaccttctggcagaacccccggaaccacttcagatgccaggtgcagttctacggcctgagcgagaacgacgagtggacccaggacagagccaagcccgtgacccagatcgtgtctgccgaagcctggggcagagccgatgatgtgattaagatccactggcaggaaaagaagtccaacaccatcctgggcagccaggaaggcaacaccatgaagaccaacgacacctacatgaagttcagctggctgaccgtgcccgagaagtccctggacaaagaacacagatgcatcgtgcggcacgaaaacaacaagaacggcgtggaccaggaaatcatcttcccacccatcaagaccgatgtgattacaatggaccccaaggacaactgctccaaggacgccaacgataccctgctgctccagctgaccaacaccagcgcctactacatgtacttgttgctgctgctgaagtccgtggtgtacttcgccatcatcacatgctgcctgctgcggagaaccgccttctgctgcaacggcgagaagtct

SEQ ID NO: 7262 - DNA, 2184 bp, synthetic construct
  source 1..2184: mol_type = other DNA
atggccttaccagtgaccgccttgctcctgccgctggccttgctgctccacgccgccaggccggacatccagatgacccagagccccagcagcctgtctgccagcgtgggcgacagagtgaccatcacctgtagagccagccagggcatcagctcttggctggcctggtatcagcagaagcccgagaaggcccccaagagcctgatctacgccgcctctagtctccagagcggcgtgcccagcagattttctggcagcggctccggcaccgacttcaccctgacaatcagctccctccagcccgaggacttcgccacctactactgccagcagtacaacagctaccctcccacctttggcggaggcaccaaggtggaaatcaagctcgagatccagaaccctgatcctgccgtgtaccagctgcgggatagcaagagcagcgacaagagcgtgtgtctgttcaccgacttcgacagccagaccaacgtgtcccagagcaaggactccgacgtgtacatcaccgataagtgcgtgctggacatgcggagcatggacttcaagagcaactccgccgtggcctggtccaacaagtccgatttcgcctgcgccaacgccttcaacaacagcattatccccgaggacacattcttcccaagccccgagagcagcgactccaccgaccacgtgaagcccaaagagacagagaacaccaagcagcccagcaagagctgccacaagcccaaggccatcgtgcacaccgagaaagtgaacatgatgagcctgaccgtgctgggcctgcggatgctgttcgccaaaaccgtggccgtgaacttcctgctgaccgccaagctgttcttcctccgcgccaagagaagcggatctggcgtgaagcagaccctgaatttcgacctgctgaagctggctggcgacgtggaatccaacccaggccctactagtatggactggatttggcgcatccttttccttgtcggcgctgctaccggcgcgcattccttcgaagaagtgcaactggtggaatccgggggaggctctgtgcagcctggcgagtctctgagactgagctgtgtggcctccggcttcaccttcagccggtacaagatgaactgggtgcgccaggcccctggcaagggactggaatgggtgtcctacatcagccgcagcggcagagacatctactacgccgacagcgtgaagggccggttcaccatcagcagagacaacgccaagaacagcctgtacctccagatgaactccctgcgggacgaggacaccgccgtgtactactgtgccggaaccgtgaccacctattactacgacttcggcatggacgtgtggggccagggcacaaccgtgacagtgtctagcacgcgtgaggacctgaagaacgtgttcccacctgaggtggccgtgttcgagcctagcgaggccgagatcagccacacccagaaagccaccctcgtgtgcctggctaccggcttctaccccgaccatgtggaactgtcttggtgggtcaacggcaaagaggtgcacagcggcgtgtgtaccgacccccagccactgaaagaacagcccgccctgaacgacagccggtactgcctgagcagcagactgagagtgtccgccaccttctggcagaacccccggaaccacttcagatgccaggtgcagttctacggcctgagcgagaacgacgagtggacccaggacagagccaagcccgtgacccagatcgtgtctgccgaagcctggggcagagccgatgatgtgattaagatccactggcaggaaaagaagtccaacaccatcctgggcagccaggaaggcaacaccatgaagaccaacgacacctacatgaagttcagctggctgaccgtgcccgagaagtccctggacaaagaacacagatgcatcgtgcggcacgaaaacaacaagaacggcgtggaccaggaaatcatcttcccacccatcaagaccgatgtgattacaatggaccccaaggacaactgctccaaggacgccaacgataccctgctgctccagctgaccaacaccagcgcctactacatgtacttgttgctgctgctgaagtccgtggtgtacttcgccatcatcacatgctgcctgctgcggagaaccgccttctgctgcaacggcgagaagtct

SEQ ID NO: 7263 - DNA, 2178 bp, synthetic construct
  source 1..2178: mol_type = other DNA
atggccttaccagtgaccgccttgctcctgccgctggccttgctgctccacgccgccaggccgcagtctgtgctgacacagcctccatctgcctctggcacacctggacagagagtgaccatcagctgtagcggcagcagaagcaacgtcggcggcaactacgtgttctggtatcagcaggtcccaggcgctacccctaagctgctgatctacagaagcaatcagcggcctagcggcgtgcccgatagatttgccggaagcaagagcggcagctctgccagccttgccatctctggactgagaagcgaggacgaggccgactactactgtgccacctgggatgatagcctgagcggcttcgtgtttggcaccggcaccaaagtgacagtgcttggtctcgagatccagaaccctgatcctgccgtgtaccagctgcgggatagcaagagcagcgacaagagcgtgtgtctgttcaccgacttcgacagccagaccaacgtgtcccagagcaaggactccgacgtgtacatcaccgataagtgcgtgctggacatgcggagcatggacttcaagagcaactccgccgtggcctggtccaacaagtccgatttcgcctgcgccaacgccttcaacaacagcattatccccgaggacacattcttcccaagccccgagagcagcgactccaccgaccacgtgaagcccaaagagacagagaacaccaagcagcccagcaagagctgccacaagcccaaggccatcgtgcacaccgagaaagtgaacatgatgagcctgaccgtgctgggcctgcggatgctgttcgccaaaaccgtggccgtgaacttcctgctgaccgccaagctgttcttcctccgcgccaagagaagcggatctggcgtgaagcagaccctgaatttcgacctgctgaagctggctggcgacgtggaatccaacccaggccctactagtatggactggatttggcgcatccttttccttgtcggcgctgctaccggcgcgcattccttcgaagttcagctggttgaatctggcggcggactggttaagcctggcggatctctgagactgtcttgtgccgccagcggcttcaccttcagcgattactacatgagctggatcagacaggcccctggcaaaggactggaatgggtgtcctacatcagcagcagcggctccaccatctactacgccgatagcgtgaagggcagattcaccatcagccgggacaacgccaagaacagcctgtacctccagatgaactccctgagagccgaggacaccgccgtgtactattgcgccagaggctacggcaaagcctacgatcaatggggccagggcacactggtcaccgtttcttctacgcgtgaggacctgaagaacgtgttcccacctgaggtggccgtgttcgagcctagcgaggccgagatcagccacacccagaaagccaccctcgtgtgcctggctaccggcttctaccccgaccatgtggaactgtcttggtgggtcaacggcaaagaggtgcacagcggcgtgtgtaccgacccccagccactgaaagaacagcccgccctgaacgacagccggtactgcctgagcagcagactgagagtgtccgccaccttctggcagaacccccggaaccacttcagatgccaggtgcagttctacggcctgagcgagaacgacgagtggacccaggacagagccaagcccgtgacccagatcgtgtctgccgaagcctggggcagagccgatgatgtgattaagatccactggcaggaaaagaagtccaacaccatcctgggcagccaggaaggcaacaccatgaagaccaacgacacctacatgaagttcagctggctgaccgtgcccgagaagtccctggacaaagaacacagatgcatcgtgcggcacgaaaacaacaagaacggcgtggaccaggaaatcatcttcccacccatcaagaccgatgtgattacaatggaccccaaggacaactgctccaaggacgccaacgataccctgctgctccagctgaccaacaccagcgcctactacatgtacttgttgctgctgctgaagtccgtggtgtacttcgccatcatcacatgctgcctgctgcggagaaccgccttctgctgcaacggcgagaagtct

SEQ ID NO: 7264 - DNA, 2175 bp, synthetic construct
  source 1..2175: mol_type = other DNA
atggccttaccagtgaccgccttgctcctgccgctggccttgctgctccacgccgccaggccgcagtctgtggtcacacagccacctagcatgtctgccgctccaggccagcaagtgaccatctcttgtagcggcggcaacagcaacatcgagcggaactacgtgtcctggtatctgcaactgcctggcacagcccctaagctggtcatcttcgacaacgacagacggcccagcggcatccccgatagattttctggcagcaagagcggcaccagcgccacactgggaattaccggacttcagacaggcgacgaggccgactactactgtggcacatgggactctagcctgagaggctgggttttcggcggaggcacaaagctgacagtgcttggtctcgagatccagaaccctgatcctgccgtgtaccagctgcgggatagcaagagcagcgacaagagcgtgtgtctgttcaccgacttcgacagccagaccaacgtgtcccagagcaaggactccgacgtgtacatcaccgataagtgcgtgctggacatgcggagcatggacttcaagagcaactccgccgtggcctggtccaacaagtccgatttcgcctgcgccaacgccttcaacaacagcattatccccgaggacacattcttcccaagccccgagagcagcgactccaccgaccacgtgaagcccaaagagacagagaacaccaagcagcccagcaagagctgccacaagcccaaggccatcgtgcacaccgagaaagtgaacatgatgagcctgaccgtgctgggcctgcggatgctgttcgccaaaaccgtggccgtgaacttcctgctgaccgccaagctgttcttcctccgcgccaagagaagcggatctggcgtgaagcagaccctgaatttcgacctgctgaagctggctggcgacgtggaatccaacccaggccctactagtatggactggatttggcgcatccttttccttgtcggcgctgctaccggcgcgcattccttcgaagtgcagctcgttgagtctggcggcggactgattcaacctggcggaagcctgagactgagctgtgccgcttccggcttcaccttcagcaactacgccatgaactgggttcgacaggcccctggcaaaggactggaatgggtgtccaccatcaacggcagaggcagcagcaccatctacgccgattctgtgaagggcagattcaccatcagccgggacaacagcaagaacaccctgtacctccagatgaactccctgagagccgaggacaccgccacctattactgtgcccggtacatcagcagaggactgggcgattcttggggccagggcacactggttacagtgacgcgtgaggacctgaagaacgtgttcccacctgaggtggccgtgttcgagcctagcgaggccgagatcagccacacccagaaagccaccctcgtgtgcctggctaccggcttctaccccgaccatgtggaactgtcttggtgggtcaacggcaaagaggtgcacagcggcgtgtgtaccgacccccagccactgaaagaacagcccgccctgaacgacagccggtactgcctgagcagcagactgagagtgtccgccaccttctggcagaacccccggaaccacttcagatgccaggtgcagttctacggcctgagcgagaacgacgagtggacccaggacagagccaagcccgtgacccagatcgtgtctgccgaagcctggggcagagccgatgatgtgattaagatccactggcaggaaaagaagtccaacaccatcctgggcagccaggaaggcaacaccatgaagaccaacgacacctacatgaagttcagctggctgaccgtgcccgagaagtccctggacaaagaacacagatgcatcgtgcggcacgaaaacaacaagaacggcgtggaccaggaaatcatcttcccacccatcaagaccgatgtgattacaatggaccccaaggacaactgctccaaggacgccaacgataccctgctgctccagctgaccaacaccagcgcctactacatgtacttgttgctgctgctgaagtccgtggtgtacttcgccatcatcacatgctgcctgctgcggagaaccgccttctgctgcaacggcgagaagtct

SEQ ID NO: 7265 - DNA, 2178 bp, synthetic construct
  source 1..2178: mol_type = other DNA
atggccttaccagtgaccgccttgctcctgccgctggccttgctgctccacgccgccaggccggacgtcgtgatgacccagacccctctgagcctgcctgtgtccctgggcgatcaggccagcatcagctgtagaagcagccagagcctggtgcacagcaacggcaacacctacctgcactggtatctccagaagcccggccagagccccaagctgctgatctacaaggtgtccaacagattcagcggcgtgcccgacagattctccggcagcggctctggcaccgacttcaccctgaagatcagccgggtggaagccgaggacctgggcgtgtacttctgtagccagaacacccccgtgccccccaagtttggcagcggcaccaagctggaaatcaagctcgagatccagaaccctgatcctgccgtgtaccagctgcgggatagcaagagcagcgacaagagcgtgtgtctgttcaccgacttcgacagccagaccaacgtgtcccagagcaaggactccgacgtgtacatcaccgataagtgcgtgctggacatgcggagcatggacttcaagagcaactccgccgtggcctggtccaacaagtccgatttcgcctgcgccaacgccttcaacaacagcattatccccgaggacacattcttcccaagccccgagagcagcgactccaccgaccacgtgaagcccaaagagacagagaacaccaagcagcccagcaagagctgccacaagcccaaggccatcgtgcacaccgagaaagtgaacatgatgagcctgaccgtgctgggcctgcggatgctgttcgccaaaaccgtggccgtgaacttcctgctgaccgccaagctgttcttcctccgcgccaagagaagcggatctggcgtgaagcagaccctgaatttcgacctgctgaagctggctggcgacgtggaatccaacccaggccctactagtatggactggatttggcgcatccttttccttgtcggcgctgctaccggcgcgcattccttcgaacaggtgcagctccagcagtctggcgctgaactcgtgcggcctggcgcttctgtgaagctgtcttgcaaggccagcggctacaccttcaacgactacgagatgcactgggtcaagcagacccctgtgcacggcctgaagtggatcggagccctggaacccaagaccggcgataccgcctacagccagaagttcaagggcaaggccaccctgaccgccgacaagagcagcagcacagcctacatggaactgcggagcctgaccagcgaggacagcgccgtgtactactgcaccagctgctactactacacctacagcggccagggcaccctcgtgacagtgtctgctacgcgtgaggacctgaagaacgtgttcccacctgaggtggccgtgttcgagcctagcgaggccgagatcagccacacccagaaagccaccctcgtgtgcctggctaccggcttctaccccgaccatgtggaactgtcttggtgggtcaacggcaaagaggtgcacagcggcgtgtgtaccgacccccagccactgaaagaacagcccgccctgaacgacagccggtactgcctgagcagcagactgagagtgtccgccaccttctggcagaacccccggaaccacttcagatgccaggtgcagttctacggcctgagcgagaacgacgagtggacccaggacagagccaagcccgtgacccagatcgtgtctgccgaagcctggggcagagccgatgatgtgattaagatccactggcaggaaaagaagtccaacaccatcctgggcagccaggaaggcaacaccatgaagaccaacgacacctacatgaagttcagctggctgaccgtgcccgagaagtccctggacaaagaacacagatgcatcgtgcggcacgaaaacaacaagaacggcgtggaccaggaaatcatcttcccacccatcaagaccgatgtgattacaatggaccccaaggacaactgctccaaggacgccaacgataccctgctgctccagctgaccaacaccagcgcctactacatgtacttgttgctgctgctgaagtccgtggtgtacttcgccatcatcacatgctgcctgctgcggagaaccgccttctgctgcaacggcgagaagtct

SEQ ID NO: 7266 - DNA, 2175 bp, synthetic construct
  source 1..2175: mol_type = other DNA
atggccttaccagtgaccgccttgctcctgccgctggccttgctgctccacgccgccaggccggacatccaactgacccagagccccagcagcctgtctgcctctgtgggcgacagagtgaccatcacctgtagagccagccagggcatcagaaacgacctgggctggtatcagcagaagcccggcaaggcccccaagcggctgatctatgctgccagctccctccagaatggcgtgcccagcagattttccggcagcggctctggcaccgagttcaccctgaccatcagctccctccagcccgaggacttcgccacctactactgcctccagcacaacacctaccccgccttcggccagggcaccaaggtggaaatcaagagactcgagatccagaaccctgatcctgccgtgtaccagctgcgggatagcaagagcagcgacaagagcgtgtgtctgttcaccgacttcgacagccagaccaacgtgtcccagagcaaggactccgacgtgtacatcaccgataagtgcgtgctggacatgcggagcatggacttcaagagcaactccgccgtggcctggtccaacaagtccgatttcgcctgcgccaacgccttcaacaacagcattatccccgaggacacattcttcccaagccccgagagcagcgactccaccgaccacgtgaagcccaaagagacagagaacaccaagcagcccagcaagagctgccacaagcccaaggccatcgtgcacaccgagaaagtgaacatgatgagcctgaccgtgctgggcctgcggatgctgttcgccaaaaccgtggccgtgaacttcctgctgaccgccaagctgttcttcctccgcgccaagagaagcggatctggcgtgaagcagaccctgaatttcgacctgctgaagctggctggcgacgtggaatccaacccaggccctactagtatggactggatttggcgcatccttttccttgtcggcgctgctaccggcgcgcattccttcgaacaggtgcaactccaggaatctggccctggcctcgtgaagcctagccagaccctgagcctgacctgtaccgtgtctggcggcagcatcagcagcttcaactactactggtcctggatcagacaccaccctggcaagggcctggaatggatcggctacatctactacagcggcagcacctacagcaaccccagcctgaagtcccgcgtgaccatctccgtggacaccagcaagaaccagtttagcctgaccctgtccagcgtgacagccgccgataccgccgtgtactactgcgccagaggctacaactggaactacttcgactactggggccagggaaccctcgtgaccgtgtctagtacgcgtgaggacctgaagaacgtgttcccacctgaggtggccgtgttcgagcctagcgaggccgagatcagccacacccagaaagccaccctcgtgtgcctggctaccggcttctaccccgaccatgtggaactgtcttggtgggtcaacggcaaagaggtgcacagcggcgtgtgtaccgacccccagccactgaaagaacagcccgccctgaacgacagccggtactgcctgagcagcagactgagagtgtccgccaccttctggcagaacccccggaaccacttcagatgccaggtgcagttctacggcctgagcgagaacgacgagtggacccaggacagagccaagcccgtgacccagatcgtgtctgccgaagcctggggcagagccgatgatgtgattaagatccactggcaggaaaagaagtccaacaccatcctgggcagccaggaaggcaacaccatgaagaccaacgacacctacatgaagttcagctggctgaccgtgcccgagaagtccctggacaaagaacacagatgcatcgtgcggcacgaaaacaacaagaacggcgtggaccaggaaatcatcttcccacccatcaagaccgatgtgattacaatggaccccaaggacaactgctccaaggacgccaacgataccctgctgctccagctgaccaacaccagcgcctactacatgtacttgttgctgctgctgaagtccgtggtgtacttcgccatcatcacatgctgcctgctgcggagaaccgccttctgctgcaacggcgagaagtct

SEQ ID NO: 7267 - DNA, 2181 bp, synthetic construct
  source 1..2181: mol_type = other DNA
atggccttaccagtgaccgccttgctcctgccgctggccttgctgctccacgccgccaggccggacgacatcgtgctgacccagagccccgccagcctggccgtgagcctgggccagagcgtgaccatcagctgcagagccagcgagagcgtggagtactacggcaccagcctgatgcagtggtaccagcagaagcccggccagccccccaagctgctgatctacgccaccagcaacgtggagagcggcgtgcccgccagattcagcggcagcggcagcggcaccgacttcagcctgaacatccaccccgtggaggaggacgacatcgccatgtacttctgccagcagagcagaaagctgcccagcaccttcggcggcggcaccaagctggagatcaagctcgagatccagaaccctgatcctgccgtgtaccagctgcgggatagcaagagcagcgacaagagcgtgtgtctgttcaccgacttcgacagccagaccaacgtgtcccagagcaaggactccgacgtgtacatcaccgataagtgcgtgctggacatgcggagcatggacttcaagagcaactccgccgtggcctggtccaacaagtccgatttcgcctgcgccaacgccttcaacaacagcattatccccgaggacacattcttcccaagccccgagagcagcgactccaccgaccacgtgaagcccaaagagacagagaacaccaagcagcccagcaagagctgccacaagcccaaggccatcgtgcacaccgagaaagtgaacatgatgagcctgaccgtgctgggcctgcggatgctgttcgccaaaaccgtggccgtgaacttcctgctgaccgccaagctgttcttcctccgcgccaagagaagcggatctggcgtgaagcagaccctgaatttcgacctgctgaagctggctggcgacgtggaatccaacccaggccctactagtatggactggatttggcgcatccttttccttgtcggcgctgctaccggcgcgcattccttcgaagacgtgagactgcaggagagcggccccggccaggtgaagcccagccagaccgtgagcctgacctgcagcgtgaccggctacagcatcaccaacggcaaccactggtggaactggatcagacaggtgagcggcagcaagctggagtggatcggctacatcagcagcagcggcagcaccgacagcaaccccagcctgaagagcagaatcagcatcaccagagacaccagcaagaaccagctgttcctgcagctgaacagcgtgaccaccgaggacatcgccacctactactgcgccagaggctactacttcgactactggggccagggcaccaccctgaccgtgagcagcacgcgtgaggacctgaagaacgtgttcccacctgaggtggccgtgttcgagcctagcgaggccgagatcagccacacccagaaagccaccctcgtgtgcctggctaccggcttctaccccgaccatgtggaactgtcttggtgggtcaacggcaaagaggtgcacagcggcgtgtgtaccgacccccagccactgaaagaacagcccgccctgaacgacagccggtactgcctgagcagcagactgagagtgtccgccaccttctggcagaacccccggaaccacttcagatgccaggtgcagttctacggcctgagcgagaacgacgagtggacccaggacagagccaagcccgtgacccagatcgtgtctgccgaagcctggggcagagccgatgatgtgattaagatccactggcaggaaaagaagtccaacaccatcctgggcagccaggaaggcaacaccatgaagaccaacgacacctacatgaagttcagctggctgaccgtgcccgagaagtccctggacaaagaacacagatgcatcgtgcggcacgaaaacaacaagaacggcgtggaccaggaaatcatcttcccacccatcaagaccgatgtgattacaatggaccccaaggacaactgctccaaggacgccaacgataccctgctgctccagctgaccaacaccagcgcctactacatgtacttgttgctgctgctgaagtccgtggtgtacttcgccatcatcacatgctgcctgctgcggagaaccgccttctgctgcaacggcgagaagtct

SEQ ID NO: 7268 - DNA, 2178 bp, synthetic construct
  source 1..2178: mol_type = other DNA
atggccttaccagtgaccgccttgctcctgccgctggccttgctgctccacgccgccaggccggacatccagatgacccagagccccagcagcctgtctgccagcgtgggcgacagagtgaccatcacctgtagagccagccaggacgtgaacaccgccgtggcctggtatcagcagaagcctggcaaggcccccaagctgctgatctacagcgccagcttcctggaaagcggcgtgcccagcagattcagcggaagcagaagcggcaccgacttcaccctgaccatcagctccctccagcccgaggacttcgccacctactactgccagcagcactacaccacccctcccaccttcggccagaccaaggtggaaatcaagagactcgagatccagaaccctgatcctgccgtgtaccagctgcgggatagcaagagcagcgacaagagcgtgtgtctgttcaccgacttcgacagccagaccaacgtgtcccagagcaaggactccgacgtgtacatcaccgataagtgcgtgctggacatgcggagcatggacttcaagagcaactccgccgtggcctggtccaacaagtccgatttcgcctgcgccaacgccttcaacaacagcattatccccgaggacacattcttcccaagccccgagagcagcgactccaccgaccacgtgaagcccaaagagacagagaacaccaagcagcccagcaagagctgccacaagcccaaggccatcgtgcacaccgagaaagtgaacatgatgagcctgaccgtgctgggcctgcggatgctgttcgccaaaaccgtggccgtgaacttcctgctgaccgccaagctgttcttcctccgcgccaagagaagcggatctggcgtgaagcagaccctgaatttcgacctgctgaagctggctggcgacgtggaatccaacccaggccctactagtatggactggatttggcgcatccttttccttgtcggcgctgctaccggcgcgcattccttcgaagaagtgcaactggtggaatctggcggcggactggtgcagcctggcggatctctgagactgagctgtgccgccagcggcttcaacatcaaggacacctacatccactgggtgcgccaggcccctggaaagggactggaatgggtggcccggatctaccccaccaacggctacaccagatacgccgacagcgtgaagggccggttcaccatcagcgccgacaccagcaagaataccgcctacctccagatgaacagcctgcgggccgaggataccgccgtgtactactgctcaagatggggaggcgacggcttctacgctatggacgtgtggggccagggcacccttgtgaccgtgtcatctacgcgtgaggacctgaagaacgtgttcccacctgaggtggccgtgttcgagcctagcgaggccgagatcagccacacccagaaagccaccctcgtgtgcctggctaccggcttctaccccgaccatgtggaactgtcttggtgggtcaacggcaaagaggtgcacagcggcgtgtgtaccgacccccagccactgaaagaacagcccgccctgaacgacagccggtactgcctgagcagcagactgagagtgtccgccaccttctggcagaacccccggaaccacttcagatgccaggtgcagttctacggcctgagcgagaacgacgagtggacccaggacagagccaagcccgtgacccagatcgtgtctgccgaagcctggggcagagccgatgatgtgattaagatccactggcaggaaaagaagtccaacaccatcctgggcagccaggaaggcaacaccatgaagaccaacgacacctacatgaagttcagctggctgaccgtgcccgagaagtccctggacaaagaacacagatgcatcgtgcggcacgaaaacaacaagaacggcgtggaccaggaaatcatcttcccacccatcaagaccgatgtgattacaatggaccccaaggacaactgctccaaggacgccaacgataccctgctgctccagctgaccaacaccagcgcctactacatgtacttgttgctgctgctgaagtccgtggtgtacttcgccatcatcacatgctgcctgctgcggagaaccgccttctgctgcaacggcgagaagtct

SEQ ID NO: 7269 - DNA, 2175 bp, synthetic construct
  source 1..2175: mol_type = other DNA
atggccttaccagtgaccgccttgctcctgccgctggccttgctgctccacgccgccaggccggaccagagcgtgctgacacagcctcctagcgtgtcagtggcccctggcaagaccgccagaatcccctgcgagggcaactacatcggcagcagcaacgtgcactggtatcagcagaagcccggccaggctcccgtgctcgtgatccacttcgacagcgacagacccagcggcatccccgacagattcagcggcagcaacagcggcaacatggctaccctgaccatcagcagagtggaagccggggacgaggccgactactactgtcaagtgtgggagaaccacggctgggtgttcggcggaggcaccaagctgacagtgctgtctctcgagatccagaaccctgatcctgccgtgtaccagctgcgggatagcaagagcagcgacaagagcgtgtgtctgttcaccgacttcgacagccagaccaacgtgtcccagagcaaggactccgacgtgtacatcaccgataagtgcgtgctggacatgcggagcatggacttcaagagcaactccgccgtggcctggtccaacaagtccgatttcgcctgcgccaacgccttcaacaacagcattatccccgaggacacattcttcccaagccccgagagcagcgactccaccgaccacgtgaagcccaaagagacagagaacaccaagcagcccagcaagagctgccacaagcccaaggccatcgtgcacaccgagaaagtgaacatgatgagcctgaccgtgctgggcctgcggatgctgttcgccaaaaccgtggccgtgaacttcctgctgaccgccaagctgttcttcctccgcgccaagagaagcggatctggcgtgaagcagaccctgaatttcgacctgctgaagctggctggcgacgtggaatccaacccaggccctactagtatggactggatttggcgcatccttttccttgtcggcgctgctaccggcgcgcattccttcgaagaggtgcaactggtggaaacaggcggcggactggtgcagcctggcgagtctctgagactgagctgtgccgccagcggcttcaccttcagcgactacgagatgaactgggtgcgccaggcccctggaaagggcctggaatgggtgtcctacatcagcagctccggcagcaccatctactacgccgacagcgtgaagggccggtttaccatctaccgggacaacgccaagaacagcctgtacctccagatgaactccctgcgggccgaggacaccgccctgtactattgtgccagagcctggggcgtgggaccccctgattattggggacagggcaccctcgtgaccgtgtcctctacgcgtgaggacctgaagaacgtgttcccacctgaggtggccgtgttcgagcctagcgaggccgagatcagccacacccagaaagccaccctcgtgtgcctggctaccggcttctaccccgaccatgtggaactgtcttggtgggtcaacggcaaagaggtgcacagcggcgtgtgtaccgacccccagccactgaaagaacagcccgccctgaacgacagccggtactgcctgagcagcagactgagagtgtccgccaccttctggcagaacccccggaaccacttcagatgccaggtgcagttctacggcctgagcgagaacgacgagtggacccaggacagagccaagcccgtgacccagatcgtgtctgccgaagcctggggcagagccgatgatgtgattaagatccactggcaggaaaagaagtccaacaccatcctgggcagccaggaaggcaacaccatgaagaccaacgacacctacatgaagttcagctggctgaccgtgcccgagaagtccctggacaaagaacacagatgcatcgtgcggcacgaaaacaacaagaacggcgtggaccaggaaatcatcttcccacccatcaagaccgatgtgattacaatggaccccaaggacaactgctccaaggacgccaacgataccctgctgctccagctgaccaacaccagcgcctactacatgtacttgttgctgctgctgaagtccgtggtgtacttcgccatcatcacatgctgcctgctgcggagaaccgccttctgctgcaacggcgagaagtct

SEQ ID NO: 7270 - DNA, 2199 bp, synthetic construct
  source 1..2199: mol_type = other DNA
atggccttaccagtgaccgccttgctcctgccgctggccttgctgctccacgccgccaggccggacatccagatgacccagagccccagcagcctgtctgccagcgtgggcgataccgtgaccatcacctgtcaggccaacggctacctgaactggtatcagcagcggagaggcaaggcccccaagctgctgatctacgacggcagcaagctggaaagaggcgtgcccagcagattcagcggcagaagatggggccaggagtacaacctgaccatcaacaacctccagcccgaggatattgccacatacttttgccaggtgtacgagttcgtggtgcccggcacacggctggacctgaagagaacagtggctgctcctctcgagatccagaaccctgatcctgccgtgtaccagctgcgggatagcaagagcagcgacaagagcgtgtgtctgttcaccgacttcgacagccagaccaacgtgtcccagagcaaggactccgacgtgtacatcaccgataagtgcgtgctggacatgcggagcatggacttcaagagcaactccgccgtggcctggtccaacaagtccgatttcgcctgcgccaacgccttcaacaacagcattatccccgaggacacattcttcccaagccccgagagcagcgactccaccgaccacgtgaagcccaaagagacagagaacaccaagcagcccagcaagagctgccacaagcccaaggccatcgtgcacaccgagaaagtgaacatgatgagcctgaccgtgctgggcctgcggatgctgttcgccaaaaccgtggccgtgaacttcctgctgaccgccaagctgttcttcctccgcgccaagagaagcggatctggcgtgaagcagaccctgaatttcgacctgctgaagctggctggcgacgtggaatccaacccaggccctactagtatggactggatttggcgcatccttttccttgtcggcgctgctaccggcgcgcattccttcgaacaggtgcagctgctccagtctggcgctgccgtgacaaagcctggcgcttctgtgcgggtgtcctgtgaagccagcggctacaacatccgggactacttcatccactggtggcggcaggctccaggccagggactccagtgggtgggatggatcaaccccaagaccggccagcccaacaaccccagacagttccagggcagagtgtccctgaccagacacgccagctgggacttcgacaccttcagcttctacatggatctgaaggccctgcggagcgacgataccgccgtgtacttctgcgccagacagagaagcgactactgggatttcgacgtgtggggcagcggcacccaagtgacagtgtctagcgccagcaccaagggacccacgcgtgaggacctgaagaacgtgttcccacctgaggtggccgtgttcgagcctagcgaggccgagatcagccacacccagaaagccaccctcgtgtgcctggctaccggcttctaccccgaccatgtggaactgtcttggtgggtcaacggcaaagaggtgcacagcggcgtgtgtaccgacccccagccactgaaagaacagcccgccctgaacgacagccggtactgcctgagcagcagactgagagtgtccgccaccttctggcagaacccccggaaccacttcagatgccaggtgcagttctacggcctgagcgagaacgacgagtggacccaggacagagccaagcccgtgacccagatcgtgtctgccgaagcctggggcagagccgatgatgtgattaagatccactggcaggaaaagaagtccaacaccatcctgggcagccaggaaggcaacaccatgaagaccaacgacacctacatgaagttcagctggctgaccgtgcccgagaagtccctggacaaagaacacagatgcatcgtgcggcacgaaaacaacaagaacggcgtggaccaggaaatcatcttcccacccatcaagaccgatgtgattacaatggaccccaaggacaactgctccaaggacgccaacgataccctgctgctccagctgaccaacaccagcgcctactacatgtacttgttgctgctgctgaagtccgtggtgtacttcgccatcatcacatgctgcctgctgcggagaaccgccttctgctgcaacggcgagaagtct

SEQ ID NO: 7271 - DNA, 2217 bp, synthetic construct
  source 1..2217: mol_type = other DNA
atggccttaccagtgaccgccttgctcctgccgctggccttgctgctccacgccgccaggccgcagtctgccctgacacagcctcctagcgcctctggctctcccggccagagcatcaccatcagctgtaccggcaccagcaacaacttcgtgtcctggtatcagcagcacgccggcaaggcccccaagctcgtgatctacgacgtgaacaagcggcccagcggcgtgcccgatagattcagcggcagcaagagcggcaacaccgccagcctgacagtgtctggcctccagaccgatgacgaggccgtgtactactgcggcagcctcgtgggcaactgggacgtgatctttggcggaggcaccaagctgaccgtgctgctcgagatccagaaccctgatcctgccgtgtaccagctgcgggatagcaagagcagcgacaagagcgtgtgtctgttcaccgacttcgacagccagaccaacgtgtcccagagcaaggactccgacgtgtacatcaccgataagtgcgtgctggacatgcggagcatggacttcaagagcaactccgccgtggcctggtccaacaagtccgatttcgcctgcgccaacgccttcaacaacagcattatccccgaggacacattcttcccaagccccgagagcagcgactccaccgaccacgtgaagcccaaagagacagagaacaccaagcagcccagcaagagctgccacaagcccaaggccatcgtgcacaccgagaaagtgaacatgatgagcctgaccgtgctgggcctgcggatgctgttcgccaaaaccgtggccgtgaacttcctgctgaccgccaagctgttcttcctccgcgccaagagaagcggatctggcgtgaagcagaccctgaatttcgacctgctgaagctggctggcgacgtggaatccaacccaggccctactagtatggactggatttggcgcatccttttccttgtcggcgctgctaccggcgcgcattccttcgaacagccccagctccaggaatctggccccacactggtggaagccagcgagacactgagcctgacctgtgccgtgtccggcgattctaccgccgcctgcaatagcttctggggctgggtgcgccagcctcctggaaagggactggaatgggtgggaagcctgagccactgcgccagctattggaaccggggctggacctaccacaaccccagcctgaagtccagactgaccctggccctggacacccccaagaacctggtgttcctgaagctgaacagcgtgacagccgccgacaccgccacctactactgtgccagatttggcggcgaggtgctgcggtacaccgactggcctaaacctgcctgggtggacctgtggggcagaggaacactcgtgaccgtgtccagcacgcgtgaggacctgaagaacgtgttcccacctgaggtggccgtgttcgagcctagcgaggccgagatcagccacacccagaaagccaccctcgtgtgcctggctaccggcttctaccccgaccatgtggaactgtcttggtgggtcaacggcaaagaggtgcacagcggcgtgtgtaccgacccccagccactgaaagaacagcccgccctgaacgacagccggtactgcctgagcagcagactgagagtgtccgccaccttctggcagaacccccggaaccacttcagatgccaggtgcagttctacggcctgagcgagaacgacgagtggacccaggacagagccaagcccgtgacccagatcgtgtctgccgaagcctggggcagagccgatgatgtgattaagatccactggcaggaaaagaagtccaacaccatcctgggcagccaggaaggcaacaccatgaagaccaacgacacctacatgaagttcagctggctgaccgtgcccgagaagtccctggacaaagaacacagatgcatcgtgcggcacgaaaacaacaagaacggcgtggaccaggaaatcatcttcccacccatcaagaccgatgtgattacaatggaccccaaggacaactgctccaaggacgccaacgataccctgctgctccagctgaccaacaccagcgcctactacatgtacttgttgctgctgctgaagtccgtggtgtacttcgccatcatcacatgctgcctgctgcggagaaccgccttctgctgcaacggcgagaagtct

SEQ ID NO: 7272 - DNA, 2172 bp, synthetic construct
  source 1..2172: mol_type = other DNA
atggccttaccagtgaccgccttgctcctgccgctggccttgctgctccacgccgccaggccggagatcgtgctgacacagagccctggcaccctgagcctgtctccaggcgagacagccatcatcagctgccggacaagccagtacggcagcctggcctggtatcagcagaggccaggacaggcccccagactcgtgatctacagcggcagcacaagagccgccggaatccccgatagattcagcggctccagatggggacccgactacaacctgaccatcagcaacctggaaagcggcgacttcggcgtgtactactgccagcagtacgagttcttcggccagggcaccaaggtgcaggtggacatcaaaagactcgagatccagaaccctgatcctgccgtgtaccagctgcgggatagcaagagcagcgacaagagcgtgtgtctgttcaccgacttcgacagccagaccaacgtgtcccagagcaaggactccgacgtgtacatcaccgataagtgcgtgctggacatgcggagcatggacttcaagagcaactccgccgtggcctggtccaacaagtccgatttcgcctgcgccaacgccttcaacaacagcattatccccgaggacacattcttcccaagccccgagagcagcgactccaccgaccacgtgaagcccaaagagacagagaacaccaagcagcccagcaagagctgccacaagcccaaggccatcgtgcacaccgagaaagtgaacatgatgagcctgaccgtgctgggcctgcggatgctgttcgccaaaaccgtggccgtgaacttcctgctgaccgccaagctgttcttcctccgcgccaagagaagcggatctggcgtgaagcagaccctgaatttcgacctgctgaagctggctggcgacgtggaatccaacccaggccctactagtatggactggatttggcgcatccttttccttgtcggcgctgctaccggcgcgcattccttcgaacaggtgcagctggtgcagtctggcggccagatgaagaaacccggcgagagcatgagaatcagctgtcgggcctccggctacgagttcatcgactgcaccctgaactggatcagactggcccctggcaagcggcctgagtggatgggatggctgaagcctagaggcggagccgtgaactacgccagacctctccagggcagagtgaccatgaccagggacgtgtacagcgataccgccttcctggaactgcggagcctgaccgtggatgataccgccgtgtacttctgcaccagaggcaagaactgcgattacaactgggacttcgagcactggggcagaggcacccctgtgatcgtgtctagcacgcgtgaggacctgaagaacgtgttcccacctgaggtggccgtgttcgagcctagcgaggccgagatcagccacacccagaaagccaccctcgtgtgcctggctaccggcttctaccccgaccatgtggaactgtcttggtgggtcaacggcaaagaggtgcacagcggcgtgtgtaccgacccccagccactgaaagaacagcccgccctgaacgacagccggtactgcctgagcagcagactgagagtgtccgccaccttctggcagaacccccggaaccacttcagatgccaggtgcagttctacggcctgagcgagaacgacgagtggacccaggacagagccaagcccgtgacccagatcgtgtctgccgaagcctggggcagagccgatgatgtgattaagatccactggcaggaaaagaagtccaacaccatcctgggcagccaggaaggcaacaccatgaagaccaacgacacctacatgaagttcagctggctgaccgtgcccgagaagtccctggacaaagaacacagatgcatcgtgcggcacgaaaacaacaagaacggcgtggaccaggaaatcatcttcccacccatcaagaccgatgtgattacaatggaccccaaggacaactgctccaaggacgccaacgataccctgctgctccagctgaccaacaccagcgcctactacatgtacttgttgctgctgctgaagtccgtggtgtacttcgccatcatcacatgctgcctgctgcggagaaccgccttctgctgcaacggcgagaagtct

SEQ ID NO: 7273 - DNA, 2202 bp, synthetic construct
  source 1..2202: mol_type = other DNA
atggccttaccagtgaccgccttgctcctgccgctggccttgctgctccacgccgccaggccggagctggtgctgacacagagccctggcaccctgtctctgtctgccggcgaaagagccaccctgagctgtagagccagccagagcgtgtcctctggcagcctggcttggtatcagcagaagccaggccaggcccccagactgctgatctacggcgcttctaccagagccaccggcatccccgatagattcagcggctctggctccggcaccgacttcaccctgacaatcggcagactggaacccgaggacctggccgtgtactactgccagcagtacggcaccagcccctacacattcggccagggcaccaagctggaaatcctcgagatccagaaccctgatcctgccgtgtaccagctgcgggatagcaagagcagcgacaagagcgtgtgtctgttcaccgacttcgacagccagaccaacgtgtcccagagcaaggactccgacgtgtacatcaccgataagtgcgtgctggacatgcggagcatggacttcaagagcaactccgccgtggcctggtccaacaagtccgatttcgcctgcgccaacgccttcaacaacagcattatccccgaggacacattcttcccaagccccgagagcagcgactccaccgaccacgtgaagcccaaagagacagagaacaccaagcagcccagcaagagctgccacaagcccaaggccatcgtgcacaccgagaaagtgaacatgatgagcctgaccgtgctgggcctgcggatgctgttcgccaaaaccgtggccgtgaacttcctgctgaccgccaagctgttcttcctccgcgccaagagaagcggatctggcgtgaagcagaccctgaatttcgacctgctgaagctggctggcgacgtggaatccaacccaggccctactagtatggactggatttggcgcatccttttccttgtcggcgctgctaccggcgcgcattccttcgaactggaacagagcggagccgaagtgaagaaacccggcagcagcgtgcaggtgtcctgcaaagcaagcggcggcaccttctctatgtacggcttcaactgggtgcgccaggctcctggacacggcctggaatggatgggcggcatcatccccatcttcggcacctccaactacgcccagaaattccggggcagagtgaccttcaccgccgaccaggccacaagcaccgcctacatggaactgaccaacctgcggagcgacgacaccgccgtgtattattgcgccagagacttcggccccgactgggaggatggcgacagctacgatggcagcggcagaggcttcttcgacttctggggccagggaacccttgtgaccgtgtcctcaacgcgtgaggacctgaagaacgtgttcccacctgaggtggccgtgttcgagcctagcgaggccgagatcagccacacccagaaagccaccctcgtgtgcctggctaccggcttctaccccgaccatgtggaactgtcttggtgggtcaacggcaaagaggtgcacagcggcgtgtgtaccgacccccagccactgaaagaacagcccgccctgaacgacagccggtactgcctgagcagcagactgagagtgtccgccaccttctggcagaacccccggaaccacttcagatgccaggtgcagttctacggcctgagcgagaacgacgagtggacccaggacagagccaagcccgtgacccagatcgtgtctgccgaagcctggggcagagccgatgatgtgattaagatccactggcaggaaaagaagtccaacaccatcctgggcagccaggaaggcaacaccatgaagaccaacgacacctacatgaagttcagctggctgaccgtgcccgagaagtccctggacaaagaacacagatgcatcgtgcggcacgaaaacaacaagaacggcgtggaccaggaaatcatcttcccacccatcaagaccgatgtgattacaatggaccccaaggacaactgctccaaggacgccaacgataccctgctgctccagctgaccaacaccagcgcctactacatgtacttgttgctgctgctgaagtccgtggtgtacttcgccatcatcacatgctgcctgctgcggagaaccgccttctgctgcaacggcgagaagtct

SEQ ID NO: 7274 - DNA, 2142 bp, synthetic construct
  source 1..2142: mol_type = other DNA
atggccttaccagtgaccgccttgctcctgccgctggccttgctgctccacgccgccaggccggacatccagatgacccagagccccagcagcctgtctgccagcgtgggcgacagagtgaccatcacctgtcaggccagccaggacatcaacaactacctgaactggtatcagcagaagcccggcaaggcccccaagctgctgatctacgacgccagcaatctgcagaccggcgtgcccagcagattttccggctctggcagcggcaccgacttcaccttcaccatcgaggacattgccacctactactgccagcagtacaccttcggccctggcaccaaggtggacatcaaactcgagatccagaaccctgatcctgccgtgtaccagctgcgggatagcaagagcagcgacaagagcgtgtgtctgttcaccgacttcgacagccagaccaacgtgtcccagagcaaggactccgacgtgtacatcaccgataagtgcgtgctggacatgcggagcatggacttcaagagcaactccgccgtggcctggtccaacaagtccgatttcgcctgcgccaacgccttcaacaacagcattatccccgaggacacattcttcccaagccccgagagcagcgactccaccgaccacgtgaagcccaaagagacagagaacaccaagcagcccagcaagagctgccacaagcccaaggccatcgtgcacaccgagaaagtgaacatgatgagcctgaccgtgctgggcctgcggatgctgttcgccaaaaccgtggccgtgaacttcctgctgaccgccaagctgttcttcctccgcgccaagagaagcggatctggcgtgaagcagaccctgaatttcgacctgctgaagctggctggcgacgtggaatccaacccaggccctactagtatggactggatttggcgcatccttttccttgtcggcgctgctaccggcgcgcattccttcgaagaagtgcaactgctggaatctggcggcggactggtgcagcctggcggatctctgagactgagctgtgccgccagcggcttcacctttagctggtacagcatgacctgggtgcgccaggcccctggcaaaggactggaatgggtgtccagcatcgtgccctggggcgatttcacccagtacgccgatagcgtgaagggccggttcaccatcagccgggacaacagcaagaacaccctgtacctgcagatgaacagcctgcgggccgaggacaccgccgtgtactattgtgccaagggacctggctggggcagcttcgatctgtggggcagaggaacccttgtgaccgtgtccagcacgcgtgaggacctgaagaacgtgttcccacctgaggtggccgtgttcgagcctagcgaggccgagatcagccacacccagaaagccaccctcgtgtgcctggctaccggcttctaccccgaccatgtggaactgtcttggtgggtcaacggcaaagaggtgcacagcggcgtgtgtaccgacccccagccactgaaagaacagcccgccctgaacgacagccggtactgcctgagcagcagactgagagtgtccgccaccttctggcagaacccccggaaccacttcagatgccaggtgcagttctacggcctgagcgagaacgacgagtggacccaggacagagccaagcccgtgacccagatcgtgtctgccgaagcctggggcagagccgatgatgtgattaagatccactggcaggaaaagaagtccaacaccatcctgggcagccaggaaggcaacaccatgaagaccaacgacacctacatgaagttcagctggctgaccgtgcccgagaagtccctggacaaagaacacagatgcatcgtgcggcacgaaaacaacaagaacggcgtggaccaggaaatcatcttcccacccatcaagaccgatgtgattacaatggaccccaaggacaactgctccaaggacgccaacgataccctgctgctccagctgaccaacaccagcgcctactacatgtacttgttgctgctgctgaagtccgtggtgtacttcgccatcatcacatgctgcctgctgcggagaaccgccttctgctgcaacggcgagaagtct

SEQ ID NO: 7275 - DNA, 2172 bp, synthetic construct
  source 1..2172: mol_type = other DNA
atggccttaccagtgaccgccttgctcctgccgctggccttgctgctccacgccgccaggccggacatccagatgacccagagccccagcagcctgtctgccagcgtgggcgacagagtgaccatcacctgtaccgccagcctgagcgtgtccagcacctacctgcactggtatcagcagaagcccggcagcagccccaagctgtggatctacagcaccagcaacctggcctccggcgtgcccagcagattttctggcagcggctctggcaccagctacaccctgaccatcagctccctccagcccgaggacttcgccacctactactgccaccagtaccacagaagccccctgacctttggcggaggcaccaaggtggaaatcaagagactcgagatccagaaccctgatcctgccgtgtaccagctgcgggatagcaagagcagcgacaagagcgtgtgtctgttcaccgacttcgacagccagaccaacgtgtcccagagcaaggactccgacgtgtacatcaccgataagtgcgtgctggacatgcggagcatggacttcaagagcaactccgccgtggcctggtccaacaagtccgatttcgcctgcgccaacgccttcaacaacagcattatccccgaggacacattcttcccaagccccgagagcagcgactccaccgaccacgtgaagcccaaagagacagagaacaccaagcagcccagcaagagctgccacaagcccaaggccatcgtgcacaccgagaaagtgaacatgatgagcctgaccgtgctgggcctgcggatgctgttcgccaaaaccgtggccgtgaacttcctgctgaccgccaagctgttcttcctccgcgccaagagaagcggatctggcgtgaagcagaccctgaatttcgacctgctgaagctggctggcgacgtggaatccaacccaggccctactagtatggactggatttggcgcatccttttccttgtcggcgctgctaccggcgcgcattccttcgaagaagtgcaactggtggaatctggcggcggactggtgcagcctggcggatctctgagactgagctgtgccgccagcggcttcagcctgaccaaatacggcgtgcactgggtgcgccaggcccctggaaaaggactggaatgggtgggagtgaagtgggctggcggctccaccgactacaacagcgccctgatgagccggttcaccatcagcaaggacaacgccaagaacagcctgtacctccagatgaactccctgcgggccgaggacaccgccgtgtactactgtgccagagatcaccgggacgctatggactactggggccagggaacactcgtgaccgtgtcctctacgcgtgaggacctgaagaacgtgttcccacctgaggtggccgtgttcgagcctagcgaggccgagatcagccacacccagaaagccaccctcgtgtgcctggctaccggcttctaccccgaccatgtggaactgtcttggtgggtcaacggcaaagaggtgcacagcggcgtgtgtaccgacccccagccactgaaagaacagcccgccctgaacgacagccggtactgcctgagcagcagactgagagtgtccgccaccttctggcagaacccccggaaccacttcagatgccaggtgcagttctacggcctgagcgagaacgacgagtggacccaggacagagccaagcccgtgacccagatcgtgtctgccgaagcctggggcagagccgatgatgtgattaagatccactggcaggaaaagaagtccaacaccatcctgggcagccaggaaggcaacaccatgaagaccaacgacacctacatgaagttcagctggctgaccgtgcccgagaagtccctggacaaagaacacagatgcatcgtgcggcacgaaaacaacaagaacggcgtggaccaggaaatcatcttcccacccatcaagaccgatgtgattacaatggaccccaaggacaactgctccaaggacgccaacgataccctgctgctccagctgaccaacaccagcgcctactacatgtacttgttgctgctgctgaagtccgtggtgtacttcgccatcatcacatgctgcctgctgcggagaaccgccttctgctgcaacggcgagaagtct

SEQ ID NO: 7276 - DNA, 2184 bp, synthetic construct
  source 1..2184: mol_type = other DNA
atggccttaccagtgaccgccttgctcctgccgctggccttgctgctccacgccgccaggccggacatccagatgacccagagccccagcagcctgtctgccagcgtgggcgacagagtgaccatcacatgcaaggccagccaggacgtgggaacagccgtggcctggtatcagcagaagcctggcaaggcccccaagctgctgatctacagcgccagctacagatccaccggcgtgcccagcagattttccggctctggcagcggcaccgacttcaccctgaccatctctagcctccagcccgaggacttcgccacctactactgccagcaccactactccgccccctggacatttggcggaggcaccaaggtggaaatcaagctcgagatccagaaccctgatcctgccgtgtaccagctgcgggatagcaagagcagcgacaagagcgtgtgtctgttcaccgacttcgacagccagaccaacgtgtcccagagcaaggactccgacgtgtacatcaccgataagtgcgtgctggacatgcggagcatggacttcaagagcaactccgccgtggcctggtccaacaagtccgatttcgcctgcgccaacgccttcaacaacagcattatccccgaggacacattcttcccaagccccgagagcagcgactccaccgaccacgtgaagcccaaagagacagagaacaccaagcagcccagcaagagctgccacaagcccaaggccatcgtgcacaccgagaaagtgaacatgatgagcctgaccgtgctgggcctgcggatgctgttcgccaaaaccgtggccgtgaacttcctgctgaccgccaagctgttcttcctccgcgccaagagaagcggatctggcgtgaagcagaccctgaatttcgacctgctgaagctggctggcgacgtggaatccaacccaggccctactagtatggactggatttggcgcatccttttccttgtcggcgctgctaccggcgcgcattccttcgaagaagtgcaactggtggaatcaggcggcggactggtgcagcctggcggatctctgagactgagctgtgccgccagcggcttcaccttcagcagaaacggcatgagctgggtgcgccaggcccctggaaaaggactggaatgggtggcaaccgtgtccagcggcggcagctacatctactacgccgacagcgtgaagggccggttcaccatctccagagacaacgccaagaacagcctgtacctccagatgaactccctgcgggccgaggacaccgccgtgtactattgtgccagacagggcaccaccgccctggctaccagattcttcgatgtgtggggccagggcaccctcgtgaccgtgtcatctacgcgtgaggacctgaagaacgtgttcccacctgaggtggccgtgttcgagcctagcgaggccgagatcagccacacccagaaagccaccctcgtgtgcctggctaccggcttctaccccgaccatgtggaactgtcttggtgggtcaacggcaaagaggtgcacagcggcgtgtgtaccgacccccagccactgaaagaacagcccgccctgaacgacagccggtactgcctgagcagcagactgagagtgtccgccaccttctggcagaacccccggaaccacttcagatgccaggtgcagttctacggcctgagcgagaacgacgagtggacccaggacagagccaagcccgtgacccagatcgtgtctgccgaagcctggggcagagccgatgatgtgattaagatccactggcaggaaaagaagtccaacaccatcctgggcagccaggaaggcaacaccatgaagaccaacgacacctacatgaagttcagctggctgaccgtgcccgagaagtccctggacaaagaacacagatgcatcgtgcggcacgaaaacaacaagaacggcgtggaccaggaaatcatcttcccacccatcaagaccgatgtgattacaatggaccccaaggacaactgctccaaggacgccaacgataccctgctgctccagctgaccaacaccagcgcctactacatgtacttgttgctgctgctgaagtccgtggtgtacttcgccatcatcacatgctgcctgctgcggagaaccgccttctgctgcaacggcgagaagtct

SEQ ID NO: 7277 - DNA, 2172 bp, synthetic construct
  source 1..2172: mol_type = other DNA
atggccttaccagtgaccgccttgctcctgccgctggccttgctgctccacgccgccaggccggacatccagatgacccagagcccccctagcctgtctgcctctgtgggcggcaaagtgaccatcacatgcaaggccagccaggacatcgaccgctacatggcctggtatcaggacaagcccggcaagggacccaagctgctgatccacgataccagcaccctccagcccggcatccccagcagattttctggcagcggctccggcagagactacagcttcagcatcagcaacctggaacccgaggacattgccacctactactgcctccagtacgacaacctgtggaccttcggcggaggcaccaagctggaaatcaagagactcgagatccagaaccctgatcctgccgtgtaccagctgcgggatagcaagagcagcgacaagagcgtgtgtctgttcaccgacttcgacagccagaccaacgtgtcccagagcaaggactccgacgtgtacatcaccgataagtgcgtgctggacatgcggagcatggacttcaagagcaactccgccgtggcctggtccaacaagtccgatttcgcctgcgccaacgccttcaacaacagcattatccccgaggacacattcttcccaagccccgagagcagcgactccaccgaccacgtgaagcccaaagagacagagaacaccaagcagcccagcaagagctgccacaagcccaaggccatcgtgcacaccgagaaagtgaacatgatgagcctgaccgtgctgggcctgcggatgctgttcgccaaaaccgtggccgtgaacttcctgctgaccgccaagctgttcttcctccgcgccaagagaagcggatctggcgtgaagcagaccctgaatttcgacctgctgaagctggctggcgacgtggaatccaacccaggccctactagtatggactggatttggcgcatccttttccttgtcggcgctgctaccggcgcgcattccttcgaacaggtgcaactggtgcagagcggagccgagcttgtgaagcctggcgcttccgtgaagatgagctgcaaagccagcggctacatcttcaccaactacaacatccactgggtcaagaagtccccaggccagggcctggaatggatcggagccatctaccccggaaacggcgacgccccttacagccagaagttccaggacagagccaccctgaccgccgacaccagcagcagcaccacctacatggaactgagcagcctgaccagcgaggacagcgccgtgtactattgcgtgcgggccaactgggatgtggccttcgcctattggggccagggcacactggtgtccgtgtcctctacgcgtgaggacctgaagaacgtgttcccacctgaggtggccgtgttcgagcctagcgaggccgagatcagccacacccagaaagccaccctcgtgtgcctggctaccggcttctaccccgaccatgtggaactgtcttggtgggtcaacggcaaagaggtgcacagcggcgtgtgtaccgacccccagccactgaaagaacagcccgccctgaacgacagccggtactgcctgagcagcagactgagagtgtccgccaccttctggcagaacccccggaaccacttcagatgccaggtgcagttctacggcctgagcgagaacgacgagtggacccaggacagagccaagcccgtgacccagatcgtgtctgccgaagcctggggcagagccgatgatgtgattaagatccactggcaggaaaagaagtccaacaccatcctgggcagccaggaaggcaacaccatgaagaccaacgacacctacatgaagttcagctggctgaccgtgcccgagaagtccctggacaaagaacacagatgcatcgtgcggcacgaaaacaacaagaacggcgtggaccaggaaatcatcttcccacccatcaagaccgatgtgattacaatggaccccaaggacaactgctccaaggacgccaacgataccctgctgctccagctgaccaacaccagcgcctactacatgtacttgttgctgctgctgaagtccgtggtgtacttcgccatcatcacatgctgcctgctgcggagaaccgccttctgctgcaacggcgagaagtct

SEQ ID NO: 7278 - DNA, 2175 bp, synthetic construct
  source 1..2175: mol_type = other DNA
atggccttaccagtgaccgccttgctcctgccgctggccttgctgctccacgccgccaggccggacatccagatgacccagagccctgccagcctgtctgcctctgtgggcgagacagtgaccatcacctgtcgggtgtccggcaacatccacaactacctggcctggtatcagcagaagcagggcaagagcccccaactgctggtgtacaacgccaagaccctggccgatggcgtgcccagcagattttctggctctggcagcggcacccagtacagcctgaagatcaacagcctccagcccgaggacttcggcagctactactgccagcacttctggtccaacccctacaccttcggcggaggcaccaagctggaaatcaagctcgagatccagaaccctgatcctgccgtgtaccagctgcgggatagcaagagcagcgacaagagcgtgtgtctgttcaccgacttcgacagccagaccaacgtgtcccagagcaaggactccgacgtgtacatcaccgataagtgcgtgctggacatgcggagcatggacttcaagagcaactccgccgtggcctggtccaacaagtccgatttcgcctgcgccaacgccttcaacaacagcattatccccgaggacacattcttcccaagccccgagagcagcgactccaccgaccacgtgaagcccaaagagacagagaacaccaagcagcccagcaagagctgccacaagcccaaggccatcgtgcacaccgagaaagtgaacatgatgagcctgaccgtgctgggcctgcggatgctgttcgccaaaaccgtggccgtgaacttcctgctgaccgccaagctgttcttcctccgcgccaagagaagcggatctggcgtgaagcagaccctgaatttcgacctgctgaagctggctggcgacgtggaatccaacccaggccctactagtatggactggatttggcgcatccttttccttgtcggcgctgctaccggcgcgcattccttcgaacaggtgcaactccagcagtctggcgcttccgtgaaggtgtcctgcaaggccagcgaactcgtgcggcctggcacaggctacgccttcaccaattacctgatcgagtgggtcaagcagaggcccggacagggcctggaatggatcggagtgattaacccaggcagcggcggcaccaactacaacgagaagttcaagggcaaggccaccctgaccgccgacaagagcagcagcacagcctacatgcaactgagcagcctgaccagcgacgacagcgccgtgtacttctgcgcccggtacagaagctacgactggtacttcgacgtgtggggagccggcaccaccgtgacagtgtcatctacgcgtgaggacctgaagaacgtgttcccacctgaggtggccgtgttcgagcctagcgaggccgagatcagccacacccagaaagccaccctcgtgtgcctggctaccggcttctaccccgaccatgtggaactgtcttggtgggtcaacggcaaagaggtgcacagcggcgtgtgtaccgacccccagccactgaaagaacagcccgccctgaacgacagccggtactgcctgagcagcagactgagagtgtccgccaccttctggcagaacccccggaaccacttcagatgccaggtgcagttctacggcctgagcgagaacgacgagtggacccaggacagagccaagcccgtgacccagatcgtgtctgccgaagcctggggcagagccgatgatgtgattaagatccactggcaggaaaagaagtccaacaccatcctgggcagccaggaaggcaacaccatgaagaccaacgacacctacatgaagttcagctggctgaccgtgcccgagaagtccctggacaaagaacacagatgcatcgtgcggcacgaaaacaacaagaacggcgtggaccaggaaatcatcttcccacccatcaagaccgatgtgattacaatggaccccaaggacaactgctccaaggacgccaacgataccctgctgctccagctgaccaacaccagcgcctactacatgtacttgttgctgctgctgaagtccgtggtgtacttcgccatcatcacatgctgcctgctgcggagaaccgccttctgctgcaacggcgagaagtct

SEQ ID NO: 7279 - DNA, 2172 bp, synthetic construct
  source 1..2172: mol_type = other DNA
atggccttaccagtgaccgccttgctcctgccgctggccttgctgctccacgccgccaggccggacatccagatgacccagagcttcagcagcctgagcgccagcgtgggcgacagagtgaccatcacctgtagagccagccaggacatcagcaactacctgaactggtatcagcagaagcccggcaaggcccccaagctgctgatctactacaccagcagactgcacagcggcgtgcccagcagattttctggcagcggctccggcaccgactacaccctgacaatcagctccctgcagcccgaggacttcgctacctacttctgtcagcaaggcaacaccctgccctggacctttggcggaggcaccaagctggaaatcaagagactcgagatccagaaccctgatcctgccgtgtaccagctgcgggatagcaagagcagcgacaagagcgtgtgtctgttcaccgacttcgacagccagaccaacgtgtcccagagcaaggactccgacgtgtacatcaccgataagtgcgtgctggacatgcggagcatggacttcaagagcaactccgccgtggcctggtccaacaagtccgatttcgcctgcgccaacgccttcaacaacagcattatccccgaggacacattcttcccaagccccgagagcagcgactccaccgaccacgtgaagcccaaagagacagagaacaccaagcagcccagcaagagctgccacaagcccaaggccatcgtgcacaccgagaaagtgaacatgatgagcctgaccgtgctgggcctgcggatgctgttcgccaaaaccgtggccgtgaacttcctgctgaccgccaagctgttcttcctccgcgccaagagaagcggatctggcgtgaagcagaccctgaatttcgacctgctgaagctggctggcgacgtggaatccaacccaggccctactagtatggactggatttggcgcatccttttccttgtcggcgctgctaccggcgcgcattccttcgaagaagtgcaactggtgcagtccggcggagggctggtgcagagcggaggatctctgagactgagctgcagagccagcggctacaccttcacccggtactggatgctgtgggtgcgccagaggccaggcaagggactggaatgggtggccgagatcaacccccggaacgaccggaccaactacaacgagaagttcaagacccggttcaccatcagcgtggacagaagcaagaacaccctgtacctgcagatggacagcctgcgggccgaggataccgccgtgtacttttgtgctctgggaggcggctacgctatggactactggggccagggaacccttgtgaccgtgtcctctacgcgtgaggacctgaagaacgtgttcccacctgaggtggccgtgttcgagcctagcgaggccgagatcagccacacccagaaagccaccctcgtgtgcctggctaccggcttctaccccgaccatgtggaactgtcttggtgggtcaacggcaaagaggtgcacagcggcgtgtgtaccgacccccagccactgaaagaacagcccgccctgaacgacagccggtactgcctgagcagcagactgagagtgtccgccaccttctggcagaacccccggaaccacttcagatgccaggtgcagttctacggcctgagcgagaacgacgagtggacccaggacagagccaagcccgtgacccagatcgtgtctgccgaagcctggggcagagccgatgatgtgattaagatccactggcaggaaaagaagtccaacaccatcctgggcagccaggaaggcaacaccatgaagaccaacgacacctacatgaagttcagctggctgaccgtgcccgagaagtccctggacaaagaacacagatgcatcgtgcggcacgaaaacaacaagaacggcgtggaccaggaaatcatcttcccacccatcaagaccgatgtgattacaatggaccccaaggacaactgctccaaggacgccaacgataccctgctgctccagctgaccaacaccagcgcctactacatgtacttgttgctgctgctgaagtccgtggtgtacttcgccatcatcacatgctgcctgctgcggagaaccgccttctgctgcaacggcgagaagtct

SEQ ID NO: 7280 - DNA, 2175 bp, synthetic construct
  source 1..2175: mol_type = other DNA
atggccttaccagtgaccgccttgctcctgccgctggccttgctgctccacgccgccaggccggacatccagatgacacagtctccggcgtcactgtccgcctccgtgggggagactgtgactattatttgtagggcatcagttaacatctactcttatttggcctggtaccagcagaagcaaggcaagagtcctcagctgctggtgtataatgcgaagatcctggcagagggcgtgccgagccggttctccggcagcggctcaggtacccaattttccctcaagatcaattcactgcagccagaggactttggcagttactattgtcaacaccactacggcacattcactttcgggtccggtacaaaattggagattaagcgactcgagatccagaaccctgatcctgccgtgtaccagctgcgggatagcaagagcagcgacaagagcgtgtgtctgttcaccgacttcgacagccagaccaacgtgtcccagagcaaggactccgacgtgtacatcaccgataagtgcgtgctggacatgcggagcatggacttcaagagcaactccgccgtggcctggtccaacaagtccgatttcgcctgcgccaacgccttcaacaacagcattatccccgaggacacattcttcccaagccccgagagcagcgactccaccgaccacgtgaagcccaaagagacagagaacaccaagcagcccagcaagagctgccacaagcccaaggccatcgtgcacaccgagaaagtgaacatgatgagcctgaccgtgctgggcctgcggatgctgttcgccaaaaccgtggccgtgaacttcctgctgaccgccaagctgttcttcctccgcgccaagagaagcggatctggcgtgaagcagaccctgaatttcgacctgctgaagctggctggcgacgtggaatccaacccaggccctactagtatggactggatttggcgcatccttttccttgtcggcgctgctaccggcgcgcattccttcgaacaggtacagttgaaagaaagcgggcctggactggtagcgccttcccaatctctctccatcacgtgcaccatctctggcttctccctgacttcctatggagttcactgggtgaggcagccccccggcaagggactggaatggctggtcgtcatctggtccgacgggtccacaacctacaactccgctctgaaaagtcggctctctatttctaaagataatagcaagagccaggtgtttctgaaaatgaactctctgcagaccgatgatacggccatttactactgcgcttcacactatggctcaaccttggcattcgcttcctggggccacggaacactggtgaccgtttccgcagccacgcgtgaggacctgaagaacgtgttcccacctgaggtggccgtgttcgagcctagcgaggccgagatcagccacacccagaaagccaccctcgtgtgcctggctaccggcttctaccccgaccatgtggaactgtcttggtgggtcaacggcaaagaggtgcacagcggcgtgtgtaccgacccccagccactgaaagaacagcccgccctgaacgacagccggtactgcctgagcagcagactgagagtgtccgccaccttctggcagaacccccggaaccacttcagatgccaggtgcagttctacggcctgagcgagaacgacgagtggacccaggacagagccaagcccgtgacccagatcgtgtctgccgaagcctggggcagagccgatgatgtgattaagatccactggcaggaaaagaagtccaacaccatcctgggcagccaggaaggcaacaccatgaagaccaacgacacctacatgaagttcagctggctgaccgtgcccgagaagtccctggacaaagaacacagatgcatcgtgcggcacgaaaacaacaagaacggcgtggaccaggaaatcatcttcccacccatcaagaccgatgtgattacaatggaccccaaggacaactgctccaaggacgccaacgataccctgctgctccagctgaccaacaccagcgcctactacatgtacttgttgctgctgctgaagtccgtggtgtacttcgccatcatcacatgctgcctgctgcggagaaccgccttctgctgcaacggcgagaagtct

SEQ ID NO: 7281 - DNA, 2199 bp, synthetic construct
  source 1..2199: mol_type = other DNA
atggccttaccagtgaccgccttgctcctgccgctggccttgctgctccacgccgccaggccggacattgtgatgacccagtctcacaaattcatgtccacatcagtaggagacagggtcagcgtcacctgcaaggccagtcagaatgtgggtaataatgtagcctggtatcaacagaaaccagggcaatctcctaaagtactgatttactcggcatcctaccggtacagtggagtccctgatcgcttcacaggcagtggatctgggacagatttcactctcaccatcagtaatgtgcagtctgaagacttggcagagtatttctgtcagcaatataacacctatccattcacgttcggctcggggacaaagttggaaataaaactcgagatccagaaccctgatcctgccgtgtaccagctgcgggatagcaagagcagcgacaagagcgtgtgtctgttcaccgacttcgacagccagaccaacgtgtcccagagcaaggactccgacgtgtacatcaccgataagtgcgtgctggacatgcggagcatggacttcaagagcaactccgccgtggcctggtccaacaagtccgatttcgcctgcgccaacgccttcaacaacagcattatccccgaggacacattcttcccaagccccgagagcagcgactccaccgaccacgtgaagcccaaagagacagagaacaccaagcagcccagcaagagctgccacaagcccaaggccatcgtgcacaccgagaaagtgaacatgatgagcctgaccgtgctgggcctgcggatgctgttcgccaaaaccgtggccgtgaacttcctgctgaccgccaagctgttcttcctccgcgccaagagaagcggatctggcgtgaagcagaccctgaatttcgacctgctgaagctggctggcgacgtggaatccaacccaggccctactagtatggactggatttggcgcatccttttccttgtcggcgctgctaccggcgcgcattccttcgaagaggtacagctggaggaaagcggtggaggactggtgcaacctggagggtctatgaagctctcttgcgtagcttctgggttcacgttctccaattactggatgaactgggtgcggcagtcccccgagaaaggcctggaatgggtagcagaaattcggttcaagtcccataactatgctacacactttgccgagtctgtcaaaggccggttcactattagtcgagacgacagcaagtcttcagtctacctgcagatgaataacttgcgggcagaggacacaggtatctactactgcaccaggagaatcggcaactccgactatgactggtggtactttgacgtctggggagcaggcaccagcgtgacggtgagttcagcctcaacgcgtgaggacctgaagaacgtgttcccacctgaggtggccgtgttcgagcctagcgaggccgagatcagccacacccagaaagccaccctcgtgtgcctggctaccggcttctaccccgaccatgtggaactgtcttggtgggtcaacggcaaagaggtgcacagcggcgtgtgtaccgacccccagccactgaaagaacagcccgccctgaacgacagccggtactgcctgagcagcagactgagagtgtccgccaccttctggcagaacccccggaaccacttcagatgccaggtgcagttctacggcctgagcgagaacgacgagtggacccaggacagagccaagcccgtgacccagatcgtgtctgccgaagcctggggcagagccgatgatgtgattaagatccactggcaggaaaagaagtccaacaccatcctgggcagccaggaaggcaacaccatgaagaccaacgacacctacatgaagttcagctggctgaccgtgcccgagaagtccctggacaaagaacacagatgcatcgtgcggcacgaaaacaacaagaacggcgtggaccaggaaatcatcttcccacccatcaagaccgatgtgattacaatggaccccaaggacaactgctccaaggacgccaacgataccctgctgctccagctgaccaacaccagcgcctactacatgtacttgttgctgctgctgaagtccgtggtgtacttcgccatcatcacatgctgcctgctgcggagaaccgccttctgctgcaacggcgagaagtct

SEQ ID NO: 7282 - DNA, 2178 bp, synthetic construct
  source 1..2178: mol_type = other DNA
atggccttaccagtgaccgccttgctcctgccgctggccttgctgctccacgccgccaggccggaccagatcgtgctgacccagtcccccgctattatgtccgcatcaccgggcgaaaaagtgacgatctcctgtagcgcttcatctagcgtctcctacatgtattggtatcaacagaaacctgggtctagcccaaagccgtggatctacagaaccagtaaccttgccagtggggtgccagcccgcttcagcggtagtggcagtggaacttcctatagcctcacaataagcaacatggaggctgaagatgccgctgcctattactgccagcagtaccacagttacccaaccacgttcggcgggggaactaagctcgaagtaaaactcgagatccagaaccctgatcctgccgtgtaccagctgcgggatagcaagagcagcgacaagagcgtgtgtctgttcaccgacttcgacagccagaccaacgtgtcccagagcaaggactccgacgtgtacatcaccgataagtgcgtgctggacatgcggagcatggacttcaagagcaactccgccgtggcctggtccaacaagtccgatttcgcctgcgccaacgccttcaacaacagcattatccccgaggacacattcttcccaagccccgagagcagcgactccaccgaccacgtgaagcccaaagagacagagaacaccaagcagcccagcaagagctgccacaagcccaaggccatcgtgcacaccgagaaagtgaacatgatgagcctgaccgtgctgggcctgcggatgctgttcgccaaaaccgtggccgtgaacttcctgctgaccgccaagctgttcttcctccgcgccaagagaagcggatctggcgtgaagcagaccctgaatttcgacctgctgaagctggctggcgacgtggaatccaacccaggccctactagtatggactggatttggcgcatccttttccttgtcggcgctgctaccggcgcgcattccttcgaagaggtgcagctggtggaatctgggggcggcctggtccaacctaagggatcactcaagctctcttgtgcggccagcggattctctttcaatacctatgctatgaattgggtgagacaggcgcccggaaagggcctcgaatggatagcccatatccggtcaaaatcaaacaatttcgcaacctactatgcggactccgtgaaggaccgattttccatctcccgagatgcctccgagaatattctgttcctgcagatgaataacctcaagacagaggacaccgccatgtactactgtgtgcgccagggcggtgactttcccatggattactgggggcaggggaccagcgtgaccgtgagctctacgcgtgaggacctgaagaacgtgttcccacctgaggtggccgtgttcgagcctagcgaggccgagatcagccacacccagaaagccaccctcgtgtgcctggctaccggcttctaccccgaccatgtggaactgtcttggtgggtcaacggcaaagaggtgcacagcggcgtgtgtaccgacccccagccactgaaagaacagcccgccctgaacgacagccggtactgcctgagcagcagactgagagtgtccgccaccttctggcagaacccccggaaccacttcagatgccaggtgcagttctacggcctgagcgagaacgacgagtggacccaggacagagccaagcccgtgacccagatcgtgtctgccgaagcctggggcagagccgatgatgtgattaagatccactggcaggaaaagaagtccaacaccatcctgggcagccaggaaggcaacaccatgaagaccaacgacacctacatgaagttcagctggctgaccgtgcccgagaagtccctggacaaagaacacagatgcatcgtgcggcacgaaaacaacaagaacggcgtggaccaggaaatcatcttcccacccatcaagaccgatgtgattacaatggaccccaaggacaactgctccaaggacgccaacgataccctgctgctccagctgaccaacaccagcgcctactacatgtacttgttgctgctgctgaagtccgtggtgtacttcgccatcatcacatgctgcctgctgcggagaaccgccttctgctgcaacggcgagaagtct

SEQ ID NO: 7283 - DNA, 2175 bp, synthetic construct
  source 1..2175: mol_type = other DNA
atggccttaccagtgaccgccttgctcctgccgctggccttgctgctccacgccgccaggccggacgacatccagatgacccagagcagcagcagcttcagcgtgagcctgggcgacagagtgaccatcacctgcatggccagcgaggacatctacatcagactggcctggtaccagcagaagcccggcaacgcccccagactgctgatcagcgccgccaccagcctggagaccggcgtgcccagcagattcagcggcagcggcagcggcaaggactacaccctgagcatcaccagcctgcagaccgaggacgtgggcacctactactgccagcagtactggagcagcccctggaccttcggcggcggcaccaagctggagatcaacctcgagatccagaaccctgatcctgccgtgtaccagctgcgggatagcaagagcagcgacaagagcgtgtgtctgttcaccgacttcgacagccagaccaacgtgtcccagagcaaggactccgacgtgtacatcaccgataagtgcgtgctggacatgcggagcatggacttcaagagcaactccgccgtggcctggtccaacaagtccgatttcgcctgcgccaacgccttcaacaacagcattatccccgaggacacattcttcccaagccccgagagcagcgactccaccgaccacgtgaagcccaaagagacagagaacaccaagcagcccagcaagagctgccacaagcccaaggccatcgtgcacaccgagaaagtgaacatgatgagcctgaccgtgctgggcctgcggatgctgttcgccaaaaccgtggccgtgaacttcctgctgaccgccaagctgttcttcctccgcgccaagagaagcggatctggcgtgaagcagaccctgaatttcgacctgctgaagctggctggcgacgtggaatccaacccaggccctactagtatggactggatttggcgcatccttttccttgtcggcgctgctaccggcgcgcattccttcgaagacgtgcagctgcaggagagcggccccggcctggtgaagcccagccagagcctgagcctgacctgcaccgtgaccggctacagcatcaccagcgactacacctggaactggatcagacagttccccggcaacaagctggagtggatgggctacatcacctacagcggcagcaccagctacaaccccagcctgaagagcagaaacagcatcaccagagacaccagcaagaaccagttcttcctgcagctgaacagcgtgaccaccgaggacaccgccacctactactgcgccagactgggcagaagatacacaatggactactggggccagggcaccagcgtgaccgtgagcagcacgcgtgaggacctgaagaacgtgttcccacctgaggtggccgtgttcgagcctagcgaggccgagatcagccacacccagaaagccaccctcgtgtgcctggctaccggcttctaccccgaccatgtggaactgtcttggtgggtcaacggcaaagaggtgcacagcggcgtgtgtaccgacccccagccactgaaagaacagcccgccctgaacgacagccggtactgcctgagcagcagactgagagtgtccgccaccttctggcagaacccccggaaccacttcagatgccaggtgcagttctacggcctgagcgagaacgacgagtggacccaggacagagccaagcccgtgacccagatcgtgtctgccgaagcctggggcagagccgatgatgtgattaagatccactggcaggaaaagaagtccaacaccatcctgggcagccaggaaggcaacaccatgaagaccaacgacacctacatgaagttcagctggctgaccgtgcccgagaagtccctggacaaagaacacagatgcatcgtgcggcacgaaaacaacaagaacggcgtggaccaggaaatcatcttcccacccatcaagaccgatgtgattacaatggaccccaaggacaactgctccaaggacgccaacgataccctgctgctccagctgaccaacaccagcgcctactacatgtacttgttgctgctgctgaagtccgtggtgtacttcgccatcatcacatgctgcctgctgcggagaaccgccttctgctgcaacggcgagaagtct

SEQ ID NO: 7284 - DNA, 2184 bp, synthetic construct
  source 1..2184: mol_type = other DNA
atggccttaccagtgaccgccttgctcctgccgctggccttgctgctccacgccgccaggccggacgacatccagatgacccagagccccagcagcctgtctgccagcgtgggcgacagagtgaccatcacctgtagagccagccagagcatcagcagctacctgaactggtatcagcagaagcccggcaaggcccccaaactgctgatctacgacgccagcaacctggaaaccggcgtgcccagcagattttccggcagcggctctggcaccgacttcaccttcaccatcagctccctccagcccgaggacattgccacctactactgccagcagtacgacaacctgcccctgacctttggcggaggcaccaaggtggacatcaagagactcgagatccagaaccctgatcctgccgtgtaccagctgcgggatagcaagagcagcgacaagagcgtgtgtctgttcaccgacttcgacagccagaccaacgtgtcccagagcaaggactccgacgtgtacatcaccgataagtgcgtgctggacatgcggagcatggacttcaagagcaactccgccgtggcctggtccaacaagtccgatttcgcctgcgccaacgccttcaacaacagcattatccccgaggacacattcttcccaagccccgagagcagcgactccaccgaccacgtgaagcccaaagagacagagaacaccaagcagcccagcaagagctgccacaagcccaaggccatcgtgcacaccgagaaagtgaacatgatgagcctgaccgtgctgggcctgcggatgctgttcgccaaaaccgtggccgtgaacttcctgctgaccgccaagctgttcttcctccgcgccaagagaagcggatctggcgtgaagcagaccctgaatttcgacctgctgaagctggctggcgacgtggaatccaacccaggccctactagtatggactggatttggcgcatccttttccttgtcggcgctgctaccggcgcgcattccttcgaacaggtgcaactggtggaatctggcggcggagtggtgcagcctggcagaagcctgagactgagctgtgccgccagcggcttcacctttagcagctacgccatgcactgggtgcgccaggcccctggaaaaggcctggaatgggtggccgtgatctcctacgacggctccaacaagtattacgccgacagcgtgaagggccggttcaccatctccagagacaacagcaagaacaccctgtacctccagatgaacagcctgcgggccgaggacaccgccgtgtactattgtgccagggctcacaacagcagctcttggagcttcgactactggggccagggcaccctcgtgaccgtgtcatctacgcgtgaggacctgaagaacgtgttcccacctgaggtggccgtgttcgagcctagcgaggccgagatcagccacacccagaaagccaccctcgtgtgcctggctaccggcttctaccccgaccatgtggaactgtcttggtgggtcaacggcaaagaggtgcacagcggcgtgtgtaccgacccccagccactgaaagaacagcccgccctgaacgacagccggtactgcctgagcagcagactgagagtgtccgccaccttctggcagaacccccggaaccacttcagatgccaggtgcagttctacggcctgagcgagaacgacgagtggacccaggacagagccaagcccgtgacccagatcgtgtctgccgaagcctggggcagagccgatgatgtgattaagatccactggcaggaaaagaagtccaacaccatcctgggcagccaggaaggcaacaccatgaagaccaacgacacctacatgaagttcagctggctgaccgtgcccgagaagtccctggacaaagaacacagatgcatcgtgcggcacgaaaacaacaagaacggcgtggaccaggaaatcatcttcccacccatcaagaccgatgtgattacaatggaccccaaggacaactgctccaaggacgccaacgataccctgctgctccagctgaccaacaccagcgcctactacatgtacttgttgctgctgctgaagtccgtggtgtacttcgccatcatcacatgctgcctgctgcggagaaccgccttctgctgcaacggcgagaagtct

SEQ ID NO: 7285 - DNA, 2211 bp, synthetic construct
  source 1..2211: mol_type = other DNA
atggccttaccagtgaccgccttgctcctgccgctggccttgctgctccacgccgccaggccggacgacgtcgtgatgacccagagccctctgagcctgcctgtgtccctgggcgatcaggccagcatctcctgcagatccagccagagactggtgcacagcaacggcaacacctacctgcactggtatctgcagaagcccggccagagccccaagctgctgatctaccgggtgtccaacagattccccggcgtgcccgatagattcagcggctctggcagcggcaccgacttcaccctgaagatcagccgggtggaagccgaggacctgggcatctatttctgcagccagagcacccacgtgccctacacctttggcggaggcaccaagctggaaatcaagcggctcgagatccagaaccctgatcctgccgtgtaccagctgcgggatagcaagagcagcgacaagagcgtgtgtctgttcaccgacttcgacagccagaccaacgtgtcccagagcaaggactccgacgtgtacatcaccgataagtgcgtgctggacatgcggagcatggacttcaagagcaactccgccgtggcctggtccaacaagtccgatttcgcctgcgccaacgccttcaacaacagcattatccccgaggacacattcttcccaagccccgagagcagcgactccaccgaccacgtgaagcccaaagagacagagaacaccaagcagcccagcaagagctgccacaagcccaaggccatcgtgcacaccgagaaagtgaacatgatgagcctgaccgtgctgggcctgcggatgctgttcgccaaaaccgtggccgtgaacttcctgctgaccgccaagctgttcttcctccgcgccaagagaagcggatctggcgtgaagcagaccctgaatttcgacctgctgaagctggctggcgacgtggaatccaacccaggccctactagtatggactggatttggcgcatccttttccttgtcggcgctgctaccggcgcgcattccttcgaagaagtgcggctgcagcagtctggccccgacctgattaagcctggggccagcgtgaagatgagctgcaaggccagcggctacaccttcaccggctacgtgatgcactgggtcaagcagaggccaggccagggcctggaatggatcggcttcatcaacccctacaacgacgacatccagagcaacgagcggttccggggcaaggccaccctgaccagcgataagagcagcaccaccgcctacatggaactgagcagcctgacctccgaggacagcgccgtgtactactgtgctaggggagccggctacaacttcgacggggcctacagattcttcgacttttggggccagggcaccacactgaccgtgtcctctacgcgtgaggacctgaagaacgtgttcccacctgaggtggccgtgttcgagcctagcgaggccgagatcagccacacccagaaagccaccctcgtgtgcctggctaccggcttctaccccgaccatgtggaactgtcttggtgggtcaacggcaaagaggtgcacagcggcgtgtgtaccgacccccagccactgaaagaacagcccgccctgaacgacagccggtactgcctgagcagcagactgagagtgtccgccaccttctggcagaacccccggaaccacttcagatgccaggtgcagttctacggcctgagcgagaacgacgagtggacccaggacagagccaagcccgtgacccagatcgtgtctgccgaagcctggggcagagccgatgatgtgattaagatccactggcaggaaaagaagtccaacaccatcctgggcagccaggaaggcaacaccatgaagaccaacgacacctacatgaagttcagctggctgaccgtgcccgagaagtccctggacaaagaacacagatgcatcgtgcggcacgaaaacaacaagaacggcgtggaccaggaaatcatcttcccacccatcaagaccgatgtgattacaatggaccccaaggacaactgctccaaggacgccaacgataccctgctgctccagctgaccaacaccagcgcctactacatgtacttgttgctgctgctgaagtccgtggtgtacttcgccatcatcacatgctgcctgctgcggagaaccgccttctgctgcaacggcgagaagtct

SEQ ID NO: 7286 - DNA, 2184 bp, synthetic construct
  source 1..2184: mol_type = other DNA
atggccttaccagtgaccgccttgctcctgccgctggccttgctgctccacgccgccaggccggacagctacgagctgacccagcctcctagcgtgtccgtgtctcctggacagaccgccaccatctcttgcagcggcgatcaactgggcgggaagtacggccactggtatcagaagaagcccggccagagccccgtgctggtgctgtaccaggacagaaaacggcctgccggcatccccgagagattcagcggaagcagcagcggcaacaccatcaccctgaccatcagcggcacccaggccgtggatgaggccgactactactgccaggcttgggacaccaatctgggcggcgtgttcggcggaggcaccaaagtgacagtgctgggacagctcgagatccagaaccctgatcctgccgtgtaccagctgcgggatagcaagagcagcgacaagagcgtgtgtctgttcaccgacttcgacagccagaccaacgtgtcccagagcaaggactccgacgtgtacatcaccgataagtgcgtgctggacatgcggagcatggacttcaagagcaactccgccgtggcctggtccaacaagtccgatttcgcctgcgccaacgccttcaacaacagcattatccccgaggacacattcttcccaagccccgagagcagcgactccaccgaccacgtgaagcccaaagagacagagaacaccaagcagcccagcaagagctgccacaagcccaaggccatcgtgcacaccgagaaagtgaacatgatgagcctgaccgtgctgggcctgcggatgctgttcgccaaaaccgtggccgtgaacttcctgctgaccgccaagctgttcttcctccgcgccaagagaagcggatctggcgtgaagcagaccctgaatttcgacctgctgaagctggctggcgacgtggaatccaacccaggccctactagtatggactggatttggcgcatccttttccttgtcggcgctgctaccggcgcgcattccttcgaacaggtgcaactggtggaaagcggagccgaagtgaagaaacctggggccagcgtgaaggtgtcctgcaaggccagcggctacacctttaccggctactacatgcactgggtgcgccaggctccaggccagggactggaatggatgggccggatcaaccccaatagcggcggcaccaactacgcccagaaattccagggcagagtgaccatgaccagagacaccagcatcagcaccgcctacatggaactgagccggctgagaagcgacgacaccgccgtgtactactgcgccagccctagaggcagaggcagcgccttcgatatttggggccagggcacactcgtgaccgtgtcctctacgcgtgaggacctgaagaacgtgttcccacctgaggtggccgtgttcgagcctagcgaggccgagatcagccacacccagaaagccaccctcgtgtgcctggctaccggcttctaccccgaccatgtggaactgtcttggtgggtcaacggcaaagaggtgcacagcggcgtgtgtaccgacccccagccactgaaagaacagcccgccctgaacgacagccggtactgcctgagcagcagactgagagtgtccgccaccttctggcagaacccccggaaccacttcagatgccaggtgcagttctacggcctgagcgagaacgacgagtggacccaggacagagccaagcccgtgacccagatcgtgtctgccgaagcctggggcagagccgatgatgtgattaagatccactggcaggaaaagaagtccaacaccatcctgggcagccaggaaggcaacaccatgaagaccaacgacacctacatgaagttcagctggctgaccgtgcccgagaagtccctggacaaagaacacagatgcatcgtgcggcacgaaaacaacaagaacggcgtggaccaggaaatcatcttcccacccatcaagaccgatgtgattacaatggaccccaaggacaactgctccaaggacgccaacgataccctgctgctccagctgaccaacaccagcgcctactacatgtacttgttgctgctgctgaagtccgtggtgtacttcgccatcatcacatgctgcctgctgcggagaaccgccttctgctgcaacggcgagaagtct

SEQ ID NO: 7287 - DNA, 2193 bp, synthetic construct
  source 1..2193: mol_type = other DNA
atggccttaccagtgaccgccttgctcctgccgctggccttgctgctccacgccgccaggccggacaacttcatgctgacccagccccacagcgtgtccgagagccctggcaagaccgtgaccatctcctgcaccagaagcagcggctctatcgccagcaaatacgtgcagtggtatcagcagaggcccggcagcagccctaccaccgtgatctacgaggacaaccagaggcctagcggcgtgcccgatagattcagcggcagcatcgacaccagcagcaacagcgccagcctgaccatcagcggcctgagaacagaggacgaggccgactactactgccacagctacgacagcaacaaccactccgtgttcggcggaggcaccaaagtgacagtgctgggacagctcgagatccagaaccctgatcctgccgtgtaccagctgcgggatagcaagagcagcgacaagagcgtgtgtctgttcaccgacttcgacagccagaccaacgtgtcccagagcaaggactccgacgtgtacatcaccgataagtgcgtgctggacatgcggagcatggacttcaagagcaactccgccgtggcctggtccaacaagtccgatttcgcctgcgccaacgccttcaacaacagcattatccccgaggacacattcttcccaagccccgagagcagcgactccaccgaccacgtgaagcccaaagagacagagaacaccaagcagcccagcaagagctgccacaagcccaaggccatcgtgcacaccgagaaagtgaacatgatgagcctgaccgtgctgggcctgcggatgctgttcgccaaaaccgtggccgtgaacttcctgctgaccgccaagctgttcttcctccgcgccaagagaagcggatctggcgtgaagcagaccctgaatttcgacctgctgaagctggctggcgacgtggaatccaacccaggccctactagtatggactggatttggcgcatccttttccttgtcggcgctgctaccggcgcgcattccttcgaagaagtgcaactggtggaaagcgggggaggcgtggtgcagccaggcggatctctgagactgagctgtgccgccagcggcttcaccttcagcagctacgccatgagctgggtgcgccaggcccctggaaaaggcctggaatgggtgtccgccatctctggctctggcggcagcacctactacgccgatagcgtgaagggccggttcagcatcagccgggacaacagcaagaacaccctgtacctccagatgaacagcctgcgggccgaggacaccgccgtgtactactgtgccagaaccagaagctccggggccttcgacatctggggccagggaacactcgtgaccgtgtcctctacgcgtgaggacctgaagaacgtgttcccacctgaggtggccgtgttcgagcctagcgaggccgagatcagccacacccagaaagccaccctcgtgtgcctggctaccggcttctaccccgaccatgtggaactgtcttggtgggtcaacggcaaagaggtgcacagcggcgtgtgtaccgacccccagccactgaaagaacagcccgccctgaacgacagccggtactgcctgagcagcagactgagagtgtccgccaccttctggcagaacccccggaaccacttcagatgccaggtgcagttctacggcctgagcgagaacgacgagtggacccaggacagagccaagcccgtgacccagatcgtgtctgccgaagcctggggcagagccgatgatgtgattaagatccactggcaggaaaagaagtccaacaccatcctgggcagccaggaaggcaacaccatgaagaccaacgacacctacatgaagttcagctggctgaccgtgcccgagaagtccctggacaaagaacacagatgcatcgtgcggcacgaaaacaacaagaacggcgtggaccaggaaatcatcttcccacccatcaagaccgatgtgattacaatggaccccaaggacaactgctccaaggacgccaacgataccctgctgctccagctgaccaacaccagcgcctactacatgtacttgttgctgctgctgaagtccgtggtgtacttcgccatcatcacatgctgcctgctgcggagaaccgccttctgctgcaacggcgagaagtct

SEQ ID NO: 7288 - DNA, 2178 bp, synthetic construct
  source 1..2178: mol_type = other DNA
atggccttaccagtgaccgccttgctcctgccgctggccttgctgctccacgccgccaggccggacatccagatgaaccagagccccagcagcctgagcgccagcctgggcgataccatcaccatcacctgtcacgccagccagaacatcaacgtgtggctgagctggtatcagcagaagcccggcaacatccccaagctgctgatctacaaggccagcaacctgcacaccggcgtgcccagcagattttctggcagcggctctggcaccggcttcaccattaccatcagctccctccagcccgaggacattgccacctactactgccagcagggccagagctacccctggacatttggcggaggcaccaagctggaaatcaagagactcgagatccagaaccctgatcctgccgtgtaccagctgcgggatagcaagagcagcgacaagagcgtgtgtctgttcaccgacttcgacagccagaccaacgtgtcccagagcaaggactccgacgtgtacatcaccgataagtgcgtgctggacatgcggagcatggacttcaagagcaactccgccgtggcctggtccaacaagtccgatttcgcctgcgccaacgccttcaacaacagcattatccccgaggacacattcttcccaagccccgagagcagcgactccaccgaccacgtgaagcccaaagagacagagaacaccaagcagcccagcaagagctgccacaagcccaaggccatcgtgcacaccgagaaagtgaacatgatgagcctgaccgtgctgggcctgcggatgctgttcgccaaaaccgtggccgtgaacttcctgctgaccgccaagctgttcttcctccgcgccaagagaagcggatctggcgtgaagcagaccctgaatttcgacctgctgaagctggctggcgacgtggaatccaacccaggccctactagtatggactggatttggcgcatccttttccttgtcggcgctgctaccggcgcgcattccttcgaagaagtgcaactccagcagagcggcccagagcttgtgaagcctggcgcttccgtgaagattagctgcaaagccagcggctacagcttcaccggctacttcatgaactgggtcaagcagagccacggcaagagcctggagtacatcggcagattcaacccctacaacggcgagacactgtacaaccagaagttcaagggcaaggccaccctgaccgtggacaagagcagcagcaccgtgcacatggaactgctgagcgtgaccagcgaggacagcgccgtgtactactgtggcagaagcggcaacgacgacgctatggactattggggccagggcaccagcgtgaccgtgtctagtgctacgcgtgaggacctgaagaacgtgttcccacctgaggtggccgtgttcgagcctagcgaggccgagatcagccacacccagaaagccaccctcgtgtgcctggctaccggcttctaccccgaccatgtggaactgtcttggtgggtcaacggcaaagaggtgcacagcggcgtgtgtaccgacccccagccactgaaagaacagcccgccctgaacgacagccggtactgcctgagcagcagactgagagtgtccgccaccttctggcagaacccccggaaccacttcagatgccaggtgcagttctacggcctgagcgagaacgacgagtggacccaggacagagccaagcccgtgacccagatcgtgtctgccgaagcctggggcagagccgatgatgtgattaagatccactggcaggaaaagaagtccaacaccatcctgggcagccaggaaggcaacaccatgaagaccaacgacacctacatgaagttcagctggctgaccgtgcccgagaagtccctggacaaagaacacagatgcatcgtgcggcacgaaaacaacaagaacggcgtggaccaggaaatcatcttcccacccatcaagaccgatgtgattacaatggaccccaaggacaactgctccaaggacgccaacgataccctgctgctccagctgaccaacaccagcgcctactacatgtacttgttgctgctgctgaagtccgtggtgtacttcgccatcatcacatgctgcctgctgcggagaaccgccttctgctgcaacggcgagaagtct

SEQ ID NO: 7289 - DNA, 2181 bp, synthetic construct
  source 1..2181: mol_type = other DNA
atggccttaccagtgaccgccttgctcctgccgctggccttgctgctccacgccgccaggccggagatcgtgctgacacagagccctgccaccctgtctctgagccctggcgaaagagccaccctgagctgtagagccagccagagcgtgcggagctacctggcctggtatcagcagaagcctggacaggcccccagactgctgatctacgacgccagcaatcgggccacaggcatccccgccagattttctggctctggcagcggcaccgacttcaccctgacaatcagcagcctggaacccgaggacttcgccgtgtactactgccagcagcggagcaactggccccctacctttggacagggcaccaaggtggaaatcaagctcgagatccagaaccctgatcctgccgtgtaccagctgcgggatagcaagagcagcgacaagagcgtgtgtctgttcaccgacttcgacagccagaccaacgtgtcccagagcaaggactccgacgtgtacatcaccgataagtgcgtgctggacatgcggagcatggacttcaagagcaactccgccgtggcctggtccaacaagtccgatttcgcctgcgccaacgccttcaacaacagcattatccccgaggacacattcttcccaagccccgagagcagcgactccaccgaccacgtgaagcccaaagagacagagaacaccaagcagcccagcaagagctgccacaagcccaaggccatcgtgcacaccgagaaagtgaacatgatgagcctgaccgtgctgggcctgcggatgctgttcgccaaaaccgtggccgtgaacttcctgctgaccgccaagctgttcttcctccgcgccaagagaagcggatctggcgtgaagcagaccctgaatttcgacctgctgaagctggctggcgacgtggaatccaacccaggccctactagtatggactggatttggcgcatccttttccttgtcggcgctgctaccggcgcgcattccttcgaacaactccaggtgcaggaatctggccccggactcgtgaagcccagcgagacactgagcctgacctgtaccgtgtccggcggcagcatcagcaacagctacttctcctggggctggatcagacagccccctggcaagggcctggaatggatcggcagcttctactacggcgagaaaacctactacaaccccagcctgaagtccagagccaccatcagcatcgacaccagcaagagccagttctccctgaagctgagcagcgtgacagccgccgacaccgccgtgtattattgccccagaggccccaccatgatccggggcgtgatcgactcttggggccagggaacactcgtgaccgtgtcctctacgcgtgaggacctgaagaacgtgttcccacctgaggtggccgtgttcgagcctagcgaggccgagatcagccacacccagaaagccaccctcgtgtgcctggctaccggcttctaccccgaccatgtggaactgtcttggtgggtcaacggcaaagaggtgcacagcggcgtgtgtaccgacccccagccactgaaagaacagcccgccctgaacgacagccggtactgcctgagcagcagactgagagtgtccgccaccttctggcagaacccccggaaccacttcagatgccaggtgcagttctacggcctgagcgagaacgacgagtggacccaggacagagccaagcccgtgacccagatcgtgtctgccgaagcctggggcagagccgatgatgtgattaagatccactggcaggaaaagaagtccaacaccatcctgggcagccaggaaggcaacaccatgaagaccaacgacacctacatgaagttcagctggctgaccgtgcccgagaagtccctggacaaagaacacagatgcatcgtgcggcacgaaaacaacaagaacggcgtggaccaggaaatcatcttcccacccatcaagaccgatgtgattacaatggaccccaaggacaactgctccaaggacgccaacgataccctgctgctccagctgaccaacaccagcgcctactacatgtacttgttgctgctgctgaagtccgtggtgtacttcgccatcatcacatgctgcctgctgcggagaaccgccttctgctgcaacggcgagaagtct

SEQ ID NO: 7290 - DNA, 2208 bp, synthetic construct
  source 1..2208: mol_type = other DNA
atggccttaccagtgaccgccttgctcctgccgctggccttgctgctccacgccgccaggccggacatcgtgatgacccagacccccctgagcctgcctgtgacacctggcgagcctgccagcatctcctgcagaagcagcagaagcctgctggacagcgacgacggcaacacctacctggactggtatctgcagaaacccggccagagcccccaactgctgatctacaccctgagctacagagccagcggcgtgcccgatagattttccggctctggcagcggcaccgacttcaccctgaagatcagccgggtggaagccgaggacgtgggcgtgtactactgtatgcagcgggtggaatttcccatcaccttcggccagggcaccagactggaaatcaagagactcgagatccagaaccctgatcctgccgtgtaccagctgcgggatagcaagagcagcgacaagagcgtgtgtctgttcaccgacttcgacagccagaccaacgtgtcccagagcaaggactccgacgtgtacatcaccgataagtgcgtgctggacatgcggagcatggacttcaagagcaactccgccgtggcctggtccaacaagtccgatttcgcctgcgccaacgccttcaacaacagcattatccccgaggacacattcttcccaagccccgagagcagcgactccaccgaccacgtgaagcccaaagagacagagaacaccaagcagcccagcaagagctgccacaagcccaaggccatcgtgcacaccgagaaagtgaacatgatgagcctgaccgtgctgggcctgcggatgctgttcgccaaaaccgtggccgtgaacttcctgctgaccgccaagctgttcttcctccgcgccaagagaagcggatctggcgtgaagcagaccctgaatttcgacctgctgaagctggctggcgacgtggaatccaacccaggccctactagtatggactggatttggcgcatccttttccttgtcggcgctgctaccggcgcgcattccttcgaacaggtgcaactggtggaatctggcgggggagtggtgcagcctggcagatccctgagactgagctgtgccgccagcggcttcatcttcagcagatacggaatgcactgggtgcgccaggcccctggcaagggactgaaatgggtggccgtgatttggtacgacggcagcaacaagctgtacgccgacagcgtgaagggccggttcaccatcagcagagacaacagcaagaacaccctgtacctgcagatgaacagcctgcgggccgaggacaccgccgtgtactattgcgccagagactactacgacaacagccggcaccactggggcttcgactattggggccagggaacccttgtgaccgtgtcctctacgcgtgaggacctgaagaacgtgttcccacctgaggtggccgtgttcgagcctagcgaggccgagatcagccacacccagaaagccaccctcgtgtgcctggctaccggcttctaccccgaccatgtggaactgtcttggtgggtcaacggcaaagaggtgcacagcggcgtgtgtaccgacccccagccactgaaagaacagcccgccctgaacgacagccggtactgcctgagcagcagactgagagtgtccgccaccttctggcagaacccccggaaccacttcagatgccaggtgcagttctacggcctgagcgagaacgacgagtggacccaggacagagccaagcccgtgacccagatcgtgtctgccgaagcctggggcagagccgatgatgtgattaagatccactggcaggaaaagaagtccaacaccatcctgggcagccaggaaggcaacaccatgaagaccaacgacacctacatgaagttcagctggctgaccgtgcccgagaagtccctggacaaagaacacagatgcatcgtgcggcacgaaaacaacaagaacggcgtggaccaggaaatcatcttcccacccatcaagaccgatgtgattacaatggaccccaaggacaactgctccaaggacgccaacgataccctgctgctccagctgaccaacaccagcgcctactacatgtacttgttgctgctgctgaagtccgtggtgtacttcgccatcatcacatgctgcctgctgcggagaaccgccttctgctgcaacggcgagaagtct

SEQ ID NO: 7291 - DNA, 2178 bp, synthetic construct
  source 1..2178: mol_type = other DNA
atggccttaccagtgaccgccttgctcctgccgctggccttgctgctccacgccgccaggccggagatccagatgacccagagccccagcagcatgtctgccagcctgggcgacaccatcaccatcacatgccaggccacccaggacatcttcaagaacctgaactggtatcagcagaagcccggcaagccccccagcctgctgatctactatgccaccgaactggccgagggcgtgcccagcagattttctggcagcggcagcggctccgactacagcctgaccatcagcaacctggaaagcgaggacttcgccgcctactactgcctccagttcttcgagttcccattcaccttcggctccggcaccaagctggaaatgaagctcgagatccagaaccctgatcctgccgtgtaccagctgcgggatagcaagagcagcgacaagagcgtgtgtctgttcaccgacttcgacagccagaccaacgtgtcccagagcaaggactccgacgtgtacatcaccgataagtgcgtgctggacatgcggagcatggacttcaagagcaactccgccgtggcctggtccaacaagtccgatttcgcctgcgccaacgccttcaacaacagcattatccccgaggacacattcttcccaagccccgagagcagcgactccaccgaccacgtgaagcccaaagagacagagaacaccaagcagcccagcaagagctgccacaagcccaaggccatcgtgcacaccgagaaagtgaacatgatgagcctgaccgtgctgggcctgcggatgctgttcgccaaaaccgtggccgtgaacttcctgctgaccgccaagctgttcttcctccgcgccaagagaagcggatctggcgtgaagcagaccctgaatttcgacctgctgaagctggctggcgacgtggaatccaacccaggccctactagtatggactggatttggcgcatccttttccttgtcggcgctgctaccggcgcgcattccttcgaacaggtgcaactccagcagtctggcgctgagcttgtgcggcctggcacctctgtgaaggtgtcctgtaaagccagcggctacgtgttcaccaactactggatcgagtggatcaagcagcggccaggccagggcctggaatggatcggcgtgatgaatccaggcagcggcgagacaacctacaacgagaagttcaagggcaaggccaccctgaccgccgacaagagcagcagcacagcctacatgcaactgtcctccctgaccagcgtggacagcgccgtgtacttctgcgccagggaccacgaccgggactactacgctatggactactggggccagggcaccagcgtgaccgtgtcatctacgcgtgaggacctgaagaacgtgttcccacctgaggtggccgtgttcgagcctagcgaggccgagatcagccacacccagaaagccaccctcgtgtgcctggctaccggcttctaccccgaccatgtggaactgtcttggtgggtcaacggcaaagaggtgcacagcggcgtgtgtaccgacccccagccactgaaagaacagcccgccctgaacgacagccggtactgcctgagcagcagactgagagtgtccgccaccttctggcagaacccccggaaccacttcagatgccaggtgcagttctacggcctgagcgagaacgacgagtggacccaggacagagccaagcccgtgacccagatcgtgtctgccgaagcctggggcagagccgatgatgtgattaagatccactggcaggaaaagaagtccaacaccatcctgggcagccaggaaggcaacaccatgaagaccaacgacacctacatgaagttcagctggctgaccgtgcccgagaagtccctggacaaagaacacagatgcatcgtgcggcacgaaaacaacaagaacggcgtggaccaggaaatcatcttcccacccatcaagaccgatgtgattacaatggaccccaaggacaactgctccaaggacgccaacgataccctgctgctccagctgaccaacaccagcgcctactacatgtacttgttgctgctgctgaagtccgtggtgtacttcgccatcatcacatgctgcctgctgcggagaaccgccttctgctgcaacggcgagaagtct

SEQ ID NO: 7292 - DNA, 2169 bp, synthetic construct
  source 1..2169: mol_type = other DNA
atggccttaccagtgaccgccttgctcctgccgctggccttgctgctccacgccgccaggccggacatcctgctgacacagagccccgccatcctgtccgtgtctccaggcgagagagtgtcctttagctgccgggccagccagaacatcggcaccagcatccactggtatcagcagcggaccaacggcagccccagactgctgattaagtacgccagcgagtccgtgtccggcatccccagcagattttctggcagcggctccggcaccgacttcaccctgagcatcaacagcgtggaaagcgaggacattgccgactactactgccagcacaccaatagctggcccaccacctttggcggaggcaccaagctggaaatcaagagactcgagatccagaaccctgatcctgccgtgtaccagctgcgggatagcaagagcagcgacaagagcgtgtgtctgttcaccgacttcgacagccagaccaacgtgtcccagagcaaggactccgacgtgtacatcaccgataagtgcgtgctggacatgcggagcatggacttcaagagcaactccgccgtggcctggtccaacaagtccgatttcgcctgcgccaacgccttcaacaacagcattatccccgaggacacattcttcccaagccccgagagcagcgactccaccgaccacgtgaagcccaaagagacagagaacaccaagcagcccagcaagagctgccacaagcccaaggccatcgtgcacaccgagaaagtgaacatgatgagcctgaccgtgctgggcctgcggatgctgttcgccaaaaccgtggccgtgaacttcctgctgaccgccaagctgttcttcctccgcgccaagagaagcggatctggcgtgaagcagaccctgaatttcgacctgctgaagctggctggcgacgtggaatccaacccaggccctactagtatggactggatttggcgcatccttttccttgtcggcgctgctaccggcgcgcattccttcgaacaggtgcaactccagcagtccgacgccgagcttgtgaagcctggcgcttccgtgaagattagctgcaaggccagcggctacaccttcaccgaccacgccattcactgggtcaagcagaagcccgagcagggcctggaatggatcggctacttcagccccggcaacggcgacatcaagtacaacgagaagttcaagggcaaggccaccctgaccgccgacaagagcagcagcacagcctacatgcaactgaacagcctgaccagcgaggactccgccgtgtacttctgcaagcggagctacggcaactacgactactggggccagggcaccacactgaccgtgtctagtacgcgtgaggacctgaagaacgtgttcccacctgaggtggccgtgttcgagcctagcgaggccgagatcagccacacccagaaagccaccctcgtgtgcctggctaccggcttctaccccgaccatgtggaactgtcttggtgggtcaacggcaaagaggtgcacagcggcgtgtgtaccgacccccagccactgaaagaacagcccgccctgaacgacagccggtactgcctgagcagcagactgagagtgtccgccaccttctggcagaacccccggaaccacttcagatgccaggtgcagttctacggcctgagcgagaacgacgagtggacccaggacagagccaagcccgtgacccagatcgtgtctgccgaagcctggggcagagccgatgatgtgattaagatccactggcaggaaaagaagtccaacaccatcctgggcagccaggaaggcaacaccatgaagaccaacgacacctacatgaagttcagctggctgaccgtgcccgagaagtccctggacaaagaacacagatgcatcgtgcggcacgaaaacaacaagaacggcgtggaccaggaaatcatcttcccacccatcaagaccgatgtgattacaatggaccccaaggacaactgctccaaggacgccaacgataccctgctgctccagctgaccaacaccagcgcctactacatgtacttgttgctgctgctgaagtccgtggtgtacttcgccatcatcacatgctgcctgctgcggagaaccgccttctgctgcaacggcgagaagtct

SEQ ID NO: 7293 - DNA, 2184 bp, synthetic construct
  source 1..2184: mol_type = other DNA
atggccttaccagtgaccgccttgctcctgccgctggccttgctgctccacgccgccaggccggacatcgtgatgacccagagccccgatagcctggccgtgtctctgggagagagagccaccatcaactgcaagagcagccagagcctgctgaacagcggcgaccagaagaactacctgacctggtatcagcagaagcccggccagccccccaagctgctgatctactgggccagcaccagagaaagcggcgtgcccgatagattcagcggcagcggaagtggcaccgacttcaccctgaccatcagttctcttcaggccgaggacgtggccgtgtactactgccagaacgactacagctaccccctgaccttcggccagggcaccaaggtggaaatcaagctcgagatccagaaccctgatcctgccgtgtaccagctgcgggatagcaagagcagcgacaagagcgtgtgtctgttcaccgacttcgacagccagaccaacgtgtcccagagcaaggactccgacgtgtacatcaccgataagtgcgtgctggacatgcggagcatggacttcaagagcaactccgccgtggcctggtccaacaagtccgatttcgcctgcgccaacgccttcaacaacagcattatccccgaggacacattcttcccaagccccgagagcagcgactccaccgaccacgtgaagcccaaagagacagagaacaccaagcagcccagcaagagctgccacaagcccaaggccatcgtgcacaccgagaaagtgaacatgatgagcctgaccgtgctgggcctgcggatgctgttcgccaaaaccgtggccgtgaacttcctgctgaccgccaagctgttcttcctccgcgccaagagaagcggatctggcgtgaagcagaccctgaatttcgacctgctgaagctggctggcgacgtggaatccaacccaggccctactagtatggactggatttggcgcatccttttccttgtcggcgctgctaccggcgcgcattccttcgaacaggtgcagctggtgcagtctggggccgaagtgaagaaaaccggcagcagcgtgaaggtgtcctgcaaggccagcggctacacctttaccgaccacgccattcacgtgtggcggcaggctccaggacaggccctggaatggatgggccacttcagccccggcaacaccgacatcaagtacaacgacaagttcaagggcagagtgaccctgaccgtggaccgcagcatgagcaccgcctacatggaactgagcagcctgcggagcgaggacaccgccatgtactattgcaagaccagcaccttctttttcgactactggggccagggaacaatggtcaccgtgtccagcacgcgtgaggacctgaagaacgtgttcccacctgaggtggccgtgttcgagcctagcgaggccgagatcagccacacccagaaagccaccctcgtgtgcctggctaccggcttctaccccgaccatgtggaactgtcttggtgggtcaacggcaaagaggtgcacagcggcgtgtgtaccgacccccagccactgaaagaacagcccgccctgaacgacagccggtactgcctgagcagcagactgagagtgtccgccaccttctggcagaacccccggaaccacttcagatgccaggtgcagttctacggcctgagcgagaacgacgagtggacccaggacagagccaagcccgtgacccagatcgtgtctgccgaagcctggggcagagccgatgatgtgattaagatccactggcaggaaaagaagtccaacaccatcctgggcagccaggaaggcaacaccatgaagaccaacgacacctacatgaagttcagctggctgaccgtgcccgagaagtccctggacaaagaacacagatgcatcgtgcggcacgaaaacaacaagaacggcgtggaccaggaaatcatcttcccacccatcaagaccgatgtgattacaatggaccccaaggacaactgctccaaggacgccaacgataccctgctgctccagctgaccaacaccagcgcctactacatgtacttgttgctgctgctgaagtccgtggtgtacttcgccatcatcacatgctgcctgctgcggagaaccgccttctgctgcaacggcgagaagtct

SEQ ID NO: 7294 - DNA, 2181 bp, synthetic construct
  source 1..2181: mol_type = other DNA
atggccttaccagtgaccgccttgctcctgccgctggccttgctgctccacgccgccaggccggacatccagatgacccagagccccagcagcctgtctgccagcgtgggcgacagagtgaccatcacatgcaaggccagccaggacgtgtccattgccgtggcctggtatcagcagaagcccggcaaggcccccaaggtgctgatctacagcgccagctacagatacaccggcgtgcccgacagattcagcggctctggcagcggcaccgacttcaccttcaccatcagctccctccagcccgaggatattgccgtgtactactgccagcagcactacatcacccccctgacctttggcggaggcaccaaggtggaaatcaagctcgagatccagaaccctgatcctgccgtgtaccagctgcgggatagcaagagcagcgacaagagcgtgtgtctgttcaccgacttcgacagccagaccaacgtgtcccagagcaaggactccgacgtgtacatcaccgataagtgcgtgctggacatgcggagcatggacttcaagagcaactccgccgtggcctggtccaacaagtccgatttcgcctgcgccaacgccttcaacaacagcattatccccgaggacacattcttcccaagccccgagagcagcgactccaccgaccacgtgaagcccaaagagacagagaacaccaagcagcccagcaagagctgccacaagcccaaggccatcgtgcacaccgagaaagtgaacatgatgagcctgaccgtgctgggcctgcggatgctgttcgccaaaaccgtggccgtgaacttcctgctgaccgccaagctgttcttcctccgcgccaagagaagcggatctggcgtgaagcagaccctgaatttcgacctgctgaagctggctggcgacgtggaatccaacccaggccctactagtatggactggatttggcgcatccttttccttgtcggcgctgctaccggcgcgcattccttcgaacagatccaactggtgcagagcggccacgaagtgaagaaacctggggccagcgtgaaggtgtcctgcaaagccagcggctacacctttaccaactacggcatgaactgggtgcgccaggcccctggacagggcctggaatggatgggctggatcaacaccaagaccggcgagcccacctacgccgaagagttcaagggcagattcgtgttcagcctggaaaccagcgcctccaccgcctacctccagatcagctctctgaaggccgaggacaccgccatgtacttttgcggcagaggcggctacggcagcagctactggtacttcgatgtgtggggccagggcaccaccgtgaccgtgtcatctacgcgtgaggacctgaagaacgtgttcccacctgaggtggccgtgttcgagcctagcgaggccgagatcagccacacccagaaagccaccctcgtgtgcctggctaccggcttctaccccgaccatgtggaactgtcttggtgggtcaacggcaaagaggtgcacagcggcgtgtgtaccgacccccagccactgaaagaacagcccgccctgaacgacagccggtactgcctgagcagcagactgagagtgtccgccaccttctggcagaacccccggaaccacttcagatgccaggtgcagttctacggcctgagcgagaacgacgagtggacccaggacagagccaagcccgtgacccagatcgtgtctgccgaagcctggggcagagccgatgatgtgattaagatccactggcaggaaaagaagtccaacaccatcctgggcagccaggaaggcaacaccatgaagaccaacgacacctacatgaagttcagctggctgaccgtgcccgagaagtccctggacaaagaacacagatgcatcgtgcggcacgaaaacaacaagaacggcgtggaccaggaaatcatcttcccacccatcaagaccgatgtgattacaatggaccccaaggacaactgctccaaggacgccaacgataccctgctgctccagctgaccaacaccagcgcctactacatgtacttgttgctgctgctgaagtccgtggtgtacttcgccatcatcacatgctgcctgctgcggagaaccgccttctgctgcaacggcgagaagtct

SEQ ID NO: 7295 - DNA, 2187 bp, synthetic construct
  source 1..2187: mol_type = other DNA
atggccttaccagtgaccgccttgctcctgccgctggccttgctgctccacgccgccaggccggacatcgtgatgacccagagccccgatagcctggccgtgtctctgggagagagagccaccatcaactgccgggccagcaagagcgtgtccaccagcggctacagctacatgcactggtatcagcagaagcccggccagccccccaagctgctgatctacctggcctccaacctggaaagcggcgtgcccgatagattcagcggcagcggctctggcaccgacttcaccctgaccatcagttctcttcaggccgaggacgtggccgtgtactactgccagcacagcagagagctgccctacaccttcggccagggcaccaagctggaaatcaagctcgagatccagaaccctgatcctgccgtgtaccagctgcgggatagcaagagcagcgacaagagcgtgtgtctgttcaccgacttcgacagccagaccaacgtgtcccagagcaaggactccgacgtgtacatcaccgataagtgcgtgctggacatgcggagcatggacttcaagagcaactccgccgtggcctggtccaacaagtccgatttcgcctgcgccaacgccttcaacaacagcattatccccgaggacacattcttcccaagccccgagagcagcgactccaccgaccacgtgaagcccaaagagacagagaacaccaagcagcccagcaagagctgccacaagcccaaggccatcgtgcacaccgagaaagtgaacatgatgagcctgaccgtgctgggcctgcggatgctgttcgccaaaaccgtggccgtgaacttcctgctgaccgccaagctgttcttcctccgcgccaagagaagcggatctggcgtgaagcagaccctgaatttcgacctgctgaagctggctggcgacgtggaatccaacccaggccctactagtatggactggatttggcgcatccttttccttgtcggcgctgctaccggcgcgcattccttcgaacaggtgcaactccaggaatctggccctggccttgtgaagcccagcgagacactgagcctgacctgtaccgtgtccggcggcagcatcagctcttacggcgtgcactggattcggcagcctccaggcaagggcctggaatggatcggcgtgatctggacctccggcgtgaccgactacaacagcgccctgatgggcagagtgaccatctccgtggacaccagcaagaaccagttcagcctgaagctgagcagcgtgacagccgccgataccgccgtgtattattgcgccagagatggcgactacgaccgctacacaatggactactggggccagggaacccttgtgaccgtgtcctctacgcgtgaggacctgaagaacgtgttcccacctgaggtggccgtgttcgagcctagcgaggccgagatcagccacacccagaaagccaccctcgtgtgcctggctaccggcttctaccccgaccatgtggaactgtcttggtgggtcaacggcaaagaggtgcacagcggcgtgtgtaccgacccccagccactgaaagaacagcccgccctgaacgacagccggtactgcctgagcagcagactgagagtgtccgccaccttctggcagaacccccggaaccacttcagatgccaggtgcagttctacggcctgagcgagaacgacgagtggacccaggacagagccaagcccgtgacccagatcgtgtctgccgaagcctggggcagagccgatgatgtgattaagatccactggcaggaaaagaagtccaacaccatcctgggcagccaggaaggcaacaccatgaagaccaacgacacctacatgaagttcagctggctgaccgtgcccgagaagtccctggacaaagaacacagatgcatcgtgcggcacgaaaacaacaagaacggcgtggaccaggaaatcatcttcccacccatcaagaccgatgtgattacaatggaccccaaggacaactgctccaaggacgccaacgataccctgctgctccagctgaccaacaccagcgcctactacatgtacttgttgctgctgctgaagtccgtggtgtacttcgccatcatcacatgctgcctgctgcggagaaccgccttctgctgcaacggcgagaagtct

SEQ ID NO: 7296 - DNA, 2187 bp, synthetic construct
  source 1..2187: mol_type = other DNA
atggccttaccagtgaccgccttgctcctgccgctggccttgctgctccacgccgccaggccggacatccagatgacccagagccccagcagcctgtctgccagcgtgggcgacagagtgaccatcacctgtagagccagccagagcatcggcaccagcctgcactggtatcagcagaagcctggcaaggcccccaagctgctgattaagttcgccagcagactgcagagcggcgtgcccagcagattttctggcagcggctccggcaccgacttcaccctgacaatcagctccctgcagcccgaggacttcgccacctactactgccagcagagccccggcttccctccaacctttggacagggcaccaagctggaaatcaagcggctcgagatccagaaccctgatcctgccgtgtaccagctgcgggatagcaagagcagcgacaagagcgtgtgtctgttcaccgacttcgacagccagaccaacgtgtcccagagcaaggactccgacgtgtacatcaccgataagtgcgtgctggacatgcggagcatggacttcaagagcaactccgccgtggcctggtccaacaagtccgatttcgcctgcgccaacgccttcaacaacagcattatccccgaggacacattcttcccaagccccgagagcagcgactccaccgaccacgtgaagcccaaagagacagagaacaccaagcagcccagcaagagctgccacaagcccaaggccatcgtgcacaccgagaaagtgaacatgatgagcctgaccgtgctgggcctgcggatgctgttcgccaaaaccgtggccgtgaacttcctgctgaccgccaagctgttcttcctccgcgccaagagaagcggatctggcgtgaagcagaccctgaatttcgacctgctgaagctggctggcgacgtggaatccaacccaggccctactagtatggactggatttggcgcatccttttccttgtcggcgctgctaccggcgcgcattccttcgaacaggtgcaactggtggaatctggcggcggacttgtgaagccaggcggcagcctgagactgagctgtgccgccagcggcttcagcatcaccaccagcggctactactggacctggatcagacagttccccggcaagggcctggaatggatgggctacatcggctacaacagcaagacctactacaaccccgccctgaagtcccggatcaccatcagcagagacaacgccaagaacagcctgtacctgcagatgaactccctgagagccgaggataccgccgtgtactactgcgccagatccctgtacggcggctacaaggacgccttcgatagctggggccagggaacccttgtgaccgtgtctagcacgcgtgaggacctgaagaacgtgttcccacctgaggtggccgtgttcgagcctagcgaggccgagatcagccacacccagaaagccaccctcgtgtgcctggctaccggcttctaccccgaccatgtggaactgtcttggtgggtcaacggcaaagaggtgcacagcggcgtgtgtaccgacccccagccactgaaagaacagcccgccctgaacgacagccggtactgcctgagcagcagactgagagtgtccgccaccttctggcagaacccccggaaccacttcagatgccaggtgcagttctacggcctgagcgagaacgacgagtggacccaggacagagccaagcccgtgacccagatcgtgtctgccgaagcctggggcagagccgatgatgtgattaagatccactggcaggaaaagaagtccaacaccatcctgggcagccaggaaggcaacaccatgaagaccaacgacacctacatgaagttcagctggctgaccgtgcccgagaagtccctggacaaagaacacagatgcatcgtgcggcacgaaaacaacaagaacggcgtggaccaggaaatcatcttcccacccatcaagaccgatgtgattacaatggaccccaaggacaactgctccaaggacgccaacgataccctgctgctccagctgaccaacaccagcgcctactacatgtacttgttgctgctgctgaagtccgtggtgtacttcgccatcatcacatgctgcctgctgcggagaaccgccttctgctgcaacggcgagaagtct

SEQ ID NO: 7297 - DNA, 2202 bp, synthetic construct
  source 1..2202: mol_type = other DNA
atggccttaccagtgaccgccttgctcctgccgctggccttgctgctccacgccgccaggccggacgagatcgtgctgacccagagccctctgagcctgcctgtgacacctggcgagcctgccagcatctcctgtagaagcagccagagcctgctgcacagcatcggctacaactacctggactggtatctccagaagcccggccagagcccccaactgctgatctacctgggcagcaacagagccagcggcgtgcccgatagattttccggcagcggctccggcaccgacttcaccctgaagatcagccgggtggaagccgaggacgtgggcgtgtactactgtatgcaggccctccagacccccctgacctttggcggaggcaccaaggtggaaatcaagcggctcgagatccagaaccctgatcctgccgtgtaccagctgcgggatagcaagagcagcgacaagagcgtgtgtctgttcaccgacttcgacagccagaccaacgtgtcccagagcaaggactccgacgtgtacatcaccgataagtgcgtgctggacatgcggagcatggacttcaagagcaactccgccgtggcctggtccaacaagtccgatttcgcctgcgccaacgccttcaacaacagcattatccccgaggacacattcttcccaagccccgagagcagcgactccaccgaccacgtgaagcccaaagagacagagaacaccaagcagcccagcaagagctgccacaagcccaaggccatcgtgcacaccgagaaagtgaacatgatgagcctgaccgtgctgggcctgcggatgctgttcgccaaaaccgtggccgtgaacttcctgctgaccgccaagctgttcttcctccgcgccaagagaagcggatctggcgtgaagcagaccctgaatttcgacctgctgaagctggctggcgacgtggaatccaacccaggccctactagtatggactggatttggcgcatccttttccttgtcggcgctgctaccggcgcgcattccttcgaagaagtgcaactggtggaaagcggaggcggcgtggtgcagcctggaagaagcctgagactgagctgtgccgccagcggcttcaccttccggtcctacggaatgcactgggtgcgccaggcccctggcaaaggactggaatgggtggccgtgatctcctacgacggctccaacaagtactacaccgacagcgtgaacggcagattcaccatcagcagagacaacagcaagaacaccctgtacctccagatgaacagcctgcgggccgaggacaccgccgtgtactattgtgctagaggcggaggctactacgagacaagcggccctgattactggggccagggcacactcgtgaccgtgtctagtacgcgtgaggacctgaagaacgtgttcccacctgaggtggccgtgttcgagcctagcgaggccgagatcagccacacccagaaagccaccctcgtgtgcctggctaccggcttctaccccgaccatgtggaactgtcttggtgggtcaacggcaaagaggtgcacagcggcgtgtgtaccgacccccagccactgaaagaacagcccgccctgaacgacagccggtactgcctgagcagcagactgagagtgtccgccaccttctggcagaacccccggaaccacttcagatgccaggtgcagttctacggcctgagcgagaacgacgagtggacccaggacagagccaagcccgtgacccagatcgtgtctgccgaagcctggggcagagccgatgatgtgattaagatccactggcaggaaaagaagtccaacaccatcctgggcagccaggaaggcaacaccatgaagaccaacgacacctacatgaagttcagctggctgaccgtgcccgagaagtccctggacaaagaacacagatgcatcgtgcggcacgaaaacaacaagaacggcgtggaccaggaaatcatcttcccacccatcaagaccgatgtgattacaatggaccccaaggacaactgctccaaggacgccaacgataccctgctgctccagctgaccaacaccagcgcctactacatgtacttgttgctgctgctgaagtccgtggtgtacttcgccatcatcacatgctgcctgctgcggagaaccgccttctgctgcaacggcgagaagtct

SEQ ID NO: 7298 - DNA, 2196 bp, synthetic construct
  source 1..2196: mol_type = other DNA
atggccttaccagtgaccgccttgctcctgccgctggccttgctgctccacgccgccaggccggacgacgtcgtgatgacccagagccctctgagcctgcctgtgacacctggcgagcctgccagcatctcctgtagaagcagccagagcctgctgcacagcatcggctacaactacctgcactggtttctccagaagcccggccagagcccccaactgctgatctacctgggcagcaacagagccagcggcgtgcccgatagattttccggcagcggctccggcaccgacttcaccctgaagatcagccgggtggaagccgaggacgtgggcgtgtactactgtatgcaggccctccagacccctcccacctttggacagggcaccagactggaaatcaagcggctcgagatccagaaccctgatcctgccgtgtaccagctgcgggatagcaagagcagcgacaagagcgtgtgtctgttcaccgacttcgacagccagaccaacgtgtcccagagcaaggactccgacgtgtacatcaccgataagtgcgtgctggacatgcggagcatggacttcaagagcaactccgccgtggcctggtccaacaagtccgatttcgcctgcgccaacgccttcaacaacagcattatccccgaggacacattcttcccaagccccgagagcagcgactccaccgaccacgtgaagcccaaagagacagagaacaccaagcagcccagcaagagctgccacaagcccaaggccatcgtgcacaccgagaaagtgaacatgatgagcctgaccgtgctgggcctgcggatgctgttcgccaaaaccgtggccgtgaacttcctgctgaccgccaagctgttcttcctccgcgccaagagaagcggatctggcgtgaagcagaccctgaatttcgacctgctgaagctggctggcgacgtggaatccaacccaggccctactagtatggactggatttggcgcatccttttccttgtcggcgctgctaccggcgcgcattccttcgaacaactccaactccaggaaagcggccctggcctcgtgaagcctagcggcacactgagcctgacatgtgccgtgtctggcggcagcatcagcagcagcaactggtggtcttgggtgcgccagcctcctggcaagggcctggaatggatcggcgaaatctaccacagcggcagcaccaactacaaccccagcctgaagtccagagtgaccatcagcgtggacaagagcaagaaccagttctccctgaagctgagcagcgtgacagccgccgataccgccgtgtactattgcgtgggcagcccctacggcgactacgtgctggattattggggccagggcaccctcgtgaccgtgtctagtacgcgtgaggacctgaagaacgtgttcccacctgaggtggccgtgttcgagcctagcgaggccgagatcagccacacccagaaagccaccctcgtgtgcctggctaccggcttctaccccgaccatgtggaactgtcttggtgggtcaacggcaaagaggtgcacagcggcgtgtgtaccgacccccagccactgaaagaacagcccgccctgaacgacagccggtactgcctgagcagcagactgagagtgtccgccaccttctggcagaacccccggaaccacttcagatgccaggtgcagttctacggcctgagcgagaacgacgagtggacccaggacagagccaagcccgtgacccagatcgtgtctgccgaagcctggggcagagccgatgatgtgattaagatccactggcaggaaaagaagtccaacaccatcctgggcagccaggaaggcaacaccatgaagaccaacgacacctacatgaagttcagctggctgaccgtgcccgagaagtccctggacaaagaacacagatgcatcgtgcggcacgaaaacaacaagaacggcgtggaccaggaaatcatcttcccacccatcaagaccgatgtgattacaatggaccccaaggacaactgctccaaggacgccaacgataccctgctgctccagctgaccaacaccagcgcctactacatgtacttgttgctgctgctgaagtccgtggtgtacttcgccatcatcacatgctgcctgctgcggagaaccgccttctgctgcaacggcgagaagtct

SEQ ID NO: 7299 - DNA, 2190 bp, synthetic construct
  source 1..2190: mol_type = other DNA
atggccttaccagtgaccgccttgctcctgccgctggccttgctgctccacgccgccaggccggacgagatcgtgctgacacagagccctggcaccctgagcctgtctctgggagagagagccacactgagctgtcgggccagccagtctatcagcagcagcttcctggcctggtatcagcagaagcccggccaggcccctaagctgctgatctacgccgccagcacaagagccaccggcatccccgatagattcagcggctctggcagcggcaccgacttcaccctgaccatcagcagactggaacccgaggacttcgccgtgtactactgccagcagtacggcagaagcctgagcttcggcggaggcaccaaggtggaagtgaagctcgagatccagaaccctgatcctgccgtgtaccagctgcgggatagcaagagcagcgacaagagcgtgtgtctgttcaccgacttcgacagccagaccaacgtgtcccagagcaaggactccgacgtgtacatcaccgataagtgcgtgctggacatgcggagcatggacttcaagagcaactccgccgtggcctggtccaacaagtccgatttcgcctgcgccaacgccttcaacaacagcattatccccgaggacacattcttcccaagccccgagagcagcgactccaccgaccacgtgaagcccaaagagacagagaacaccaagcagcccagcaagagctgccacaagcccaaggccatcgtgcacaccgagaaagtgaacatgatgagcctgaccgtgctgggcctgcggatgctgttcgccaaaaccgtggccgtgaacttcctgctgaccgccaagctgttcttcctccgcgccaagagaagcggatctggcgtgaagcagaccctgaatttcgacctgctgaagctggctggcgacgtggaatccaacccaggccctactagtatggactggatttggcgcatccttttccttgtcggcgctgctaccggcgcgcattccttcgaacaggtgcaactccagcagtctggccccggactcgtgaagcctagccagacactgagcctgacctgcgccatcagcggcgatagcgtgtccggcaatagcgccacctggaactggatcagacagagcccatctcggggcctggaatggctgggccggacctactaccgcagcaagtggaaccacgactacgccgagagcgtgaagtcccggatcaccatcaaccccgacaccagcaagaaccagttctccttgcaactgaacagcgtgacccccgaggacacagccgtgtattattgcgccagaggcgacagcagctcttggtacgccttcgactattggggccagggcaccctcgtgaccgtgtctagtacgcgtgaggacctgaagaacgtgttcccacctgaggtggccgtgttcgagcctagcgaggccgagatcagccacacccagaaagccaccctcgtgtgcctggctaccggcttctaccccgaccatgtggaactgtcttggtgggtcaacggcaaagaggtgcacagcggcgtgtgtaccgacccccagccactgaaagaacagcccgccctgaacgacagccggtactgcctgagcagcagactgagagtgtccgccaccttctggcagaacccccggaaccacttcagatgccaggtgcagttctacggcctgagcgagaacgacgagtggacccaggacagagccaagcccgtgacccagatcgtgtctgccgaagcctggggcagagccgatgatgtgattaagatccactggcaggaaaagaagtccaacaccatcctgggcagccaggaaggcaacaccatgaagaccaacgacacctacatgaagttcagctggctgaccgtgcccgagaagtccctggacaaagaacacagatgcatcgtgcggcacgaaaacaacaagaacggcgtggaccaggaaatcatcttcccacccatcaagaccgatgtgattacaatggaccccaaggacaactgctccaaggacgccaacgataccctgctgctccagctgaccaacaccagcgcctactacatgtacttgttgctgctgctgaagtccgtggtgtacttcgccatcatcacatgctgcctgctgcggagaaccgccttctgctgcaacggcgagaagtct

SEQ ID NO: 7300 - DNA, 2187 bp, synthetic construct
  source 1..2187: mol_type = other DNA
atggccttaccagtgaccgccttgctcctgccgctggccttgctgctccacgccgccaggccggaccagagcgtcgtgacacagcctcctagcgtgtcagtggcccctggcaagaccgccagaatcacctgtggccggaacaacatcggcagcaagagcgtgcactggtatcagcagaagcccggccaggctcctgtgctggtggtgtacgacgacagcgacagacccagcggcatccccgagagattcagcggcagcaactccggcaataccgccaccctgaccatcagcagagtggaagccggcgacgaggccgactactactgccaagtgtgggacagcagcagcgatcacgtggtgtttggcggaggcaccaagctgacagtgctgggtctcgagatccagaaccctgatcctgccgtgtaccagctgcgggatagcaagagcagcgacaagagcgtgtgtctgttcaccgacttcgacagccagaccaacgtgtcccagagcaaggactccgacgtgtacatcaccgataagtgcgtgctggacatgcggagcatggacttcaagagcaactccgccgtggcctggtccaacaagtccgatttcgcctgcgccaacgccttcaacaacagcattatccccgaggacacattcttcccaagccccgagagcagcgactccaccgaccacgtgaagcccaaagagacagagaacaccaagcagcccagcaagagctgccacaagcccaaggccatcgtgcacaccgagaaagtgaacatgatgagcctgaccgtgctgggcctgcggatgctgttcgccaaaaccgtggccgtgaacttcctgctgaccgccaagctgttcttcctccgcgccaagagaagcggatctggcgtgaagcagaccctgaatttcgacctgctgaagctggctggcgacgtggaatccaacccaggccctactagtatggactggatttggcgcatccttttccttgtcggcgctgctaccggcgcgcattccttcgaagtgcaactggtgcagtctggcggaggggtcatgcggcctggcggatctctgagactgtcttgtgccgccagcggcttcaccttcgacgactacggcatgagctgggtgcgccaggcccctggaaaaggcctggaatgggtgtccggcatcaactggaatggcggcagcaccggctacgccgattctgtgcggggcagattcaccatcagccgggacaacgccaagaacagcctgtacctgcagatgaactccctgcgggccgaggacaccgccctgtactattgcgccagagagcggggctacggctaccacgaccctcacgattattggggccagggcacccttgttaccgtgtcctctacgcgtgaggacctgaagaacgtgttcccacctgaggtggccgtgttcgagcctagcgaggccgagatcagccacacccagaaagccaccctcgtgtgcctggctaccggcttctaccccgaccatgtggaactgtcttggtgggtcaacggcaaagaggtgcacagcggcgtgtgtaccgacccccagccactgaaagaacagcccgccctgaacgacagccggtactgcctgagcagcagactgagagtgtccgccaccttctggcagaacccccggaaccacttcagatgccaggtgcagttctacggcctgagcgagaacgacgagtggacccaggacagagccaagcccgtgacccagatcgtgtctgccgaagcctggggcagagccgatgatgtgattaagatccactggcaggaaaagaagtccaacaccatcctgggcagccaggaaggcaacaccatgaagaccaacgacacctacatgaagttcagctggctgaccgtgcccgagaagtccctggacaaagaacacagatgcatcgtgcggcacgaaaacaacaagaacggcgtggaccaggaaatcatcttcccacccatcaagaccgatgtgattacaatggaccccaaggacaactgctccaaggacgccaacgataccctgctgctccagctgaccaacaccagcgcctactacatgtacttgttgctgctgctgaagtccgtggtgtacttcgccatcatcacatgctgcctgctgcggagaaccgccttctgctgcaacggcgagaagtct

SEQ ID NO: 7301 - DNA, 2226 bp, synthetic construct
  source 1..2226: mol_type = other DNA
atggccttaccagtgaccgccttgctcctgccgctggccttgctgctccacgccgccaggccggaacagaaactcatcagtgaagaagacctggaattccaggctgtcgtgacacagcctcctagcgcctctggcacaccaggccagagagtgaccatctcctgtagcggcagcagcagcaacatcggcagcaacaccgtgaactggtatcagcaggtgcccggcaccgctcccaagctgctgatctacagcaacaaccagcggcccagcggcgtgcccgatagattttctggcagcaagagcggcaccagcgccagcctggctatctctggactccagtccgaggacgaggccgactactattgcgccgcctgggacgatagcctgaacggctgggtgttcggcggaggcaccaagctgacagtgctgctcgagatccagaaccctgatcctgccgtgtaccagctgcgggatagcaagagcagcgacaagagcgtgtgtctgttcaccgacttcgacagccagaccaacgtgtcccagagcaaggactccgacgtgtacatcaccgataagtgcgtgctggacatgcggagcatggacttcaagagcaactccgccgtggcctggtccaacaagtccgatttcgcctgcgccaacgccttcaacaacagcattatccccgaggacacattcttcccaagccccgagagcagcgactccaccgaccacgtgaagcccaaagagacagagaacaccaagcagcccagcaagagctgccacaagcccaaggccatcgtgcacaccgagaaagtgaacatgatgagcctgaccgtgctgggcctgcggatgctgttcgccaaaaccgtggccgtgaacttcctgctgaccgccaagctgttcttcctccgcgccaagagaagcggatctggcgtgaagcagaccctgaatttcgacctgctgaagctggctggcgacgtggaatccaacccaggccctactagtatggactggatttggcgcatccttttccttgtcggcgctgctaccggcgcgcattccttcgaacagatgcaactggtgcagagcggagccgaagtgaaagagcctggcgagagcctgcggatctcctgcaagggcagcggctacagcttcaccaatttctggatctcttgggtgcgccagatgcccggcaagggcctggaatggatgggcagagtggaccccggctactcctacagcacctacagccctagcttccagggccacgtgaccatcagcgccgacaagagcaccagcaccgcctacctccagtggaacagcctgaaggccagcgacaccgccatgtactactgcgccagagtgcagtacagcggctattacgattggttcgacccctggggccagggcacactcgtgacagtgtcaagcacgcgtgaggacctgaagaacgtgttcccacctgaggtggccgtgttcgagcctagcgaggccgagatcagccacacccagaaagccaccctcgtgtgcctggctaccggcttctaccccgaccatgtggaactgtcttggtgggtcaacggcaaagaggtgcacagcggcgtgtgtaccgacccccagccactgaaagaacagcccgccctgaacgacagccggtactgcctgagcagcagactgagagtgtccgccaccttctggcagaacccccggaaccacttcagatgccaggtgcagttctacggcctgagcgagaacgacgagtggacccaggacagagccaagcccgtgacccagatcgtgtctgccgaagcctggggcagagccgatgatgtgattaagatccactggcaggaaaagaagtccaacaccatcctgggcagccaggaaggcaacaccatgaagaccaacgacacctacatgaagttcagctggctgaccgtgcccgagaagtccctggacaaagaacacagatgcatcgtgcggcacgaaaacaacaagaacggcgtggaccaggaaatcatcttcccacccatcaagaccgatgtgattacaatggaccccaaggacaactgctccaaggacgccaacgataccctgctgctccagctgaccaacaccagcgcctactacatgtacttgttgctgctgctgaagtccgtggtgtacttcgccatcatcacatgctgcctgctgcggagaaccgccttctgctgcaacggcgagaagtct

SEQ ID NO: 7302 - DNA, 2208 bp, synthetic construct
  source 1..2208: mol_type = other DNA
atggccttaccagtgaccgccttgctcctgccgctggccttgctgctccacgccgccaggccggaacagaaactcatcagtgaagaagacctggaattcgacatccagatgacccagagccccagcacactgagcgccagcgtgggcgacagagtgaccatcacctgtcgggccagccagaacatcaacaagtggctggcctggtatcagcagaggcccggaaaagccccccagctgctgatctacaaggccagcagcctggaaagcggcgtgcccagcagattttctggcagcggctctggcaccgagtacaccctgaccatcagctccctccagcccgacgacttcgccacctactactgccagcagtacaacagctacgccaccttcggccagggcaccaaggtggaaatcaagagactcgagatccagaaccctgatcctgccgtgtaccagctgcgggatagcaagagcagcgacaagagcgtgtgtctgttcaccgacttcgacagccagaccaacgtgtcccagagcaaggactccgacgtgtacatcaccgataagtgcgtgctggacatgcggagcatggacttcaagagcaactccgccgtggcctggtccaacaagtccgatttcgcctgcgccaacgccttcaacaacagcattatccccgaggacacattcttcccaagccccgagagcagcgactccaccgaccacgtgaagcccaaagagacagagaacaccaagcagcccagcaagagctgccacaagcccaaggccatcgtgcacaccgagaaagtgaacatgatgagcctgaccgtgctgggcctgcggatgctgttcgccaaaaccgtggccgtgaacttcctgctgaccgccaagctgttcttcctccgcgccaagagaagcggatctggcgtgaagcagaccctgaatttcgacctgctgaagctggctggcgacgtggaatccaacccaggccctactagtatggactggatttggcgcatccttttccttgtcggcgctgctaccggcgcgcattccttcgaacaggtgcagctggtgcagtctggggccgaagtgaagaagcctggcgagagcctgaagatcagctgcaagggctccggctacaacttctctaacaagtggatcggctgggtgcgccagctgcctggcagaggactggaatggatcgccatcatctaccccggctacagcgacatcacctacagccccagcttccagggccgcgtgacaatcagcgccgacaccagcatcaacaccgcctacctgcactggcacagcctgaaggccagcgacaccgccatgtactactgcgtgcggcatacagccctggctggcttcgattattggggcctgggcaccctcgtgaccgtgtctagtacgcgtgaggacctgaagaacgtgttcccacctgaggtggccgtgttcgagcctagcgaggccgagatcagccacacccagaaagccaccctcgtgtgcctggctaccggcttctaccccgaccatgtggaactgtcttggtgggtcaacggcaaagaggtgcacagcggcgtgtgtaccgacccccagccactgaaagaacagcccgccctgaacgacagccggtactgcctgagcagcagactgagagtgtccgccaccttctggcagaacccccggaaccacttcagatgccaggtgcagttctacggcctgagcgagaacgacgagtggacccaggacagagccaagcccgtgacccagatcgtgtctgccgaagcctggggcagagccgatgatgtgattaagatccactggcaggaaaagaagtccaacaccatcctgggcagccaggaaggcaacaccatgaagaccaacgacacctacatgaagttcagctggctgaccgtgcccgagaagtccctggacaaagaacacagatgcatcgtgcggcacgaaaacaacaagaacggcgtggaccaggaaatcatcttcccacccatcaagaccgatgtgattacaatggaccccaaggacaactgctccaaggacgccaacgataccctgctgctccagctgaccaacaccagcgcctactacatgtacttgttgctgctgctgaagtccgtggtgtacttcgccatcatcacatgctgcctgctgcggagaaccgccttctgctgcaacggcgagaagtct

SEQ ID NO: 7303 - DNA, 2184 bp, synthetic construct
  source 1..2184: mol_type = other DNA
atggccttaccagtgaccgccttgctcctgccgctggccttgctgctccacgccgccaggccggacatcgtgctgacacagagccctgcttctctggccgtgtctctgggacagagagccaccatcagctgtagagccagcgagagcgtggacaactacggcaacaccttcatgcactggtatcagcagaagcccggccagcctcctaagctgctgatctacagagccagcaacctggaaagcggcatccccgccagattttctggcagcggcagcagaaccgacttcaccctgaccatcaatcccgtggaagccgacgacgtggcaacctactactgccagcagagcaacgaggaccctcctacatttggagccggcaccaagctggaactgaaactcgagatccagaaccctgatcctgccgtgtaccagctgcgggatagcaagagcagcgacaagagcgtgtgtctgttcaccgacttcgacagccagaccaacgtgtcccagagcaaggactccgacgtgtacatcaccgataagtgcgtgctggacatgcggagcatggacttcaagagcaactccgccgtggcctggtccaacaagtccgatttcgcctgcgccaacgccttcaacaacagcattatccccgaggacacattcttcccaagccccgagagcagcgactccaccgaccacgtgaagcccaaagagacagagaacaccaagcagcccagcaagagctgccacaagcccaaggccatcgtgcacaccgagaaagtgaacatgatgagcctgaccgtgctgggcctgcggatgctgttcgccaaaaccgtggccgtgaacttcctgctgaccgccaagctgttcttcctccgcgccaagagaagcggatctggcgtgaagcagaccctgaatttcgacctgctgaagctggctggcgacgtggaatccaacccaggccctactagtatggactggatttggcgcatccttttccttgtcggcgctgctaccggcgcgcattccttcgaacagattcagctggtgcagtctggccccgagctgaagaaacctggcgagacagtgaagatcagctgcaaggccagcggctacatcttcaccaattacggcatgaactgggtcaagcaggcccctggcaagagcttcaagtggatgggctggatcaacacctacaccggcgagagcacatacagcgccgacttcaagggcagattcgccttcagcctggaaaccagcgccagcacagcctacctgcacatcaacgacctgaagaacgaggacaccgccacctacttttgcgccagaagcggcggctacgaccctatggattattggggccagggcaccagcgtgaccgtttcttctacgcgtgaggacctgaagaacgtgttcccacctgaggtggccgtgttcgagcctagcgaggccgagatcagccacacccagaaagccaccctcgtgtgcctggctaccggcttctaccccgaccatgtggaactgtcttggtgggtcaacggcaaagaggtgcacagcggcgtgtgtaccgacccccagccactgaaagaacagcccgccctgaacgacagccggtactgcctgagcagcagactgagagtgtccgccaccttctggcagaacccccggaaccacttcagatgccaggtgcagttctacggcctgagcgagaacgacgagtggacccaggacagagccaagcccgtgacccagatcgtgtctgccgaagcctggggcagagccgatgatgtgattaagatccactggcaggaaaagaagtccaacaccatcctgggcagccaggaaggcaacaccatgaagaccaacgacacctacatgaagttcagctggctgaccgtgcccgagaagtccctggacaaagaacacagatgcatcgtgcggcacgaaaacaacaagaacggcgtggaccaggaaatcatcttcccacccatcaagaccgatgtgattacaatggaccccaaggacaactgctccaaggacgccaacgataccctgctgctccagctgaccaacaccagcgcctactacatgtacttgttgctgctgctgaagtccgtggtgtacttcgccatcatcacatgctgcctgctgcggagaaccgccttctgctgcaacggcgagaagtct

SEQ ID NO: 7304 - DNA, 2181 bp, synthetic construct
  source 1..2181: mol_type = other DNA
atggccttaccagtgaccgccttgctcctgccgctggccttgctgctccacgccgccaggccggacgagatcgtgctgacacagagccctggcaccctgagcctgtctccaggcgaaagagccacactgagctgtcgggccagccagagcgtgtccaatacctacctggcctggtatcaccagaggcccggacaggctccccggctgctgatctatggcgcttctagcagagccaccggcatccccgatagattcagcggctctggcagcggcaccgacttcgccctgacaatcagctccctggaacccgaggacttcgccgtgtactactgccagcagtacagcaactcctggaccttcggccagggcaccaaggtggaaatcaagagactcgagatccagaaccctgatcctgccgtgtaccagctgcgggatagcaagagcagcgacaagagcgtgtgtctgttcaccgacttcgacagccagaccaacgtgtcccagagcaaggactccgacgtgtacatcaccgataagtgcgtgctggacatgcggagcatggacttcaagagcaactccgccgtggcctggtccaacaagtccgatttcgcctgcgccaacgccttcaacaacagcattatccccgaggacacattcttcccaagccccgagagcagcgactccaccgaccacgtgaagcccaaagagacagagaacaccaagcagcccagcaagagctgccacaagcccaaggccatcgtgcacaccgagaaagtgaacatgatgagcctgaccgtgctgggcctgcggatgctgttcgccaaaaccgtggccgtgaacttcctgctgaccgccaagctgttcttcctccgcgccaagagaagcggatctggcgtgaagcagaccctgaatttcgacctgctgaagctggctggcgacgtggaatccaacccaggccctactagtatggactggatttggcgcatccttttccttgtcggcgctgctaccggcgcgcattccttcgaacaggtgcaactggtggaatctggcgggggagtggtgcagcctggcagaagcctgagactgtcttgtgccgccagcggcttcaccttcagcagctacgacatgcactgggtgcgccaggcccctggcaaaggactggaatgggtggccgtgatctcctacgacggcaccaacgagtattacgccgacagcgtgaagggccggttcaccatctccagagacaccagcaagaacaccctgtacctccagatgaacagcctgcgggccgaggacacagccgtgtattattgcgccagagagcggtacttcgactggtccttcgactactggggccagggaaccctggtgtccgtgtctagtacgcgtgaggacctgaagaacgtgttcccacctgaggtggccgtgttcgagcctagcgaggccgagatcagccacacccagaaagccaccctcgtgtgcctggctaccggcttctaccccgaccatgtggaactgtcttggtgggtcaacggcaaagaggtgcacagcggcgtgtgtaccgacccccagccactgaaagaacagcccgccctgaacgacagccggtactgcctgagcagcagactgagagtgtccgccaccttctggcagaacccccggaaccacttcagatgccaggtgcagttctacggcctgagcgagaacgacgagtggacccaggacagagccaagcccgtgacccagatcgtgtctgccgaagcctggggcagagccgatgatgtgattaagatccactggcaggaaaagaagtccaacaccatcctgggcagccaggaaggcaacaccatgaagaccaacgacacctacatgaagttcagctggctgaccgtgcccgagaagtccctggacaaagaacacagatgcatcgtgcggcacgaaaacaacaagaacggcgtggaccaggaaatcatcttcccacccatcaagaccgatgtgattacaatggaccccaaggacaactgctccaaggacgccaacgataccctgctgctccagctgaccaacaccagcgcctactacatgtacttgttgctgctgctgaagtccgtggtgtacttcgccatcatcacatgctgcctgctgcggagaaccgccttctgctgcaacggcgagaagtct

SEQ ID NO: 7305 - DNA, 2178 bp, synthetic construct
  source 1..2178: mol_type = other DNA
atggccttaccagtgaccgccttgctcctgccgctggccttgctgctccacgccgccaggccggacgagctgacacaggaccctgctgtgtctgttgccctgggccagacagtgcggattacctgtcaaggcgacagcctgagaagcaactacgccaactggtatcagcagaagcccggacaggctcccgtgctggttatctacggccagaacaacagacccagcggcatccccgatagattcagcggctctagctctggcaataccgccagcctgacaatcactggcgctcaggctgccgatgaggccgactactactgcgatagcagagtgtccaccggcaatcacgtggtgtttggcggcggaacaaagctgacagtgctcggacaactcgagatccagaaccctgatcctgccgtgtaccagctgcgggatagcaagagcagcgacaagagcgtgtgtctgttcaccgacttcgacagccagaccaacgtgtcccagagcaaggactccgacgtgtacatcaccgataagtgcgtgctggacatgcggagcatggacttcaagagcaactccgccgtggcctggtccaacaagtccgatttcgcctgcgccaacgccttcaacaacagcattatccccgaggacacattcttcccaagccccgagagcagcgactccaccgaccacgtgaagcccaaagagacagagaacaccaagcagcccagcaagagctgccacaagcccaaggccatcgtgcacaccgagaaagtgaacatgatgagcctgaccgtgctgggcctgcggatgctgttcgccaaaaccgtggccgtgaacttcctgctgaccgccaagctgttcttcctccgcgccaagagaagcggatctggcgtgaagcagaccctgaatttcgacctgctgaagctggctggcgacgtggaatccaacccaggccctactagtatggactggatttggcgcatccttttccttgtcggcgctgctaccggcgcgcattccttcgaagaagttcagctggtgcagagcggagccgaagtgaagaaacctggggcctctgtgaaggtgtcctgcaaggcttccggctacacctttaccagctacgccatgcactgggtccgacaggcacctggacaacggcttgaatggatgggctggatcaacgccggcaacggcaacaccaagtacagccagaaattccagggccgcgtgaccatcaccagagatacaagcgccagcaccgcctacatggaactgtctagcctgagatccgaggacaccgccgtgtactactgtgccagagacatcagctacggcagcttcgactattggggccagggcacactggtcaccgttagctctacgcgtgaggacctgaagaacgtgttcccacctgaggtggccgtgttcgagcctagcgaggccgagatcagccacacccagaaagccaccctcgtgtgcctggctaccggcttctaccccgaccatgtggaactgtcttggtgggtcaacggcaaagaggtgcacagcggcgtgtgtaccgacccccagccactgaaagaacagcccgccctgaacgacagccggtactgcctgagcagcagactgagagtgtccgccaccttctggcagaacccccggaaccacttcagatgccaggtgcagttctacggcctgagcgagaacgacgagtggacccaggacagagccaagcccgtgacccagatcgtgtctgccgaagcctggggcagagccgatgatgtgattaagatccactggcaggaaaagaagtccaacaccatcctgggcagccaggaaggcaacaccatgaagaccaacgacacctacatgaagttcagctggctgaccgtgcccgagaagtccctggacaaagaacacagatgcatcgtgcggcacgaaaacaacaagaacggcgtggaccaggaaatcatcttcccacccatcaagaccgatgtgattacaatggaccccaaggacaactgctccaaggacgccaacgataccctgctgctccagctgaccaacaccagcgcctactacatgtacttgttgctgctgctgaagtccgtggtgtacttcgccatcatcacatgctgcctgctgcggagaaccgccttctgctgcaacggcgagaagtct

SEQ ID NO: 7306 - DNA, 2184 bp, synthetic construct
  source 1..2184: mol_type = other DNA
atggccttaccagtgaccgccttgctcctgccgctggccttgctgctccacgccgccaggccggacgacatcgtgctgacacagacaccagccacactgagcgtgacacctggcgattctgtgtccctgagctgtagagccagccagagcatcagcaacaacctgcactggtatcagcagaagtcccacgagagccccagactgctgattaagaacgccagccagtctatcagcggcatccccagcaagtttagcggctctggcagcggcaccgacttcaccctgagaatcaacagcgtggaaaccgaggacttcgggatgtacttctgccagcagagcaatagctggccctacacatttggctccggcaccaagctggaaatcaaactcgagatccagaaccctgatcctgccgtgtaccagctgcgggatagcaagagcagcgacaagagcgtgtgtctgttcaccgacttcgacagccagaccaacgtgtcccagagcaaggactccgacgtgtacatcaccgataagtgcgtgctggacatgcggagcatggacttcaagagcaactccgccgtggcctggtccaacaagtccgatttcgcctgcgccaacgccttcaacaacagcattatccccgaggacacattcttcccaagccccgagagcagcgactccaccgaccacgtgaagcccaaagagacagagaacaccaagcagcccagcaagagctgccacaagcccaaggccatcgtgcacaccgagaaagtgaacatgatgagcctgaccgtgctgggcctgcggatgctgttcgccaaaaccgtggccgtgaacttcctgctgaccgccaagctgttcttcctccgcgccaagagaagcggatctggcgtgaagcagaccctgaatttcgacctgctgaagctggctggcgacgtggaatccaacccaggccctactagtatggactggatttggcgcatccttttccttgtcggcgctgctaccggcgcgcattccttcgaacaagtgaagctgcaacagagcggacccgagctggttaagccaggcgcttccgtgaagattagctgcaaggccagcggctacagcttcaccggctactacatgcactgggtcaagcagagccacggcaacatcctggactggatcggctacatctacccctacaacggcgtgtccagctacaaccagaagttcaagggcaaagccactctgaccgtggacaagagcagcagcaccgcctacatggaactgagaagcctgaccagcgaggacagcgccgtgtactattgtgccagagagcggggcctgtaccagctcagagcaatggattattggggccagggcaccagcgtgaccgtttcttctacgcgtgaggacctgaagaacgtgttcccacctgaggtggccgtgttcgagcctagcgaggccgagatcagccacacccagaaagccaccctcgtgtgcctggctaccggcttctaccccgaccatgtggaactgtcttggtgggtcaacggcaaagaggtgcacagcggcgtgtgtaccgacccccagccactgaaagaacagcccgccctgaacgacagccggtactgcctgagcagcagactgagagtgtccgccaccttctggcagaacccccggaaccacttcagatgccaggtgcagttctacggcctgagcgagaacgacgagtggacccaggacagagccaagcccgtgacccagatcgtgtctgccgaagcctggggcagagccgatgatgtgattaagatccactggcaggaaaagaagtccaacaccatcctgggcagccaggaaggcaacaccatgaagaccaacgacacctacatgaagttcagctggctgaccgtgcccgagaagtccctggacaaagaacacagatgcatcgtgcggcacgaaaacaacaagaacggcgtggaccaggaaatcatcttcccacccatcaagaccgatgtgattacaatggaccccaaggacaactgctccaaggacgccaacgataccctgctgctccagctgaccaacaccagcgcctactacatgtacttgttgctgctgctgaagtccgtggtgtacttcgccatcatcacatgctgcctgctgcggagaaccgccttctgctgcaacggcgagaagtct

SEQ ID NO: 7307 - DNA, 2157 bp, synthetic construct
  source 1..2157: mol_type = other DNA
atggccttaccagtgaccgccttgctcctgccgctggccttgctgctccacgccgccaggccggacgacatcgtgatgacacagacccctgccatcatgagcgcctctccaggccagaaagtgaccatcacatgtagcgccagcagcagcgtgaactacatgcactggtatcagcagaagctgggcagcagccccaagctgtggatctacgataccagcaaactggcccctggcgtgccagccagattttctggttctggcagcggcaccagctacagcctgacaatcagcagcatggaagccgaggatgccgccagctacttctgccatcagtggtctagctacccctacacctttggctccggcaccaagctggaaatcaaactcgagatccagaaccctgatcctgccgtgtaccagctgcgggatagcaagagcagcgacaagagcgtgtgtctgttcaccgacttcgacagccagaccaacgtgtcccagagcaaggactccgacgtgtacatcaccgataagtgcgtgctggacatgcggagcatggacttcaagagcaactccgccgtggcctggtccaacaagtccgatttcgcctgcgccaacgccttcaacaacagcattatccccgaggacacattcttcccaagccccgagagcagcgactccaccgaccacgtgaagcccaaagagacagagaacaccaagcagcccagcaagagctgccacaagcccaaggccatcgtgcacaccgagaaagtgaacatgatgagcctgaccgtgctgggcctgcggatgctgttcgccaaaaccgtggccgtgaacttcctgctgaccgccaagctgttcttcctccgcgccaagagaagcggatctggcgtgaagcagaccctgaatttcgacctgctgaagctggctggcgacgtggaatccaacccaggccctactagtatggactggatttggcgcatccttttccttgtcggcgctgctaccggcgcgcattccttcgaagaagttcagctccaagagtctggccccgacctggtcaagcctagccaaagcctgagcctgacctgtaccgtgaccggctacagcatcacaagcggctatggatggcactggatcagacagttccccggcaacaaactggaatggatgggctacatccactacagcggcagcaccacctacaatcccagcctgaagtcccggatcagcatcagcagagacaccagcaagaaccagttcttcctgcaactgaacagcgtgaccaccgaggacaccgccacctactattgtgctcggagcctgagatattggggccagggcacaaccctgaccgtgtcatctacgcgtgaggacctgaagaacgtgttcccacctgaggtggccgtgttcgagcctagcgaggccgagatcagccacacccagaaagccaccctcgtgtgcctggctaccggcttctaccccgaccatgtggaactgtcttggtgggtcaacggcaaagaggtgcacagcggcgtgtgtaccgacccccagccactgaaagaacagcccgccctgaacgacagccggtactgcctgagcagcagactgagagtgtccgccaccttctggcagaacccccggaaccacttcagatgccaggtgcagttctacggcctgagcgagaacgacgagtggacccaggacagagccaagcccgtgacccagatcgtgtctgccgaagcctggggcagagccgatgatgtgattaagatccactggcaggaaaagaagtccaacaccatcctgggcagccaggaaggcaacaccatgaagaccaacgacacctacatgaagttcagctggctgaccgtgcccgagaagtccctggacaaagaacacagatgcatcgtgcggcacgaaaacaacaagaacggcgtggaccaggaaatcatcttcccacccatcaagaccgatgtgattacaatggaccccaaggacaactgctccaaggacgccaacgataccctgctgctccagctgaccaacaccagcgcctactacatgtacttgttgctgctgctgaagtccgtggtgtacttcgccatcatcacatgctgcctgctgcggagaaccgccttctgctgcaacggcgagaagtct

SEQ ID NO: 7308 - DNA, 2166 bp, synthetic construct
  source 1..2166: mol_type = other DNA
atggccttaccagtgaccgccttgctcctgccgctggccttgctgctccacgccgccaggccggacgacatccagatgacacagagccctagcagcctgtctgccagcgtgggagacagagtgaccatcacctgtagcgccaccagcagcatcagctacatgcactggtatcagcagaagcccggcaaggcccctaaaggctggatctacgataccagcaaactggcccacggcgtgcccagcagattttctggttctggcagcggcaccgacttcaccctgacaatatctagcctccagcctgaggacttcgccacctactactgccaccagagaagaagctaccccttcaccttcggccagggcaccaaggtggaaatcaaactcgagatccagaaccctgatcctgccgtgtaccagctgcgggatagcaagagcagcgacaagagcgtgtgtctgttcaccgacttcgacagccagaccaacgtgtcccagagcaaggactccgacgtgtacatcaccgataagtgcgtgctggacatgcggagcatggacttcaagagcaactccgccgtggcctggtccaacaagtccgatttcgcctgcgccaacgccttcaacaacagcattatccccgaggacacattcttcccaagccccgagagcagcgactccaccgaccacgtgaagcccaaagagacagagaacaccaagcagcccagcaagagctgccacaagcccaaggccatcgtgcacaccgagaaagtgaacatgatgagcctgaccgtgctgggcctgcggatgctgttcgccaaaaccgtggccgtgaacttcctgctgaccgccaagctgttcttcctccgcgccaagagaagcggatctggcgtgaagcagaccctgaatttcgacctgctgaagctggctggcgacgtggaatccaacccaggccctactagtatggactggatttggcgcatccttttccttgtcggcgctgctaccggcgcgcattccttcgaagaagtgcaactggttcagagcggagccgaagtgaagaaacctggggcctctgtgaaggtgtcctgcaaggcttccggctacacctttaccaatttctggattcactgggtccgacaggctccaggccaaggactggaatggatcggagagatcgaccccagcgacagctacaccaactacaaccagaaattcaaaggccgggtcaccatcaccagagacaccagcacaagcaccgcctacctggaactgagcagcctgagaagcgaggacaccgccgtgtactactgcgccagggaaatcaccaccgtggattattggggccagggaaccctggtcaccgtgtcatctacgcgtgaggacctgaagaacgtgttcccacctgaggtggccgtgttcgagcctagcgaggccgagatcagccacacccagaaagccaccctcgtgtgcctggctaccggcttctaccccgaccatgtggaactgtcttggtgggtcaacggcaaagaggtgcacagcggcgtgtgtaccgacccccagccactgaaagaacagcccgccctgaacgacagccggtactgcctgagcagcagactgagagtgtccgccaccttctggcagaacccccggaaccacttcagatgccaggtgcagttctacggcctgagcgagaacgacgagtggacccaggacagagccaagcccgtgacccagatcgtgtctgccgaagcctggggcagagccgatgatgtgattaagatccactggcaggaaaagaagtccaacaccatcctgggcagccaggaaggcaacaccatgaagaccaacgacacctacatgaagttcagctggctgaccgtgcccgagaagtccctggacaaagaacacagatgcatcgtgcggcacgaaaacaacaagaacggcgtggaccaggaaatcatcttcccacccatcaagaccgatgtgattacaatggaccccaaggacaactgctccaaggacgccaacgataccctgctgctccagctgaccaacaccagcgcctactacatgtacttgttgctgctgctgaagtccgtggtgtacttcgccatcatcacatgctgcctgctgcggagaaccgccttctgctgcaacggcgagaagtct

SEQ ID NO: 7309 - DNA, 2187 bp, synthetic construct
  source 1..2187: mol_type = other DNA
atggccttaccagtgaccgccttgctcctgccgctggccttgctgctccacgccgccaggccggacgacatccagatgacacagagccctagcagcctgtctgccagcgtgggagacagagtgaccatcacatgcaaggccagccagggcttcaacaaatacgtggcctggtatcagcagaagcccggcaaggctcctaagctgctgatctactacaccagcacactccagcctggcgtgcccagcagattttctggctctggcagcggcagagactacaccctgacaatatccagcctccagccagaggacttcgccacctactactgtctccagtacggcaacctgctgtacgcctttggacagggcaccaaggtggaaatcaagagactcgagatccagaaccctgatcctgccgtgtaccagctgcgggatagcaagagcagcgacaagagcgtgtgtctgttcaccgacttcgacagccagaccaacgtgtcccagagcaaggactccgacgtgtacatcaccgataagtgcgtgctggacatgcggagcatggacttcaagagcaactccgccgtggcctggtccaacaagtccgatttcgcctgcgccaacgccttcaacaacagcattatccccgaggacacattcttcccaagccccgagagcagcgactccaccgaccacgtgaagcccaaagagacagagaacaccaagcagcccagcaagagctgccacaagcccaaggccatcgtgcacaccgagaaagtgaacatgatgagcctgaccgtgctgggcctgcggatgctgttcgccaaaaccgtggccgtgaacttcctgctgaccgccaagctgttcttcctccgcgccaagagaagcggatctggcgtgaagcagaccctgaatttcgacctgctgaagctggctggcgacgtggaatccaacccaggccctactagtatggactggatttggcgcatccttttccttgtcggcgctgctaccggcgcgcattccttcgaagaagttcagcttgtgcagagcggagccgaagtgaagaaacctggggcctctgtgaaggtgtcctgcaaagccagcggctacacctttaccagctactggatcggctgggtccgacaggctcctggacaaggactggaatggatcggcgacatctatcccggcggaggctacaccaactacaacgagaagttcaagggccgcgtgacaatcaccagagacacctctacaagcaccgcctacctggaactgagcagcctgagaagcgaggacaccgccgtgtactactgcgccagactggatggcagcagctacagaggcgctatggattcttggggccagggcacactggtcaccgtttcttctacgcgtgaggacctgaagaacgtgttcccacctgaggtggccgtgttcgagcctagcgaggccgagatcagccacacccagaaagccaccctcgtgtgcctggctaccggcttctaccccgaccatgtggaactgtcttggtgggtcaacggcaaagaggtgcacagcggcgtgtgtaccgacccccagccactgaaagaacagcccgccctgaacgacagccggtactgcctgagcagcagactgagagtgtccgccaccttctggcagaacccccggaaccacttcagatgccaggtgcagttctacggcctgagcgagaacgacgagtggacccaggacagagccaagcccgtgacccagatcgtgtctgccgaagcctggggcagagccgatgatgtgattaagatccactggcaggaaaagaagtccaacaccatcctgggcagccaggaaggcaacaccatgaagaccaacgacacctacatgaagttcagctggctgaccgtgcccgagaagtccctggacaaagaacacagatgcatcgtgcggcacgaaaacaacaagaacggcgtggaccaggaaatcatcttcccacccatcaagaccgatgtgattacaatggaccccaaggacaactgctccaaggacgccaacgataccctgctgctccagctgaccaacaccagcgcctactacatgtacttgttgctgctgctgaagtccgtggtgtacttcgccatcatcacatgctgcctgctgcggagaaccgccttctgctgcaacggcgagaagtct

SEQ ID NO: 7310 - DNA, 2175 bp, synthetic construct
  source 1..2175: mol_type = other DNA
atggccttaccagtgaccgccttgctcctgccgctggccttgctgctccacgccgccaggccggacgacatccagatgacacagagccctagcagcctgtctgccagcgtgggagacagagtgaccatcacctgtagagccagccaggacatccggtactacctgaactggtatcagcagaagcccggcaaggcccctaagctgctgatctatgtggcctccagcctccagagcggagtgccttctagattttctggcagcggctccggcaccgagtttaccctgacagtgtctagcttgcagcccgaggacttcgccacctactactgcctgcaagtgtacagcacccctcggacctttggacagggcaccaaggtggaaatcaaactcgagatccagaaccctgatcctgccgtgtaccagctgcgggatagcaagagcagcgacaagagcgtgtgtctgttcaccgacttcgacagccagaccaacgtgtcccagagcaaggactccgacgtgtacatcaccgataagtgcgtgctggacatgcggagcatggacttcaagagcaactccgccgtggcctggtccaacaagtccgatttcgcctgcgccaacgccttcaacaacagcattatccccgaggacacattcttcccaagccccgagagcagcgactccaccgaccacgtgaagcccaaagagacagagaacaccaagcagcccagcaagagctgccacaagcccaaggccatcgtgcacaccgagaaagtgaacatgatgagcctgaccgtgctgggcctgcggatgctgttcgccaaaaccgtggccgtgaacttcctgctgaccgccaagctgttcttcctccgcgccaagagaagcggatctggcgtgaagcagaccctgaatttcgacctgctgaagctggctggcgacgtggaatccaacccaggccctactagtatggactggatttggcgcatccttttccttgtcggcgctgctaccggcgcgcattccttcgaagaagtgcagcttgttgaatctggcggcggactggctaagcctggcggatctctgagactgtcttgtgccgccagcggcttccggttcaccttcaacaactactacatggactgggtccgacaggcccctggacaaggacttgaatgggtgtccagaatcagcagcagcggcgaccctacttggtacgccgattctgtgaagggcagattcaccatcagcagagagaacgccaagaacaccctgttcctccagatgaactccctgagagccgaggacaccgccgtgtactattgtgcctctctgaccaccggcagcgattcttggggacagggcgtgctggttaccgtgtcatctacgcgtgaggacctgaagaacgtgttcccacctgaggtggccgtgttcgagcctagcgaggccgagatcagccacacccagaaagccaccctcgtgtgcctggctaccggcttctaccccgaccatgtggaactgtcttggtgggtcaacggcaaagaggtgcacagcggcgtgtgtaccgacccccagccactgaaagaacagcccgccctgaacgacagccggtactgcctgagcagcagactgagagtgtccgccaccttctggcagaacccccggaaccacttcagatgccaggtgcagttctacggcctgagcgagaacgacgagtggacccaggacagagccaagcccgtgacccagatcgtgtctgccgaagcctggggcagagccgatgatgtgattaagatccactggcaggaaaagaagtccaacaccatcctgggcagccaggaaggcaacaccatgaagaccaacgacacctacatgaagttcagctggctgaccgtgcccgagaagtccctggacaaagaacacagatgcatcgtgcggcacgaaaacaacaagaacggcgtggaccaggaaatcatcttcccacccatcaagaccgatgtgattacaatggaccccaaggacaactgctccaaggacgccaacgataccctgctgctccagctgaccaacaccagcgcctactacatgtacttgttgctgctgctgaagtccgtggtgtacttcgccatcatcacatgctgcctgctgcggagaaccgccttctgctgcaacggcgagaagtct

SEQ ID NO: 7311 - DNA, 2175 bp, synthetic construct
  source 1..2175: mol_type = other DNA
atggccttaccagtgaccgccttgctcctgccgctggccttgctgctccacgccgccaggccggagatcgtgatgacacagagccccgccacactgagtgtgtctccaggcgaaagagccacactgtcctgtagagccagccagagcgtgtccagaaacctggcctggtatcagcagaagcctggacaggctccccggctgttgatctacggcgcttctacaagagccaccggcattcccgccagattttctggctctggcagcggcaccgagttcaccctgacaatcggaagcctccagagcgaggacttcgccgtgtactactgccagcagtacaagacctggcctcggacctttggacagggcaccaacgtggaaatcaaactcgagatccagaaccctgatcctgccgtgtaccagctgcgggatagcaagagcagcgacaagagcgtgtgtctgttcaccgacttcgacagccagaccaacgtgtcccagagcaaggactccgacgtgtacatcaccgataagtgcgtgctggacatgcggagcatggacttcaagagcaactccgccgtggcctggtccaacaagtccgatttcgcctgcgccaacgccttcaacaacagcattatccccgaggacacattcttcccaagccccgagagcagcgactccaccgaccacgtgaagcccaaagagacagagaacaccaagcagcccagcaagagctgccacaagcccaaggccatcgtgcacaccgagaaagtgaacatgatgagcctgaccgtgctgggcctgcggatgctgttcgccaaaaccgtggccgtgaacttcctgctgaccgccaagctgttcttcctccgcgccaagagaagcggatctggcgtgaagcagaccctgaatttcgacctgctgaagctggctggcgacgtggaatccaacccaggccctactagtatggactggatttggcgcatccttttccttgtcggcgctgctaccggcgcgcattccttcgaacaagttcagctgcaacaatggggagccggcctgctgaagcctagcgaaacactgtctctgacctgcgccgtgttcggcggctctttcagcggctactactggtcctggatcagacagcctcctggcaaaggactggaatggatcggcgagatcaaccaccggggcaacaccaacgacaaccccagcctgaaaagcagagtgaccatcagcgtggacaccagcaagaaccagttcgccctgaagctgagcagcgtgacagccgctgataccgccgtgtattattgcgccagagagcggggctacacctacggcaatttcgatcactggggccagggcaccctggtcacagtttcttctacgcgtgaggacctgaagaacgtgttcccacctgaggtggccgtgttcgagcctagcgaggccgagatcagccacacccagaaagccaccctcgtgtgcctggctaccggcttctaccccgaccatgtggaactgtcttggtgggtcaacggcaaagaggtgcacagcggcgtgtgtaccgacccccagccactgaaagaacagcccgccctgaacgacagccggtactgcctgagcagcagactgagagtgtccgccaccttctggcagaacccccggaaccacttcagatgccaggtgcagttctacggcctgagcgagaacgacgagtggacccaggacagagccaagcccgtgacccagatcgtgtctgccgaagcctggggcagagccgatgatgtgattaagatccactggcaggaaaagaagtccaacaccatcctgggcagccaggaaggcaacaccatgaagaccaacgacacctacatgaagttcagctggctgaccgtgcccgagaagtccctggacaaagaacacagatgcatcgtgcggcacgaaaacaacaagaacggcgtggaccaggaaatcatcttcccacccatcaagaccgatgtgattacaatggaccccaaggacaactgctccaaggacgccaacgataccctgctgctccagctgaccaacaccagcgcctactacatgtacttgttgctgctgctgaagtccgtggtgtacttcgccatcatcacatgctgcctgctgcggagaaccgccttctgctgcaacggcgagaagtct

SEQ ID NO: 7312 - DNA, 2178 bp, synthetic construct
  source 1..2178: mol_type = other DNA
atggccttaccagtgaccgccttgctcctgccgctggccttgctgctccacgccgccaggccggagatcgtgatgacccctagcagcgccacactgagtgtgtctccaggcgaaagagccacactgtcctgtagagccagccagagcgtgtccagaaacctggcctggtatcagcagaagcctggacaggctccccggctgttgatctacggcgcttctacaagagccaccggcattcccgccagattttctggctctggcagcggcaccgagttcaccctgacaatctctagcctccagagcgaggacttcgccgtgtactactgccaccagtacagcaactggatgtgcagcttcggccagggcaccaagctggaaatcaaactcgagatccagaaccctgatcctgccgtgtaccagctgcgggatagcaagagcagcgacaagagcgtgtgtctgttcaccgacttcgacagccagaccaacgtgtcccagagcaaggactccgacgtgtacatcaccgataagtgcgtgctggacatgcggagcatggacttcaagagcaactccgccgtggcctggtccaacaagtccgatttcgcctgcgccaacgccttcaacaacagcattatccccgaggacacattcttcccaagccccgagagcagcgactccaccgaccacgtgaagcccaaagagacagagaacaccaagcagcccagcaagagctgccacaagcccaaggccatcgtgcacaccgagaaagtgaacatgatgagcctgaccgtgctgggcctgcggatgctgttcgccaaaaccgtggccgtgaacttcctgctgaccgccaagctgttcttcctccgcgccaagagaagcggatctggcgtgaagcagaccctgaatttcgacctgctgaagctggctggcgacgtggaatccaacccaggccctactagtatggactggatttggcgcatccttttccttgtcggcgctgctaccggcgcgcattccttcgaagaagttcagctccttgagtcaggtggcggcctggttcaacctggcggatctctgagactgagctgtgccgccagcggcttcacctttagcagatacgccatgaactgggtccgacaggcccctggcaaaggactggaatgggtgtccggcatctctggaagcggcggcagaacctactacgccgattctgtgaagggcagattcaccatcagccgggacaacagcaagaacaccctgtacctccagatgaacagcctgagagccgaggacacagccgtgtattattgcgccaaggaccgggacttttggagcggcccttttgactattggggccagggaaccctggtcaccgttagctctacgcgtgaggacctgaagaacgtgttcccacctgaggtggccgtgttcgagcctagcgaggccgagatcagccacacccagaaagccaccctcgtgtgcctggctaccggcttctaccccgaccatgtggaactgtcttggtgggtcaacggcaaagaggtgcacagcggcgtgtgtaccgacccccagccactgaaagaacagcccgccctgaacgacagccggtactgcctgagcagcagactgagagtgtccgccaccttctggcagaacccccggaaccacttcagatgccaggtgcagttctacggcctgagcgagaacgacgagtggacccaggacagagccaagcccgtgacccagatcgtgtctgccgaagcctggggcagagccgatgatgtgattaagatccactggcaggaaaagaagtccaacaccatcctgggcagccaggaaggcaacaccatgaagaccaacgacacctacatgaagttcagctggctgaccgtgcccgagaagtccctggacaaagaacacagatgcatcgtgcggcacgaaaacaacaagaacggcgtggaccaggaaatcatcttcccacccatcaagaccgatgtgattacaatggaccccaaggacaactgctccaaggacgccaacgataccctgctgctccagctgaccaacaccagcgcctactacatgtacttgttgctgctgctgaagtccgtggtgtacttcgccatcatcacatgctgcctgctgcggagaaccgccttctgctgcaacggcgagaagtct

SEQ ID NO: 7313 - DNA, 2193 bp, synthetic construct
  source 1..2193: mol_type = other DNA
atggccttaccagtgaccgccttgctcctgccgctggccttgctgctccacgccgccaggccggacatccagatgacccagagccccagcagcctgtctgccagcgtgggcgacagagtgaccatcacatgcaaggccagcaagaacatcagaagctacctggcctggtatcagcagaagcccggcaaggcccccaagctgctgatctacagcggcagcacactgcacagcggcgtgcccagcagattttccggctctggcagcggcaccgacttcaccctgaccatctctagcctccagcccgaggacttcgccacctactactgccagcagcaccacgagtaccccctgacattcggccagggcaccaaggtggaaatcaagagactcgagatccagaaccctgatcctgccgtgtaccagctgcgggatagcaagagcagcgacaagagcgtgtgtctgttcaccgacttcgacagccagaccaacgtgtcccagagcaaggactccgacgtgtacatcaccgataagtgcgtgctggacatgcggagcatggacttcaagagcaactccgccgtggcctggtccaacaagtccgatttcgcctgcgccaacgccttcaacaacagcattatccccgaggacacattcttcccaagccccgagagcagcgactccaccgaccacgtgaagcccaaagagacagagaacaccaagcagcccagcaagagctgccacaagcccaaggccatcgtgcacaccgagaaagtgaacatgatgagcctgaccgtgctgggcctgcggatgctgttcgccaaaaccgtggccgtgaacttcctgctgaccgccaagctgttcttcctccgcgccaagagaagcggatctggcgtgaagcagaccctgaatttcgacctgctgaagctggctggcgacgtggaatccaacccaggccctactagtatggactggatttggcgcatccttttccttgtcggcgctgctaccggcgcgcattccttcgaacaggtgcaactccaggaatctggccccggactcgtgaagcccagcgagacactgagcctgacctgtaccgtgtccggctacaccatcaccagcggctacgactggtcctggatcagacagcctcctggcaagggcctggaatggatcggctacatcaactacggcggctccaccaactacaagcccagcctgggaagccgcgtgacaatcagcgtggacacctccaagaaccagttcagcctgaagctgagcagcgtgacagccgccgataccgccgtgtactactgcgcccggtacaacgagtacaagagctacatctacgattggtacttcgacttctggggccagggaaccctcgtgaccgtgtctagtacgcgtgaggacctgaagaacgtgttcccacctgaggtggccgtgttcgagcctagcgaggccgagatcagccacacccagaaagccaccctcgtgtgcctggctaccggcttctaccccgaccatgtggaactgtcttggtgggtcaacggcaaagaggtgcacagcggcgtgtgtaccgacccccagccactgaaagaacagcccgccctgaacgacagccggtactgcctgagcagcagactgagagtgtccgccaccttctggcagaacccccggaaccacttcagatgccaggtgcagttctacggcctgagcgagaacgacgagtggacccaggacagagccaagcccgtgacccagatcgtgtctgccgaagcctggggcagagccgatgatgtgattaagatccactggcaggaaaagaagtccaacaccatcctgggcagccaggaaggcaacaccatgaagaccaacgacacctacatgaagttcagctggctgaccgtgcccgagaagtccctggacaaagaacacagatgcatcgtgcggcacgaaaacaacaagaacggcgtggaccaggaaatcatcttcccacccatcaagaccgatgtgattacaatggaccccaaggacaactgctccaaggacgccaacgataccctgctgctccagctgaccaacaccagcgcctactacatgtacttgttgctgctgctgaagtccgtggtgtacttcgccatcatcacatgctgcctgctgcggagaaccgccttctgctgcaacggcgagaagtct

SEQ ID NO: 7314 - DNA, 2199 bp, synthetic construct
  source 1..2199: mol_type = other DNA
atggccttaccagtgaccgccttgctcctgccgctggccttgctgctccacgccgccaggccgcagtctgtggtcacacagcctccatccgtgtctgctgcccctggacagaaagtgaccatctcctgtagcggcagcagcagcaacatcggcaacaactacgtgtcctggtatcagcagctccccggcacagctcccaaactgctgatctacgacaacaacaagcggcccagcggcatccccgatagattttctggcagcaagagcggcaccagcgccacactgggaattaccggacttcagacaggcgacgaggccgactactactgtggcacatgggatggcagcctgtacaccatgcttttcggcggaggcaccaagctgacagtgcttctcgagatccagaaccctgatcctgccgtgtaccagctgcgggatagcaagagcagcgacaagagcgtgtgtctgttcaccgacttcgacagccagaccaacgtgtcccagagcaaggactccgacgtgtacatcaccgataagtgcgtgctggacatgcggagcatggacttcaagagcaactccgccgtggcctggtccaacaagtccgatttcgcctgcgccaacgccttcaacaacagcattatccccgaggacacattcttcccaagccccgagagcagcgactccaccgaccacgtgaagcccaaagagacagagaacaccaagcagcccagcaagagctgccacaagcccaaggccatcgtgcacaccgagaaagtgaacatgatgagcctgaccgtgctgggcctgcggatgctgttcgccaaaaccgtggccgtgaacttcctgctgaccgccaagctgttcttcctccgcgccaagagaagcggatctggcgtgaagcagaccctgaatttcgacctgctgaagctggctggcgacgtggaatccaacccaggccctactagtatggactggatttggcgcatccttttccttgtcggcgctgctaccggcgcgcattccttcgaagaagtgcaactggtggaatctggcggcggactggttaagcctggcggatctctgagactgtcttgtgccgccagcggcttcaccttcagcaatgcctggatgagctgggttcgacaggcccctggaaaaggactggaatgggtcggattcatccggtccaaagcctacggcggcaccacagaatatgccgcctctgtgaagggcagattcaccatcagccgggacgacagcaagtctatcgcctacctccagatgaacaacctgaaaaccgaggacaccgccgtgtactactgcgccagagatggcctgtacagcagctcttggtacgacagcgattactggggccagggcacactggtcacagtgtcatctacgcgtgaggacctgaagaacgtgttcccacctgaggtggccgtgttcgagcctagcgaggccgagatcagccacacccagaaagccaccctcgtgtgcctggctaccggcttctaccccgaccatgtggaactgtcttggtgggtcaacggcaaagaggtgcacagcggcgtgtgtaccgacccccagccactgaaagaacagcccgccctgaacgacagccggtactgcctgagcagcagactgagagtgtccgccaccttctggcagaacccccggaaccacttcagatgccaggtgcagttctacggcctgagcgagaacgacgagtggacccaggacagagccaagcccgtgacccagatcgtgtctgccgaagcctggggcagagccgatgatgtgattaagatccactggcaggaaaagaagtccaacaccatcctgggcagccaggaaggcaacaccatgaagaccaacgacacctacatgaagttcagctggctgaccgtgcccgagaagtccctggacaaagaacacagatgcatcgtgcggcacgaaaacaacaagaacggcgtggaccaggaaatcatcttcccacccatcaagaccgatgtgattacaatggaccccaaggacaactgctccaaggacgccaacgataccctgctgctccagctgaccaacaccagcgcctactacatgtacttgttgctgctgctgaagtccgtggtgtacttcgccatcatcacatgctgcctgctgcggagaaccgccttctgctgcaacggcgagaagtct

SEQ ID NO: 7315 - DNA, 2214 bp, synthetic construct
  source 1..2214: mol_type = other DNA
atggccttaccagtgaccgccttgctcctgccgctggccttgctgctccacgccgccaggccgcagtctgtgctgacacagcctcctagtgtgtctggcgctcctggacagagagtgaccatctcttgtaccggcagcagcagcaatatcggagccggctatgacgtgcactggtatcagcagctccctggcacagcccctaaactgctgatcttcggcaacagcaacagacccagcggcgtgcccgatagattcagcggctttaagagcggcacaagcgccagcctggctatcactggactgcaagccgaggacgaggccgactacttctgccagagctacgatagcagcctgagcggcagcggagtgtttggcacaggcaccaaagtgacagtgcttggcctcgagatccagaaccctgatcctgccgtgtaccagctgcgggatagcaagagcagcgacaagagcgtgtgtctgttcaccgacttcgacagccagaccaacgtgtcccagagcaaggactccgacgtgtacatcaccgataagtgcgtgctggacatgcggagcatggacttcaagagcaactccgccgtggcctggtccaacaagtccgatttcgcctgcgccaacgccttcaacaacagcattatccccgaggacacattcttcccaagccccgagagcagcgactccaccgaccacgtgaagcccaaagagacagagaacaccaagcagcccagcaagagctgccacaagcccaaggccatcgtgcacaccgagaaagtgaacatgatgagcctgaccgtgctgggcctgcggatgctgttcgccaaaaccgtggccgtgaacttcctgctgaccgccaagctgttcttcctccgcgccaagagaagcggatctggcgtgaagcagaccctgaatttcgacctgctgaagctggctggcgacgtggaatccaacccaggccctactagtatggactggatttggcgcatccttttccttgtcggcgctgctaccggcgcgcattccttcgaacaaatgcaactggttcaaagcggcggtggcctggtgcaacctggaagaagtctgagactgagctgtgccgccagcggcttcaccttcgatgattacgccatgcactgggtccgacaggcccctggaaaaggactggaatgggtgtccggcatctcctggaatagcggctctatcggctacgccgacagcgtgaagggcagattcaccatcagccgggacaacgccaagaacagcctgtacctccagatgaactccctgagagccgaggatacagccctgtactactgcgccaaggacatccacagcggcagctactacggcctgctgtactacgctatggacgtgtggggccagggcacaaccgtgacagtttcttctacgcgtgaggacctgaagaacgtgttcccacctgaggtggccgtgttcgagcctagcgaggccgagatcagccacacccagaaagccaccctcgtgtgcctggctaccggcttctaccccgaccatgtggaactgtcttggtgggtcaacggcaaagaggtgcacagcggcgtgtgtaccgacccccagccactgaaagaacagcccgccctgaacgacagccggtactgcctgagcagcagactgagagtgtccgccaccttctggcagaacccccggaaccacttcagatgccaggtgcagttctacggcctgagcgagaacgacgagtggacccaggacagagccaagcccgtgacccagatcgtgtctgccgaagcctggggcagagccgatgatgtgattaagatccactggcaggaaaagaagtccaacaccatcctgggcagccaggaaggcaacaccatgaagaccaacgacacctacatgaagttcagctggctgaccgtgcccgagaagtccctggacaaagaacacagatgcatcgtgcggcacgaaaacaacaagaacggcgtggaccaggaaatcatcttcccacccatcaagaccgatgtgattacaatggaccccaaggacaactgctccaaggacgccaacgataccctgctgctccagctgaccaacaccagcgcctactacatgtacttgttgctgctgctgaagtccgtggtgtacttcgccatcatcacatgctgcctgctgcggagaaccgccttctgctgcaacggcgagaagtct

SEQ ID NO: 7316 - DNA, 2214 bp, synthetic construct
  source 1..2214: mol_type = other DNA
atggccttaccagtgaccgccttgctcctgccgctggccttgctgctccacgccgccaggccgctgcctgttctgacacagcctccatctgcctctggcacacctggacagagagtgaccatcagctgtagcggcagaagcagcaacatcggcagcaacagcgtgaactggtacagacagcttcctggcgctgcccctaagctgctgatctacagcaacaaccagcggcctcctggcgtgccagtcagattttctggcagcaagagcggcacaagcgccagcctggctatttctggactccagtctgaggacgaggccacctactactgtgccacctgggacgacaacctgaacgtgcactacgtgttcggcaccggcaccaaagtgacagtgcttggaagtagactcgagatccagaaccctgatcctgccgtgtaccagctgcgggatagcaagagcagcgacaagagcgtgtgtctgttcaccgacttcgacagccagaccaacgtgtcccagagcaaggactccgacgtgtacatcaccgataagtgcgtgctggacatgcggagcatggacttcaagagcaactccgccgtggcctggtccaacaagtccgatttcgcctgcgccaacgccttcaacaacagcattatccccgaggacacattcttcccaagccccgagagcagcgactccaccgaccacgtgaagcccaaagagacagagaacaccaagcagcccagcaagagctgccacaagcccaaggccatcgtgcacaccgagaaagtgaacatgatgagcctgaccgtgctgggcctgcggatgctgttcgccaaaaccgtggccgtgaacttcctgctgaccgccaagctgttcttcctccgcgccaagagaagcggatctggcgtgaagcagaccctgaatttcgacctgctgaagctggctggcgacgtggaatccaacccaggccctactagtatggactggatttggcgcatccttttccttgtcggcgctgctaccggcgcgcattccttcgaacttgaaatggctcaggtgcagctggtgcagagcggagccgaagtgaagaaacctggcagcagcgtgaaggtgtcctgcaaagcttctggcggcaccttcagcagctacgccatctcttgggttcgacaggcccctggacaaggactggaatggatgggcagaatcatccccatcctgggaatcgccaactacgcccagaaattccagggcagagtgacaatcaccgccgacaagagcaccagcaccgcctacatggaactgagcagcctgagaagcgaggacaccgccgtgtactattgtgcaagaggcggctactacagccacgacatgtggagcgaagattggggccagggcacactggtcacagtgtcatctacgcgtgaggacctgaagaacgtgttcccacctgaggtggccgtgttcgagcctagcgaggccgagatcagccacacccagaaagccaccctcgtgtgcctggctaccggcttctaccccgaccatgtggaactgtcttggtgggtcaacggcaaagaggtgcacagcggcgtgtgtaccgacccccagccactgaaagaacagcccgccctgaacgacagccggtactgcctgagcagcagactgagagtgtccgccaccttctggcagaacccccggaaccacttcagatgccaggtgcagttctacggcctgagcgagaacgacgagtggacccaggacagagccaagcccgtgacccagatcgtgtctgccgaagcctggggcagagccgatgatgtgattaagatccactggcaggaaaagaagtccaacaccatcctgggcagccaggaaggcaacaccatgaagaccaacgacacctacatgaagttcagctggctgaccgtgcccgagaagtccctggacaaagaacacagatgcatcgtgcggcacgaaaacaacaagaacggcgtggaccaggaaatcatcttcccacccatcaagaccgatgtgattacaatggaccccaaggacaactgctccaaggacgccaacgataccctgctgctccagctgaccaacaccagcgcctactacatgtacttgttgctgctgctgaagtccgtggtgtacttcgccatcatcacatgctgcctgctgcggagaaccgccttctgctgcaacggcgagaagtct

SEQ ID NO: 7317 - DNA, 2196 bp, synthetic construct
  source 1..2196: mol_type = other DNA
atggccttaccagtgaccgccttgctcctgccgctggccttgctgctccacgccgccaggccggacttcgtgatgacacagagccctgatagcctggccgtgtctctcggcgagcgagtgaccatgagctgcaagtctagccagagcctgctgaacagcggcaaccagaagaactacctgacctggtatcagcagaagcccggccagcctcctaagctgctgatctactgggccagcaccagagaaagcggcgtgcccgatagattttctggctctggcagcggcaccgacttcaccctgacaatttctagcctgcaagccgaggacgtggccgtgtactactgccagaacgactacagctacccctacaccttcggccagggcaccaagctggaaatcaaactcgagatccagaaccctgatcctgccgtgtaccagctgcgggatagcaagagcagcgacaagagcgtgtgtctgttcaccgacttcgacagccagaccaacgtgtcccagagcaaggactccgacgtgtacatcaccgataagtgcgtgctggacatgcggagcatggacttcaagagcaactccgccgtggcctggtccaacaagtccgatttcgcctgcgccaacgccttcaacaacagcattatccccgaggacacattcttcccaagccccgagagcagcgactccaccgaccacgtgaagcccaaagagacagagaacaccaagcagcccagcaagagctgccacaagcccaaggccatcgtgcacaccgagaaagtgaacatgatgagcctgaccgtgctgggcctgcggatgctgttcgccaaaaccgtggccgtgaacttcctgctgaccgccaagctgttcttcctccgcgccaagagaagcggatctggcgtgaagcagaccctgaatttcgacctgctgaagctggctggcgacgtggaatccaacccaggccctactagtatggactggatttggcgcatccttttccttgtcggcgctgctaccggcgcgcattccttcgaagaagtgcaactggttcagagcggagccgagctgaagaaacctggggccagcgtgaaggtgtcctgtaaagccagcggctacacctttaccgactactacatgaaatgggtccgacaggccccaggccagggactcgaatggatcggcgatattatccccagcaacggggccaccttctacaaccagaaattcaagggccgcgtgaccatcaccgtggacaagagcacaagcaccgcctacatggaactgagcagcctgagaagcgaggacaccgccgtgtattattgcgccagaagccatctgctgcgggccagttggttcgcctattggggacagggaaccctggtcaccgttagctctacgcgtgaggacctgaagaacgtgttcccacctgaggtggccgtgttcgagcctagcgaggccgagatcagccacacccagaaagccaccctcgtgtgcctggctaccggcttctaccccgaccatgtggaactgtcttggtgggtcaacggcaaagaggtgcacagcggcgtgtgtaccgacccccagccactgaaagaacagcccgccctgaacgacagccggtactgcctgagcagcagactgagagtgtccgccaccttctggcagaacccccggaaccacttcagatgccaggtgcagttctacggcctgagcgagaacgacgagtggacccaggacagagccaagcccgtgacccagatcgtgtctgccgaagcctggggcagagccgatgatgtgattaagatccactggcaggaaaagaagtccaacaccatcctgggcagccaggaaggcaacaccatgaagaccaacgacacctacatgaagttcagctggctgaccgtgcccgagaagtccctggacaaagaacacagatgcatcgtgcggcacgaaaacaacaagaacggcgtggaccaggaaatcatcttcccacccatcaagaccgatgtgattacaatggaccccaaggacaactgctccaaggacgccaacgataccctgctgctccagctgaccaacaccagcgcctactacatgtacttgttgctgctgctgaagtccgtggtgtacttcgccatcatcacatgctgcctgctgcggagaaccgccttctgctgcaacggcgagaagtct

SEQ ID NO: 7318 - DNA, 2196 bp, synthetic construct
  source 1..2196: mol_type = other DNA
atggccttaccagtgaccgccttgctcctgccgctggccttgctgctccacgccgccaggccggacttcgtgatgacacagagccctgatagcctggccgtgtctctcggcgagcgagtgaccatgagctgcaagtctagccagagcctgctgaacagcggcaaccagaagaactacctgacctggtatcagcagaagcccggccagcctcctaagctgctgatctactgggccagcaccagagaaagcggcgtgcccgatagattttctggctctggcagcggcaccgacttcaccctgacaatttctagcctgcaagccgaggacgtggccgtgtactactgccagaacgactacagctacccctacaccttcggccagggcaccaagctggaaatcaaactcgagatccagaaccctgatcctgccgtgtaccagctgcgggatagcaagagcagcgacaagagcgtgtgtctgttcaccgacttcgacagccagaccaacgtgtcccagagcaaggactccgacgtgtacatcaccgataagtgcgtgctggacatgcggagcatggacttcaagagcaactccgccgtggcctggtccaacaagtccgatttcgcctgcgccaacgccttcaacaacagcattatccccgaggacacattcttcccaagccccgagagcagcgactccaccgaccacgtgaagcccaaagagacagagaacaccaagcagcccagcaagagctgccacaagcccaaggccatcgtgcacaccgagaaagtgaacatgatgagcctgaccgtgctgggcctgcggatgctgttcgccaaaaccgtggccgtgaacttcctgctgaccgccaagctgttcttcctccgcgccaagagaagcggatctggcgtgaagcagaccctgaatttcgacctgctgaagctggctggcgacgtggaatccaacccaggccctactagtatggactggatttggcgcatccttttccttgtcggcgctgctaccggcgcgcattccttcgaacaagtgcaactggttcagagcggagccgagctgaagaaacctggggccagcgtgaaggtgtcctgtaaagccagcggctacacctttaccgactactacatgaaatgggtccgacaggccccaggccagggactcgaatggatcggcgatattatccccagcaacggggccaccttctacaaccagaaattcaagggccgcgtgaccatcaccgtggacaagagcacaagcaccgcctacatggaactgagcagcctgagaagcgaggacaccgccgtgtattattgcgccagaagccatctgctgcgggccagttggttcgcctattggggacagggaaccctggtcaccgttagctctacgcgtgaggacctgaagaacgtgttcccacctgaggtggccgtgttcgagcctagcgaggccgagatcagccacacccagaaagccaccctcgtgtgcctggctaccggcttctaccccgaccatgtggaactgtcttggtgggtcaacggcaaagaggtgcacagcggcgtgtgtaccgacccccagccactgaaagaacagcccgccctgaacgacagccggtactgcctgagcagcagactgagagtgtccgccaccttctggcagaacccccggaaccacttcagatgccaggtgcagttctacggcctgagcgagaacgacgagtggacccaggacagagccaagcccgtgacccagatcgtgtctgccgaagcctggggcagagccgatgatgtgattaagatccactggcaggaaaagaagtccaacaccatcctgggcagccaggaaggcaacaccatgaagaccaacgacacctacatgaagttcagctggctgaccgtgcccgagaagtccctggacaaagaacacagatgcatcgtgcggcacgaaaacaacaagaacggcgtggaccaggaaatcatcttcccacccatcaagaccgatgtgattacaatggaccccaaggacaactgctccaaggacgccaacgataccctgctgctccagctgaccaacaccagcgcctactacatgtacttgttgctgctgctgaagtccgtggtgtacttcgccatcatcacatgctgcctgctgcggagaaccgccttctgctgcaacggcgagaagtct

SEQ ID NO: 7319 - DNA, 2166 bp, synthetic construct
  source 1..2166: mol_type = other DNA
atggccttaccagtgaccgccttgctcctgccgctggccttgctgctccacgccgccaggccggacgtgcagatcacacagagccctagctacctggctgcctctcctggcgagacaatcaccatcaactgtcgggccagcaagagcatcagcaaggacctggcctggtatcaagagaagcccggcaagaccaacaagctgctgatctacagcggcagcacactccagtctggcatccccagcagattttccggctctggcagcggcaccgatttcaccctgaccataagcagcctggaacctgaggacttcgccatgtactactgccagcagcacaacaagtacccctacacctttggcggaggcaccaagctggaaatcaagagactcgagatccagaaccctgatcctgccgtgtaccagctgcgggatagcaagagcagcgacaagagcgtgtgtctgttcaccgacttcgacagccagaccaacgtgtcccagagcaaggactccgacgtgtacatcaccgataagtgcgtgctggacatgcggagcatggacttcaagagcaactccgccgtggcctggtccaacaagtccgatttcgcctgcgccaacgccttcaacaacagcattatccccgaggacacattcttcccaagccccgagagcagcgactccaccgaccacgtgaagcccaaagagacagagaacaccaagcagcccagcaagagctgccacaagcccaaggccatcgtgcacaccgagaaagtgaacatgatgagcctgaccgtgctgggcctgcggatgctgttcgccaaaaccgtggccgtgaacttcctgctgaccgccaagctgttcttcctccgcgccaagagaagcggatctggcgtgaagcagaccctgaatttcgacctgctgaagctggctggcgacgtggaatccaacccaggccctactagtatggactggatttggcgcatccttttccttgtcggcgctgctaccggcgcgcattccttcgaacaagttcaactgcaacagcctggggccgagcttgttagacctggcgcttctgtgaagctgagctgcaaggccagcggctacaccttcaccagctactggatgaactgggtcaagcagcggcctgaccagggcctcgaatggatcggcagaatcgacccctacgacagcgagacacactacaaccagaagttcaaggacaaggccatcctgaccgtggacaagagcagctccaccgcctacatgcaactgagcagcctgacctctgaggatagcgccgtgtactattgcgccagaggcaactgggacgactattggggccagggcacaaccctgacagtgtctagtacgcgtgaggacctgaagaacgtgttcccacctgaggtggccgtgttcgagcctagcgaggccgagatcagccacacccagaaagccaccctcgtgtgcctggctaccggcttctaccccgaccatgtggaactgtcttggtgggtcaacggcaaagaggtgcacagcggcgtgtgtaccgacccccagccactgaaagaacagcccgccctgaacgacagccggtactgcctgagcagcagactgagagtgtccgccaccttctggcagaacccccggaaccacttcagatgccaggtgcagttctacggcctgagcgagaacgacgagtggacccaggacagagccaagcccgtgacccagatcgtgtctgccgaagcctggggcagagccgatgatgtgattaagatccactggcaggaaaagaagtccaacaccatcctgggcagccaggaaggcaacaccatgaagaccaacgacacctacatgaagttcagctggctgaccgtgcccgagaagtccctggacaaagaacacagatgcatcgtgcggcacgaaaacaacaagaacggcgtggaccaggaaatcatcttcccacccatcaagaccgatgtgattacaatggaccccaaggacaactgctccaaggacgccaacgataccctgctgctccagctgaccaacaccagcgcctactacatgtacttgttgctgctgctgaagtccgtggtgtacttcgccatcatcacatgctgcctgctgcggagaaccgccttctgctgcaacggcgagaagtct

SEQ ID NO: 7320 - DNA, 2172 bp, synthetic construct
  source 1..2172: mol_type = other DNA
atggccttaccagtgaccgccttgctcctgccgctggccttgctgctccacgccgccaggccggagatcgtgctgacacagagccctaccagcatgacagcctctccaggcgagcaagtgaccatcacctgtagagccagcagcagcatcaactacatgcactggtatcagcagaagcctggcgcaagccccagaccttggatctacgagacaagcaagctggcctccggcgtgcccgatagattttctggatctgccagcggcaccagctacagcctgaccatcaacaacatggaagccgaggacgccgccacctactactgccagcagtggaattacccctcctggacctttggcggaggcaccaagctggaacttaaactcgagatccagaaccctgatcctgccgtgtaccagctgcgggatagcaagagcagcgacaagagcgtgtgtctgttcaccgacttcgacagccagaccaacgtgtcccagagcaaggactccgacgtgtacatcaccgataagtgcgtgctggacatgcggagcatggacttcaagagcaactccgccgtggcctggtccaacaagtccgatttcgcctgcgccaacgccttcaacaacagcattatccccgaggacacattcttcccaagccccgagagcagcgactccaccgaccacgtgaagcccaaagagacagagaacaccaagcagcccagcaagagctgccacaagcccaaggccatcgtgcacaccgagaaagtgaacatgatgagcctgaccgtgctgggcctgcggatgctgttcgccaaaaccgtggccgtgaacttcctgctgaccgccaagctgttcttcctccgcgccaagagaagcggatctggcgtgaagcagaccctgaatttcgacctgctgaagctggctggcgacgtggaatccaacccaggccctactagtatggactggatttggcgcatccttttccttgtcggcgctgctaccggcgcgcattccttcgaagaagtgcagctcgttgagtctggtggcggactggttcagcctggaagaagcctgaagctgagctgtgccgccagcggcttcaccttcagcgactacaatatggcctgggtccgacaggcccctaagaaaggactggaatgggtcgccaccatcctgtacgatggcggcagaacctactaccggggcagcgtgaagggcagattcaccatcagcagagacaacgccaagagcaccctgtacctgcggatggactctctgagaagcgaggataccgccacatattactgtgccacacacagccggggcaccgactactttgattattggggccagggcgtgatggttaccgtgtctagtacgcgtgaggacctgaagaacgtgttcccacctgaggtggccgtgttcgagcctagcgaggccgagatcagccacacccagaaagccaccctcgtgtgcctggctaccggcttctaccccgaccatgtggaactgtcttggtgggtcaacggcaaagaggtgcacagcggcgtgtgtaccgacccccagccactgaaagaacagcccgccctgaacgacagccggtactgcctgagcagcagactgagagtgtccgccaccttctggcagaacccccggaaccacttcagatgccaggtgcagttctacggcctgagcgagaacgacgagtggacccaggacagagccaagcccgtgacccagatcgtgtctgccgaagcctggggcagagccgatgatgtgattaagatccactggcaggaaaagaagtccaacaccatcctgggcagccaggaaggcaacaccatgaagaccaacgacacctacatgaagttcagctggctgaccgtgcccgagaagtccctggacaaagaacacagatgcatcgtgcggcacgaaaacaacaagaacggcgtggaccaggaaatcatcttcccacccatcaagaccgatgtgattacaatggaccccaaggacaactgctccaaggacgccaacgataccctgctgctccagctgaccaacaccagcgcctactacatgtacttgttgctgctgctgaagtccgtggtgtacttcgccatcatcacatgctgcctgctgcggagaaccgccttctgctgcaacggcgagaagtct

SEQ ID NO: 7321 - DNA, 2199 bp, synthetic construct
  source 1..2199: mol_type = other DNA
atggccttaccagtgaccgccttgctcctgccgctggccttgctgctccacgccgccaggccggacatcgtgatgacacagagcccttctagcctggccgtgtctgagggcgagacagtgaccatcaactgcaagagcagccagagcttcctgtctagcggcgacggcaagaattacgtggcctggtatcagtacaagcccggacagagccccaagctgctgatctactgggccagcacaagacagagcggcgtgcccgatagattcatcggctctggcagcggcaccgacttcaccctgacaatctctacagtgcaggccgaggacctggctatctactactgccagcagtattacgacacccctctgacctttggctccggcaccaagctggaaatcaaactcgagatccagaaccctgatcctgccgtgtaccagctgcgggatagcaagagcagcgacaagagcgtgtgtctgttcaccgacttcgacagccagaccaacgtgtcccagagcaaggactccgacgtgtacatcaccgataagtgcgtgctggacatgcggagcatggacttcaagagcaactccgccgtggcctggtccaacaagtccgatttcgcctgcgccaacgccttcaacaacagcattatccccgaggacacattcttcccaagccccgagagcagcgactccaccgaccacgtgaagcccaaagagacagagaacaccaagcagcccagcaagagctgccacaagcccaaggccatcgtgcacaccgagaaagtgaacatgatgagcctgaccgtgctgggcctgcggatgctgttcgccaaaaccgtggccgtgaacttcctgctgaccgccaagctgttcttcctccgcgccaagagaagcggatctggcgtgaagcagaccctgaatttcgacctgctgaagctggctggcgacgtggaatccaacccaggccctactagtatggactggatttggcgcatccttttccttgtcggcgctgctaccggcgcgcattccttcgaagaagtgaagctgcaagagtctggccccagcctggtgcagagtagccaaacactgagcctgacctgtaccgtgtccggctttagcctgaccagctaccacatccactgggtccgacagacccctggcaaaggactggaatggatgggcgtgatgtggagcgacggcgacaccagctataacagcgccctgaagtcccggctgagcatcagcagagatacaagccagagccaggtgttcctgaagatgaacagcctccagaccgaggacaccgccacctactattgtgccagaggctactacagcagctacctgtacctttggttcgcctattggggccagggcaccctggttacagtcagctctacgcgtgaggacctgaagaacgtgttcccacctgaggtggccgtgttcgagcctagcgaggccgagatcagccacacccagaaagccaccctcgtgtgcctggctaccggcttctaccccgaccatgtggaactgtcttggtgggtcaacggcaaagaggtgcacagcggcgtgtgtaccgacccccagccactgaaagaacagcccgccctgaacgacagccggtactgcctgagcagcagactgagagtgtccgccaccttctggcagaacccccggaaccacttcagatgccaggtgcagttctacggcctgagcgagaacgacgagtggacccaggacagagccaagcccgtgacccagatcgtgtctgccgaagcctggggcagagccgatgatgtgattaagatccactggcaggaaaagaagtccaacaccatcctgggcagccaggaaggcaacaccatgaagaccaacgacacctacatgaagttcagctggctgaccgtgcccgagaagtccctggacaaagaacacagatgcatcgtgcggcacgaaaacaacaagaacggcgtggaccaggaaatcatcttcccacccatcaagaccgatgtgattacaatggaccccaaggacaactgctccaaggacgccaacgataccctgctgctccagctgaccaacaccagcgcctactacatgtacttgttgctgctgctgaagtccgtggtgtacttcgccatcatcacatgctgcctgctgcggagaaccgccttctgctgcaacggcgagaagtct

SEQ ID NO: 7322 - DNA, 2211 bp, synthetic construct
  source 1..2211: mol_type = other DNA
atggccttaccagtgaccgccttgctcctgccgctggccttgctgctccacgccgccaggccggacgtgctgatgacccagacacctgtgtctctgccagtgtctctcggaggccaggtgtccatctcctgtagaagcagccagagcctggtgcactccgacggcgatacctacctgcactggtatctccagaagcctggacagagccctcagctcctgatctaccgggtgtccaacagattcagcggcgtgcccgatagattttccggcagcggctctggcaccgacttcaccctgaagatcagcagagtggaacccgaggacctgggcctgtactactgtctccagaccacacacttcccaccttggacctttggcggaggcaccaagctggaaatgaaactcgagatccagaaccctgatcctgccgtgtaccagctgcgggatagcaagagcagcgacaagagcgtgtgtctgttcaccgacttcgacagccagaccaacgtgtcccagagcaaggactccgacgtgtacatcaccgataagtgcgtgctggacatgcggagcatggacttcaagagcaactccgccgtggcctggtccaacaagtccgatttcgcctgcgccaacgccttcaacaacagcattatccccgaggacacattcttcccaagccccgagagcagcgactccaccgaccacgtgaagcccaaagagacagagaacaccaagcagcccagcaagagctgccacaagcccaaggccatcgtgcacaccgagaaagtgaacatgatgagcctgaccgtgctgggcctgcggatgctgttcgccaaaaccgtggccgtgaacttcctgctgaccgccaagctgttcttcctccgcgccaagagaagcggatctggcgtgaagcagaccctgaatttcgacctgctgaagctggctggcgacgtggaatccaacccaggccctactagtatggactggatttggcgcatccttttccttgtcggcgctgctaccggcgcgcattccttcgaacaggttcagctccagcagtctggacccgagcttagaaggccaggatctagcgtcagactgagctgcaaggccagcggctaccggatcaaggacttcctgatccactggattaagaacagacccgagcacggcctggaatggatcggatggattgaccctgaggacggcgagactaagtacgcccagaagttccagaccaaggccacactgaccgccgacacctctagcaacaccgcctacatgcaactgagcagcctgaccagcgaggacaccgccacctacttttgtgctagatggggcgacgtgtactacggcctgatgagaggccatgtgatggatgcctggggccagggaacaagcgtgacagtctcttctacgcgtgaggacctgaagaacgtgttcccacctgaggtggccgtgttcgagcctagcgaggccgagatcagccacacccagaaagccaccctcgtgtgcctggctaccggcttctaccccgaccatgtggaactgtcttggtgggtcaacggcaaagaggtgcacagcggcgtgtgtaccgacccccagccactgaaagaacagcccgccctgaacgacagccggtactgcctgagcagcagactgagagtgtccgccaccttctggcagaacccccggaaccacttcagatgccaggtgcagttctacggcctgagcgagaacgacgagtggacccaggacagagccaagcccgtgacccagatcgtgtctgccgaagcctggggcagagccgatgatgtgattaagatccactggcaggaaaagaagtccaacaccatcctgggcagccaggaaggcaacaccatgaagaccaacgacacctacatgaagttcagctggctgaccgtgcccgagaagtccctggacaaagaacacagatgcatcgtgcggcacgaaaacaacaagaacggcgtggaccaggaaatcatcttcccacccatcaagaccgatgtgattacaatggaccccaaggacaactgctccaaggacgccaacgataccctgctgctccagctgaccaacaccagcgcctactacatgtacttgttgctgctgctgaagtccgtggtgtacttcgccatcatcacatgctgcctgctgcggagaaccgccttctgctgcaacggcgagaagtct

SEQ ID NO: 7323 - DNA, 2196 bp, synthetic construct
  source 1..2196: mol_type = other DNA
atggccttaccagtgaccgccttgctcctgccgctggccttgctgctccacgccgccaggccggacatcgtgatgacacagagccccgccacactgtcactgtctccaggcgaaagagccacactgagctgtcggagcagcaagagcctccagaacgtgaacggcaacacctacctgtactggttccagcagaagcccggccagtctcctcagctcctgatctacagaatgagcaacctgaacagcggcgtgcccgacagattttctggcagcggaagcggcaccgagttcaccctgaccataagcagcctggaacctgaggacttcgccgtgtactactgtatgcagcacctggaataccccatcaccttcggagccggcaccaagctggaaatcaaactcgagatccagaaccctgatcctgccgtgtaccagctgcgggatagcaagagcagcgacaagagcgtgtgtctgttcaccgacttcgacagccagaccaacgtgtcccagagcaaggactccgacgtgtacatcaccgataagtgcgtgctggacatgcggagcatggacttcaagagcaactccgccgtggcctggtccaacaagtccgatttcgcctgcgccaacgccttcaacaacagcattatccccgaggacacattcttcccaagccccgagagcagcgactccaccgaccacgtgaagcccaaagagacagagaacaccaagcagcccagcaagagctgccacaagcccaaggccatcgtgcacaccgagaaagtgaacatgatgagcctgaccgtgctgggcctgcggatgctgttcgccaaaaccgtggccgtgaacttcctgctgaccgccaagctgttcttcctccgcgccaagagaagcggatctggcgtgaagcagaccctgaatttcgacctgctgaagctggctggcgacgtggaatccaacccaggccctactagtatggactggatttggcgcatccttttccttgtcggcgctgctaccggcgcgcattccttcgaagaagtgcaactggttgaatctggcggcggactggttaagcctggcggatctctgaagctgagctgtgccgccagcggctacacctttaccagctacgtgatgcactgggtccgacaggcccctggcaaaggacttgagtggatcggctacatcaacccctacaacgatggcaccaagtacaacgagaagttccagggcagagtgaccatcagctccgacaagagcatcagcaccgcctacatggaactgagcagcctgagaagcgaggataccgccatgtactattgcgccagaggcacctactactacggcaccagagtgttcgactactggggccagggaaccctggtcacagtctcttctacgcgtgaggacctgaagaacgtgttcccacctgaggtggccgtgttcgagcctagcgaggccgagatcagccacacccagaaagccaccctcgtgtgcctggctaccggcttctaccccgaccatgtggaactgtcttggtgggtcaacggcaaagaggtgcacagcggcgtgtgtaccgacccccagccactgaaagaacagcccgccctgaacgacagccggtactgcctgagcagcagactgagagtgtccgccaccttctggcagaacccccggaaccacttcagatgccaggtgcagttctacggcctgagcgagaacgacgagtggacccaggacagagccaagcccgtgacccagatcgtgtctgccgaagcctggggcagagccgatgatgtgattaagatccactggcaggaaaagaagtccaacaccatcctgggcagccaggaaggcaacaccatgaagaccaacgacacctacatgaagttcagctggctgaccgtgcccgagaagtccctggacaaagaacacagatgcatcgtgcggcacgaaaacaacaagaacggcgtggaccaggaaatcatcttcccacccatcaagaccgatgtgattacaatggaccccaaggacaactgctccaaggacgccaacgataccctgctgctccagctgaccaacaccagcgcctactacatgtacttgttgctgctgctgaagtccgtggtgtacttcgccatcatcacatgctgcctgctgcggagaaccgccttctgctgcaacggcgagaagtct

SEQ ID NO: 7324 - DNA, 2184 bp, synthetic construct
  source 1..2184: mol_type = other DNA
atggccttaccagtgaccgccttgctcctgccgctggccttgctgctccacgccgccaggccggacatccagatgacacagagccctagcagcctgtctgccagcgtgggagacagagtgaccatcacatgcaaggccagcgaccacatcaacaactggctggcctggtatcagcagaagcctggacaggcccctaagctgctgatctacggcgctaccacactggaaacaggcgtgcccagcagattttctggcagcggctctggcaccgactacaccctgacaatatccagcctccagcctgaggacttcgccacctactactgtcagcagagctggaacaccccttggacattcggccagggcaccaagctggaaatcaagagactcgagatccagaaccctgatcctgccgtgtaccagctgcgggatagcaagagcagcgacaagagcgtgtgtctgttcaccgacttcgacagccagaccaacgtgtcccagagcaaggactccgacgtgtacatcaccgataagtgcgtgctggacatgcggagcatggacttcaagagcaactccgccgtggcctggtccaacaagtccgatttcgcctgcgccaacgccttcaacaacagcattatccccgaggacacattcttcccaagccccgagagcagcgactccaccgaccacgtgaagcccaaagagacagagaacaccaagcagcccagcaagagctgccacaagcccaaggccatcgtgcacaccgagaaagtgaacatgatgagcctgaccgtgctgggcctgcggatgctgttcgccaaaaccgtggccgtgaacttcctgctgaccgccaagctgttcttcctccgcgccaagagaagcggatctggcgtgaagcagaccctgaatttcgacctgctgaagctggctggcgacgtggaatccaacccaggccctactagtatggactggatttggcgcatccttttccttgtcggcgctgctaccggcgcgcattccttcgaacaagttcagcttcaacagcctggcgctgagctggtcaaacctggcgcttctgtgaagatgagctgcaaagccagcggctacgccttcagcagctactggatcaactggatgaagcagaaacccggccagggactcgaatggatcggccaaatctatcccggcgacggcgacaccaactacaacggcaagttcaagggcagagccacactgaccgccgatacctctagcagcacagcctacatgcagctgagcagcctgaccagcgaagatagcgccgtgtacttctgtgcccggtccatcacaacagtcgtgggctgcgctatggactattggggccagggaacaagcgtgaccgtgtctagtacgcgtgaggacctgaagaacgtgttcccacctgaggtggccgtgttcgagcctagcgaggccgagatcagccacacccagaaagccaccctcgtgtgcctggctaccggcttctaccccgaccatgtggaactgtcttggtgggtcaacggcaaagaggtgcacagcggcgtgtgtaccgacccccagccactgaaagaacagcccgccctgaacgacagccggtactgcctgagcagcagactgagagtgtccgccaccttctggcagaacccccggaaccacttcagatgccaggtgcagttctacggcctgagcgagaacgacgagtggacccaggacagagccaagcccgtgacccagatcgtgtctgccgaagcctggggcagagccgatgatgtgattaagatccactggcaggaaaagaagtccaacaccatcctgggcagccaggaaggcaacaccatgaagaccaacgacacctacatgaagttcagctggctgaccgtgcccgagaagtccctggacaaagaacacagatgcatcgtgcggcacgaaaacaacaagaacggcgtggaccaggaaatcatcttcccacccatcaagaccgatgtgattacaatggaccccaaggacaactgctccaaggacgccaacgataccctgctgctccagctgaccaacaccagcgcctactacatgtacttgttgctgctgctgaagtccgtggtgtacttcgccatcatcacatgctgcctgctgcggagaaccgccttctgctgcaacggcgagaagtct

SEQ ID NO: 7325 - DNA, 2190 bp, synthetic construct
  source 1..2190: mol_type = other DNA
atggccttaccagtgaccgccttgctcctgccgctggccttgctgctccacgccgccaggccgcagatcgtgctgtctcagtctcctgccatcctgagcgcttccccaggcgagaaagtgaccatgacctgtagagccagcagcagcgtgtcctacatgcactggtatcagcagaagcccggcagcagccctaagccttggatctacgccaccagcaatctggcctctggcgtgccagccagattttctggctctggcagcggcaccagctacagcttcacaatcagcagagtggaagccgaggacgccgccacctactattgtcagcagtggaccttcaatcctcctaccttcggcggaggcacccggctggaaatcaaaagaacagtggctgctctcgagatccagaaccctgatcctgccgtgtaccagctgcgggatagcaagagcagcgacaagagcgtgtgtctgttcaccgacttcgacagccagaccaacgtgtcccagagcaaggactccgacgtgtacatcaccgataagtgcgtgctggacatgcggagcatggacttcaagagcaactccgccgtggcctggtccaacaagtccgatttcgcctgcgccaacgccttcaacaacagcattatccccgaggacacattcttcccaagccccgagagcagcgactccaccgaccacgtgaagcccaaagagacagagaacaccaagcagcccagcaagagctgccacaagcccaaggccatcgtgcacaccgagaaagtgaacatgatgagcctgaccgtgctgggcctgcggatgctgttcgccaaaaccgtggccgtgaacttcctgctgaccgccaagctgttcttcctccgcgccaagagaagcggatctggcgtgaagcagaccctgaatttcgacctgctgaagctggctggcgacgtggaatccaacccaggccctactagtatggactggatttggcgcatccttttccttgtcggcgctgctaccggcgcgcattccttcgaacaggcttatctgcaacagagcggagccgaactcgtcagacctggcgcttctgtgaagatgagctgcaaggccagcggctacaccttcaccagctataatatgcactgggtcaagcagacccctcggcagggactcgaatggatcggcggaatctatcccggcaacggcgacacctcctacaaccagaagttcaagggcaaagccacactgaccgtgggcaagagcagcagcaccgcctatatgcagctcagcagcctgaccagcgaggacagcgccgtgtacttctgcgccagatacgactacaactacgctatggactactggggccagggcaccagcgtgacagttagctctgccagcacgcgtgaggacctgaagaacgtgttcccacctgaggtggccgtgttcgagcctagcgaggccgagatcagccacacccagaaagccaccctcgtgtgcctggctaccggcttctaccccgaccatgtggaactgtcttggtgggtcaacggcaaagaggtgcacagcggcgtgtgtaccgacccccagccactgaaagaacagcccgccctgaacgacagccggtactgcctgagcagcagactgagagtgtccgccaccttctggcagaacccccggaaccacttcagatgccaggtgcagttctacggcctgagcgagaacgacgagtggacccaggacagagccaagcccgtgacccagatcgtgtctgccgaagcctggggcagagccgatgatgtgattaagatccactggcaggaaaagaagtccaacaccatcctgggcagccaggaaggcaacaccatgaagaccaacgacacctacatgaagttcagctggctgaccgtgcccgagaagtccctggacaaagaacacagatgcatcgtgcggcacgaaaacaacaagaacggcgtggaccaggaaatcatcttcccacccatcaagaccgatgtgattacaatggaccccaaggacaactgctccaaggacgccaacgataccctgctgctccagctgaccaacaccagcgcctactacatgtacttgttgctgctgctgaagtccgtggtgtacttcgccatcatcacatgctgcctgctgcggagaaccgccttctgctgcaacggcgagaagtct

SEQ ID NO: 7326 - DNA, 2184 bp, synthetic construct
  source 1..2184: mol_type = other DNA
atggccttaccagtgaccgccttgctcctgccgctggccttgctgctccacgccgccaggccggagatcgtgctgacacagagccctgccaccctgtctctgagccctggcgaaagagccaccctgagctgtagagccagccagagcgtgtccagctacctggcctggtatcagcagaagcccggccaggctccccggctgctgatctacgatgccagcaatagagccaccggcatccccgccagattttccggctctggcagcggcaccgacttcaccctgaccatcagctccctggaacccgaggacttcgccgtgtactactgccagcagcggagcaactggcccatcacattcggccagggcacccggctggaaatcaaactcgagatccagaaccctgatcctgccgtgtaccagctgcgggatagcaagagcagcgacaagagcgtgtgtctgttcaccgacttcgacagccagaccaacgtgtcccagagcaaggactccgacgtgtacatcaccgataagtgcgtgctggacatgcggagcatggacttcaagagcaactccgccgtggcctggtccaacaagtccgatttcgcctgcgccaacgccttcaacaacagcattatccccgaggacacattcttcccaagccccgagagcagcgactccaccgaccacgtgaagcccaaagagacagagaacaccaagcagcccagcaagagctgccacaagcccaaggccatcgtgcacaccgagaaagtgaacatgatgagcctgaccgtgctgggcctgcggatgctgttcgccaaaaccgtggccgtgaacttcctgctgaccgccaagctgttcttcctccgcgccaagagaagcggatctggcgtgaagcagaccctgaatttcgacctgctgaagctggctggcgacgtggaatccaacccaggccctactagtatggactggatttggcgcatccttttccttgtcggcgctgctaccggcgcgcattccttcgaagaggtgcagcttgttgagtctggcggaggactggtgcagcccgatagaagcctgagactgtcttgtgccgccagcggcttcaccttccacgattatgccatgcactgggtccgacaggcccctggcaaaggacttgaatgggtgtccaccatctcttggaacagcggcacaatcggctacgccgactctgtgaagggcagattcaccatcagccgggacaacgccaagaacagcctgtacctccagatgaactccctgagagccgaggacacagccctgtactactgcgccaaggacatccagtacggcaactactactacggcatggacgtgtggggccagggcacaacagtgacagtctcttctacgcgtgaggacctgaagaacgtgttcccacctgaggtggccgtgttcgagcctagcgaggccgagatcagccacacccagaaagccaccctcgtgtgcctggctaccggcttctaccccgaccatgtggaactgtcttggtgggtcaacggcaaagaggtgcacagcggcgtgtgtaccgacccccagccactgaaagaacagcccgccctgaacgacagccggtactgcctgagcagcagactgagagtgtccgccaccttctggcagaacccccggaaccacttcagatgccaggtgcagttctacggcctgagcgagaacgacgagtggacccaggacagagccaagcccgtgacccagatcgtgtctgccgaagcctggggcagagccgatgatgtgattaagatccactggcaggaaaagaagtccaacaccatcctgggcagccaggaaggcaacaccatgaagaccaacgacacctacatgaagttcagctggctgaccgtgcccgagaagtccctggacaaagaacacagatgcatcgtgcggcacgaaaacaacaagaacggcgtggaccaggaaatcatcttcccacccatcaagaccgatgtgattacaatggaccccaaggacaactgctccaaggacgccaacgataccctgctgctccagctgaccaacaccagcgcctactacatgtacttgttgctgctgctgaagtccgtggtgtacttcgccatcatcacatgctgcctgctgcggagaaccgccttctgctgcaacggcgagaagtct

SEQ ID NO: 7327 - DNA, 2169 bp, synthetic construct
  source 1..2169: mol_type = other DNA
atggccttaccagtgaccgccttgctcctgccgctggccttgctgctccacgccgccaggccggacatccagatgacacagagccctagcagcctgtctgccagcgtgggagatagagtgaccatcaactgcaaggccagccaggacatcaacagctacctgagctggttccagcagaagcctggcaaggcccctaagacactgatctaccgggccaacagactggtggatggcgtgccaagcagattttctggcagcggcagcggccaggattacaccctgacaatatccagcctccagcctgaggacttcgccacctactactgcctccagtacgacgagttccctctgacctttggcggaggcaccaaggtggaaatcaaactcgagatccagaaccctgatcctgccgtgtaccagctgcgggatagcaagagcagcgacaagagcgtgtgtctgttcaccgacttcgacagccagaccaacgtgtcccagagcaaggactccgacgtgtacatcaccgataagtgcgtgctggacatgcggagcatggacttcaagagcaactccgccgtggcctggtccaacaagtccgatttcgcctgcgccaacgccttcaacaacagcattatccccgaggacacattcttcccaagccccgagagcagcgactccaccgaccacgtgaagcccaaagagacagagaacaccaagcagcccagcaagagctgccacaagcccaaggccatcgtgcacaccgagaaagtgaacatgatgagcctgaccgtgctgggcctgcggatgctgttcgccaaaaccgtggccgtgaacttcctgctgaccgccaagctgttcttcctccgcgccaagagaagcggatctggcgtgaagcagaccctgaatttcgacctgctgaagctggctggcgacgtggaatccaacccaggccctactagtatggactggatttggcgcatccttttccttgtcggcgctgctaccggcgcgcattccttcgaacaggtgcaactggtgcagtctggggccgaagtgaagaaacctggggcctctgtgaaggtgtcctgcaaagccagcggctacacctttaccaactacgacatcaactgggtccgacaggctccaggccaaggactggaatggatcggctggatctatcctggcgacggcagcaccaagtacaacgagaagttcaaggccaaggccacactgaccgccgataccagcacaagcaccgcctacatggaactgcggagcctgagaagcgacgacaccgccgtgtactattgtgcctccggctacgaggacgctatggactattggggccagggcaccaccgtgacagtgtctagtacgcgtgaggacctgaagaacgtgttcccacctgaggtggccgtgttcgagcctagcgaggccgagatcagccacacccagaaagccaccctcgtgtgcctggctaccggcttctaccccgaccatgtggaactgtcttggtgggtcaacggcaaagaggtgcacagcggcgtgtgtaccgacccccagccactgaaagaacagcccgccctgaacgacagccggtactgcctgagcagcagactgagagtgtccgccaccttctggcagaacccccggaaccacttcagatgccaggtgcagttctacggcctgagcgagaacgacgagtggacccaggacagagccaagcccgtgacccagatcgtgtctgccgaagcctggggcagagccgatgatgtgattaagatccactggcaggaaaagaagtccaacaccatcctgggcagccaggaaggcaacaccatgaagaccaacgacacctacatgaagttcagctggctgaccgtgcccgagaagtccctggacaaagaacacagatgcatcgtgcggcacgaaaacaacaagaacggcgtggaccaggaaatcatcttcccacccatcaagaccgatgtgattacaatggaccccaaggacaactgctccaaggacgccaacgataccctgctgctccagctgaccaacaccagcgcctactacatgtacttgttgctgctgctgaagtccgtggtgtacttcgccatcatcacatgctgcctgctgcggagaaccgccttctgctgcaacggcgagaagtct

SEQ ID NO: 7328 - DNA, 2175 bp, synthetic construct
  source 1..2175: mol_type = other DNA
atggccttaccagtgaccgccttgctcctgccgctggccttgctgctccacgccgccaggccggacatcgtgatgacccagacacctctgagcctgagcgtgacacctggacagcctgccagcattagctgcaagagcagccagtctctgctggacggcgacggcaagacctacctgaattggctgctccagaagcctggacagagccctcagcggctgatctacctggtgtccaagctggatagcggcgtgcccgatagattttctggcagcggctctggcaccgacttcaccctgaagatcagcagagtggaagccgaggacgtgggcgtgtactactgttggcagggcacacacttccccagaacattcggccagggcacaaagctggaaatcaaactcgagatccagaaccctgatcctgccgtgtaccagctgcgggatagcaagagcagcgacaagagcgtgtgtctgttcaccgacttcgacagccagaccaacgtgtcccagagcaaggactccgacgtgtacatcaccgataagtgcgtgctggacatgcggagcatggacttcaagagcaactccgccgtggcctggtccaacaagtccgatttcgcctgcgccaacgccttcaacaacagcattatccccgaggacacattcttcccaagccccgagagcagcgactccaccgaccacgtgaagcccaaagagacagagaacaccaagcagcccagcaagagctgccacaagcccaaggccatcgtgcacaccgagaaagtgaacatgatgagcctgaccgtgctgggcctgcggatgctgttcgccaaaaccgtggccgtgaacttcctgctgaccgccaagctgttcttcctccgcgccaagagaagcggatctggcgtgaagcagaccctgaatttcgacctgctgaagctggctggcgacgtggaatccaacccaggccctactagtatggactggatttggcgcatccttttccttgtcggcgctgctaccggcgcgcattccttcgaacaagtgcaactggttcagagcggagccgaagtgaagaaacctggggcctctgtgaaggtgtcctgcaaggccagcggctacaccttcaaggacacctacatccactgggtccgacaggcccctggacaaggacttgagtggatgggcagaatcgaccccgccaacggcaacaccaaatacgaccccaagttccagggcagagtgaccatgaccagagacaccagcatcagcaccgcctacatggaactgagccggctgagatccgatgacaccgccgtgtactattgcgctagaagaggcggagtggattggggccagggaacactggttaccgtgtctagtacgcgtgaggacctgaagaacgtgttcccacctgaggtggccgtgttcgagcctagcgaggccgagatcagccacacccagaaagccaccctcgtgtgcctggctaccggcttctaccccgaccatgtggaactgtcttggtgggtcaacggcaaagaggtgcacagcggcgtgtgtaccgacccccagccactgaaagaacagcccgccctgaacgacagccggtactgcctgagcagcagactgagagtgtccgccaccttctggcagaacccccggaaccacttcagatgccaggtgcagttctacggcctgagcgagaacgacgagtggacccaggacagagccaagcccgtgacccagatcgtgtctgccgaagcctggggcagagccgatgatgtgattaagatccactggcaggaaaagaagtccaacaccatcctgggcagccaggaaggcaacaccatgaagaccaacgacacctacatgaagttcagctggctgaccgtgcccgagaagtccctggacaaagaacacagatgcatcgtgcggcacgaaaacaacaagaacggcgtggaccaggaaatcatcttcccacccatcaagaccgatgtgattacaatggaccccaaggacaactgctccaaggacgccaacgataccctgctgctccagctgaccaacaccagcgcctactacatgtacttgttgctgctgctgaagtccgtggtgtacttcgccatcatcacatgctgcctgctgcggagaaccgccttctgctgcaacggcgagaagtct

SEQ ID NO: 7329 - DNA, 2178 bp, synthetic construct
  source 1..2178: mol_type = other DNA
atggccttaccagtgaccgccttgctcctgccgctggccttgctgctccacgccgccaggccggacatccagatgacacagagccctagcagcctgtctgccagcgtgggagacagagtgaccatcacatgcaaggccagccaggatgtgtctacagccgtggcctggttccagcagaagcctggaaaagcccctaagctgctgatctacagccccagctacagatacaccggcgtgcccagcagattttctggcagcggctctggcaccgacttcaccctgacaatatccagcctccagcctgaggacttcacctactactgccagcagctctacagcaccccttacacattcggccagggcaccaaggtggaaatcaaactcgagatccagaaccctgatcctgccgtgtaccagctgcgggatagcaagagcagcgacaagagcgtgtgtctgttcaccgacttcgacagccagaccaacgtgtcccagagcaaggactccgacgtgtacatcaccgataagtgcgtgctggacatgcggagcatggacttcaagagcaactccgccgtggcctggtccaacaagtccgatttcgcctgcgccaacgccttcaacaacagcattatccccgaggacacattcttcccaagccccgagagcagcgactccaccgaccacgtgaagcccaaagagacagagaacaccaagcagcccagcaagagctgccacaagcccaaggccatcgtgcacaccgagaaagtgaacatgatgagcctgaccgtgctgggcctgcggatgctgttcgccaaaaccgtggccgtgaacttcctgctgaccgccaagctgttcttcctccgcgccaagagaagcggatctggcgtgaagcagaccctgaatttcgacctgctgaagctggctggcgacgtggaatccaacccaggccctactagtatggactggatttggcgcatccttttccttgtcggcgctgctaccggcgcgcattccttcgaagaagtgcaactggttcagagcggagccgaagtgaagaaacctggggcctctgtgaaggtgtcctgcaaagccagcggctacacctttaccgactactacctggacgtggtcgtgcggcaagctcctggacaaggactggaatggatcggcagagtgaacccctacaacggcggcaccatctacaaccagaaattcaagggaagagtgaccctgaccagagacaccagcacctccacagcctacctggaactgagcagcctgagaagcgaagataccgccgtgtactactgcgccagggaccactacagatatgaccctctgctggactactggggccagggaaccctggttacagtgtctagtacgcgtgaggacctgaagaacgtgttcccacctgaggtggccgtgttcgagcctagcgaggccgagatcagccacacccagaaagccaccctcgtgtgcctggctaccggcttctaccccgaccatgtggaactgtcttggtgggtcaacggcaaagaggtgcacagcggcgtgtgtaccgacccccagccactgaaagaacagcccgccctgaacgacagccggtactgcctgagcagcagactgagagtgtccgccaccttctggcagaacccccggaaccacttcagatgccaggtgcagttctacggcctgagcgagaacgacgagtggacccaggacagagccaagcccgtgacccagatcgtgtctgccgaagcctggggcagagccgatgatgtgattaagatccactggcaggaaaagaagtccaacaccatcctgggcagccaggaaggcaacaccatgaagaccaacgacacctacatgaagttcagctggctgaccgtgcccgagaagtccctggacaaagaacacagatgcatcgtgcggcacgaaaacaacaagaacggcgtggaccaggaaatcatcttcccacccatcaagaccgatgtgattacaatggaccccaaggacaactgctccaaggacgccaacgataccctgctgctccagctgaccaacaccagcgcctactacatgtacttgttgctgctgctgaagtccgtggtgtacttcgccatcatcacatgctgcctgctgcggagaaccgccttctgctgcaacggcgagaagtct

SEQ ID NO: 7330 - DNA, 2196 bp, synthetic construct
  source 1..2196: mol_type = other DNA
atggccttaccagtgaccgccttgctcctgccgctggccttgctgctccacgccgccaggccggacatccagatgacacagagccctagcagcctgtctgccagcgtgggagacagagtgaccatcacctgtagagccagccagagcgtgtccaccagcagctacaactacatgcactggtatcagcagaagcccggcaagcctcctaagctgctgattaagtacgccagcaacctggaaagcggcgtgcccagcagattttctggcagcggctctggcaccgacttcaccctgacaatatccagcctccagcctgaggacttcgccacctactactgtcagcactcctgggagatccctctgacattcggccagggcaccaaggtggaaatcaaactcgagatccagaaccctgatcctgccgtgtaccagctgcgggatagcaagagcagcgacaagagcgtgtgtctgttcaccgacttcgacagccagaccaacgtgtcccagagcaaggactccgacgtgtacatcaccgataagtgcgtgctggacatgcggagcatggacttcaagagcaactccgccgtggcctggtccaacaagtccgatttcgcctgcgccaacgccttcaacaacagcattatccccgaggacacattcttcccaagccccgagagcagcgactccaccgaccacgtgaagcccaaagagacagagaacaccaagcagcccagcaagagctgccacaagcccaaggccatcgtgcacaccgagaaagtgaacatgatgagcctgaccgtgctgggcctgcggatgctgttcgccaaaaccgtggccgtgaacttcctgctgaccgccaagctgttcttcctccgcgccaagagaagcggatctggcgtgaagcagaccctgaatttcgacctgctgaagctggctggcgacgtggaatccaacccaggccctactagtatggactggatttggcgcatccttttccttgtcggcgctgctaccggcgcgcattccttcgaagaagtgcaactggttcagagcggagccgaagtgaagaaacctggggcctctgtgaaggtgtcctgcaaggccagcggctacagcttcaccgactattatatgcactgggtccgacaggctccaggccagggacttgagtggatcggcagaatcaacccctacaacggcgctgccttctacagccagaacttcaaggatagagtgaccctgaccgtggacaccagcaccagcacagcctacctggaactgagcagcctgagaagcgaggacaccgccgtgtactactgcgccattgagagaggcgctgacctggaaggctacgctatggattattggggccagggaaccctggtcaccgtgtcatctacgcgtgaggacctgaagaacgtgttcccacctgaggtggccgtgttcgagcctagcgaggccgagatcagccacacccagaaagccaccctcgtgtgcctggctaccggcttctaccccgaccatgtggaactgtcttggtgggtcaacggcaaagaggtgcacagcggcgtgtgtaccgacccccagccactgaaagaacagcccgccctgaacgacagccggtactgcctgagcagcagactgagagtgtccgccaccttctggcagaacccccggaaccacttcagatgccaggtgcagttctacggcctgagcgagaacgacgagtggacccaggacagagccaagcccgtgacccagatcgtgtctgccgaagcctggggcagagccgatgatgtgattaagatccactggcaggaaaagaagtccaacaccatcctgggcagccaggaaggcaacaccatgaagaccaacgacacctacatgaagttcagctggctgaccgtgcccgagaagtccctggacaaagaacacagatgcatcgtgcggcacgaaaacaacaagaacggcgtggaccaggaaatcatcttcccacccatcaagaccgatgtgattacaatggaccccaaggacaactgctccaaggacgccaacgataccctgctgctccagctgaccaacaccagcgcctactacatgtacttgttgctgctgctgaagtccgtggtgtacttcgccatcatcacatgctgcctgctgcggagaaccgccttctgctgcaacggcgagaagtct

SEQ ID NO: 7331 - DNA, 2190 bp, synthetic construct
  source 1..2190: mol_type = other DNA
atggccttaccagtgaccgccttgctcctgccgctggccttgctgctccacgccgccaggccggagatcgtgctgacacagtctccagccacactgagcgcttctccaggcgagagagtgaccctgacctgtagagccagcagcaacgtgatctccagctacgtgcactggtatcagcagaagcctggcagcagccccagactgtttctgtacagcaccagcaatctggcctccggcgtgccaagcagattttctggctctggcagcggcaccgacttcacctttaccatctctagcctggaagccgaggacgccgccacctactactgtcagcagtacagcggctaccctctgaccttcggccagggcacaagactggaaatcaaactcgagatccagaaccctgatcctgccgtgtaccagctgcgggatagcaagagcagcgacaagagcgtgtgtctgttcaccgacttcgacagccagaccaacgtgtcccagagcaaggactccgacgtgtacatcaccgataagtgcgtgctggacatgcggagcatggacttcaagagcaactccgccgtggcctggtccaacaagtccgatttcgcctgcgccaacgccttcaacaacagcattatccccgaggacacattcttcccaagccccgagagcagcgactccaccgaccacgtgaagcccaaagagacagagaacaccaagcagcccagcaagagctgccacaagcccaaggccatcgtgcacaccgagaaagtgaacatgatgagcctgaccgtgctgggcctgcggatgctgttcgccaaaaccgtggccgtgaacttcctgctgaccgccaagctgttcttcctccgcgccaagagaagcggatctggcgtgaagcagaccctgaatttcgacctgctgaagctggctggcgacgtggaatccaacccaggccctactagtatggactggatttggcgcatccttttccttgtcggcgctgctaccggcgcgcattccttcgaacaagttcagctgcaagagtctggccctggcctggtcaagcctagcgaaacactgagcctgacctgcgccgtgtctggctactctatcaccagcgcctactattggaactggatcagacagcctcctggcaaaggactggaatggatcggctacatcagctacgacggcagaaacaactacaaccccagcctgaagaaccggatcaccatcaatcccgacaccagcaagaaccagttcagcctccagctgaacagcgtgacccctgaggataccgccgtgtactactgtgccagagaaggcgactacgacgtgggcaactactacgctatggactactggggccagggaaccctggtcacagtctcttctacgcgtgaggacctgaagaacgtgttcccacctgaggtggccgtgttcgagcctagcgaggccgagatcagccacacccagaaagccaccctcgtgtgcctggctaccggcttctaccccgaccatgtggaactgtcttggtgggtcaacggcaaagaggtgcacagcggcgtgtgtaccgacccccagccactgaaagaacagcccgccctgaacgacagccggtactgcctgagcagcagactgagagtgtccgccaccttctggcagaacccccggaaccacttcagatgccaggtgcagttctacggcctgagcgagaacgacgagtggacccaggacagagccaagcccgtgacccagatcgtgtctgccgaagcctggggcagagccgatgatgtgattaagatccactggcaggaaaagaagtccaacaccatcctgggcagccaggaaggcaacaccatgaagaccaacgacacctacatgaagttcagctggctgaccgtgcccgagaagtccctggacaaagaacacagatgcatcgtgcggcacgaaaacaacaagaacggcgtggaccaggaaatcatcttcccacccatcaagaccgatgtgattacaatggaccccaaggacaactgctccaaggacgccaacgataccctgctgctccagctgaccaacaccagcgcctactacatgtacttgttgctgctgctgaagtccgtggtgtacttcgccatcatcacatgctgcctgctgcggagaaccgccttctgctgcaacggcgagaagtct

SEQ ID NO: 7332 - DNA, 2190 bp, synthetic construct
  source 1..2190: mol_type = other DNA
atggccttaccagtgaccgccttgctcctgccgctggccttgctgctccacgccgccaggccggagatcgtgctgacacagtctcccgccacactgtcactgtctccaggcgaaagagccacactgagctgtagagccagcagcaacgtgatctccagctacgtgcactggtatcagcagaagcctggacaggcccctcggctgctgatctacagcacaagcaatctggcctctggcatccccgccagattttctggctctggaagcggcaccgacttcaccctgaccataagcagcctggaacctgaggacttcgccgtgtactactgccagcagtatagcggctaccctctgaccttcggccagggcacaagactggaaatcaaactcgagatccagaaccctgatcctgccgtgtaccagctgcgggatagcaagagcagcgacaagagcgtgtgtctgttcaccgacttcgacagccagaccaacgtgtcccagagcaaggactccgacgtgtacatcaccgataagtgcgtgctggacatgcggagcatggacttcaagagcaactccgccgtggcctggtccaacaagtccgatttcgcctgcgccaacgccttcaacaacagcattatccccgaggacacattcttcccaagccccgagagcagcgactccaccgaccacgtgaagcccaaagagacagagaacaccaagcagcccagcaagagctgccacaagcccaaggccatcgtgcacaccgagaaagtgaacatgatgagcctgaccgtgctgggcctgcggatgctgttcgccaaaaccgtggccgtgaacttcctgctgaccgccaagctgttcttcctccgcgccaagagaagcggatctggcgtgaagcagaccctgaatttcgacctgctgaagctggctggcgacgtggaatccaacccaggccctactagtatggactggatttggcgcatccttttccttgtcggcgctgctaccggcgcgcattccttcgaagaagtgcaactggtggaaagtggcggcggactggtgcaacctggaagaagcctgagactgtcctgtgccgccagcggctactctatcacaagcgcctactactggaactgggtccgacaggctcctggcaaaggactggaatgggtgtcctacatcagctacgacggcagaaacaactacaaccccagcctgaagaaccgcttcaccatcagccgggacaacgccaagaagtccctgtacctccagatgaacagcctgagagccgaggacacagccctgtactattgcgccaaagagggcgactacgacgtcggcaactactacgctatggactactggggccagggaaccaccgtgactgtctcttctacgcgtgaggacctgaagaacgtgttcccacctgaggtggccgtgttcgagcctagcgaggccgagatcagccacacccagaaagccaccctcgtgtgcctggctaccggcttctaccccgaccatgtggaactgtcttggtgggtcaacggcaaagaggtgcacagcggcgtgtgtaccgacccccagccactgaaagaacagcccgccctgaacgacagccggtactgcctgagcagcagactgagagtgtccgccaccttctggcagaacccccggaaccacttcagatgccaggtgcagttctacggcctgagcgagaacgacgagtggacccaggacagagccaagcccgtgacccagatcgtgtctgccgaagcctggggcagagccgatgatgtgattaagatccactggcaggaaaagaagtccaacaccatcctgggcagccaggaaggcaacaccatgaagaccaacgacacctacatgaagttcagctggctgaccgtgcccgagaagtccctggacaaagaacacagatgcatcgtgcggcacgaaaacaacaagaacggcgtggaccaggaaatcatcttcccacccatcaagaccgatgtgattacaatggaccccaaggacaactgctccaaggacgccaacgataccctgctgctccagctgaccaacaccagcgcctactacatgtacttgttgctgctgctgaagtccgtggtgtacttcgccatcatcacatgctgcctgctgcggagaaccgccttctgctgcaacggcgagaagtct

SEQ ID NO: 7333 - DNA, 2187 bp, synthetic construct
  source 1..2187: mol_type = other DNA
atggccttaccagtgaccgccttgctcctgccgctggccttgctgctccacgccgccaggccggacgtggtcatgacacagaccccactgagcctgcctgtgtctctgggagatcaggccagcatctcctgtagaagcagccagagcctggtgcacagcaacggcaacacctacctgcggtggtatctccagaagcctggacagagccccaaggtgctgatctacaaggtgtccaacagagtgtccggcgtgcccgatagattttctggcagcggctctggcaccgacttcaccctgaagatcaatagagtggaagccgaggacctgggcgtgtacttctgtagccagagcacccatgtgccttggacctttggcggaggcaccaagctggaaatcaagctcgagatccagaaccctgatcctgccgtgtaccagctgcgggatagcaagagcagcgacaagagcgtgtgtctgttcaccgacttcgacagccagaccaacgtgtcccagagcaaggactccgacgtgtacatcaccgataagtgcgtgctggacatgcggagcatggacttcaagagcaactccgccgtggcctggtccaacaagtccgatttcgcctgcgccaacgccttcaacaacagcattatccccgaggacacattcttcccaagccccgagagcagcgactccaccgaccacgtgaagcccaaagagacagagaacaccaagcagcccagcaagagctgccacaagcccaaggccatcgtgcacaccgagaaagtgaacatgatgagcctgaccgtgctgggcctgcggatgctgttcgccaaaaccgtggccgtgaacttcctgctgaccgccaagctgttcttcctccgcgccaagagaagcggatctggcgtgaagcagaccctgaatttcgacctgctgaagctggctggcgacgtggaatccaacccaggccctactagtatggactggatttggcgcatccttttccttgtcggcgctgctaccggcgcgcattccttcgaaggcgtgaagctggacgagacaggcggaggacttgttcaacctggcggagccatgaagctgagctgtgtgaccagcggctttaccttcggccactactggatgaactgggtccgacagtcccctgagaaaggactggaatgggtcgcccagttcagaaacaagccctacaactacgaaacctactacagcgacagcgtgaagggcagattcaccatcagccgggacgacagcaagtccagcgtgtacctccagatgaacaacctgcgcgtggaagataccggcatctactactgtaccggggccagctacggcatggaatatctcggccagggcaccagcgtgaccgtgtctacaacgcgtgaggacctgaagaacgtgttcccacctgaggtggccgtgttcgagcctagcgaggccgagatcagccacacccagaaagccaccctcgtgtgcctggctaccggcttctaccccgaccatgtggaactgtcttggtgggtcaacggcaaagaggtgcacagcggcgtgtgtaccgacccccagccactgaaagaacagcccgccctgaacgacagccggtactgcctgagcagcagactgagagtgtccgccaccttctggcagaacccccggaaccacttcagatgccaggtgcagttctacggcctgagcgagaacgacgagtggacccaggacagagccaagcccgtgacccagatcgtgtctgccgaagcctggggcagagccgatgatgtgattaagatccactggcaggaaaagaagtccaacaccatcctgggcagccaggaaggcaacaccatgaagaccaacgacacctacatgaagttcagctggctgaccgtgcccgagaagtccctggacaaagaacacagatgcatcgtgcggcacgaaaacaacaagaacggcgtggaccaggaaatcatcttcccacccatcaagaccgatgtgattacaatggaccccaaggacaactgctccaaggacgccaacgataccctgctgctccagctgaccaacaccagcgcctactacatgtacttgttgctgctgctgaagtccgtggtgtacttcgccatcatcacatgctgcctgctgcggagaaccgccttctgctgcaacggcgagaagtct

SEQ ID NO: 7334 - DNA, 2205 bp, synthetic construct
  source 1..2205: mol_type = other DNA
atggccttaccagtgaccgccttgctcctgccgctggccttgctgctccacgccgccaggccgcaggtgcaactggtggaatctggcggcaatctggttcagcctggcggctctctgagactgtcttgtgccgccagcggcttcaccttcggcagcttttctatgagctgggtccgacaagctcctggcggaggacttgaatgggtggcaggactgtctgccagaagcagcctgacacactacgccgactctgtgaagggcagattcaccatcagccgggacaacgccaagaacagcgtgtacctccagatgaacagcctgagagtggaagataccgccgtgtactactgcgccagaagaagctacgacagcagcggctactggggccacttctacagctacatggatgtgtggggccagggcaccctggttacagtttctctcgagatccagaaccctgatcctgccgtgtaccagctgcgggatagcaagagcagcgacaagagcgtgtgtctgttcaccgacttcgacagccagaccaacgtgtcccagagcaaggactccgacgtgtacatcaccgataagtgcgtgctggacatgcggagcatggacttcaagagcaactccgccgtggcctggtccaacaagtccgatttcgcctgcgccaacgccttcaacaacagcattatccccgaggacacattcttcccaagccccgagagcagcgactccaccgaccacgtgaagcccaaagagacagagaacaccaagcagcccagcaagagctgccacaagcccaaggccatcgtgcacaccgagaaagtgaacatgatgagcctgaccgtgctgggcctgcggatgctgttcgccaaaaccgtggccgtgaacttcctgctgaccgccaagctgttcttcctccgcgccaagagaagcggatctggcgtgaagcagaccctgaatttcgacctgctgaagctggctggcgacgtggaatccaacccaggccctactagtatggactggatttggcgcatccttttccttgtcggcgctgctaccggcgcgcattccttcgaatctgtgctgacccagcctagctccgtgtctgctgctcctggacagaaagtgaccatctcctgtagcggcagcaccagcaacatcggcaacaactacgtgtcctggtatcagcagcaccccggcaaggcccctaagctgatgatctacgacgtgtccaagaggcccagcggcgtgccagatagattttccggcagcaagagcggcaacagcgccagcctggatattagcggactccagtctgaggacgaggccgactactattgcgccgcctgggatgatagcctgagcgagtttctgtttggcaccggcaccaagctgacagtgcttggaacgcgtgaggacctgaagaacgtgttcccacctgaggtggccgtgttcgagcctagcgaggccgagatcagccacacccagaaagccaccctcgtgtgcctggctaccggcttctaccccgaccatgtggaactgtcttggtgggtcaacggcaaagaggtgcacagcggcgtgtgtaccgacccccagccactgaaagaacagcccgccctgaacgacagccggtactgcctgagcagcagactgagagtgtccgccaccttctggcagaacccccggaaccacttcagatgccaggtgcagttctacggcctgagcgagaacgacgagtggacccaggacagagccaagcccgtgacccagatcgtgtctgccgaagcctggggcagagccgatgatgtgattaagatccactggcaggaaaagaagtccaacaccatcctgggcagccaggaaggcaacaccatgaagaccaacgacacctacatgaagttcagctggctgaccgtgcccgagaagtccctggacaaagaacacagatgcatcgtgcggcacgaaaacaacaagaacggcgtggaccaggaaatcatcttcccacccatcaagaccgatgtgattacaatggaccccaaggacaactgctccaaggacgccaacgataccctgctgctccagctgaccaacaccagcgcctactacatgtacttgttgctgctgctgaagtccgtggtgtacttcgccatcatcacatgctgcctgctgcggagaaccgccttctgctgcaacggcgagaagtct

SEQ ID NO: 7335 - DNA, 2190 bp, synthetic construct
  source 1..2190: mol_type = other DNA
atggccttaccagtgaccgccttgctcctgccgctggccttgctgctccacgccgccaggccggacgtggtcatgacacagagcccttctagcctgtctgccagcgtgggcgacagagtgacaatcacctgtcagagcagcctggacatcagccactacctgaactggtatcagcagaagcccggcaaggcccctaagctgctgatctacgacgccagcaatctggaaaccggcgtgcccagcagattttctggcagcggaagcggcacccacttcaccttcacaatatccagcctccagcctgaggacttcgccacctactactgccagcagtacgacaacctgcctctgacctttggcggaggcaccaagctggaaatcaagagactcgagatccagaaccctgatcctgccgtgtaccagctgcgggatagcaagagcagcgacaagagcgtgtgtctgttcaccgacttcgacagccagaccaacgtgtcccagagcaaggactccgacgtgtacatcaccgataagtgcgtgctggacatgcggagcatggacttcaagagcaactccgccgtggcctggtccaacaagtccgatttcgcctgcgccaacgccttcaacaacagcattatccccgaggacacattcttcccaagccccgagagcagcgactccaccgaccacgtgaagcccaaagagacagagaacaccaagcagcccagcaagagctgccacaagcccaaggccatcgtgcacaccgagaaagtgaacatgatgagcctgaccgtgctgggcctgcggatgctgttcgccaaaaccgtggccgtgaacttcctgctgaccgccaagctgttcttcctccgcgccaagagaagcggatctggcgtgaagcagaccctgaatttcgacctgctgaagctggctggcgacgtggaatccaacccaggccctactagtatggactggatttggcgcatccttttccttgtcggcgctgctaccggcgcgcattccttcgaacaagttcaactggttcaatcaggcggaggcgtggtgcaacctggtggctctctgagagtgtcttgtgctgcctctggcgtgaccctgagcgactatggaatgcactgggtccgacaggcccctggcaaaggacttgagtgggtcgccttcatcagaaacgacggcagcgacaagtattacgccgacagcgtgaagggcagattcaccatcagccgggacaacagcgagaaaaccgtgtctctccagatgtctagcctgagagccgaggacaccgccgtgtactactgtgccaagaatggcgagagcggccctctggactactggtatctggatctgtggggcagaggcaccctggtcacagtctcttctacgcgtgaggacctgaagaacgtgttcccacctgaggtggccgtgttcgagcctagcgaggccgagatcagccacacccagaaagccaccctcgtgtgcctggctaccggcttctaccccgaccatgtggaactgtcttggtgggtcaacggcaaagaggtgcacagcggcgtgtgtaccgacccccagccactgaaagaacagcccgccctgaacgacagccggtactgcctgagcagcagactgagagtgtccgccaccttctggcagaacccccggaaccacttcagatgccaggtgcagttctacggcctgagcgagaacgacgagtggacccaggacagagccaagcccgtgacccagatcgtgtctgccgaagcctggggcagagccgatgatgtgattaagatccactggcaggaaaagaagtccaacaccatcctgggcagccaggaaggcaacaccatgaagaccaacgacacctacatgaagttcagctggctgaccgtgcccgagaagtccctggacaaagaacacagatgcatcgtgcggcacgaaaacaacaagaacggcgtggaccaggaaatcatcttcccacccatcaagaccgatgtgattacaatggaccccaaggacaactgctccaaggacgccaacgataccctgctgctccagctgaccaacaccagcgcctactacatgtacttgttgctgctgctgaagtccgtggtgtacttcgccatcatcacatgctgcctgctgcggagaaccgccttctgctgcaacggcgagaagtct

SEQ ID NO: 7336 - DNA, 2202 bp, synthetic construct
  source 1..2202: mol_type = other DNA
atggccttaccagtgaccgccttgctcctgccgctggccttgctgctccacgccgccaggccgagctacgagctgacacagcctccatccgtgtctggcacacctggacagagagtggctatctcctgtagcggcagcagcagcaacatcggcaccagaatggtcacctggtatcagcacgtgccaggcacagcccctaagctgctgatcttcaacaacaaccagcggcctagcggcgtgcccgatagattttctgccagcaagagcggcacaagcgccagcctggctatcatcggactccagtctgacgacgaggccgactactactgtgccacctgggacgacaacgtgaagtcctacgtgttcggcaccggcaccaaagtgacagtgcttggaagtagactcgagatccagaaccctgatcctgccgtgtaccagctgcgggatagcaagagcagcgacaagagcgtgtgtctgttcaccgacttcgacagccagaccaacgtgtcccagagcaaggactccgacgtgtacatcaccgataagtgcgtgctggacatgcggagcatggacttcaagagcaactccgccgtggcctggtccaacaagtccgatttcgcctgcgccaacgccttcaacaacagcattatccccgaggacacattcttcccaagccccgagagcagcgactccaccgaccacgtgaagcccaaagagacagagaacaccaagcagcccagcaagagctgccacaagcccaaggccatcgtgcacaccgagaaagtgaacatgatgagcctgaccgtgctgggcctgcggatgctgttcgccaaaaccgtggccgtgaacttcctgctgaccgccaagctgttcttcctccgcgccaagagaagcggatctggcgtgaagcagaccctgaatttcgacctgctgaagctggctggcgacgtggaatccaacccaggccctactagtatggactggatttggcgcatccttttccttgtcggcgctgctaccggcgcgcattccttcgaacttgaaatggcccaggttcagctccagcagtggggagctggactgctgaagcctagcgagacactgagcctgacctgtgctgtgtacggcggcagcttcagcggctactactggtcctggatcagacagcctcctggcaaaggactggaatggatcggcgagatcaaccacagcggctccaccaactacaaccccagcctgaagtccagagtgaccatcagcgtggacaccagcaagaaccagttctccctgaagctgagcagcgtgacagccgctgataccgccgtgtactattgcgctagagcccctcagtcttggtacgtgggagatgtgtggggccagggcacactggttacagtgtcatctacgcgtgaggacctgaagaacgtgttcccacctgaggtggccgtgttcgagcctagcgaggccgagatcagccacacccagaaagccaccctcgtgtgcctggctaccggcttctaccccgaccatgtggaactgtcttggtgggtcaacggcaaagaggtgcacagcggcgtgtgtaccgacccccagccactgaaagaacagcccgccctgaacgacagccggtactgcctgagcagcagactgagagtgtccgccaccttctggcagaacccccggaaccacttcagatgccaggtgcagttctacggcctgagcgagaacgacgagtggacccaggacagagccaagcccgtgacccagatcgtgtctgccgaagcctggggcagagccgatgatgtgattaagatccactggcaggaaaagaagtccaacaccatcctgggcagccaggaaggcaacaccatgaagaccaacgacacctacatgaagttcagctggctgaccgtgcccgagaagtccctggacaaagaacacagatgcatcgtgcggcacgaaaacaacaagaacggcgtggaccaggaaatcatcttcccacccatcaagaccgatgtgattacaatggaccccaaggacaactgctccaaggacgccaacgataccctgctgctccagctgaccaacaccagcgcctactacatgtacttgttgctgctgctgaagtccgtggtgtacttcgccatcatcacatgctgcctgctgcggagaaccgccttctgctgcaacggcgagaagtct

SEQ ID NO: 7337 - DNA, 2193 bp, synthetic construct
  source 1..2193: mol_type = other DNA
atggccttaccagtgaccgccttgctcctgccgctggccttgctgctccacgccgccaggccgcagtctgtgctgacacagcctcctagcctgtctgtggcccctggaaagacagccagcatcacatgcggcggcaacaacatcggcatgaagtccgtgcactggtatcagcagaggccaggacaggctcctgtgctggtcatctactacgacagcgacagaccctctggcatccccggcagattttccggcagcaactctggcaataccgccacactgaccatctccagagtggaagctggcgacgaggccgactactactgccaagtgtgggataccaccggcgatcaccctggctatgtgtttggcaccggcaccaaagtgacagtgcttctcgagatccagaaccctgatcctgccgtgtaccagctgcgggatagcaagagcagcgacaagagcgtgtgtctgttcaccgacttcgacagccagaccaacgtgtcccagagcaaggactccgacgtgtacatcaccgataagtgcgtgctggacatgcggagcatggacttcaagagcaactccgccgtggcctggtccaacaagtccgatttcgcctgcgccaacgccttcaacaacagcattatccccgaggacacattcttcccaagccccgagagcagcgactccaccgaccacgtgaagcccaaagagacagagaacaccaagcagcccagcaagagctgccacaagcccaaggccatcgtgcacaccgagaaagtgaacatgatgagcctgaccgtgctgggcctgcggatgctgttcgccaaaaccgtggccgtgaacttcctgctgaccgccaagctgttcttcctccgcgccaagagaagcggatctggcgtgaagcagaccctgaatttcgacctgctgaagctggctggcgacgtggaatccaacccaggccctactagtatggactggatttggcgcatccttttccttgtcggcgctgctaccggcgcgcattccttcgaacaagttcaactggttcagagcggagccgaagtgaagaaacctggcagcagcgtgaaggtgtcctgcaaagcaagcggcggcacctttagcagctacgccatctcttgggtccgacaggcacctggacaaggactggaatggatgggcggcatcatccccatcttcggcacagccaattacgcccagaaattccagggcagagtgaccatcaccgccgacgagtctacaagcaccgcctacatggaactgagcagcctgagaagcgaggacaccgccgtgtactattgtgccagaggcgtgtacggctacagcggctctgccccttatgatgagtggggccagggaaccctggtcaccgtttcttctacgcgtgaggacctgaagaacgtgttcccacctgaggtggccgtgttcgagcctagcgaggccgagatcagccacacccagaaagccaccctcgtgtgcctggctaccggcttctaccccgaccatgtggaactgtcttggtgggtcaacggcaaagaggtgcacagcggcgtgtgtaccgacccccagccactgaaagaacagcccgccctgaacgacagccggtactgcctgagcagcagactgagagtgtccgccaccttctggcagaacccccggaaccacttcagatgccaggtgcagttctacggcctgagcgagaacgacgagtggacccaggacagagccaagcccgtgacccagatcgtgtctgccgaagcctggggcagagccgatgatgtgattaagatccactggcaggaaaagaagtccaacaccatcctgggcagccaggaaggcaacaccatgaagaccaacgacacctacatgaagttcagctggctgaccgtgcccgagaagtccctggacaaagaacacagatgcatcgtgcggcacgaaaacaacaagaacggcgtggaccaggaaatcatcttcccacccatcaagaccgatgtgattacaatggaccccaaggacaactgctccaaggacgccaacgataccctgctgctccagctgaccaacaccagcgcctactacatgtacttgttgctgctgctgaagtccgtggtgtacttcgccatcatcacatgctgcctgctgcggagaaccgccttctgctgcaacggcgagaagtct

SEQ ID NO: 7338 - DNA, 2187 bp, synthetic construct
  source 1..2187: mol_type = other DNA
atggccttaccagtgaccgccttgctcctgccgctggccttgctgctccacgccgccaggccggaggtgcaactggttgagtctggcggaggactggtgcagcctggaagaagcctgagactgtcttgtgccgccagcggcttcaccttcgacgattatgccatgcactgggtccgacaggcccctggcaaaggacttgaatgggtgtccggcatctcctggaacagcggctctatcggctacgccgattccgtgaagggcagattcaccatcagccgggacaacgccaagaacagcctgtacctccagatgaactccctgagagccgaggacacagccctgtactactgcgccaaagacaaaggcggaggctactacgacttttggagcggcagcgattattggggccagggcacactggtcacagtgtctagcctcgagatccagaaccctgatcctgccgtgtaccagctgcgggatagcaagagcagcgacaagagcgtgtgtctgttcaccgacttcgacagccagaccaacgtgtcccagagcaaggactccgacgtgtacatcaccgataagtgcgtgctggacatgcggagcatggacttcaagagcaactccgccgtggcctggtccaacaagtccgatttcgcctgcgccaacgccttcaacaacagcattatccccgaggacacattcttcccaagccccgagagcagcgactccaccgaccacgtgaagcccaaagagacagagaacaccaagcagcccagcaagagctgccacaagcccaaggccatcgtgcacaccgagaaagtgaacatgatgagcctgaccgtgctgggcctgcggatgctgttcgccaaaaccgtggccgtgaacttcctgctgaccgccaagctgttcttcctccgcgccaagagaagcggatctggcgtgaagcagaccctgaatttcgacctgctgaagctggctggcgacgtggaatccaacccaggccctactagtatggactggatttggcgcatccttttccttgtcggcgctgctaccggcgcgcattccttcgaatcttctgagctgacacaggaccctgccgtgtctgttgctctgggccagacagtgcggattacctgtcagggcgatagcctgagaagctactacgcctcctggtatcagcagaagccaggccaggctcctgtgctggtcatctacggcaagaacaacagacccagcggcatccccgatagattcagcggaagcagctctggcaataccgccagcctgacaattactggcgctcaggccgaggacgaggccgactactactgcaacagcagagatagcagcggctgggttttcggcggaggcacaaaactgacagtgctgacgcgtgaggacctgaagaacgtgttcccacctgaggtggccgtgttcgagcctagcgaggccgagatcagccacacccagaaagccaccctcgtgtgcctggctaccggcttctaccccgaccatgtggaactgtcttggtgggtcaacggcaaagaggtgcacagcggcgtgtgtaccgacccccagccactgaaagaacagcccgccctgaacgacagccggtactgcctgagcagcagactgagagtgtccgccaccttctggcagaacccccggaaccacttcagatgccaggtgcagttctacggcctgagcgagaacgacgagtggacccaggacagagccaagcccgtgacccagatcgtgtctgccgaagcctggggcagagccgatgatgtgattaagatccactggcaggaaaagaagtccaacaccatcctgggcagccaggaaggcaacaccatgaagaccaacgacacctacatgaagttcagctggctgaccgtgcccgagaagtccctggacaaagaacacagatgcatcgtgcggcacgaaaacaacaagaacggcgtggaccaggaaatcatcttcccacccatcaagaccgatgtgattacaatggaccccaaggacaactgctccaaggacgccaacgataccctgctgctccagctgaccaacaccagcgcctactacatgtacttgttgctgctgctgaagtccgtggtgtacttcgccatcatcacatgctgcctgctgcggagaaccgccttctgctgcaacggcgagaagtct

SEQ ID NO: 7339 - DNA, 2214 bp, synthetic construct
  source 1..2214: mol_type = other DNA
atggccttaccagtgaccgccttgctcctgccgctggccttgctgctccacgccgccaggccggaagtgcagctccagcagtctggacctggcctggttaagcctagccagacactgagcctgacctgtgccatcagcggcgatagcgtgctgagcaacagcgacacctggaactggatcagacagagccctagcagaggactggaatggctgggcagaacctaccacagaagcacttggtacgacgactacgccagctctgtgcggggcagagtgtccatcaatgtggacaccagcaagaaccagtacagcctgcaactgaacgccgtgacacctgaggataccggcgtgtactactgcgccagagacagactccaggacggcaactcttggagcgacgcctttgatgtgtggggccagggcacaatggtcaccgtttctagcctcgagatccagaaccctgatcctgccgtgtaccagctgcgggatagcaagagcagcgacaagagcgtgtgtctgttcaccgacttcgacagccagaccaacgtgtcccagagcaaggactccgacgtgtacatcaccgataagtgcgtgctggacatgcggagcatggacttcaagagcaactccgccgtggcctggtccaacaagtccgatttcgcctgcgccaacgccttcaacaacagcattatccccgaggacacattcttcccaagccccgagagcagcgactccaccgaccacgtgaagcccaaagagacagagaacaccaagcagcccagcaagagctgccacaagcccaaggccatcgtgcacaccgagaaagtgaacatgatgagcctgaccgtgctgggcctgcggatgctgttcgccaaaaccgtggccgtgaacttcctgctgaccgccaagctgttcttcctccgcgccaagagaagcggatctggcgtgaagcagaccctgaatttcgacctgctgaagctggctggcgacgtggaatccaacccaggccctactagtatggactggatttggcgcatccttttccttgtcggcgctgctaccggcgcgcattccttcgaacaatctgctctgacacagcctgccagcgtgtcaggatctcctggacagagcatcaccatctcttgcaccggcaccagctctgatgtcggcggctacaattacgtgtcctggtatcagcagcaccccggcaaggcccctaagctgatgatctacgacgtgtccaacagacccagcggcgtgtccaatagattctccggcagcaagagcggcaacaccgccagcctgacaatttctggactgcaagccgaggacgaggccgactactactgtagcagctacaccagcagcagcacactggtgtacgtgttcggcacaggcaccaaagtgaccgtgcttacgcgtgaggacctgaagaacgtgttcccacctgaggtggccgtgttcgagcctagcgaggccgagatcagccacacccagaaagccaccctcgtgtgcctggctaccggcttctaccccgaccatgtggaactgtcttggtgggtcaacggcaaagaggtgcacagcggcgtgtgtaccgacccccagccactgaaagaacagcccgccctgaacgacagccggtactgcctgagcagcagactgagagtgtccgccaccttctggcagaacccccggaaccacttcagatgccaggtgcagttctacggcctgagcgagaacgacgagtggacccaggacagagccaagcccgtgacccagatcgtgtctgccgaagcctggggcagagccgatgatgtgattaagatccactggcaggaaaagaagtccaacaccatcctgggcagccaggaaggcaacaccatgaagaccaacgacacctacatgaagttcagctggctgaccgtgcccgagaagtccctggacaaagaacacagatgcatcgtgcggcacgaaaacaacaagaacggcgtggaccaggaaatcatcttcccacccatcaagaccgatgtgattacaatggaccccaaggacaactgctccaaggacgccaacgataccctgctgctccagctgaccaacaccagcgcctactacatgtacttgttgctgctgctgaagtccgtggtgtacttcgccatcatcacatgctgcctgctgcggagaaccgccttctgctgcaacggcgagaagtct

SEQ ID NO: 7340 - DNA, 2148 bp, synthetic construct
  source 1..2148: mol_type = other DNA
atggccttaccagtgaccgccttgctcctgccgctggccttgctgctccacgccgccaggccgcaggtgcaactggttcagtctggggccgaagtgaagaaacctggggcctctgtgaaggtgtcctgcaaggcttccggctacacctttaccagctacgacatcaactgggtccgacaggccacaggccaaggactggaatggatgggctggatgaaccccaacagcggcaataccggctacgcccagaaattccagggcagagtgaccatgaccagaaacaccagcatcagcaccgcctacatggaactgagcagcctgagaagcgaggacaccgccgtgtactattgcgccagaggcgacagcaccaaggtggaaatcaaactcgagatccagaaccctgatcctgccgtgtaccagctgcgggatagcaagagcagcgacaagagcgtgtgtctgttcaccgacttcgacagccagaccaacgtgtcccagagcaaggactccgacgtgtacatcaccgataagtgcgtgctggacatgcggagcatggacttcaagagcaactccgccgtggcctggtccaacaagtccgatttcgcctgcgccaacgccttcaacaacagcattatccccgaggacacattcttcccaagccccgagagcagcgactccaccgaccacgtgaagcccaaagagacagagaacaccaagcagcccagcaagagctgccacaagcccaaggccatcgtgcacaccgagaaagtgaacatgatgagcctgaccgtgctgggcctgcggatgctgttcgccaaaaccgtggccgtgaacttcctgctgaccgccaagctgttcttcctccgcgccaagagaagcggatctggcgtgaagcagaccctgaatttcgacctgctgaagctggctggcgacgtggaatccaacccaggccctactagtatggactggatttggcgcatccttttccttgtcggcgctgctaccggcgcgcattccttcgaacaatctgtgctgacccagcctagatccgtgtctggctctcctggacagagcgtgaccatctcttgtaccggcaccagctctgatgtcggcggctacaattacgtgtcctggtatcagcagcaccccggcgaagcccctaagctgattatctacgacgccgacaagcggcccagcggcatcagcaatagattcagctctggcaagagcggcaacaccgccagcctgacaatcagcggactccaggtggaagatgaggccgactactactgctgctcctatgccggcggaagcacctgggttttcggaggcggtacaaaagtgaccgtgctgacgcgtgaggacctgaagaacgtgttcccacctgaggtggccgtgttcgagcctagcgaggccgagatcagccacacccagaaagccaccctcgtgtgcctggctaccggcttctaccccgaccatgtggaactgtcttggtgggtcaacggcaaagaggtgcacagcggcgtgtgtaccgacccccagccactgaaagaacagcccgccctgaacgacagccggtactgcctgagcagcagactgagagtgtccgccaccttctggcagaacccccggaaccacttcagatgccaggtgcagttctacggcctgagcgagaacgacgagtggacccaggacagagccaagcccgtgacccagatcgtgtctgccgaagcctggggcagagccgatgatgtgattaagatccactggcaggaaaagaagtccaacaccatcctgggcagccaggaaggcaacaccatgaagaccaacgacacctacatgaagttcagctggctgaccgtgcccgagaagtccctggacaaagaacacagatgcatcgtgcggcacgaaaacaacaagaacggcgtggaccaggaaatcatcttcccacccatcaagaccgatgtgattacaatggaccccaaggacaactgctccaaggacgccaacgataccctgctgctccagctgaccaacaccagcgcctactacatgtacttgttgctgctgctgaagtccgtggtgtacttcgccatcatcacatgctgcctgctgcggagaaccgccttctgctgcaacggcgagaagtct

SEQ ID NO: 7341 - DNA, 2214 bp, synthetic construct
  source 1..2214: mol_type = other DNA
atggccttaccagtgaccgccttgctcctgccgctggccttgctgctccacgccgccaggccggaagtgcagctccagcagtctggacctggcctggttaagcctagccagacactgagcctgacctgtgccatcagcggcgatagcgtgtcctctaatagcgccgcctggaactggatcagacagagccctagcagaggactggaatggctgggcagaacctactaccgcagcaagtggtacagcgactacgccgtgtccgtgaagtcccggatcaccatcaatcccgacaccagcaagaaccagttcagcctgcaactgaacagcgtgacccctgaggataccgccgtgtactactgcgccagagatccctacgacttttggagcggctaccccgacgcctttgacatctggggacagggcacaatggtcaccgtttctagcctcgagatccagaaccctgatcctgccgtgtaccagctgcgggatagcaagagcagcgacaagagcgtgtgtctgttcaccgacttcgacagccagaccaacgtgtcccagagcaaggactccgacgtgtacatcaccgataagtgcgtgctggacatgcggagcatggacttcaagagcaactccgccgtggcctggtccaacaagtccgatttcgcctgcgccaacgccttcaacaacagcattatccccgaggacacattcttcccaagccccgagagcagcgactccaccgaccacgtgaagcccaaagagacagagaacaccaagcagcccagcaagagctgccacaagcccaaggccatcgtgcacaccgagaaagtgaacatgatgagcctgaccgtgctgggcctgcggatgctgttcgccaaaaccgtggccgtgaacttcctgctgaccgccaagctgttcttcctccgcgccaagagaagcggatctggcgtgaagcagaccctgaatttcgacctgctgaagctggctggcgacgtggaatccaacccaggccctactagtatggactggatttggcgcatccttttccttgtcggcgctgctaccggcgcgcattccttcgaacaatctgctctgacacagcctgccagcgtgtcaggatctcctggacagagcatcaccatctcttgcaccggcaccagctctgatgtcggcggctacaattacgtgtcctggtatcagcagcaccccggcaaggcccctaaagtgattatcagcgaagtgaacaacagacccagcggcgtgtcccacagattcagcggctctaagtctggcaacaccgccagcctgacaatctctggactgcaagccgaggacgaggccgactacttctgtagcagctacaccagcggcagaaccctgtacgtgttcggcacaggcagcaaagtgacagtgctgggaacgcgtgaggacctgaagaacgtgttcccacctgaggtggccgtgttcgagcctagcgaggccgagatcagccacacccagaaagccaccctcgtgtgcctggctaccggcttctaccccgaccatgtggaactgtcttggtgggtcaacggcaaagaggtgcacagcggcgtgtgtaccgacccccagccactgaaagaacagcccgccctgaacgacagccggtactgcctgagcagcagactgagagtgtccgccaccttctggcagaacccccggaaccacttcagatgccaggtgcagttctacggcctgagcgagaacgacgagtggacccaggacagagccaagcccgtgacccagatcgtgtctgccgaagcctggggcagagccgatgatgtgattaagatccactggcaggaaaagaagtccaacaccatcctgggcagccaggaaggcaacaccatgaagaccaacgacacctacatgaagttcagctggctgaccgtgcccgagaagtccctggacaaagaacacagatgcatcgtgcggcacgaaaacaacaagaacggcgtggaccaggaaatcatcttcccacccatcaagaccgatgtgattacaatggaccccaaggacaactgctccaaggacgccaacgataccctgctgctccagctgaccaacaccagcgcctactacatgtacttgttgctgctgctgaagtccgtggtgtacttcgccatcatcacatgctgcctgctgcggagaaccgccttctgctgcaacggcgagaagtct

SEQ ID NO: 7342 - DNA, 2211 bp, synthetic construct
  source 1..2211: mol_type = other DNA
atggccttaccagtgaccgccttgctcctgccgctggccttgctgctccacgccgccaggccgcaatctgctctgacacagcctgccagcgcctctggatctcctggacagagcgtgaccatctcctgtaccggcacctcttctgatgtcggcggctacaactacgtgtcctggtatcagcagcaccccggcaaggcccctaagctgatgatctacgacgtgtccaacagacccagcggcgtgtccaatagattctccggcagcaagagcggcaacaccgccagcctgacaatttctggactgcaagccgaggacgaggccgactactactgtagcagctacaccagcagcagcacactgtacgtgttcggcacaggcacccagctcacagttcttctcgagatccagaaccctgatcctgccgtgtaccagctgcgggatagcaagagcagcgacaagagcgtgtgtctgttcaccgacttcgacagccagaccaacgtgtcccagagcaaggactccgacgtgtacatcaccgataagtgcgtgctggacatgcggagcatggacttcaagagcaactccgccgtggcctggtccaacaagtccgatttcgcctgcgccaacgccttcaacaacagcattatccccgaggacacattcttcccaagccccgagagcagcgactccaccgaccacgtgaagcccaaagagacagagaacaccaagcagcccagcaagagctgccacaagcccaaggccatcgtgcacaccgagaaagtgaacatgatgagcctgaccgtgctgggcctgcggatgctgttcgccaaaaccgtggccgtgaacttcctgctgaccgccaagctgttcttcctccgcgccaagagaagcggatctggcgtgaagcagaccctgaatttcgacctgctgaagctggctggcgacgtggaatccaacccaggccctactagtatggactggatttggcgcatccttttccttgtcggcgctgctaccggcgcgcattccttcgaagaagtgcagctccagcagtctggacctggcctggttaagcctagccagacactgagcctgacctgtgccatcagcggcgattccatgctgagcaacagcgacacctggaactggatcagacagagccccagcagaggcctggaatggctgggcagaacataccacagaagcacttggtacgacgactacgccagctctgtgcggggcagagtgtccatcaatgtggacaccagcaagaaccagtacagcctgcaactgaacgccgtgacacctgaggataccggcgtgtactactgtgccagagtgcggctccaggacggcaattcttggagcgacgcctttgatgtgtggggccagggcacaatggtcaccgtttctagcacgcgtgaggacctgaagaacgtgttcccacctgaggtggccgtgttcgagcctagcgaggccgagatcagccacacccagaaagccaccctcgtgtgcctggctaccggcttctaccccgaccatgtggaactgtcttggtgggtcaacggcaaagaggtgcacagcggcgtgtgtaccgacccccagccactgaaagaacagcccgccctgaacgacagccggtactgcctgagcagcagactgagagtgtccgccaccttctggcagaacccccggaaccacttcagatgccaggtgcagttctacggcctgagcgagaacgacgagtggacccaggacagagccaagcccgtgacccagatcgtgtctgccgaagcctggggcagagccgatgatgtgattaagatccactggcaggaaaagaagtccaacaccatcctgggcagccaggaaggcaacaccatgaagaccaacgacacctacatgaagttcagctggctgaccgtgcccgagaagtccctggacaaagaacacagatgcatcgtgcggcacgaaaacaacaagaacggcgtggaccaggaaatcatcttcccacccatcaagaccgatgtgattacaatggaccccaaggacaactgctccaaggacgccaacgataccctgctgctccagctgaccaacaccagcgcctactacatgtacttgttgctgctgctgaagtccgtggtgtacttcgccatcatcacatgctgcctgctgcggagaaccgccttctgctgcaacggcgagaagtct

SEQ ID NO: 7343 - DNA, 2211 bp, synthetic construct
  source 1..2211: mol_type = other DNA
atggccttaccagtgaccgccttgctcctgccgctggccttgctgctccacgccgccaggccggacgtgatgctgacccagacaccactgagcctgcctgtgtctctgggcgatcaggccagcatctcctgtagaagcagccagagcatcctgcacagcaccggcgatacctacctggaatggtatctccagaagcctggacagagccccaagctgctgattaacaaggtgtccaaccggctgagcggcgtgcccgatagattttctggcagcggctctggcaccgacttcaccctgaagatcagcagagtggaagccgaggacctgggcgtgtactactgcttccaaggcagccatgttccttggacctttggcggaggcaccaagctggaaatcaagagagctgacgccgctcctaccgtgtccatctttcctctcgagatccagaaccctgatcctgccgtgtaccagctgcgggatagcaagagcagcgacaagagcgtgtgtctgttcaccgacttcgacagccagaccaacgtgtcccagagcaaggactccgacgtgtacatcaccgataagtgcgtgctggacatgcggagcatggacttcaagagcaactccgccgtggcctggtccaacaagtccgatttcgcctgcgccaacgccttcaacaacagcattatccccgaggacacattcttcccaagccccgagagcagcgactccaccgaccacgtgaagcccaaagagacagagaacaccaagcagcccagcaagagctgccacaagcccaaggccatcgtgcacaccgagaaagtgaacatgatgagcctgaccgtgctgggcctgcggatgctgttcgccaaaaccgtggccgtgaacttcctgctgaccgccaagctgttcttcctccgcgccaagagaagcggatctggcgtgaagcagaccctgaatttcgacctgctgaagctggctggcgacgtggaatccaacccaggccctactagtatggactggatttggcgcatccttttccttgtcggcgctgctaccggcgcgcattccttcgaacaagtgaagctccagcagagcggccctagccttgtgaaacctggcgcttccgtgaagatgagctgcaaggccagcggctacaccttcaccgatttctacatgaaatgggtcaagcagagccacggcaagtctctggaatggatcggcgacatcaaccccaacatcggagacaccttctacaaccagaagttcaagggcaaagccacactgaccgtggacaagagcagcagcaccgcctacatgcagctcaacagcctgaccagcgaggacagcgccgtgtacttttgttccgtgggctacttcgacgtgtggggagccggaacaaccgtgacagtctcttctacgcgtgaggacctgaagaacgtgttcccacctgaggtggccgtgttcgagcctagcgaggccgagatcagccacacccagaaagccaccctcgtgtgcctggctaccggcttctaccccgaccatgtggaactgtcttggtgggtcaacggcaaagaggtgcacagcggcgtgtgtaccgacccccagccactgaaagaacagcccgccctgaacgacagccggtactgcctgagcagcagactgagagtgtccgccaccttctggcagaacccccggaaccacttcagatgccaggtgcagttctacggcctgagcgagaacgacgagtggacccaggacagagccaagcccgtgacccagatcgtgtctgccgaagcctggggcagagccgatgatgtgattaagatccactggcaggaaaagaagtccaacaccatcctgggcagccaggaaggcaacaccatgaagaccaacgacacctacatgaagttcagctggctgaccgtgcccgagaagtccctggacaaagaacacagatgcatcgtgcggcacgaaaacaacaagaacggcgtggaccaggaaatcatcttcccacccatcaagaccgatgtgattacaatggaccccaaggacaactgctccaaggacgccaacgataccctgctgctccagctgaccaacaccagcgcctactacatgtacttgttgctgctgctgaagtccgtggtgtacttcgccatcatcacatgctgcctgctgcggagaaccgccttctgctgcaacggcgagaagtct

SEQ ID NO: 7344 - DNA, 2199 bp, synthetic construct
  source 1..2199: mol_type = other DNA
atggccttaccagtgaccgccttgctcctgccgctggccttgctgctccacgccgccaggccggagatcgtgctgacacagtctcccgccacactgtcactgtctccaggcgaaagagccacactgagctgtagagccagccagagcgtgtccatctacctggcctggtatcagcagaagcctggacaggctccccggctgctgatctacgatgccagcaatagagccacaggcatccccgccagattttctggctctggcagcggcaccgatttcaccctgaccataagcagcctggaacctgaggacttcgccgtgtactactgccagcagagaagcaactggcctcctttcacattcggccctggcaccaaggtggacatcaaactcgagatccagaaccctgatcctgccgtgtaccagctgcgggatagcaagagcagcgacaagagcgtgtgtctgttcaccgacttcgacagccagaccaacgtgtcccagagcaaggactccgacgtgtacatcaccgataagtgcgtgctggacatgcggagcatggacttcaagagcaactccgccgtggcctggtccaacaagtccgatttcgcctgcgccaacgccttcaacaacagcattatccccgaggacacattcttcccaagccccgagagcagcgactccaccgaccacgtgaagcccaaagagacagagaacaccaagcagcccagcaagagctgccacaagcccaaggccatcgtgcacaccgagaaagtgaacatgatgagcctgaccgtgctgggcctgcggatgctgttcgccaaaaccgtggccgtgaacttcctgctgaccgccaagctgttcttcctccgcgccaagagaagcggatctggcgtgaagcagaccctgaatttcgacctgctgaagctggctggcgacgtggaatccaacccaggccctactagtatggactggatttggcgcatccttttccttgtcggcgctgctaccggcgcgcattccttcgaacaggtgcagcttgttgaaagcggaggcggagttgtgcagcctggcagaagtctgagactgtcttgtgccgccagcggcttcaccttcagcagctatggaatgcactgggtccgacaggcccctggcaaaggacttgaatgggttgccgtgatctgggacgacggcagcaacaagtattacgtggacagcgtgaagggcagattcaccatcagccgggacaacagcaagaacaccctgtacctccagatgaacagcctgagagccgaggacacagccgtgtattattgcgccagagatgactactacggcagcggctccttcaacagctactatggcacagacgtgtggggccagggcacaacagttaccgttagctctacgcgtgaggacctgaagaacgtgttcccacctgaggtggccgtgttcgagcctagcgaggccgagatcagccacacccagaaagccaccctcgtgtgcctggctaccggcttctaccccgaccatgtggaactgtcttggtgggtcaacggcaaagaggtgcacagcggcgtgtgtaccgacccccagccactgaaagaacagcccgccctgaacgacagccggtactgcctgagcagcagactgagagtgtccgccaccttctggcagaacccccggaaccacttcagatgccaggtgcagttctacggcctgagcgagaacgacgagtggacccaggacagagccaagcccgtgacccagatcgtgtctgccgaagcctggggcagagccgatgatgtgattaagatccactggcaggaaaagaagtccaacaccatcctgggcagccaggaaggcaacaccatgaagaccaacgacacctacatgaagttcagctggctgaccgtgcccgagaagtccctggacaaagaacacagatgcatcgtgcggcacgaaaacaacaagaacggcgtggaccaggaaatcatcttcccacccatcaagaccgatgtgattacaatggaccccaaggacaactgctccaaggacgccaacgataccctgctgctccagctgaccaacaccagcgcctactacatgtacttgttgctgctgctgaagtccgtggtgtacttcgccatcatcacatgctgcctgctgcggagaaccgccttctgctgcaacggcgagaagtct

SEQ ID NO: 7345 - DNA, 2154 bp, synthetic construct
  source 1..2154: mol_type = other DNA
atggccttaccagtgaccgccttgctcctgccgctggccttgctgctccacgccgccaggccggacatccagatgacacagagccctagcagcctgtctgccagcgtgggagacagagtgaccatcacctgtagagccagccagggcatctcttcttggctggcctggtatcagcagaagcccgagaaggcccctaagagcctgatctatgccgccagctctctccagagcggagtgcctagcagattttctggcagcggctccggcaccgatttcaccctgacaatatccagcctccagcctgaggacttcgccacctactactgccagcagtacaacagctacccctacaccttcggccagggcaccaagctggaaatcaaactcgagatccagaaccctgatcctgccgtgtaccagctgcgggatagcaagagcagcgacaagagcgtgtgtctgttcaccgacttcgacagccagaccaacgtgtcccagagcaaggactccgacgtgtacatcaccgataagtgcgtgctggacatgcggagcatggacttcaagagcaactccgccgtggcctggtccaacaagtccgatttcgcctgcgccaacgccttcaacaacagcattatccccgaggacacattcttcccaagccccgagagcagcgactccaccgaccacgtgaagcccaaagagacagagaacaccaagcagcccagcaagagctgccacaagcccaaggccatcgtgcacaccgagaaagtgaacatgatgagcctgaccgtgctgggcctgcggatgctgttcgccaaaaccgtggccgtgaacttcctgctgaccgccaagctgttcttcctccgcgccaagagaagcggatctggcgtgaagcagaccctgaatttcgacctgctgaagctggctggcgacgtggaatccaacccaggccctactagtatggactggatttggcgcatccttttccttgtcggcgctgctaccggcgcgcattccttcgaagaagtgcaactggttcaatctggcggcggactggttcatccaggcggttctctgagactgagctgtgccggctctggcttcaccttcagcacctacctgatgtactgggtccgacaggcccctggcaagacactggaatgggtgtccgctattggcagcggaggcgatacctactacgccgactctgtgaagggcagattcaccatcagccgggacaacgccaagaacagcctgtacctccagatgaactccctgagagccgaggacatggccgtgtactactgtgccagaggactcggctattggggccagggaacactggtcacagtgtcctctacgcgtgaggacctgaagaacgtgttcccacctgaggtggccgtgttcgagcctagcgaggccgagatcagccacacccagaaagccaccctcgtgtgcctggctaccggcttctaccccgaccatgtggaactgtcttggtgggtcaacggcaaagaggtgcacagcggcgtgtgtaccgacccccagccactgaaagaacagcccgccctgaacgacagccggtactgcctgagcagcagactgagagtgtccgccaccttctggcagaacccccggaaccacttcagatgccaggtgcagttctacggcctgagcgagaacgacgagtggacccaggacagagccaagcccgtgacccagatcgtgtctgccgaagcctggggcagagccgatgatgtgattaagatccactggcaggaaaagaagtccaacaccatcctgggcagccaggaaggcaacaccatgaagaccaacgacacctacatgaagttcagctggctgaccgtgcccgagaagtccctggacaaagaacacagatgcatcgtgcggcacgaaaacaacaagaacggcgtggaccaggaaatcatcttcccacccatcaagaccgatgtgattacaatggaccccaaggacaactgctccaaggacgccaacgataccctgctgctccagctgaccaacaccagcgcctactacatgtacttgttgctgctgctgaagtccgtggtgtacttcgccatcatcacatgctgcctgctgcggagaaccgccttctgctgcaacggcgagaagtct

SEQ ID NO: 7346 - DNA, 2211 bp, synthetic construct
  source 1..2211: mol_type = other DNA
atggccttaccagtgaccgccttgctcctgccgctggccttgctgctccacgccgccaggccgctgcctgttctgacacagcctccatccgtgtctgtggcccctggaaagaccgccagaatcacatgcggcggcaacaacatcggcagcaagagcgtgcactggtatcagcagaagcctggacaggctcctgtgctggtggtgtacgacgacagcgatagacctagcggcatccccgagagattcagcggcagcaattccggcaataccgccacactgaccatcagcagagtggaagctggcgacgaggccgactactactgccaagtgtgggacagcagcagcgactacgtggtgtttggcggcggaacaaagctgacagtgcttctcgagatccagaaccctgatcctgccgtgtaccagctgcgggatagcaagagcagcgacaagagcgtgtgtctgttcaccgacttcgacagccagaccaacgtgtcccagagcaaggactccgacgtgtacatcaccgataagtgcgtgctggacatgcggagcatggacttcaagagcaactccgccgtggcctggtccaacaagtccgatttcgcctgcgccaacgccttcaacaacagcattatccccgaggacacattcttcccaagccccgagagcagcgactccaccgaccacgtgaagcccaaagagacagagaacaccaagcagcccagcaagagctgccacaagcccaaggccatcgtgcacaccgagaaagtgaacatgatgagcctgaccgtgctgggcctgcggatgctgttcgccaaaaccgtggccgtgaacttcctgctgaccgccaagctgttcttcctccgcgccaagagaagcggatctggcgtgaagcagaccctgaatttcgacctgctgaagctggctggcgacgtggaatccaacccaggccctactagtatggactggatttggcgcatccttttccttgtcggcgctgctaccggcgcgcattccttcgaagaagttcaactggtgcagagcggagccgaagtgaagaagccaggcgagagcctgaagattagctgcaaaggcagcggctacagcttcaccagctactggatcggctgggtccgacagatgcctggcaaaggactggaatggatgggcatcatctaccccggcgacagcgacaccagatacagccctagctttcagggccaagtgaccatctccgccgacaagagcatcagcacagcctacctccagtggtcctctctgaaggccagcgataccgccatgtactactgcgccagacaagtctggggatggcaaggcggcatgtaccccaggtctaactggtggtacaacctggactcttggggccagggcacactggtcacagtctcttctacgcgtgaggacctgaagaacgtgttcccacctgaggtggccgtgttcgagcctagcgaggccgagatcagccacacccagaaagccaccctcgtgtgcctggctaccggcttctaccccgaccatgtggaactgtcttggtgggtcaacggcaaagaggtgcacagcggcgtgtgtaccgacccccagccactgaaagaacagcccgccctgaacgacagccggtactgcctgagcagcagactgagagtgtccgccaccttctggcagaacccccggaaccacttcagatgccaggtgcagttctacggcctgagcgagaacgacgagtggacccaggacagagccaagcccgtgacccagatcgtgtctgccgaagcctggggcagagccgatgatgtgattaagatccactggcaggaaaagaagtccaacaccatcctgggcagccaggaaggcaacaccatgaagaccaacgacacctacatgaagttcagctggctgaccgtgcccgagaagtccctggacaaagaacacagatgcatcgtgcggcacgaaaacaacaagaacggcgtggaccaggaaatcatcttcccacccatcaagaccgatgtgattacaatggaccccaaggacaactgctccaaggacgccaacgataccctgctgctccagctgaccaacaccagcgcctactacatgtacttgttgctgctgctgaagtccgtggtgtacttcgccatcatcacatgctgcctgctgcggagaaccgccttctgctgcaacggcgagaagtct

SEQ ID NO: 7347 - DNA, 2190 bp, synthetic construct
  source 1..2190: mol_type = other DNA
atggccttaccagtgaccgccttgctcctgccgctggccttgctgctccacgccgccaggccggagctggtcatgacacagagccctgcttctctggccgtgtcactgggacagagagccaccatctcttgcagagccagcgagagcgtggacagctacggcaagagcttcatgcactggtatcagctcaagcccggccagcctcctaagctgctgatctacagagcctccaacctggaaagcggcgtgccagccagattttctggcagcggcagcagaaccgacttcaccctgaccattgatcccgtggaagccgatgatgccgccacctactactgccagcagaacaacgaggacccctggacatttggcggaggcaccaagctggaaatcaaactcgagatccagaaccctgatcctgccgtgtaccagctgcgggatagcaagagcagcgacaagagcgtgtgtctgttcaccgacttcgacagccagaccaacgtgtcccagagcaaggactccgacgtgtacatcaccgataagtgcgtgctggacatgcggagcatggacttcaagagcaactccgccgtggcctggtccaacaagtccgatttcgcctgcgccaacgccttcaacaacagcattatccccgaggacacattcttcccaagccccgagagcagcgactccaccgaccacgtgaagcccaaagagacagagaacaccaagcagcccagcaagagctgccacaagcccaaggccatcgtgcacaccgagaaagtgaacatgatgagcctgaccgtgctgggcctgcggatgctgttcgccaaaaccgtggccgtgaacttcctgctgaccgccaagctgttcttcctccgcgccaagagaagcggatctggcgtgaagcagaccctgaatttcgacctgctgaagctggctggcgacgtggaatccaacccaggccctactagtatggactggatttggcgcatccttttccttgtcggcgctgctaccggcgcgcattccttcgaagaagtgcagctcgaacagtctggccccgagcttgtgaaacctggcgcttccgtgaagatgagctgcaaggccagcggctacaccttcaccaactactacatgaaatgggtcaagcagagccacggcaagtccctggaatggatcggcgatctgaaccccaacaacggcgacaccttctacaaccagaagttcaagggcaaagccacactgaccgtggacaagagcagcaacaccgcctacatgcagctcaactccctgaccagcgaggacagcgccgtgtactactgtgccagaaccggcagatacgaagagaacgctatggactactggggccagggcacaagcgtgacagtctcttctacgcgtgaggacctgaagaacgtgttcccacctgaggtggccgtgttcgagcctagcgaggccgagatcagccacacccagaaagccaccctcgtgtgcctggctaccggcttctaccccgaccatgtggaactgtcttggtgggtcaacggcaaagaggtgcacagcggcgtgtgtaccgacccccagccactgaaagaacagcccgccctgaacgacagccggtactgcctgagcagcagactgagagtgtccgccaccttctggcagaacccccggaaccacttcagatgccaggtgcagttctacggcctgagcgagaacgacgagtggacccaggacagagccaagcccgtgacccagatcgtgtctgccgaagcctggggcagagccgatgatgtgattaagatccactggcaggaaaagaagtccaacaccatcctgggcagccaggaaggcaacaccatgaagaccaacgacacctacatgaagttcagctggctgaccgtgcccgagaagtccctggacaaagaacacagatgcatcgtgcggcacgaaaacaacaagaacggcgtggaccaggaaatcatcttcccacccatcaagaccgatgtgattacaatggaccccaaggacaactgctccaaggacgccaacgataccctgctgctccagctgaccaacaccagcgcctactacatgtacttgttgctgctgctgaagtccgtggtgtacttcgccatcatcacatgctgcctgctgcggagaaccgccttctgctgcaacggcgagaagtct

SEQ ID NO: 7348 - DNA, 2172 bp, synthetic construct
  source 1..2172: mol_type = other DNA
atggccttaccagtgaccgccttgctcctgccgctggccttgctgctccacgccgccaggccggacgtggtcatgacacagagcccttctagcctgtctgccagcgtgggcgacagagtgaccatcacctgtatggcctccgaggacatctacatccggctggcctggtatcagcagaagcctggaaacgcccctaagctgctgatctacgccgccacctctctggaaacaggcgtgccaagcagattttccggcagcggctctggcaccgatttcaccctgacaatatccagcctccagcctgaggacttcgccacctactactgccagcagtattggagcagcccctggacatttggcggaggcaccaaggtggaaatcaaactcgagatccagaaccctgatcctgccgtgtaccagctgcgggatagcaagagcagcgacaagagcgtgtgtctgttcaccgacttcgacagccagaccaacgtgtcccagagcaaggactccgacgtgtacatcaccgataagtgcgtgctggacatgcggagcatggacttcaagagcaactccgccgtggcctggtccaacaagtccgatttcgcctgcgccaacgccttcaacaacagcattatccccgaggacacattcttcccaagccccgagagcagcgactccaccgaccacgtgaagcccaaagagacagagaacaccaagcagcccagcaagagctgccacaagcccaaggccatcgtgcacaccgagaaagtgaacatgatgagcctgaccgtgctgggcctgcggatgctgttcgccaaaaccgtggccgtgaacttcctgctgaccgccaagctgttcttcctccgcgccaagagaagcggatctggcgtgaagcagaccctgaatttcgacctgctgaagctggctggcgacgtggaatccaacccaggccctactagtatggactggatttggcgcatccttttccttgtcggcgctgctaccggcgcgcattccttcgaacaggttcagctgcaagagtctggccccggactggtcaagcctagccaaacactgagcctgacctgtaccgtgtccggctacagcatcaccagcgactacacctggaactggatcagacagcctcctggcaacggactggaatggatcggctacatcacctacagcggcagcaccagctacaaccccagcctgaaaagccgggtgctgatctccgtggacaccagcaagaatcaggtgtccctgaagctgagcagcgtgacagccgctgataccgccgtgtactactgtgccagactggggagaagatacacaatggactactggggccagggcaccaccgtgacagtttcttctacgcgtgaggacctgaagaacgtgttcccacctgaggtggccgtgttcgagcctagcgaggccgagatcagccacacccagaaagccaccctcgtgtgcctggctaccggcttctaccccgaccatgtggaactgtcttggtgggtcaacggcaaagaggtgcacagcggcgtgtgtaccgacccccagccactgaaagaacagcccgccctgaacgacagccggtactgcctgagcagcagactgagagtgtccgccaccttctggcagaacccccggaaccacttcagatgccaggtgcagttctacggcctgagcgagaacgacgagtggacccaggacagagccaagcccgtgacccagatcgtgtctgccgaagcctggggcagagccgatgatgtgattaagatccactggcaggaaaagaagtccaacaccatcctgggcagccaggaaggcaacaccatgaagaccaacgacacctacatgaagttcagctggctgaccgtgcccgagaagtccctggacaaagaacacagatgcatcgtgcggcacgaaaacaacaagaacggcgtggaccaggaaatcatcttcccacccatcaagaccgatgtgattacaatggaccccaaggacaactgctccaaggacgccaacgataccctgctgctccagctgaccaacaccagcgcctactacatgtacttgttgctgctgctgaagtccgtggtgtacttcgccatcatcacatgctgcctgctgcggagaaccgccttctgctgcaacggcgagaagtct

SEQ ID NO: 7349 - DNA, 2184 bp, synthetic construct
  source 1..2184: mol_type = other DNA
atggccttaccagtgaccgccttgctcctgccgctggccttgctgctccacgccgccaggccggatattgtgctgactcagagccctgccactctgagccttagtccaggcgacagagctaccatctcctgtagggcctctgaatccgtgaccattctgggctctcatctcatatattggtatcaacaaaagccgggccagcctccacggctgctcattcaactggcctctaacgtgcagaccggcgtgccagctagattttctggctctggctcccggaccgactttacactgacaatcagctccgtggaacccgaagattttgccgtctattattgcctccagtccaggaccattcctcggacattcggccagggaacaaaactcgaaatcaagcggctcgagatccagaaccctgatcctgccgtgtaccagctgcgggatagcaagagcagcgacaagagcgtgtgtctgttcaccgacttcgacagccagaccaacgtgtcccagagcaaggactccgacgtgtacatcaccgataagtgcgtgctggacatgcggagcatggacttcaagagcaactccgccgtggcctggtccaacaagtccgatttcgcctgcgccaacgccttcaacaacagcattatccccgaggacacattcttcccaagccccgagagcagcgactccaccgaccacgtgaagcccaaagagacagagaacaccaagcagcccagcaagagctgccacaagcccaaggccatcgtgcacaccgagaaagtgaacatgatgagcctgaccgtgctgggcctgcggatgctgttcgccaaaaccgtggccgtgaacttcctgctgaccgccaagctgttcttcctccgcgccaagagaagcggatctggcgtgaagcagaccctgaatttcgacctgctgaagctggctggcgacgtggaatccaacccaggccctactagtatggactggatttggcgcatccttttccttgtcggcgctgctaccggcgcgcattccttcgaacaggtgcagctcgttcagagtggccccgaagtgaaaaagccaggcgagtccgtgaagatttcctgcaaagcctccggctacacattccggcactactctatgaattgggtcaagcaggccccaggccagggccttaagtggatgggacgcatcaataccgagtccggcgtgccaatctacgccgatgacttcaaaggccggttcagcttcaccgtggatacctctgcctccaccgcctacctggaaatcagcagcctgaccagcgaggatacagctgtgtacttctgtagcaacgattacctctacagcctggatttctggggacagggaaccacactgaccgtgtctagcacgcgtgaggacctgaagaacgtgttcccacctgaggtggccgtgttcgagcctagcgaggccgagatcagccacacccagaaagccaccctcgtgtgcctggctaccggcttctaccccgaccatgtggaactgtcttggtgggtcaacggcaaagaggtgcacagcggcgtgtgtaccgacccccagccactgaaagaacagcccgccctgaacgacagccggtactgcctgagcagcagactgagagtgtccgccaccttctggcagaacccccggaaccacttcagatgccaggtgcagttctacggcctgagcgagaacgacgagtggacccaggacagagccaagcccgtgacccagatcgtgtctgccgaagcctggggcagagccgatgatgtgattaagatccactggcaggaaaagaagtccaacaccatcctgggcagccaggaaggcaacaccatgaagaccaacgacacctacatgaagttcagctggctgaccgtgcccgagaagtccctggacaaagaacacagatgcatcgtgcggcacgaaaacaacaagaacggcgtggaccaggaaatcatcttcccacccatcaagaccgatgtgattacaatggaccccaaggacaactgctccaaggacgccaacgataccctgctgctccagctgaccaacaccagcgcctactacatgtacttgttgctgctgctgaagtccgtggtgtacttcgccatcatcacatgctgcctgctgcggagaaccgccttctgctgcaacggcgagaagtct

SEQ ID NO: 7350 - DNA, 2184 bp, synthetic construct
  source 1..2184: mol_type = other DNA
atggccttaccagtgaccgccttgctcctgccgctggccttgctgctccacgccgccaggccggacatcgtgctgacacagtctcccgccacactgtcactgagccctggcgatagagccacactgagctgtagagccagcgagagcgtgacaatcctgggcagccacctgatctactggtatcagcagaagcccggacaggcccctagactgctgattcagctcgccagcaatgtgcagacaggcatccctgccagattttccggcagcggcagcagaaccgatttcaccctgaccataagcagcctggaacctgaggacttcgccgtgtactactgcctccagagccggacaatccccagaacctttggacagggcaccaagctggaaatcaagagactcgagatccagaaccctgatcctgccgtgtaccagctgcgggatagcaagagcagcgacaagagcgtgtgtctgttcaccgacttcgacagccagaccaacgtgtcccagagcaaggactccgacgtgtacatcaccgataagtgcgtgctggacatgcggagcatggacttcaagagcaactccgccgtggcctggtccaacaagtccgatttcgcctgcgccaacgccttcaacaacagcattatccccgaggacacattcttcccaagccccgagagcagcgactccaccgaccacgtgaagcccaaagagacagagaacaccaagcagcccagcaagagctgccacaagcccaaggccatcgtgcacaccgagaaagtgaacatgatgagcctgaccgtgctgggcctgcggatgctgttcgccaaaaccgtggccgtgaacttcctgctgaccgccaagctgttcttcctccgcgccaagagaagcggatctggcgtgaagcagaccctgaatttcgacctgctgaagctggctggcgacgtggaatccaacccaggccctactagtatggactggatttggcgcatccttttccttgtcggcgctgctaccggcgcgcattccttcgaacaggttcagctggtgcagtctggcagcgagctgaagaaacctggcgagagcgtgaagatcagctgcaaggccagcggctacaccttcacacactacagcatgaactgggtccgacaggcccctggacaaggactggaatggatgggcagaatcaacaccgagacaggcgagcccctgtacgccgacgatttcaagggcagattcgtgttcagcctggacaccagcgccagcacagcctatctccagatcagctctctgaaggccgaggacaccgccgtgtactactgctccaacgactacctgtactccctggactattggggccagggcacactggtcacagtgtctagtacgcgtgaggacctgaagaacgtgttcccacctgaggtggccgtgttcgagcctagcgaggccgagatcagccacacccagaaagccaccctcgtgtgcctggctaccggcttctaccccgaccatgtggaactgtcttggtgggtcaacggcaaagaggtgcacagcggcgtgtgtaccgacccccagccactgaaagaacagcccgccctgaacgacagccggtactgcctgagcagcagactgagagtgtccgccaccttctggcagaacccccggaaccacttcagatgccaggtgcagttctacggcctgagcgagaacgacgagtggacccaggacagagccaagcccgtgacccagatcgtgtctgccgaagcctggggcagagccgatgatgtgattaagatccactggcaggaaaagaagtccaacaccatcctgggcagccaggaaggcaacaccatgaagaccaacgacacctacatgaagttcagctggctgaccgtgcccgagaagtccctggacaaagaacacagatgcatcgtgcggcacgaaaacaacaagaacggcgtggaccaggaaatcatcttcccacccatcaagaccgatgtgattacaatggaccccaaggacaactgctccaaggacgccaacgataccctgctgctccagctgaccaacaccagcgcctactacatgtacttgttgctgctgctgaagtccgtggtgtacttcgccatcatcacatgctgcctgctgcggagaaccgccttctgctgcaacggcgagaagtct

SEQ ID NO: 7351 - DNA, 2187 bp, synthetic construct
  source 1..2187: mol_type = other DNA
atggccttaccagtgaccgccttgctcctgccgctggccttgctgctccacgccgccaggccggacatccagctgactcagagccctagctttctgagcgccagcgtgggcgacagagtgaccattacatgtagagccagccagggcatcagcaccgacctgaactggtatcagcagaagcctggcaaggcccctaagctgctgatctacgccgccagcaatctggaaagcggcgtgccaagcagattttccggctctggcagcggcaccgagttcaccctgacaatatctagcctccagcctgaggacttcgccacctactactgccagcagagctacaactggccctacacctttggcggaggcaccaaggtggaaatcaagagactcgagatccagaaccctgatcctgccgtgtaccagctgcgggatagcaagagcagcgacaagagcgtgtgtctgttcaccgacttcgacagccagaccaacgtgtcccagagcaaggactccgacgtgtacatcaccgataagtgcgtgctggacatgcggagcatggacttcaagagcaactccgccgtggcctggtccaacaagtccgatttcgcctgcgccaacgccttcaacaacagcattatccccgaggacacattcttcccaagccccgagagcagcgactccaccgaccacgtgaagcccaaagagacagagaacaccaagcagcccagcaagagctgccacaagcccaaggccatcgtgcacaccgagaaagtgaacatgatgagcctgaccgtgctgggcctgcggatgctgttcgccaaaaccgtggccgtgaacttcctgctgaccgccaagctgttcttcctccgcgccaagagaagcggatctggcgtgaagcagaccctgaatttcgacctgctgaagctggctggcgacgtggaatccaacccaggccctactagtatggactggatttggcgcatccttttccttgtcggcgctgctaccggcgcgcattccttcgaagaagttcagctggttgaatcaggcggaggactcgtgaaacctggcggctctctgagactgtcttgtgccgccagcggcttcaccttcagcaacttcgagatgaactgggtccgacaggccccaggcaaaggactggaatgggtgtccggcatcagctccaatggccggtacatcaactacgccgacagcgtgaagggcagattcaccatcagccgggacaacgccaagaacagcctgtacctccagatgaactccctgagagccgaggacaccgccgtgtactattgtgccagagtggtggacttcgaccaggactacaacggcttcgactattggggccagggcaccctggttaccgttagctctacgcgtgaggacctgaagaacgtgttcccacctgaggtggccgtgttcgagcctagcgaggccgagatcagccacacccagaaagccaccctcgtgtgcctggctaccggcttctaccccgaccatgtggaactgtcttggtgggtcaacggcaaagaggtgcacagcggcgtgtgtaccgacccccagccactgaaagaacagcccgccctgaacgacagccggtactgcctgagcagcagactgagagtgtccgccaccttctggcagaacccccggaaccacttcagatgccaggtgcagttctacggcctgagcgagaacgacgagtggacccaggacagagccaagcccgtgacccagatcgtgtctgccgaagcctggggcagagccgatgatgtgattaagatccactggcaggaaaagaagtccaacaccatcctgggcagccaggaaggcaacaccatgaagaccaacgacacctacatgaagttcagctggctgaccgtgcccgagaagtccctggacaaagaacacagatgcatcgtgcggcacgaaaacaacaagaacggcgtggaccaggaaatcatcttcccacccatcaagaccgatgtgattacaatggaccccaaggacaactgctccaaggacgccaacgataccctgctgctccagctgaccaacaccagcgcctactacatgtacttgttgctgctgctgaagtccgtggtgtacttcgccatcatcacatgctgcctgctgcggagaaccgccttctgctgcaacggcgagaagtct

SEQ ID NO: 7352 - DNA, 2181 bp, synthetic construct
  source 1..2181: mol_type = other DNA
atggccttaccagtgaccgccttgctcctgccgctggccttgctgctccacgccgccaggccggacatccaactgactcagagccccagctttctgagcgcctctgtgggcgacagagtgaccatcacatgtagtctcagcctgggcatcagcacatggcgggattggtttccgccgaggcttggcaggggccttgagccgctgacctacgccgccagcacactgcaaagcggagtgcctagcagattttccggcagcggctctggcaccgagttcaccctgacaatatccagcctccagcctgaggacttcgccacctactactgccagcagctcaacagctaccctctgacctttggcggaggcaccaaggtggaaatcaagagactcgagatccagaaccctgatcctgccgtgtaccagctgcgggatagcaagagcagcgacaagagcgtgtgtctgttcaccgacttcgacagccagaccaacgtgtcccagagcaaggactccgacgtgtacatcaccgataagtgcgtgctggacatgcggagcatggacttcaagagcaactccgccgtggcctggtccaacaagtccgatttcgcctgcgccaacgccttcaacaacagcattatccccgaggacacattcttcccaagccccgagagcagcgactccaccgaccacgtgaagcccaaagagacagagaacaccaagcagcccagcaagagctgccacaagcccaaggccatcgtgcacaccgagaaagtgaacatgatgagcctgaccgtgctgggcctgcggatgctgttcgccaaaaccgtggccgtgaacttcctgctgaccgccaagctgttcttcctccgcgccaagagaagcggatctggcgtgaagcagaccctgaatttcgacctgctgaagctggctggcgacgtggaatccaacccaggccctactagtatggactggatttggcgcatccttttccttgtcggcgctgctaccggcgcgcattccttcgaagaagttcaactggttgagtctggtggcggcctggttaagcctggcggatctctgagactgagctgtgccgccagcggcttcacctttagcacatacggcatgagctgggtccgacaggcccctggaaaaggacttgagtgggtcgcctacatcaacaacggctccggctacatctactacgccgacagcgtgaagggcagattcaccatcagccgggacaacgccaagaacagcctgtacctccagatgaactccctgagagccgaggacaccgccgtgtactattgtgccagaggacagtggtggagcggcggagactttgattattggggccagggcaccctggtcaccgtttcttctacgcgtgaggacctgaagaacgtgttcccacctgaggtggccgtgttcgagcctagcgaggccgagatcagccacacccagaaagccaccctcgtgtgcctggctaccggcttctaccccgaccatgtggaactgtcttggtgggtcaacggcaaagaggtgcacagcggcgtgtgtaccgacccccagccactgaaagaacagcccgccctgaacgacagccggtactgcctgagcagcagactgagagtgtccgccaccttctggcagaacccccggaaccacttcagatgccaggtgcagttctacggcctgagcgagaacgacgagtggacccaggacagagccaagcccgtgacccagatcgtgtctgccgaagcctggggcagagccgatgatgtgattaagatccactggcaggaaaagaagtccaacaccatcctgggcagccaggaaggcaacaccatgaagaccaacgacacctacatgaagttcagctggctgaccgtgcccgagaagtccctggacaaagaacacagatgcatcgtgcggcacgaaaacaacaagaacggcgtggaccaggaaatcatcttcccacccatcaagaccgatgtgattacaatggaccccaaggacaactgctccaaggacgccaacgataccctgctgctccagctgaccaacaccagcgcctactacatgtacttgttgctgctgctgaagtccgtggtgtacttcgccatcatcacatgctgcctgctgcggagaaccgccttctgctgcaacggcgagaagtct

SEQ ID NO: 7353 - DNA, 2184 bp, synthetic construct
  source 1..2184: mol_type = other DNA
atggccttaccagtgaccgccttgctcctgccgctggccttgctgctccacgccgccaggccggagatcgtgctgacacagtctcccgccacactgtcactgtctccaggcgaaagagccacactgagctgtagcgccagcagcagcgtgtcctacatgtactggtatcagcagaagcccggacaggcccctagactgctgatctacagaaccagcaacctggcctctggcatccccgccagattttctggctctggcagcggcaccgatttcaccctgaccataagcagcctggaacctgaggacttcgccgtgtactactgccagcagtaccacagctaccccaccacctttggacagggcaccaaggtggaaatcaagcggacagttctcgagatccagaaccctgatcctgccgtgtaccagctgcgggatagcaagagcagcgacaagagcgtgtgtctgttcaccgacttcgacagccagaccaacgtgtcccagagcaaggactccgacgtgtacatcaccgataagtgcgtgctggacatgcggagcatggacttcaagagcaactccgccgtggcctggtccaacaagtccgatttcgcctgcgccaacgccttcaacaacagcattatccccgaggacacattcttcccaagccccgagagcagcgactccaccgaccacgtgaagcccaaagagacagagaacaccaagcagcccagcaagagctgccacaagcccaaggccatcgtgcacaccgagaaagtgaacatgatgagcctgaccgtgctgggcctgcggatgctgttcgccaaaaccgtggccgtgaacttcctgctgaccgccaagctgttcttcctccgcgccaagagaagcggatctggcgtgaagcagaccctgaatttcgacctgctgaagctggctggcgacgtggaatccaacccaggccctactagtatggactggatttggcgcatccttttccttgtcggcgctgctaccggcgcgcattccttcgaagaagtgcagctggttgaatcaggtggcggcctggttcaacctggcggatctctgagactgtcttgtgccgccagcggcttcagcttcaacacctacgccatgaactgggtccgacaggctcctggcaaaggactggaatgggtgtcccacatcagaagcaagagcaacaacttcgccacctactacgccgacagcgtgaaggacagattcaccatcagccgggacaacgccaagaacagcctgtacctccagatgaactccctgagagccgaggacaccgccgtgtattattgcgccagacaaggcggcgacttccctatggattattggggccagggcaccctggtcaccgtttcttctacgcgtgaggacctgaagaacgtgttcccacctgaggtggccgtgttcgagcctagcgaggccgagatcagccacacccagaaagccaccctcgtgtgcctggctaccggcttctaccccgaccatgtggaactgtcttggtgggtcaacggcaaagaggtgcacagcggcgtgtgtaccgacccccagccactgaaagaacagcccgccctgaacgacagccggtactgcctgagcagcagactgagagtgtccgccaccttctggcagaacccccggaaccacttcagatgccaggtgcagttctacggcctgagcgagaacgacgagtggacccaggacagagccaagcccgtgacccagatcgtgtctgccgaagcctggggcagagccgatgatgtgattaagatccactggcaggaaaagaagtccaacaccatcctgggcagccaggaaggcaacaccatgaagaccaacgacacctacatgaagttcagctggctgaccgtgcccgagaagtccctggacaaagaacacagatgcatcgtgcggcacgaaaacaacaagaacggcgtggaccaggaaatcatcttcccacccatcaagaccgatgtgattacaatggaccccaaggacaactgctccaaggacgccaacgataccctgctgctccagctgaccaacaccagcgcctactacatgtacttgttgctgctgctgaagtccgtggtgtacttcgccatcatcacatgctgcctgctgcggagaaccgccttctgctgcaacggcgagaagtct

SEQ ID NO: 7354 - DNA, 2172 bp, synthetic construct
  source 1..2172: mol_type = other DNA
atggccttaccagtgaccgccttgctcctgccgctggccttgctgctccacgccgccaggccggacgtggtcatgacacagagcccttctagcctgtctgccagcgtgggcgacagagtgaccatcacctgtaaagccagcgaggacatctacatccggctggcctggtatcagcagaagcctggaaaggcccctaagctgctgatctacgccgccacctctctggaaacaggcgtgccaagcagattttccggcagcggctctggcaccgatttcaccctgacaatatccagcctccagcctgaggacttcgccacctactactgccagcagtattggaccacaccttggacctttggcggaggcaccaaggtggaaatcaaactcgagatccagaaccctgatcctgccgtgtaccagctgcgggatagcaagagcagcgacaagagcgtgtgtctgttcaccgacttcgacagccagaccaacgtgtcccagagcaaggactccgacgtgtacatcaccgataagtgcgtgctggacatgcggagcatggacttcaagagcaactccgccgtggcctggtccaacaagtccgatttcgcctgcgccaacgccttcaacaacagcattatccccgaggacacattcttcccaagccccgagagcagcgactccaccgaccacgtgaagcccaaagagacagagaacaccaagcagcccagcaagagctgccacaagcccaaggccatcgtgcacaccgagaaagtgaacatgatgagcctgaccgtgctgggcctgcggatgctgttcgccaaaaccgtggccgtgaacttcctgctgaccgccaagctgttcttcctccgcgccaagagaagcggatctggcgtgaagcagaccctgaatttcgacctgctgaagctggctggcgacgtggaatccaacccaggccctactagtatggactggatttggcgcatccttttccttgtcggcgctgctaccggcgcgcattccttcgaacaggtgcagctccaagagtctggccctggactggtcaagcctagccagacactgagcctgacctgtaccgtgtccggctacagcatcaccatcgactacacctggaactggatcagacagcctcctggcaaaggactggaatggatcggctacatcacctacagcggcagcaccgactacaaccccagcctgaaaagccgggtgctgatctccgtggacaccagcaagaatcaggtgtccctgaagctgagcagcgtgacagccgctgataccgccgtgtactactgtgccagactgggcagaagatacgccctggattattggggccagggcaccaccgtgacagtgtcatctacgcgtgaggacctgaagaacgtgttcccacctgaggtggccgtgttcgagcctagcgaggccgagatcagccacacccagaaagccaccctcgtgtgcctggctaccggcttctaccccgaccatgtggaactgtcttggtgggtcaacggcaaagaggtgcacagcggcgtgtgtaccgacccccagccactgaaagaacagcccgccctgaacgacagccggtactgcctgagcagcagactgagagtgtccgccaccttctggcagaacccccggaaccacttcagatgccaggtgcagttctacggcctgagcgagaacgacgagtggacccaggacagagccaagcccgtgacccagatcgtgtctgccgaagcctggggcagagccgatgatgtgattaagatccactggcaggaaaagaagtccaacaccatcctgggcagccaggaaggcaacaccatgaagaccaacgacacctacatgaagttcagctggctgaccgtgcccgagaagtccctggacaaagaacacagatgcatcgtgcggcacgaaaacaacaagaacggcgtggaccaggaaatcatcttcccacccatcaagaccgatgtgattacaatggaccccaaggacaactgctccaaggacgccaacgataccctgctgctccagctgaccaacaccagcgcctactacatgtacttgttgctgctgctgaagtccgtggtgtacttcgccatcatcacatgctgcctgctgcggagaaccgccttctgctgcaacggcgagaagtct

SEQ ID NO: 7355 - DNA, 2184 bp, synthetic construct
  source 1..2184: mol_type = other DNA
atggccttaccagtgaccgccttgctcctgccgctggccttgctgctccacgccgccaggccggacatccagatgacccagaccacaagcagcctgtctgccagcctgggcgacagagtgaccatctcttgtagagccagccaggacatcagcaactacctgaactggtatcagcagaaacccgacggcaccgtgaagctgctgatctactacaccagcatcctgcacagcggcgtgcccagcagattttctggctctggcagcggcaccgactacagcctgaccatcagcaatctggaacaagaggacttcgctacctacttctgccagcaaggcaacaccctgccttggacatttggcggaggcaccaagctggaaatcaaagctctcgagatccagaaccctgatcctgccgtgtaccagctgcgggatagcaagagcagcgacaagagcgtgtgtctgttcaccgacttcgacagccagaccaacgtgtcccagagcaaggactccgacgtgtacatcaccgataagtgcgtgctggacatgcggagcatggacttcaagagcaactccgccgtggcctggtccaacaagtccgatttcgcctgcgccaacgccttcaacaacagcattatccccgaggacacattcttcccaagccccgagagcagcgactccaccgaccacgtgaagcccaaagagacagagaacaccaagcagcccagcaagagctgccacaagcccaaggccatcgtgcacaccgagaaagtgaacatgatgagcctgaccgtgctgggcctgcggatgctgttcgccaaaaccgtggccgtgaacttcctgctgaccgccaagctgttcttcctccgcgccaagagaagcggatctggcgtgaagcagaccctgaatttcgacctgctgaagctggctggcgacgtggaatccaacccaggccctactagtatggactggatttggcgcatccttttccttgtcggcgctgctaccggcgcgcattccttcgaagtgcaactggttgaatctggcggcggactggttaagcctggcggatctctgaagctgagctgtgccgcctctggcttcgccttcagcatctacgatatgagctgggtccgacagacccctgagaagagactggaatgggtcgcctacatctctagcggcggagggacctactatcccgacacagtgaagggcagattcaccatctccagagacaacgccaagaacaccctgtacctccagatgagcagcctgaagtccgaggacaccgccatgtactactgcgccagacacagcggctatggcacacattggggagtgctgtttgcctactggggccagggaacactggtcacagtttctgctacgcgtgaggacctgaagaacgtgttcccacctgaggtggccgtgttcgagcctagcgaggccgagatcagccacacccagaaagccaccctcgtgtgcctggctaccggcttctaccccgaccatgtggaactgtcttggtgggtcaacggcaaagaggtgcacagcggcgtgtgtaccgacccccagccactgaaagaacagcccgccctgaacgacagccggtactgcctgagcagcagactgagagtgtccgccaccttctggcagaacccccggaaccacttcagatgccaggtgcagttctacggcctgagcgagaacgacgagtggacccaggacagagccaagcccgtgacccagatcgtgtctgccgaagcctggggcagagccgatgatgtgattaagatccactggcaggaaaagaagtccaacaccatcctgggcagccaggaaggcaacaccatgaagaccaacgacacctacatgaagttcagctggctgaccgtgcccgagaagtccctggacaaagaacacagatgcatcgtgcggcacgaaaacaacaagaacggcgtggaccaggaaatcatcttcccacccatcaagaccgatgtgattacaatggaccccaaggacaactgctccaaggacgccaacgataccctgctgctccagctgaccaacaccagcgcctactacatgtacttgttgctgctgctgaagtccgtggtgtacttcgccatcatcacatgctgcctgctgcggagaaccgccttctgctgcaacggcgagaagtct

SEQ ID NO: 7356 - DNA, 2217 bp, synthetic construct
  source 1..2217: mol_type = other DNA
atggccttaccagtgaccgccttgctcctgccgctggccttgctgctccacgccgccaggccggacatcgtgatgacacagagccctgatagcctggccgtgtctctgggagagagagccaccatcaactgcaagagcagccagagcctgctgtacagaagcaaccagaagaactacctggcctggtatcagcagaagcccggccagcctcctaagctgctgatctactgggccagcaccagagaaagcggcgtgcccgatagattttctggctctggcagcggcaccgacttcaccctgacaatttctagcctgcaagccgaggacgtggccgtgtactactgccagcagtattacaactaccccagaaccttcggccagggcaccaaggtggaaatcaagagaacagttctcgagatccagaaccctgatcctgccgtgtaccagctgcgggatagcaagagcagcgacaagagcgtgtgtctgttcaccgacttcgacagccagaccaacgtgtcccagagcaaggactccgacgtgtacatcaccgataagtgcgtgctggacatgcggagcatggacttcaagagcaactccgccgtggcctggtccaacaagtccgatttcgcctgcgccaacgccttcaacaacagcattatccccgaggacacattcttcccaagccccgagagcagcgactccaccgaccacgtgaagcccaaagagacagagaacaccaagcagcccagcaagagctgccacaagcccaaggccatcgtgcacaccgagaaagtgaacatgatgagcctgaccgtgctgggcctgcggatgctgttcgccaaaaccgtggccgtgaacttcctgctgaccgccaagctgttcttcctccgcgccaagagaagcggatctggcgtgaagcagaccctgaatttcgacctgctgaagctggctggcgacgtggaatccaacccaggccctactagtatggactggatttggcgcatccttttccttgtcggcgctgctaccggcgcgcattccttcgaagaagttcagctgcttgaatcaggcggcggactggttcaacctggcggatctctgagactgagctgtgccgccagcggctacagcatcacaagcgactatgcctggaactgggtccgacaggcccctggcaaaggactggaatgggtgtcctacatcagcaacagcggcagcaccagctacaaccccagcctgaagtcccggttcaccatcagcagagacaacagcaagaacaccctgtacctccagatgaacagcctgagagctgaggacaccgccgtgtattattgcgccaaagagcggaactacgactacgacgattactactacgctatggactactggggccagggaaccctggtcacagtctcttctacgcgtgaggacctgaagaacgtgttcccacctgaggtggccgtgttcgagcctagcgaggccgagatcagccacacccagaaagccaccctcgtgtgcctggctaccggcttctaccccgaccatgtggaactgtcttggtgggtcaacggcaaagaggtgcacagcggcgtgtgtaccgacccccagccactgaaagaacagcccgccctgaacgacagccggtactgcctgagcagcagactgagagtgtccgccaccttctggcagaacccccggaaccacttcagatgccaggtgcagttctacggcctgagcgagaacgacgagtggacccaggacagagccaagcccgtgacccagatcgtgtctgccgaagcctggggcagagccgatgatgtgattaagatccactggcaggaaaagaagtccaacaccatcctgggcagccaggaaggcaacaccatgaagaccaacgacacctacatgaagttcagctggctgaccgtgcccgagaagtccctggacaaagaacacagatgcatcgtgcggcacgaaaacaacaagaacggcgtggaccaggaaatcatcttcccacccatcaagaccgatgtgattacaatggaccccaaggacaactgctccaaggacgccaacgataccctgctgctccagctgaccaacaccagcgcctactacatgtacttgttgctgctgctgaagtccgtggtgtacttcgccatcatcacatgctgcctgctgcggagaaccgccttctgctgcaacggcgagaagtct

SEQ ID NO: 7357 - DNA, 2196 bp, synthetic construct
  source 1..2196: mol_type = other DNA
atggccttaccagtgaccgccttgctcctgccgctggccttgctgctccacgccgccaggccggacgtggtcatgacacagagccctctgagcctgcctgtgacacttggacagcctgccagcatcagctgtagaagcagccagagcctgctgcacagcagcggcaatacctacctggaatggtatcagcagaggcccggacagagccccagacctctgatctacaagatcagcacccggttcagcggcgtgcccgatagattttctggctctggcagcggcaccgacttcaccctgaagattagcagagtggaagccgaggacgtgggcgtgtactactgcttccaaggcagccacgtgccatacacctttggcggcggaacaaaggtggaaatcaagagactcgagatccagaaccctgatcctgccgtgtaccagctgcgggatagcaagagcagcgacaagagcgtgtgtctgttcaccgacttcgacagccagaccaacgtgtcccagagcaaggactccgacgtgtacatcaccgataagtgcgtgctggacatgcggagcatggacttcaagagcaactccgccgtggcctggtccaacaagtccgatttcgcctgcgccaacgccttcaacaacagcattatccccgaggacacattcttcccaagccccgagagcagcgactccaccgaccacgtgaagcccaaagagacagagaacaccaagcagcccagcaagagctgccacaagcccaaggccatcgtgcacaccgagaaagtgaacatgatgagcctgaccgtgctgggcctgcggatgctgttcgccaaaaccgtggccgtgaacttcctgctgaccgccaagctgttcttcctccgcgccaagagaagcggatctggcgtgaagcagaccctgaatttcgacctgctgaagctggctggcgacgtggaatccaacccaggccctactagtatggactggatttggcgcatccttttccttgtcggcgctgctaccggcgcgcattccttcgaacaagttcagctggttcagagcggagccgaagtgaagaaacctggggcctctgtgaaggtgtcctgcaaagcctctggcctgaccatcgaggactactacatgcactgggtccgacaggcccctggacaaggacttgaatggatgggctggatcgaccccgagaacggcgatacagagtacggccctaagttccagggcagagtgaccatgaccagagacaccagcatcaacaccgcctacatggaactgagccggctgagatccgatgacaccgccgtgtactattgcgccgtgcacaatgcccactacggcacttggtttgcctattggggccagggcacactggtcaccgttagctctacgcgtgaggacctgaagaacgtgttcccacctgaggtggccgtgttcgagcctagcgaggccgagatcagccacacccagaaagccaccctcgtgtgcctggctaccggcttctaccccgaccatgtggaactgtcttggtgggtcaacggcaaagaggtgcacagcggcgtgtgtaccgacccccagccactgaaagaacagcccgccctgaacgacagccggtactgcctgagcagcagactgagagtgtccgccaccttctggcagaacccccggaaccacttcagatgccaggtgcagttctacggcctgagcgagaacgacgagtggacccaggacagagccaagcccgtgacccagatcgtgtctgccgaagcctggggcagagccgatgatgtgattaagatccactggcaggaaaagaagtccaacaccatcctgggcagccaggaaggcaacaccatgaagaccaacgacacctacatgaagttcagctggctgaccgtgcccgagaagtccctggacaaagaacacagatgcatcgtgcggcacgaaaacaacaagaacggcgtggaccaggaaatcatcttcccacccatcaagaccgatgtgattacaatggaccccaaggacaactgctccaaggacgccaacgataccctgctgctccagctgaccaacaccagcgcctactacatgtacttgttgctgctgctgaagtccgtggtgtacttcgccatcatcacatgctgcctgctgcggagaaccgccttctgctgcaacggcgagaagtct

SEQ ID NO: 7358 - DNA, 2172 bp, synthetic construct
  source 1..2172: mol_type = other DNA
atggccttaccagtgaccgccttgctcctgccgctggccttgctgctccacgccgccaggccggacatccagatgacacagagccctagcagcctgtctgccagcgtgggagacagagtgaccatcacctgtagagccagcgagaacatctacagcaacctggcctggtatcagcagaagcctggcaaggcccctaagctgctgatctacgccgccaccaatctggctgatggcgtgccaagcagattttccggctctggcagcggcaccgatttcaccctgacaatatccagcctccagcctgaggacttcgccacctactactgccagcacttttggggcacccctacattcggccagggcaccaaggtggaaatcaagagaacagttctcgagatccagaaccctgatcctgccgtgtaccagctgcgggatagcaagagcagcgacaagagcgtgtgtctgttcaccgacttcgacagccagaccaacgtgtcccagagcaaggactccgacgtgtacatcaccgataagtgcgtgctggacatgcggagcatggacttcaagagcaactccgccgtggcctggtccaacaagtccgatttcgcctgcgccaacgccttcaacaacagcattatccccgaggacacattcttcccaagccccgagagcagcgactccaccgaccacgtgaagcccaaagagacagagaacaccaagcagcccagcaagagctgccacaagcccaaggccatcgtgcacaccgagaaagtgaacatgatgagcctgaccgtgctgggcctgcggatgctgttcgccaaaaccgtggccgtgaacttcctgctgaccgccaagctgttcttcctccgcgccaagagaagcggatctggcgtgaagcagaccctgaatttcgacctgctgaagctggctggcgacgtggaatccaacccaggccctactagtatggactggatttggcgcatccttttccttgtcggcgctgctaccggcgcgcattccttcgaagaagtgcagctggttgaatcaggtggcggcctggttcaacctggcggatctctgagactgagctgtgccgcctctggcttcagcctgacaaattacggcgtgcactgggtccgacaggcccctggaaaaggactggaatgggtgtccgtgatttggagcggcggcagcaccgattacaacgccgccttcatcagccggttcaccatcagcgccgacaccagcaagaataccgcctacctccagatgaactccctgagagccgaggacaccgccgtgtactattgcgccagagaactgatccacgctatggacaactggggccagggaaccctggtcacagtctcttctacgcgtgaggacctgaagaacgtgttcccacctgaggtggccgtgttcgagcctagcgaggccgagatcagccacacccagaaagccaccctcgtgtgcctggctaccggcttctaccccgaccatgtggaactgtcttggtgggtcaacggcaaagaggtgcacagcggcgtgtgtaccgacccccagccactgaaagaacagcccgccctgaacgacagccggtactgcctgagcagcagactgagagtgtccgccaccttctggcagaacccccggaaccacttcagatgccaggtgcagttctacggcctgagcgagaacgacgagtggacccaggacagagccaagcccgtgacccagatcgtgtctgccgaagcctggggcagagccgatgatgtgattaagatccactggcaggaaaagaagtccaacaccatcctgggcagccaggaaggcaacaccatgaagaccaacgacacctacatgaagttcagctggctgaccgtgcccgagaagtccctggacaaagaacacagatgcatcgtgcggcacgaaaacaacaagaacggcgtggaccaggaaatcatcttcccacccatcaagaccgatgtgattacaatggaccccaaggacaactgctccaaggacgccaacgataccctgctgctccagctgaccaacaccagcgcctactacatgtacttgttgctgctgctgaagtccgtggtgtacttcgccatcatcacatgctgcctgctgcggagaaccgccttctgctgcaacggcgagaagtct

SEQ ID NO: 7359 - DNA, 2193 bp, synthetic construct
  source 1..2193: mol_type = other DNA
atggccttaccagtgaccgccttgctcctgccgctggccttgctgctccacgccgccaggccggacttcgtgatgacacagagccctctgagcctgcctgtgacacctggcgaacctgccagcatcagctgtagaagcagccagagcatcgtgcacagcaacggcaacacctacctggaatggtatctccagaagcctggacagagcccacagctgctgatctacaaggtgtccaacagattcagcggcgtgcccgacagattttctggcagcggctctggcaccgacttcaccctgaagattagcagagtggaagccgaggacgtgggcgtgtactactgcttccaaggctctcacgtgcccctgacctttggacagggcaccaagctggaaatcaagagactcgagatccagaaccctgatcctgccgtgtaccagctgcgggatagcaagagcagcgacaagagcgtgtgtctgttcaccgacttcgacagccagaccaacgtgtcccagagcaaggactccgacgtgtacatcaccgataagtgcgtgctggacatgcggagcatggacttcaagagcaactccgccgtggcctggtccaacaagtccgatttcgcctgcgccaacgccttcaacaacagcattatccccgaggacacattcttcccaagccccgagagcagcgactccaccgaccacgtgaagcccaaagagacagagaacaccaagcagcccagcaagagctgccacaagcccaaggccatcgtgcacaccgagaaagtgaacatgatgagcctgaccgtgctgggcctgcggatgctgttcgccaaaaccgtggccgtgaacttcctgctgaccgccaagctgttcttcctccgcgccaagagaagcggatctggcgtgaagcagaccctgaatttcgacctgctgaagctggctggcgacgtggaatccaacccaggccctactagtatggactggatttggcgcatccttttccttgtcggcgctgctaccggcgcgcattccttcgaagaagtgcagctggttgaaagcggagccgaagtgaagaaacctggggcctctgtgaaggtgtcctgcaaggccagcggctacacctttaccagctactggattcactgggtccgacaggcccctggacaaggacttgagtggatgggcgagaacgacccctccaacggcaggaccaactacaacgagaagttcaagaaccgcgtgaccctgaccgtggacaccagcatctctaccgcctacatggaactgagccggctgagatccgatgacaccgccgtgtactattgcgccagaggacccaactacttttacagcatggactactggggccagggcacaatggtcaccgttagctctacgcgtgaggacctgaagaacgtgttcccacctgaggtggccgtgttcgagcctagcgaggccgagatcagccacacccagaaagccaccctcgtgtgcctggctaccggcttctaccccgaccatgtggaactgtcttggtgggtcaacggcaaagaggtgcacagcggcgtgtgtaccgacccccagccactgaaagaacagcccgccctgaacgacagccggtactgcctgagcagcagactgagagtgtccgccaccttctggcagaacccccggaaccacttcagatgccaggtgcagttctacggcctgagcgagaacgacgagtggacccaggacagagccaagcccgtgacccagatcgtgtctgccgaagcctggggcagagccgatgatgtgattaagatccactggcaggaaaagaagtccaacaccatcctgggcagccaggaaggcaacaccatgaagaccaacgacacctacatgaagttcagctggctgaccgtgcccgagaagtccctggacaaagaacacagatgcatcgtgcggcacgaaaacaacaagaacggcgtggaccaggaaatcatcttcccacccatcaagaccgatgtgattacaatggaccccaaggacaactgctccaaggacgccaacgataccctgctgctccagctgaccaacaccagcgcctactacatgtacttgttgctgctgctgaagtccgtggtgtacttcgccatcatcacatgctgcctgctgcggagaaccgccttctgctgcaacggcgagaagtct

SEQ ID NO: 7360 - DNA, 2172 bp, synthetic construct
  source 1..2172: mol_type = other DNA
atggccttaccagtgaccgccttgctcctgccgctggccttgctgctccacgccgccaggccggacatccagctgactcagagccctagctttctgagcgccagcgtgggcgacagagtgaccatcacatgtagcgccagatccagcatcagcttcatgtactggtatcagcagaagcccggcaaggcccctaagctgctgatctacgacaccagcaatctggcctctggcgtgcccagcagattttctggaagcggcagcggcaccgagttcaccctgacaatctctagcctggaagccgaggatgccgccacctactattgccagcagtggtccagctatcccctgacatttggacagggcaccaagctggaaatcaaactcgagatccagaaccctgatcctgccgtgtaccagctgcgggatagcaagagcagcgacaagagcgtgtgtctgttcaccgacttcgacagccagaccaacgtgtcccagagcaaggactccgacgtgtacatcaccgataagtgcgtgctggacatgcggagcatggacttcaagagcaactccgccgtggcctggtccaacaagtccgatttcgcctgcgccaacgccttcaacaacagcattatccccgaggacacattcttcccaagccccgagagcagcgactccaccgaccacgtgaagcccaaagagacagagaacaccaagcagcccagcaagagctgccacaagcccaaggccatcgtgcacaccgagaaagtgaacatgatgagcctgaccgtgctgggcctgcggatgctgttcgccaaaaccgtggccgtgaacttcctgctgaccgccaagctgttcttcctccgcgccaagagaagcggatctggcgtgaagcagaccctgaatttcgacctgctgaagctggctggcgacgtggaatccaacccaggccctactagtatggactggatttggcgcatccttttccttgtcggcgctgctaccggcgcgcattccttcgaacaggttcagctggttcagtctggggccgaagtgaagaaacctggggcctctgtgaaggtgtcctgcaaggcttccggctacacctttaccggctcttggatgaactgggtccgacaggctcctggacagggactcgaatggatcggcagaatctatcctggcgacggcgagacaaactacaacggcaagttcaaggaccgcgtgacaatcaccgccgacaagagcacaagcaccgcctacatggaactgagcagcctgcggagcgaagataccgccgtgtactactgcgcccggatctacggcaacaacgtgtacttcgatgtgtggggccagggcacaaccgtgacagtctcttctacgcgtgaggacctgaagaacgtgttcccacctgaggtggccgtgttcgagcctagcgaggccgagatcagccacacccagaaagccaccctcgtgtgcctggctaccggcttctaccccgaccatgtggaactgtcttggtgggtcaacggcaaagaggtgcacagcggcgtgtgtaccgacccccagccactgaaagaacagcccgccctgaacgacagccggtactgcctgagcagcagactgagagtgtccgccaccttctggcagaacccccggaaccacttcagatgccaggtgcagttctacggcctgagcgagaacgacgagtggacccaggacagagccaagcccgtgacccagatcgtgtctgccgaagcctggggcagagccgatgatgtgattaagatccactggcaggaaaagaagtccaacaccatcctgggcagccaggaaggcaacaccatgaagaccaacgacacctacatgaagttcagctggctgaccgtgcccgagaagtccctggacaaagaacacagatgcatcgtgcggcacgaaaacaacaagaacggcgtggaccaggaaatcatcttcccacccatcaagaccgatgtgattacaatggaccccaaggacaactgctccaaggacgccaacgataccctgctgctccagctgaccaacaccagcgcctactacatgtacttgttgctgctgctgaagtccgtggtgtacttcgccatcatcacatgctgcctgctgcggagaaccgccttctgctgcaacggcgagaagtct

SEQ ID NO: 7361 - DNA, 2196 bp, synthetic construct
  source 1..2196: mol_type = other DNA
atggccttaccagtgaccgccttgctcctgccgctggccttgctgctccacgccgccaggccgcagctggtgctgacacagtctccaagcgcctctgccagcctgggatctagcgtgaagctgacctgtacactgagcagcggccacaagaccgacaccatcgactggtatcagcagcagcctggcaaggcccctagatacctgatgaagctggaaggcagcggcagctacaacaaaggctctggcgtgcccgatagattcagcggcagttcttctggcgctgattggtatctgaccatcagcagcctccagagcgaggacgaggccgattactactgcggcacagactaccccggcaactacctgtttggcggcggaacacagctgacagtgcttggcctcgagatccagaaccctgatcctgccgtgtaccagctgcgggatagcaagagcagcgacaagagcgtgtgtctgttcaccgacttcgacagccagaccaacgtgtcccagagcaaggactccgacgtgtacatcaccgataagtgcgtgctggacatgcggagcatggacttcaagagcaactccgccgtggcctggtccaacaagtccgatttcgcctgcgccaacgccttcaacaacagcattatccccgaggacacattcttcccaagccccgagagcagcgactccaccgaccacgtgaagcccaaagagacagagaacaccaagcagcccagcaagagctgccacaagcccaaggccatcgtgcacaccgagaaagtgaacatgatgagcctgaccgtgctgggcctgcggatgctgttcgccaaaaccgtggccgtgaacttcctgctgaccgccaagctgttcttcctccgcgccaagagaagcggatctggcgtgaagcagaccctgaatttcgacctgctgaagctggctggcgacgtggaatccaacccaggccctactagtatggactggatttggcgcatccttttccttgtcggcgctgctaccggcgcgcattccttcgaacaagaacagctggttgaaagcggcggaggactggttcaacctggcggttctctgagactgagctgtgccgccagcggcttcaccttcagcgactactacatgagctggatcagacaggccccaggcaaaggactggaatgggtcgccacaatctaccccagcagcggcaagacctactacgccgattctgccaagggcagactgaccatctccagcgacaacgccaaggacagcctgtacctccagatgaacagcctgagagccgaggacaccgccgtgtactactgcaccagagatagctacgccgacgacgccgctctgtttgacatttggggccagggcaccaccgtgaccgtttcttctacgcgtgaggacctgaagaacgtgttcccacctgaggtggccgtgttcgagcctagcgaggccgagatcagccacacccagaaagccaccctcgtgtgcctggctaccggcttctaccccgaccatgtggaactgtcttggtgggtcaacggcaaagaggtgcacagcggcgtgtgtaccgacccccagccactgaaagaacagcccgccctgaacgacagccggtactgcctgagcagcagactgagagtgtccgccaccttctggcagaacccccggaaccacttcagatgccaggtgcagttctacggcctgagcgagaacgacgagtggacccaggacagagccaagcccgtgacccagatcgtgtctgccgaagcctggggcagagccgatgatgtgattaagatccactggcaggaaaagaagtccaacaccatcctgggcagccaggaaggcaacaccatgaagaccaacgacacctacatgaagttcagctggctgaccgtgcccgagaagtccctggacaaagaacacagatgcatcgtgcggcacgaaaacaacaagaacggcgtggaccaggaaatcatcttcccacccatcaagaccgatgtgattacaatggaccccaaggacaactgctccaaggacgccaacgataccctgctgctccagctgaccaacaccagcgcctactacatgtacttgttgctgctgctgaagtccgtggtgtacttcgccatcatcacatgctgcctgctgcggagaaccgccttctgctgcaacggcgagaagtct

SEQ ID NO: 7362 - DNA, 2172 bp, synthetic construct; identical to SEQ ID NO: 7358
  source 1..2172: mol_type = other DNA

SEQ ID NO: 7363 - DNA, 2193 bp, synthetic construct; identical to SEQ ID NO: 7359
  source 1..2193: mol_type = other DNA

SEQ ID NO: 7364 - DNA, 2172 bp, synthetic construct; identical to SEQ ID NO: 7360
  source 1..2172: mol_type = other DNA

SEQ ID NO: 7365 - DNA, 2196 bp, synthetic construct; identical to SEQ ID NO: 7361
  source 1..2196: mol_type = other DNA

SEQ ID NO: 7366 - DNA, 2193 bp, synthetic construct
  source 1..2193: mol_type = other DNA
atggccttaccagtgaccgccttgctcctgccgctggccttgctgctccacgccgccaggccggatatccagctcactcaaagcccctctagtctctctgcctcagtgggggatcgggtcagttttacttgtcaagcttcacaggatatcaacaacttccttaattggtatcagcagaagccaggaaaagcacccaagctgctcatctatgatgcctcaaatttggagacgggtgttcccagtcgattctctgggtcagggtccgggaccgactttacgtttacgatctcctctctgcagcccgaagacatcgccacatactattgtcaacagtacggcaacttgcctttcacatttgggggcgggactaaggttgaaatcaagaggctcgagatccagaaccctgatcctgccgtgtaccagctgcgggatagcaagagcagcgacaagagcgtgtgtctgttcaccgacttcgacagccagaccaacgtgtcccagagcaaggactccgacgtgtacatcaccgataagtgcgtgctggacatgcggagcatggacttcaagagcaactccgccgtggcctggtccaacaagtccgatttcgcctgcgccaacgccttcaacaacagcattatccccgaggacacattcttcccaagccccgagagcagcgactccaccgaccacgtgaagcccaaagagacagagaacaccaagcagcccagcaagagctgccacaagcccaaggccatcgtgcacaccgagaaagtgaacatgatgagcctgaccgtgctgggcctgcggatgctgttcgccaaaaccgtggccgtgaacttcctgctgaccgccaagctgttcttcctccgcgccaagagaagcggatctggcgtgaagcagaccctgaatttcgacctgctgaagctggctggcgacgtggaatccaacccaggccctactagtatggactggatttggcgcatccttttccttgtcggcgctgctaccggcgcgcattccttcgaacaggtacagctgcaggaatctgggcccggacttgtcaagccaagtcagacactttctcttacatgtaccgtgagcggcggaagtataagcagtggaggcttttactggtcttggatacggcagcacccaggcaaaggcttggagtggattggatacattcatcattcaggatctacacactataatccatcccttaagtcccgggtcaccattagcattgatacgtctaagaatctgttcagtctcaggctgtcctccgtcactgctgccgacacagccgtgtactactgcgcctccttggtttactgcggaggcgactgttatagcggctttgattattgggggcaggggaccctcgtaaccgtgagctctacgcgtgaggacctgaagaacgtgttcccacctgaggtggccgtgttcgagcctagcgaggccgagatcagccacacccagaaagccaccctcgtgtgcctggctaccggcttctaccccgaccatgtggaactgtcttggtgggtcaacggcaaagaggtgcacagcggcgtgtgtaccgacccccagccactgaaagaacagcccgccctgaacgacagccggtactgcctgagcagcagactgagagtgtccgccaccttctggcagaacccccggaaccacttcagatgccaggtgcagttctacggcctgagcgagaacgacgagtggacccaggacagagccaagcccgtgacccagatcgtgtctgccgaagcctggggcagagccgatgatgtgattaagatccactggcaggaaaagaagtccaacaccatcctgggcagccaggaaggcaacaccatgaagaccaacgacacctacatgaagttcagctggctgaccgtgcccgagaagtccctggacaaagaacacagatgcatcgtgcggcacgaaaacaacaagaacggcgtggaccaggaaatcatcttcccacccatcaagaccgatgtgattacaatggaccccaaggacaactgctccaaggacgccaacgataccctgctgctccagctgaccaacaccagcgcctactacatgtacttgttgctgctgctgaagtccgtggtgtacttcgccatcatcacatgctgcctgctgcggagaaccgccttctgctgcaacggcgagaagtct

SEQ ID NO: 7367 - DNA, 2181 bp, synthetic construct
  source 1..2181: mol_type = other DNA
atggccttaccagtgaccgccttgctcctgccgctggccttgctgctccacgccgccaggccggacattcagatgacacagagccctagcagcctgagcgcctctgtgggagacagagtgaccatcacatgcaagagcagccagagcgtgctgtactccagcaatcagaagaactacctggcctggttccagcagaagcctggcaaggctcctaagctgctgatctactgggccagcaccagagaaagcggcgtgccaagcagattttctggcagcggctctggcaccgacttcaccctgacaatatccagcctccagcctgaggacttcgccacctacttttgccaccagtacctgagcagctacacattcggacagggcaccaaggtggaaatcaagcggctcgagatccagaaccctgatcctgccgtgtaccagctgcgggatagcaagagcagcgacaagagcgtgtgtctgttcaccgacttcgacagccagaccaacgtgtcccagagcaaggactccgacgtgtacatcaccgataagtgcgtgctggacatgcggagcatggacttcaagagcaactccgccgtggcctggtccaacaagtccgatttcgcctgcgccaacgccttcaacaacagcattatccccgaggacacattcttcccaagccccgagagcagcgactccaccgaccacgtgaagcccaaagagacagagaacaccaagcagcccagcaagagctgccacaagcccaaggccatcgtgcacaccgagaaagtgaacatgatgagcctgaccgtgctgggcctgcggatgctgttcgccaaaaccgtggccgtgaacttcctgctgaccgccaagctgttcttcctccgcgccaagagaagcggatctggcgtgaagcagaccctgaatttcgacctgctgaagctggctggcgacgtggaatccaacccaggccctactagtatggactggatttggcgcatccttttccttgtcggcgctgctaccggcgcgcattccttcgaagaggtgcagctggttgaatctggcggaggactggttcagcctggcggatctctgagactgtcttgtgccgccagcggctacaccttcaccacctattggatgcactgggtccgacaggcccctggcaaaggacttgagtgggtcggatatatcaggcccagcaccggctacacagagtacaaccagaagttcaaggaccgcttcaccatcagcgccgacaccagcaagaataccgcctacctccagatgaacagcctgagagccgaggacaccgccgtgtactactgtgccagatccagatggctgctggactattggggccagggcacactggttacagtttctacgcgtgaggacctgaagaacgtgttcccacctgaggtggccgtgttcgagcctagcgaggccgagatcagccacacccagaaagccaccctcgtgtgcctggctaccggcttctaccccgaccatgtggaactgtcttggtgggtcaacggcaaagaggtgcacagcggcgtgtgtaccgacccccagccactgaaagaacagcccgccctgaacgacagccggtactgcctgagcagcagactgagagtgtccgccaccttctggcagaacccccggaaccacttcagatgccaggtgcagttctacggcctgagcgagaacgacgagtggacccaggacagagccaagcccgtgacccagatcgtgtctgccgaagcctggggcagagccgatgatgtgattaagatccactggcaggaaaagaagtccaacaccatcctgggcagccaggaaggcaacaccatgaagaccaacgacacctacatgaagttcagctggctgaccgtgcccgagaagtccctggacaaagaacacagatgcatcgtgcggcacgaaaacaacaagaacggcgtggaccaggaaatcatcttcccacccatcaagaccgatgtgattacaatggaccccaaggacaactgctccaaggacgccaacgataccctgctgctccagctgaccaacaccagcgcctactacatgtacttgttgctgctgctgaagtccgtggtgtacttcgccatcatcacatgctgcctgctgcggagaaccgccttctgctgcaacggcgagaagtct

SEQ ID NO: 7368 - DNA, 2172 bp, synthetic construct
  source 1..2172: mol_type = other DNA
atggccttaccagtgaccgccttgctcctgccgctggccttgctgctccacgccgccaggccggacatccagatgacacagagccctagcagcctgtctgccagcgtgggagacagagtgaccatcacctgtagagccagccaggacatcagcaactacctgaactggtatcagcagaagcccggcaaggcccctaagctgctgatctactacaccagcagactgcacagcggcgtgcccagcagattttctggctctggcagcggcaccgacttcaccctgacaatatctagcctccagcctgaggacttcgccacctactattgccagcagggcaacaccctgccttacacatttggacagggcaccaaggtggaaatcaagagactcgagatccagaaccctgatcctgccgtgtaccagctgcgggatagcaagagcagcgacaagagcgtgtgtctgttcaccgacttcgacagccagaccaacgtgtcccagagcaaggactccgacgtgtacatcaccgataagtgcgtgctggacatgcggagcatggacttcaagagcaactccgccgtggcctggtccaacaagtccgatttcgcctgcgccaacgccttcaacaacagcattatccccgaggacacattcttcccaagccccgagagcagcgactccaccgaccacgtgaagcccaaagagacagagaacaccaagcagcccagcaagagctgccacaagcccaaggccatcgtgcacaccgagaaagtgaacatgatgagcctgaccgtgctgggcctgcggatgctgttcgccaaaaccgtggccgtgaacttcctgctgaccgccaagctgttcttcctccgcgccaagagaagcggatctggcgtgaagcagaccctgaatttcgacctgctgaagctggctggcgacgtggaatccaacccaggccctactagtatggactggatttggcgcatccttttccttgtcggcgctgctaccggcgcgcattccttcgaagaagtgcagctggttgaatcaggtggcggcctggttcaacctggcggatctctgagactgagctgtgccgccagcggcttcaccttcagcgactactttatgagctgggtccgacaggcccctggcaaaggacttgaatgggtcgccaccatcagcaatggcggcacctacacttactaccccgacagcgtgaagggcagattcaccatctccagagacaacagcaagaacaccctgtacctccagatgaactccctgagagccgaggacaccgccgtgtactactgcgccagattcgacggctacatcttcgactattggggccagggcaccctggtcacagtctcttctacgcgtgaggacctgaagaacgtgttcccacctgaggtggccgtgttcgagcctagcgaggccgagatcagccacacccagaaagccaccctcgtgtgcctggctaccggcttctaccccgaccatgtggaactgtcttggtgggtcaacggcaaagaggtgcacagcggcgtgtgtaccgacccccagccactgaaagaacagcccgccctgaacgacagccggtactgcctgagcagcagactgagagtgtccgccaccttctggcagaacccccggaaccacttcagatgccaggtgcagttctacggcctgagcgagaacgacgagtggacccaggacagagccaagcccgtgacccagatcgtgtctgccgaagcctggggcagagccgatgatgtgattaagatccactggcaggaaaagaagtccaacaccatcctgggcagccaggaaggcaacaccatgaagaccaacgacacctacatgaagttcagctggctgaccgtgcccgagaagtccctggacaaagaacacagatgcatcgtgcggcacgaaaacaacaagaacggcgtggaccaggaaatcatcttcccacccatcaagaccgatgtgattacaatggaccccaaggacaactgctccaaggacgccaacgataccctgctgctccagctgaccaacaccagcgcctactacatgtacttgttgctgctgctgaagtccgtggtgtacttcgccatcatcacatgctgcctgctgcggagaaccgccttctgctgcaacggcgagaagtct

SEQ ID NO: 7369 - DNA, 2568 bp, synthetic construct
  source 1..2568: mol_type = other DNA
atggccttaccagtgaccgccttgctcctgccgctggccttgctgctccacgccgccaggccggaagtgcagctggttgaatctggcggaggactggttcagcctggcggatctctgagactgtcttgtgccgccagcggcttcagcttcagcgacttttggatgagctgggtccgacaggcccctggcaaaggacttgaatgggtcgccacaatcagccaggccggcagcgagaaggactacgtggactctgtgaagggcagattcaccatcagccgggacaacgccaagaagtccctgtacctccagatgaacagcctgagagccgaggacaccgccgtgtactattgtgcctctggcgtgtacagcttcgactacagaggccagggcaccctggtcacagtctcttctggtaccggcggaggcggatctggcggcggaggtagcggtggcggaggatctgaattcgacatccagatgacacagactacatcctccctgtctgcctctctgggagacagagtcaccatcagttgcagggcaagtcaggacattagtaagtacctgaactggtatcagcagaaaccagatggaactgttaaactcctgatctaccatacatcaagattacactcaggagtcccatcaaggttcagtggcagtgggtctggaacagattattctctcaccattagcaacctggagcaagaagatattgccacttacttttgccaacagggtaatacgcttccgtacacgttcggaggggggaccaagctggagatcacactcgaggacctgaagaacgtgttcccacctgaggtggccgtgttcgagcctagcgaggccgagatcagccacacccagaaagccaccctcgtgtgcctggctaccggcttctaccccgaccatgtggaactgtcttggtgggtcaacggcaaagaggtgcacagcggcgtgtgtaccgacccccagccactgaaagaacagcccgccctgaacgacagccggtactgcctgagcagcagactgagagtgtccgccaccttctggcagaacccccggaaccacttcagatgccaggtgcagttctacggcctgagcgagaacgacgagtggacccaggacagagccaagcccgtgacccagatcgtgtctgccgaagcctggggcagagccgatgatgtgattaagatccactggcaggaaaagaagtccaacaccatcctgggcagccaggaaggcaacaccatgaagaccaacgacacctacatgaagttcagctggctgaccgtgcccgagaagtccctggacaaagaacacagatgcatcgtgcggcacgaaaacaacaagaacggcgtggaccaggaaatcatcttcccacccatcaagaccgatgtgattacaatggaccccaaggacaactgctccaaggacgccaacgataccctgctgctccagctgaccaacaccagcgcctactacatgtacttgttgctgctgctgaagtccgtggtgtacttcgccatcatcacatgctgcctgctgcggagaaccgccttctgctgcaacggcgagaagtctagggccaagcgatctggatctggagcaacaaacttctcactactcaaacaagcaggtgacgtggaggagaatcccgggcctactagtatggactggatttggcgcatccttttccttgtcggcgctgctaccggcgcgcattccttcgaagtgaaactgcaggagtcaggacctggcctggtggcgccctcacagagcctgtccgtcacatgcactgtctcaggggtctcattacccgactatggtgtaagctggattcgccagcctccacgaaagggtctggagtggctgggagtaatatggggtagtgaaaccacatactataattcagctctcaaatccagactgaccatcatcaaggacaactccaagagccaagttttcttaaaaatgaacagtctgcaaactgatgacacagccatttactactgtgccaaacattattactacggtggtagctatgctatggactactggggccaaggaacctcagtcaccgtctcctcaacgcgtatccagaaccctgatcctgccgtgtaccagctgcgggatagcaagagcagcgacaagagcgtgtgtctgttcaccgacttcgacagccagaccaacgtgtcccagagcaaggactccgacgtgtacatcaccgataagtgcgtgctggacatgcggagcatggacttcaagagcaactccgccgtggcctggtccaacaagtccgatttcgcctgcgccaacgccttcaacaacagcattatccccgaggacacattcttcccaagccccgagagcagcgactccaccgaccacgtgaagcccaaagagacagagaacaccaagcagcccagcaagagctgccacaagcccaaggccatcgtgcacaccgagaaagtgaacatgatgagcctgaccgtgctgggcctgcggatgctgttcgccaaaaccgtggccgtgaacttcctgctgaccgccaagctgttcttcctc

SEQ ID NO: 7370 - DNA, 2571 bp, synthetic construct
  source 1..2571: mol_type = other DNA
atggccttaccagtgaccgccttgctcctgccgctggccttgctgctccacgccgccaggccggaagtgcagctggttgaatctggcggaggactggttcagcctggcggatctctgagactgtcttgtgccgccagcggcttcagcttcagcgacttttggatgagctgggtccgacaggcccctggcaaaggacttgaatgggtcgccacaatcagccaggccggcagcgagaaggactacgtggactctgtgaagggcagattcaccatcagccgggacaacgccaagaagtccctgtacctccagatgaacagcctgagagccgaggacaccgccgtgtactattgtgcctctggcgtgtacagcttcgactacagaggccagggcaccctggtcacagtctcttctggtaccggcggaggcggatctggcggcggaggtagcggtggcggaggatctgaattcgagatcgtgatgacccagagccctgccaccctgtctctgagccctggcgaaagagccaccctgagctgtagagccagccaggacatcagcaagtacctgaactggtatcagcagaagcccggccaggcccccagactgctgatctaccacaccagcagactgcacagcggcatccccgccagattttctggctctggcagcggcaccgactacaccctgacaatcagcagcctccagcccgaggacttcgccgtgtacttctgtcagcaaggcaacaccctgccctacaccttcggccagggcaccaagctggaaatcaagctcgaggacctgaagaacgtgttcccacctgaggtggccgtgttcgagcctagcgaggccgagatcagccacacccagaaagccaccctcgtgtgcctggctaccggcttctaccccgaccatgtggaactgtcttggtgggtcaacggcaaagaggtgcacagcggcgtgtgtaccgacccccagccactgaaagaacagcccgccctgaacgacagccggtactgcctgagcagcagactgagagtgtccgccaccttctggcagaacccccggaaccacttcagatgccaggtgcagttctacggcctgagcgagaacgacgagtggacccaggacagagccaagcccgtgacccagatcgtgtctgccgaagcctggggcagagccgatgatgtgattaagatccactggcaggaaaagaagtccaacaccatcctgggcagccaggaaggcaacaccatgaagaccaacgacacctacatgaagttcagctggctgaccgtgcccgagaagtccctggacaaagaacacagatgcatcgtgcggcacgaaaacaacaagaacggcgtggaccaggaaatcatcttcccacccatcaagaccgatgtgattacaatggaccccaaggacaactgctccaaggacgccaacgataccctgctgctccagctgaccaacaccagcgcctactacatgtacttgttgctgctgctgaagtccgtggtgtacttcgccatcatcacatgctgcctgctgcggagaaccgccttctgctgcaacggcgagaagtctagggccaagcgatctggatctggagcaacaaacttctcactactcaaacaagcaggtgacgtggaggagaatcccgggcctactagtatggactggatttggcgcatccttttccttgtcggcgctgctaccggcgcgcattccttcgaacaggtgcaactccaggaatctggccctggcctcgtgaagcccagcgagacactgagcctgacctgtaccgtgtccggcgtgtccctgcctgactatggcgtgtcctggatcagacagccccctggcaagggcctggaatggatcggagtgatttggggcagcgaaaccacctactacaacagctccctgaagtccagagtgaccatctccaaggacaactccaagaaccaggtgtccctgaagctgagcagcgtgacagccgccgacaccgccgtgtattactgcgccaagcactactactacggcggcagctacgctatggactactggggccagggaaccctcgtgaccgtgtctagtacgcgtatccagaaccctgatcctgccgtgtaccagctgcgggatagcaagagcagcgacaagagcgtgtgtctgttcaccgacttcgacagccagaccaacgtgtcccagagcaaggactccgacgtgtacatcaccgataagtgcgtgctggacatgcggagcatggacttcaagagcaactccgccgtggcctggtccaacaagtccgatttcgcctgcgccaacgccttcaacaacagcattatccccgaggacacattcttcccaagccccgagagcagcgactccaccgaccacgtgaagcccaaagagacagagaacaccaagcagcccagcaagagctgccacaagcccaaggccatcgtgcacaccgagaaagtgaacatgatgagcctgaccgtgctgggcctgcggatgctgttcgccaaaaccgtggccgtgaacttcctgctgaccgccaagctgttcttcctc

SEQ ID NO: 7371 - DNA, 2574 bp, synthetic construct
  source 1..2574: mol_type = other DNA
atggccttaccagtgaccgccttgctcctgccgctggccttgctgctccacgccgccaggccggaagtgcagctggttgaatctggcggaggactggttcagcctggcggatctctgagactgtcttgtgccgccagcggcttcagcttcagcgacttttggatgagctgggtccgacaggcccctggcaaaggacttgaatgggtcgccacaatcagccaggccggcagcgagaaggactacgtggactctgtgaagggcagattcaccatcagccgggacaacgccaagaagtccctgtacctccagatgaacagcctgagagccgaggacaccgccgtgtactattgtgcctctggcgtgtacagcttcgactacagaggccagggcaccctggtcacagtctcttctggtaccggcggaggcggatctggcggcggaggtagcggtggcggaggatctgaattcgacgagatcgtgctgacacagagccccgccaccctgtcactgtctccaggcgaaagagccaccctgagctgtagcgccagcagcagcgtgtcctacatgcactggtatcagcagaagcccggccaggcccccagactgctgatctacgataccagcaagctggcctccggcatccccgccagattttctggcagcggctccggcaccgacttcaccctgacaatcagcagcctggaacccgaggacgtggccgtgtactactgttttcaaggcagcgtgtaccccttcaccttcggccagggcaccaagctggaaatcaagagactcgaggacctgaagaacgtgttcccacctgaggtggccgtgttcgagcctagcgaggccgagatcagccacacccagaaagccaccctcgtgtgcctggctaccggcttctaccccgaccatgtggaactgtcttggtgggtcaacggcaaagaggtgcacagcggcgtgtgtaccgacccccagccactgaaagaacagcccgccctgaacgacagccggtactgcctgagcagcagactgagagtgtccgccaccttctggcagaacccccggaaccacttcagatgccaggtgcagttctacggcctgagcgagaacgacgagtggacccaggacagagccaagcccgtgacccagatcgtgtctgccgaagcctggggcagagccgatgatgtgattaagatccactggcaggaaaagaagtccaacaccatcctgggcagccaggaaggcaacaccatgaagaccaacgacacctacatgaagttcagctggctgaccgtgcccgagaagtccctggacaaagaacacagatgcatcgtgcggcacgaaaacaacaagaacggcgtggaccaggaaatcatcttcccacccatcaagaccgatgtgattacaatggaccccaaggacaactgctccaaggacgccaacgataccctgctgctccagctgaccaacaccagcgcctactacatgtacttgttgctgctgctgaagtccgtggtgtacttcgccatcatcacatgctgcctgctgcggagaaccgccttctgctgcaacggcgagaagtctagggccaagcgatctggatctggagcaacaaacttctcactactcaaacaagcaggtgacgtggaggagaatcccgggcctactagtatggactggatttggcgcatccttttccttgtcggcgctgctaccggcgcgcattccttcgaacaggtgcagctccaggaatctggccctggcctcgtgaagcctagccagaccctgagcctgacctgtaccgtgtctggcggcagcatcagcacaagcggcatgggcgtgggctggatcagacagcaccctggcaagggcctggaatggatcggccacatttggtgggacgacgacaagcggtacaaccccgccctgaagtccagagtgaccatcagcgtggacaccagcaagaaccagttcagcctgaagctgagcagcgtgacagccgccgataccgccgtgtattattgcgcccggatggaactgtggtcctactacttcgactactggggccagggaaccctcgtgaccgtgtctagtacgcgtatccagaaccctgatcctgccgtgtaccagctgcgggatagcaagagcagcgacaagagcgtgtgtctgttcaccgacttcgacagccagaccaacgtgtcccagagcaaggactccgacgtgtacatcaccgataagtgcgtgctggacatgcggagcatggacttcaagagcaactccgccgtggcctggtccaacaagtccgatttcgcctgcgccaacgccttcaacaacagcattatccccgaggacacattcttcccaagccccgagagcagcgactccaccgaccacgtgaagcccaaagagacagagaacaccaagcagcccagcaagagctgccacaagcccaaggccatcgtgcacaccgagaaagtgaacatgatgagcctgaccgtgctgggcctgcggatgctgttcgccaaaaccgtggccgtgaacttcctgctgaccgccaagctgttcttcctc

SEQ ID NO: 7372 - DNA, 2568 bp, synthetic construct
  source 1..2568: mol_type = other DNA
atggccttaccagtgaccgccttgctcctgccgctggccttgctgctccacgccgccaggccggaagtgcagctggttgaatctggcggaggactggttcagcctggcggatctctgagactgtcttgtgccgccagcggcttcagcttcagcgacttttggatgagctgggtccgacaggcccctggcaaaggacttgaatgggtcgccacaatcagccaggccggcagcgagaaggactacgtggactctgtgaagggcagattcaccatcagccgggacaacgccaagaagtccctgtacctccagatgaacagcctgagagccgaggacaccgccgtgtactattgtgcctctggcgtgtacagcttcgactacagaggccagggcaccctggtcacagtctcttctggtaccggcggaggcggatctggcggcggaggtagcggtggcggaggatctgaattcgactacatccacgtgacacagagccctagcagcctgtccgtgtccatcggcgatagagtgaccatcaactgccagacctctcaaggcgtgggcagcgacctgcactggtatcagcacaaacctggcagagcccctaagctgctgatccaccatgccagctctgtggaagatggcgtgcccagcagattttccggcaccggatttcacaccagcttcaacctgacaatcaacgacctccaggccgacgacatcggcacctactactgtcaagtgctccagagcttcggcagaggcagcagactggatacaaaactcgaggacctgaagaacgtgttcccacctgaggtggccgtgttcgagcctagcgaggccgagatcagccacacccagaaagccaccctcgtgtgcctggctaccggcttctaccccgaccatgtggaactgtcttggtgggtcaacggcaaagaggtgcacagcggcgtgtgtaccgacccccagccactgaaagaacagcccgccctgaacgacagccggtactgcctgagcagcagactgagagtgtccgccaccttctggcagaacccccggaaccacttcagatgccaggtgcagttctacggcctgagcgagaacgacgagtggacccaggacagagccaagcccgtgacccagatcgtgtctgccgaagcctggggcagagccgatgatgtgattaagatccactggcaggaaaagaagtccaacaccatcctgggcagccaggaaggcaacaccatgaagaccaacgacacctacatgaagttcagctggctgaccgtgcccgagaagtccctggacaaagaacacagatgcatcgtgcggcacgaaaacaacaagaacggcgtggaccaggaaatcatcttcccacccatcaagaccgatgtgattacaatggaccccaaggacaactgctccaaggacgccaacgataccctgctgctccagctgaccaacaccagcgcctactacatgtacttgttgctgctgctgaagtccgtggtgtacttcgccatcatcacatgctgcctgctgcggagaaccgccttctgctgcaacggcgagaagtctagggccaagcgatctggatctggagcaacaaacttctcactactcaaacaagcaggtgacgtggaggagaatcccgggcctactagtatggactggatttggcgcatccttttccttgtcggcgctgctaccggcgcgcattccttcgaaagggcacacctggtgcagtctggcaccgccatgaagaaacctggcgcttccgtcagagtgtcctgtcagacaagcggctacaccttcacagcccacatcctgttctggttcagacaggccccaggcagaggactggaatgggtcggatggatcaagccccagtacggggccgtgaatttcggcggaggcttcagagacagagtgaccctgaccagggacgtgtaccgggaaatcgcctacatggacatccggggcctgaagcctgatgacaccgccgtgtactactgcgccagggatagaagctacggcgacagctcttgggctctcgatgcttggggacagggcacaacagtggtggtgtctgctacgcgtatccagaaccctgatcctgccgtgtaccagctgcgggatagcaagagcagcgacaagagcgtgtgtctgttcaccgacttcgacagccagaccaacgtgtcccagagcaaggactccgacgtgtacatcaccgataagtgcgtgctggacatgcggagcatggacttcaagagcaactccgccgtggcctggtccaacaagtccgatttcgcctgcgccaacgccttcaacaacagcattatccccgaggacacattcttcccaagccccgagagcagcgactccaccgaccacgtgaagcccaaagagacagagaacaccaagcagcccagcaagagctgccacaagcccaaggccatcgtgcacaccgagaaagtgaacatgatgagcctgaccgtgctgggcctgcggatgctgttcgccaaaaccgtggccgtgaacttcctgctgaccgccaagctgttcttcctc

SEQ ID NO: 7373 - DNA, 2598 bp, synthetic construct
  source 1..2598: mol_type = other DNA
atggccttaccagtgaccgccttgctcctgccgctggccttgctgctccacgccgccaggccggaagtgcagctggttgaatctggcggaggactggttcagcctggcggatctctgagactgtcttgtgccgccagcggcttcagcttcagcgacttttggatgagctgggtccgacaggcccctggcaaaggacttgaatgggtcgccacaatcagccaggccggcagcgagaaggactacgtggactctgtgaagggcagattcaccatcagccgggacaacgccaagaagtccctgtacctccagatgaacagcctgagagccgaggacaccgccgtgtactattgtgcctctggcgtgtacagcttcgactacagaggccagggcaccctggtcacagtctcttctggtaccggcggaggcggatctggcggcggaggtagcggtggcggaggatctgaattcgacgtgcagatgatccagacccccgatagcctggccgtgtccctgggacagagagccaccatctcttgcagagccagcgagagcgtggacaactacggcatcagcttcatgcactggtatcagcagaagcccggccagagccccaagctgctgatctacagagcctccaacctggaaagcggcatccccgccagattttccggcagcggcagcagaaccgacttcaccctgaccatcaaccccgtggaaaccgacgacgtggcaacctactactgccagcagaacaacaaggacccccccacctttggcggaggcaccaagctggaaatcaagctcgaggacctgaagaacgtgttcccacctgaggtggccgtgttcgagcctagcgaggccgagatcagccacacccagaaagccaccctcgtgtgcctggctaccggcttctaccccgaccatgtggaactgtcttggtgggtcaacggcaaagaggtgcacagcggcgtgtgtaccgacccccagccactgaaagaacagcccgccctgaacgacagccggtactgcctgagcagcagactgagagtgtccgccaccttctggcagaacccccggaaccacttcagatgccaggtgcagttctacggcctgagcgagaacgacgagtggacccaggacagagccaagcccgtgacccagatcgtgtctgccgaagcctggggcagagccgatgatgtgattaagatccactggcaggaaaagaagtccaacaccatcctgggcagccaggaaggcaacaccatgaagaccaacgacacctacatgaagttcagctggctgaccgtgcccgagaagtccctggacaaagaacacagatgcatcgtgcggcacgaaaacaacaagaacggcgtggaccaggaaatcatcttcccacccatcaagaccgatgtgattacaatggaccccaaggacaactgctccaaggacgccaacgataccctgctgctccagctgaccaacaccagcgcctactacatgtacttgttgctgctgctgaagtccgtggtgtacttcgccatcatcacatgctgcctgctgcggagaaccgccttctgctgcaacggcgagaagtctagggccaagcgatctggatctggagcaacaaacttctcactactcaaacaagcaggtgacgtggaggagaatcccgggcctactagtatggactggatttggcgcatccttttccttgtcggcgctgctaccggcgcgcattccttcgaagggggaggcggctctcaggtgcaactccagcagtctggcgctgagcttgtgaagcctggggccagcgtgaagattagctgcaaggccagcggctacgccttcagcagctactggatgaactgggtcaagcagcggcctggcaagggcctggaatggatcggccaaatctaccccggcgacggcgacaccacctacaacggcaagttcaagggcaaggccaccctgacagccgacaagagcagcagcaccgtgtacatgcaactgaacagcctgaccagcgaggacagcgccgtgtacttctgcgtgcggtactactacggcagctccggctacttcgactattggggccagggcaccacactgaccgtgtcctctacgcgtatccagaaccctgatcctgccgtgtaccagctgcgggatagcaagagcagcgacaagagcgtgtgtctgttcaccgacttcgacagccagaccaacgtgtcccagagcaaggactccgacgtgtacatcaccgataagtgcgtgctggacatgcggagcatggacttcaagagcaactccgccgtggcctggtccaacaagtccgatttcgcctgcgccaacgccttcaacaacagcattatccccgaggacacattcttcccaagccccgagagcagcgactccaccgaccacgtgaagcccaaagagacagagaacaccaagcagcccagcaagagctgccacaagcccaaggccatcgtgcacaccgagaaagtgaacatgatgagcctgaccgtgctgggcctgcggatgctgttcgccaaaaccgtggccgtgaacttcctgctgaccgccaagctgttcttcctc

SEQ ID NO: 7374 - DNA, 2571 bp, synthetic construct
  source 1..2571: mol_type = other DNA
atggccttaccagtgaccgccttgctcctgccgctggccttgctgctccacgccgccaggccggaagtgcagctggttgaatctggcggaggactggttcagcctggcggatctctgagactgtcttgtgccgccagcggcttcagcttcagcgacttttggatgagctgggtccgacaggcccctggcaaaggacttgaatgggtcgccacaatcagccaggccggcagcgagaaggactacgtggactctgtgaagggcagattcaccatcagccgggacaacgccaagaagtccctgtacctccagatgaacagcctgagagccgaggacaccgccgtgtactattgtgcctctggcgtgtacagcttcgactacagaggccagggcaccctggtcacagtctcttctggtaccggcggaggcggatctggcggcggaggtagcggtggcggaggatctgaattcgacgtgcagatgatccagacccccagcagcctgtctgccagcctgggcgatagagtgaccatcagctgtcgggccagccaggacatcggcaactacctgaactggtatcagcagaaacccgacggcaccgtgaagctgctgatctactacaccagcagactgcacagcggcgtgcccagcagattttctggcagcggctctggcaccgagtacagcctgaccatctccaacctggaacaggaagatattgctacctacttctgtcagcaaggcagcgccctgccccctacatttggcggcggaacaaagctggaaatcaacctcgaggacctgaagaacgtgttcccacctgaggtggccgtgttcgagcctagcgaggccgagatcagccacacccagaaagccaccctcgtgtgcctggctaccggcttctaccccgaccatgtggaactgtcttggtgggtcaacggcaaagaggtgcacagcggcgtgtgtaccgacccccagccactgaaagaacagcccgccctgaacgacagccggtactgcctgagcagcagactgagagtgtccgccaccttctggcagaacccccggaaccacttcagatgccaggtgcagttctacggcctgagcgagaacgacgagtggacccaggacagagccaagcccgtgacccagatcgtgtctgccgaagcctggggcagagccgatgatgtgattaagatccactggcaggaaaagaagtccaacaccatcctgggcagccaggaaggcaacaccatgaagaccaacgacacctacatgaagttcagctggctgaccgtgcccgagaagtccctggacaaagaacacagatgcatcgtgcggcacgaaaacaacaagaacggcgtggaccaggaaatcatcttcccacccatcaagaccgatgtgattacaatggaccccaaggacaactgctccaaggacgccaacgataccctgctgctccagctgaccaacaccagcgcctactacatgtacttgttgctgctgctgaagtccgtggtgtacttcgccatcatcacatgctgcctgctgcggagaaccgccttctgctgcaacggcgagaagtctagggccaagcgatctggatctggagcaacaaacttctcactactcaaacaagcaggtgacgtggaggagaatcccgggcctactagtatggactggatttggcgcatccttttccttgtcggcgctgctaccggcgcgcattccttcgaagctctccagctccagcagtctggcgcagaactcgtgcggcctggcgcttctgtgaccctgagctgtaaagccagcggctacaccttcaccgactacgagatgcactgggtcaagcagacccctgtgcacggcctggaatggatcggagccatcgaccctgagacaggcggcaccgcctacaaccagaagttcgagggcaaggccatcctgaccgccgacaagagcagcagcacagcctacatggaactgcggagcctgacctccgaggacagccccgtgtactactgtgccagacggcggtactacggcagcagctccttcgactattggggccagggcaccaccctgaccgtgtctagtacgcgtatccagaaccctgatcctgccgtgtaccagctgcgggatagcaagagcagcgacaagagcgtgtgtctgttcaccgacttcgacagccagaccaacgtgtcccagagcaaggactccgacgtgtacatcaccgataagtgcgtgctggacatgcggagcatggacttcaagagcaactccgccgtggcctggtccaacaagtccgatttcgcctgcgccaacgccttcaacaacagcattatccccgaggacacattcttcccaagccccgagagcagcgactccaccgaccacgtgaagcccaaagagacagagaacaccaagcagcccagcaagagctgccacaagcccaaggccatcgtgcacaccgagaaagtgaacatgatgagcctgaccgtgctgggcctgcggatgctgttcgccaaaaccgtggccgtgaacttcctgctgaccgccaagctgttcttcctc

SEQ ID NO: 7375 - DNA, 2583 bp, synthetic construct
  source 1..2583: mol_type = other DNA
atggccttaccagtgaccgccttgctcctgccgctggccttgctgctccacgccgccaggccggaagtgcagctggttgaatctggcggaggactggttcagcctggcggatctctgagactgtcttgtgccgccagcggcttcagcttcagcgacttttggatgagctgggtccgacaggcccctggcaaaggacttgaatgggtcgccacaatcagccaggccggcagcgagaaggactacgtggactctgtgaagggcagattcaccatcagccgggacaacgccaagaagtccctgtacctccagatgaacagcctgagagccgaggacaccgccgtgtactattgtgcctctggcgtgtacagcttcgactacagaggccagggcaccctggtcacagtctcttctggtaccggcggaggcggatctggcggcggaggtagcggtggcggaggatctgaattcgacatcgtcctgacccagtccccagccagcctggcggtgtccctgggtcaacgagctaccatttcctgcagagcctctaagtccgtatccacttccggctatagttacctgcattggtaccaacagaaaccagggcagccacccaagctgctcatctatctggcctcaaacctggagtccggcgtgcccgccagattctccggaagtgggagcggcaccgactttacattgaacatccacccagtcgaagaggaagatgctgccacttattactgtcagcactccagggagctgccatttacatttggctctggcacaaaactggagatcaaactcgaggacctgaagaacgtgttcccacctgaggtggccgtgttcgagcctagcgaggccgagatcagccacacccagaaagccaccctcgtgtgcctggctaccggcttctaccccgaccatgtggaactgtcttggtgggtcaacggcaaagaggtgcacagcggcgtgtgtaccgacccccagccactgaaagaacagcccgccctgaacgacagccggtactgcctgagcagcagactgagagtgtccgccaccttctggcagaacccccggaaccacttcagatgccaggtgcagttctacggcctgagcgagaacgacgagtggacccaggacagagccaagcccgtgacccagatcgtgtctgccgaagcctggggcagagccgatgatgtgattaagatccactggcaggaaaagaagtccaacaccatcctgggcagccaggaaggcaacaccatgaagaccaacgacacctacatgaagttcagctggctgaccgtgcccgagaagtccctggacaaagaacacagatgcatcgtgcggcacgaaaacaacaagaacggcgtggaccaggaaatcatcttcccacccatcaagaccgatgtgattacaatggaccccaaggacaactgctccaaggacgccaacgataccctgctgctccagctgaccaacaccagcgcctactacatgtacttgttgctgctgctgaagtccgtggtgtacttcgccatcatcacatgctgcctgctgcggagaaccgccttctgctgcaacggcgagaagtctagggccaagcgatctggatctggagcaacaaacttctcactactcaaacaagcaggtgacgtggaggagaatcccgggcctactagtatggactggatttggcgcatccttttccttgtcggcgctgctaccggcgcgcattccttcgaacaggttcagctggtcgagtccgggggaggtctggtacagccgggtggcagcctcaagctgtcatgtgccgcatctggttttgactttagcaggtattggatgagctgggtccgccaggccccgggcaagggacttgagtggattggagaaataaaccctacttccagcacaatcaacttcacaccttctttgaaagataaggtttttatctctcgggataacgctaaaaacacactgtacttgcagatgtctaaggtgcgaagcgaagacaccgccctctattattgcgcccggggtaattactaccgctatggggatgcgatggactattgggggcaaggtacctccgtcacggtctcaacgcgtatccagaaccctgatcctgccgtgtaccagctgcgggatagcaagagcagcgacaagagcgtgtgtctgttcaccgacttcgacagccagaccaacgtgtcccagagcaaggactccgacgtgtacatcaccgataagtgcgtgctggacatgcggagcatggacttcaagagcaactccgccgtggcctggtccaacaagtccgatttcgcctgcgccaacgccttcaacaacagcattatccccgaggacacattcttcccaagccccgagagcagcgactccaccgaccacgtgaagcccaaagagacagagaacaccaagcagcccagcaagagctgccacaagcccaaggccatcgtgcacaccgagaaagtgaacatgatgagcctgaccgtgctgggcctgcggatgctgttcgccaaaaccgtggccgtgaacttcctgctgaccgccaagctgttcttcctc

SEQ ID NO: 7376 - DNA, 2577 bp, synthetic construct
  source 1..2577: mol_type = other DNA
atggccttaccagtgaccgccttgctcctgccgctggccttgctgctccacgccgccaggccggaagtgcagctggttgaatctggcggaggactggttcagcctggcggatctctgagactgtcttgtgccgccagcggcttcagcttcagcgacttttggatgagctgggtccgacaggcccctggcaaaggacttgaatgggtcgccacaatcagccaggccggcagcgagaaggactacgtggactctgtgaagggcagattcaccatcagccgggacaacgccaagaagtccctgtacctccagatgaacagcctgagagccgaggacaccgccgtgtactattgtgcctctggcgtgtacagcttcgactacagaggccagggcaccctggtcacagtctcttctggtaccggcggaggcggatctggcggcggaggtagcggtggcggaggatctgaattcgacatccagatgacccagagccctagctcactgagcgccagcgtgggcgacagggtgaccattacctgctccgccagccaggacatcagcaactacctgaactggtaccagcagaagcccggcaaggcccccaagctgctgatctactacacctccaacctgcactccggcgtgcccagcaggttcagcggaagcggcagcggcaccgatttcaccctgaccatctccagcctgcagcccgaggacttcgccacctactactgccagcagtacaggaagctcccctggactttcggccagggcaccaaactggagatcaagcgtctcgaggacctgaagaacgtgttcccacctgaggtggccgtgttcgagcctagcgaggccgagatcagccacacccagaaagccaccctcgtgtgcctggctaccggcttctaccccgaccatgtggaactgtcttggtgggtcaacggcaaagaggtgcacagcggcgtgtgtaccgacccccagccactgaaagaacagcccgccctgaacgacagccggtactgcctgagcagcagactgagagtgtccgccaccttctggcagaacccccggaaccacttcagatgccaggtgcagttctacggcctgagcgagaacgacgagtggacccaggacagagccaagcccgtgacccagatcgtgtctgccgaagcctggggcagagccgatgatgtgattaagatccactggcaggaaaagaagtccaacaccatcctgggcagccaggaaggcaacaccatgaagaccaacgacacctacatgaagttcagctggctgaccgtgcccgagaagtccctggacaaagaacacagatgcatcgtgcggcacgaaaacaacaagaacggcgtggaccaggaaatcatcttcccacccatcaagaccgatgtgattacaatggaccccaaggacaactgctccaaggacgccaacgataccctgctgctccagctgaccaacaccagcgcctactacatgtacttgttgctgctgctgaagtccgtggtgtacttcgccatcatcacatgctgcctgctgcggagaaccgccttctgctgcaacggcgagaagtctagggccaagcgatctggatctggagcaacaaacttctcactactcaaacaagcaggtgacgtggaggagaatcccgggcctactagtatggactggatttggcgcatccttttccttgtcggcgctgctaccggcgcgcattccttcgaacaggtgcagctggtccagagcggcgccgaagtgaagaagcccggcagctccgtgaaagtgagctgcaaggccagcggcggcaccttcagcaactactggatgcactgggtgaggcaggcccccggacagggcctggagtggatgggcgccacctacaggggccacagcgacacctactacaaccagaagttcaagggccgggtgaccatcaccgccgacaagagcaccagcaccgcctacatggaactgagcagcctcaggagcgaggacaccgctgtgtattactgcgccaggggcgccatctacgacggctacgacgtgctggacaactggggccagggcacactggtgaccgtgtccagcacgcgtatccagaaccctgatcctgccgtgtaccagctgcgggatagcaagagcagcgacaagagcgtgtgtctgttcaccgacttcgacagccagaccaacgtgtcccagagcaaggactccgacgtgtacatcaccgataagtgcgtgctggacatgcggagcatggacttcaagagcaactccgccgtggcctggtccaacaagtccgatttcgcctgcgccaacgccttcaacaacagcattatccccgaggacacattcttcccaagccccgagagcagcgactccaccgaccacgtgaagcccaaagagacagagaacaccaagcagcccagcaagagctgccacaagcccaaggccatcgtgcacaccgagaaagtgaacatgatgagcctgaccgtgctgggcctgcggatgctgttcgccaaaaccgtggccgtgaacttcctgctgaccgccaagctgttcttcctc

SEQ ID NO: 7377 - DNA, 2577 bp, synthetic construct
  source 1..2577: mol_type = other DNA
atggccttaccagtgaccgccttgctcctgccgctggccttgctgctccacgccgccaggccggaagtgcagctggttgaatctggcggaggactggttcagcctggcggatctctgagactgtcttgtgccgccagcggcttcagcttcagcgacttttggatgagctgggtccgacaggcccctggcaaaggacttgaatgggtcgccacaatcagccaggccggcagcgagaaggactacgtggactctgtgaagggcagattcaccatcagccgggacaacgccaagaagtccctgtacctccagatgaacagcctgagagccgaggacaccgccgtgtactattgtgcctctggcgtgtacagcttcgactacagaggccagggcaccctggtcacagtctcttctggtaccggcggaggcggatctggcggcggaggtagcggtggcggaggatctgaattcgacatcgtgctgacacagagccctgccaccctgtctctgagccctggcgatagagccaccatcagctgtagagccagcgagagcgtgaccatcctgggcagccacctgatctactggtatcagcagaagcccggccagccccccagactgctgattcagctggcctccaatgtgcagaccggcgtgccagccagattttccggcagcggcagcagaaccgacttcaccctgaccatcagcagcgtggaacccgaggacttcgccgtgtactactgcctccagagccggaccatccccagaacattcggccagggcaccaagctggaaatcaagagactcgaggacctgaagaacgtgttcccacctgaggtggccgtgttcgagcctagcgaggccgagatcagccacacccagaaagccaccctcgtgtgcctggctaccggcttctaccccgaccatgtggaactgtcttggtgggtcaacggcaaagaggtgcacagcggcgtgtgtaccgacccccagccactgaaagaacagcccgccctgaacgacagccggtactgcctgagcagcagactgagagtgtccgccaccttctggcagaacccccggaaccacttcagatgccaggtgcagttctacggcctgagcgagaacgacgagtggacccaggacagagccaagcccgtgacccagatcgtgtctgccgaagcctggggcagagccgatgatgtgattaagatccactggcaggaaaagaagtccaacaccatcctgggcagccaggaaggcaacaccatgaagaccaacgacacctacatgaagttcagctggctgaccgtgcccgagaagtccctggacaaagaacacagatgcatcgtgcggcacgaaaacaacaagaacggcgtggaccaggaaatcatcttcccacccatcaagaccgatgtgattacaatggaccccaaggacaactgctccaaggacgccaacgataccctgctgctccagctgaccaacaccagcgcctactacatgtacttgttgctgctgctgaagtccgtggtgtacttcgccatcatcacatgctgcctgctgcggagaaccgccttctgctgcaacggcgagaagtctagggccaagcgatctggatctggagcaacaaacttctcactactcaaacaagcaggtgacgtggaggagaatcccgggcctactagtatggactggatttggcgcatccttttccttgtcggcgctgctaccggcgcgcattccttcgaacaggtgcagctggtgcagtctggccccgaagtgaagaaacccggcgagtccgtgaagatcagctgcaaggccagcggctacaccttccggcactacagcatgaactgggtcaagcaggccccaggccagggcctgaagtggatgggcagaatcaacaccgagagcggcgtgcccatctacgccgacgacttcaagggccggttcagcttcaccgtggacaccagcgccagcaccgcctacctggaaatctccagcctgaccagcgaggataccgccgtgtatttctgctccaacgactacctgtacagcctggatttctggggccagggaaccaccctgacagtgtcctctacgcgtatccagaaccctgatcctgccgtgtaccagctgcgggatagcaagagcagcgacaagagcgtgtgtctgttcaccgacttcgacagccagaccaacgtgtcccagagcaaggactccgacgtgtacatcaccgataagtgcgtgctggacatgcggagcatggacttcaagagcaactccgccgtggcctggtccaacaagtccgatttcgcctgcgccaacgccttcaacaacagcattatccccgaggacacattcttcccaagccccgagagcagcgactccaccgaccacgtgaagcccaaagagacagagaacaccaagcagcccagcaagagctgccacaagcccaaggccatcgtgcacaccgagaaagtgaacatgatgagcctgaccgtgctgggcctgcggatgctgttcgccaaaaccgtggccgtgaacttcctgctgaccgccaagctgttcttcctc

SEQ ID NO: 7378 - DNA, 2580 bp, synthetic construct
  source 1..2580: mol_type = other DNA
atggccttaccagtgaccgccttgctcctgccgctggccttgctgctccacgccgccaggccggaagtgcagctggttgaatctggcggaggactggttcagcctggcggatctctgagactgtcttgtgccgccagcggcttcagcttcagcgacttttggatgagctgggtccgacaggcccctggcaaaggacttgaatgggtcgccacaatcagccaggccggcagcgagaaggactacgtggactctgtgaagggcagattcaccatcagccgggacaacgccaagaagtccctgtacctccagatgaacagcctgagagccgaggacaccgccgtgtactattgtgcctctggcgtgtacagcttcgactacagaggccagggcaccctggtcacagtctcttctggtaccggcggaggcggatctggcggcggaggtagcggtggcggaggatctgaattccagtctgtgctgacacagcctcctagtgtgtctggcgctcctggacagagagtgaccatcagctgtacaggcagcagcagcaatatcggagccggctttgacgtgcactggtatcagcagctgcctggcacagcccctaaactgctgatctacggcaacagcaacagacccagcggcgtgcccgatagattttccggctctaagagcggcacaagcgccagcctggctattactggactccaggccgaggacgaggccgactactactgtcagagctacgacagcagcctgagcggctacgttttcggcaccggcaccaaagtgacagtgcttggtctcgaggacctgaagaacgtgttcccacctgaggtggccgtgttcgagcctagcgaggccgagatcagccacacccagaaagccaccctcgtgtgcctggctaccggcttctaccccgaccatgtggaactgtcttggtgggtcaacggcaaagaggtgcacagcggcgtgtgtaccgacccccagccactgaaagaacagcccgccctgaacgacagccggtactgcctgagcagcagactgagagtgtccgccaccttctggcagaacccccggaaccacttcagatgccaggtgcagttctacggcctgagcgagaacgacgagtggacccaggacagagccaagcccgtgacccagatcgtgtctgccgaagcctggggcagagccgatgatgtgattaagatccactggcaggaaaagaagtccaacaccatcctgggcagccaggaaggcaacaccatgaagaccaacgacacctacatgaagttcagctggctgaccgtgcccgagaagtccctggacaaagaacacagatgcatcgtgcggcacgaaaacaacaagaacggcgtggaccaggaaatcatcttcccacccatcaagaccgatgtgattacaatggaccccaaggacaactgctccaaggacgccaacgataccctgctgctccagctgaccaacaccagcgcctactacatgtacttgttgctgctgctgaagtccgtggtgtacttcgccatcatcacatgctgcctgctgcggagaaccgccttctgctgcaacggcgagaagtctagggccaagcgatctggatctggagcaacaaacttctcactactcaaacaagcaggtgacgtggaggagaatcccgggcctactagtatggactggatttggcgcatccttttccttgtcggcgctgctaccggcgcgcattccttcgaacaagttcagctggttcagagcggagccgaagtgaagaaacctggggcctctgtgaaggtgtcctgcaaggcttccggctacacctttaccgattactacatgcactgggtccgacaggctcccggccaaagacttgaatggatgggctggatcaaccccaacagcggcggcacaaattacgcccagaagttccaggaccggatcaccgtgaccagagacaccagctccaacaccggctacatggaactgacccggctgagatccgatgacaccgccgtgtactactgcgctagaagcccttactccggcgtgctggataagtggggacagggcacactggtcaccgtgtcatctacgcgtatccagaaccctgatcctgccgtgtaccagctgcgggatagcaagagcagcgacaagagcgtgtgtctgttcaccgacttcgacagccagaccaacgtgtcccagagcaaggactccgacgtgtacatcaccgataagtgcgtgctggacatgcggagcatggacttcaagagcaactccgccgtggcctggtccaacaagtccgatttcgcctgcgccaacgccttcaacaacagcattatccccgaggacacattcttcccaagccccgagagcagcgactccaccgaccacgtgaagcccaaagagacagagaacaccaagcagcccagcaagagctgccacaagcccaaggccatcgtgcacaccgagaaagtgaacatgatgagcctgaccgtgctgggcctgcggatgctgttcgccaaaaccgtggccgtgaacttcctgctgaccgccaagctgttcttcctc

SEQ ID NO: 7379 - DNA, 2571 bp, synthetic construct
  source 1..2571: mol_type = other DNA
atggccttaccagtgaccgccttgctcctgccgctggccttgctgctccacgccgccaggccggaagtgcagctggttgaatctggcggaggactggttcagcctggcggatctctgagactgtcttgtgccgccagcggcttcagcttcagcgacttttggatgagctgggtccgacaggcccctggcaaaggacttgaatgggtcgccacaatcagccaggccggcagcgagaaggactacgtggactctgtgaagggcagattcaccatcagccgggacaacgccaagaagtccctgtacctccagatgaacagcctgagagccgaggacaccgccgtgtactattgtgcctctggcgtgtacagcttcgactacagaggccagggcaccctggtcacagtctcttctggtaccggcggaggcggatctggcggcggaggtagcggtggcggaggatctgaattccaggctgttctgacacagcctccatctgcctctggcacacctggacagagagtgaccatctcctgtagcggcagcagcagcaacatcggcagctacaccgtgtcctggtatcagcagctccctggaacagcccctaagttcctgatctacagcaacaaccagcggcctagcggcgtgcccgatagattttctggcagcaagagcggcacaagcgccagcctggctatttctggactccagtctgaggacgaggccgactactattgtgccgcctgggacgatagcctgaacggctatgtgtttggcaccggcaccaaagtgacagtgcttggtctcgaggacctgaagaacgtgttcccacctgaggtggccgtgttcgagcctagcgaggccgagatcagccacacccagaaagccaccctcgtgtgcctggctaccggcttctaccccgaccatgtggaactgtcttggtgggtcaacggcaaagaggtgcacagcggcgtgtgtaccgacccccagccactgaaagaacagcccgccctgaacgacagccggtactgcctgagcagcagactgagagtgtccgccaccttctggcagaacccccggaaccacttcagatgccaggtgcagttctacggcctgagcgagaacgacgagtggacccaggacagagccaagcccgtgacccagatcgtgtctgccgaagcctggggcagagccgatgatgtgattaagatccactggcaggaaaagaagtccaacaccatcctgggcagccaggaaggcaacaccatgaagaccaacgacacctacatgaagttcagctggctgaccgtgcccgagaagtccctggacaaagaacacagatgcatcgtgcggcacgaaaacaacaagaacggcgtggaccaggaaatcatcttcccacccatcaagaccgatgtgattacaatggaccccaaggacaactgctccaaggacgccaacgataccctgctgctccagctgaccaacaccagcgcctactacatgtacttgttgctgctgctgaagtccgtggtgtacttcgccatcatcacatgctgcctgctgcggagaaccgccttctgctgcaacggcgagaagtctagggccaagcgatctggatctggagcaacaaacttctcactactcaaacaagcaggtgacgtggaggagaatcccgggcctactagtatggactggatttggcgcatccttttccttgtcggcgctgctaccggcgcgcattccttcgaagttcaactggttcagagcggagccgaagtgaagaagcctggcgagagcctgaagattagctgcaaaggcagcggctacgacttcaccacctactggatcggctgggtccgacagatgcctggcaaaggactggaatggatgggcatcatctaccccggcgacagcgacaccagatacagccctagcgttagaggccgcgtgaccatcagcgccgacaagtctatcaacaccgcctacctccagtggtccagcctggaagcctctgacaccgccatgtactactgcgccagaatgtggaccttcagccaggatggatggggccagggaacactggtcacagtgtcatctacgcgtatccagaaccctgatcctgccgtgtaccagctgcgggatagcaagagcagcgacaagagcgtgtgtctgttcaccgacttcgacagccagaccaacgtgtcccagagcaaggactccgacgtgtacatcaccgataagtgcgtgctggacatgcggagcatggacttcaagagcaactccgccgtggcctggtccaacaagtccgatttcgcctgcgccaacgccttcaacaacagcattatccccgaggacacattcttcccaagccccgagagcagcgactccaccgaccacgtgaagcccaaagagacagagaacaccaagcagcccagcaagagctgccacaagcccaaggccatcgtgcacaccgagaaagtgaacatgatgagcctgaccgtgctgggcctgcggatgctgttcgccaaaaccgtggccgtgaacttcctgctgaccgccaagctgttcttcctc

SEQ ID NO: 7380 - DNA, 2580 bp, synthetic construct
  source 1..2580: mol_type = other DNA
atggccttaccagtgaccgccttgctcctgccgctggccttgctgctccacgccgccaggccggaagtgcagctggttgaatctggcggaggactggttcagcctggcggatctctgagactgtcttgtgccgccagcggcttcagcttcagcgacttttggatgagctgggtccgacaggcccctggcaaaggacttgaatgggtcgccacaatcagccaggccggcagcgagaaggactacgtggactctgtgaagggcagattcaccatcagccgggacaacgccaagaagtccctgtacctccagatgaacagcctgagagccgaggacaccgccgtgtactattgtgcctctggcgtgtacagcttcgactacagaggccagggcaccctggtcacagtctcttctggtaccggcggaggcggatctggcggcggaggtagcggtggcggaggatctgaattcgacatcgtgatgacccagagccccgatagcctggccgtgtctctgggagagagagccaccatcaactgcaagagcagccagagcatcctgtacagcagcaaccagaagaactacctggcctggtatcagcagaagcccggccagagccctaagctgctgatctactgggccagcaccagagaaagcggcgtgcccgatagattcagcggcagcggctctggcaccgacttcaccctgaccatcagttctcttcaggccgaggacgtggccgtgtactactgccaccagtacatcagctcctacaccttcggccagggcaccaagctggaaatcaagctcgaggacctgaagaacgtgttcccacctgaggtggccgtgttcgagcctagcgaggccgagatcagccacacccagaaagccaccctcgtgtgcctggctaccggcttctaccccgaccatgtggaactgtcttggtgggtcaacggcaaagaggtgcacagcggcgtgtgtaccgacccccagccactgaaagaacagcccgccctgaacgacagccggtactgcctgagcagcagactgagagtgtccgccaccttctggcagaacccccggaaccacttcagatgccaggtgcagttctacggcctgagcgagaacgacgagtggacccaggacagagccaagcccgtgacccagatcgtgtctgccgaagcctggggcagagccgatgatgtgattaagatccactggcaggaaaagaagtccaacaccatcctgggcagccaggaaggcaacaccatgaagaccaacgacacctacatgaagttcagctggctgaccgtgcccgagaagtccctggacaaagaacacagatgcatcgtgcggcacgaaaacaacaagaacggcgtggaccaggaaatcatcttcccacccatcaagaccgatgtgattacaatggaccccaaggacaactgctccaaggacgccaacgataccctgctgctccagctgaccaacaccagcgcctactacatgtacttgttgctgctgctgaagtccgtggtgtacttcgccatcatcacatgctgcctgctgcggagaaccgccttctgctgcaacggcgagaagtctagggccaagcgatctggatctggagcaacaaacttctcactactcaaacaagcaggtgacgtggaggagaatcccgggcctactagtatggactggatttggcgcatccttttccttgtcggcgctgctaccggcgcgcattccttcgaacaggtgcagctggtgcagtctggcgctgaagtgaagaaacctggggccagcgtgaaggtgtcctgcaaggccagcggctacacctttgccagccagtggatgcactggatgagacaggcccctggacagggcctggaatggatcggctggatcaaccccggcaacgtgaacaccaagtacaacgagaagttcaagggcagagccaccctgacagtggacaccagcaccaacaccgcctacatggaactgagcagcctgcggagcgaggacaccgccgtgtattattgcgccagaagcacctggtacagacccctggattattggggccagggaacccttgtgaccgtgtcctctacgcgtatccagaaccctgatcctgccgtgtaccagctgcgggatagcaagagcagcgacaagagcgtgtgtctgttcaccgacttcgacagccagaccaacgtgtcccagagcaaggactccgacgtgtacatcaccgataagtgcgtgctggacatgcggagcatggacttcaagagcaactccgccgtggcctggtccaacaagtccgatttcgcctgcgccaacgccttcaacaacagcattatccccgaggacacattcttcccaagccccgagagcagcgactccaccgaccacgtgaagcccaaagagacagagaacaccaagcagcccagcaagagctgccacaagcccaaggccatcgtgcacaccgagaaagtgaacatgatgagcctgaccgtgctgggcctgcggatgctgttcgccaaaaccgtggccgtgaacttcctgctgaccgccaagctgttcttcctc

SEQ ID NO: 7381 - DNA, 2580 bp, synthetic construct
  source 1..2580: mol_type = other DNA
atggccttaccagtgaccgccttgctcctgccgctggccttgctgctccacgccgccaggccggaagtgcagctggttgaatctggcggaggactggttcagcctggcggatctctgagactgtcttgtgccgccagcggcttcagcttcagcgacttttggatgagctgggtccgacaggcccctggcaaaggacttgaatgggtcgccacaatcagccaggccggcagcgagaaggactacgtggactctgtgaagggcagattcaccatcagccgggacaacgccaagaagtccctgtacctccagatgaacagcctgagagccgaggacaccgccgtgtactattgtgcctctggcgtgtacagcttcgactacagaggccagggcaccctggtcacagtctcttctggtaccggcggaggcggatctggcggcggaggtagcggtggcggaggatctgaattcgaccacatcgtgctgacccagagccctagcagcctgtctgccagcctgggcgacagagtgaccatcagctgtagagccagccaggacatcagcacctacctgaactggtatcagcagaaacccgacggcaccgtgaagctgctgatcttctacaccagcagactgcacgccggggtgcccagcagattttctggcagcggctctggcacccaccacagcctgaccatctccaacctggaacaggaagatattgctacctacttctgtcagcaaggcaacagcctgcccttcaccttcggcagcggcaccaagctggaaatcaagagactcgaggacctgaagaacgtgttcccacctgaggtggccgtgttcgagcctagcgaggccgagatcagccacacccagaaagccaccctcgtgtgcctggctaccggcttctaccccgaccatgtggaactgtcttggtgggtcaacggcaaagaggtgcacagcggcgtgtgtaccgacccccagccactgaaagaacagcccgccctgaacgacagccggtactgcctgagcagcagactgagagtgtccgccaccttctggcagaacccccggaaccacttcagatgccaggtgcagttctacggcctgagcgagaacgacgagtggacccaggacagagccaagcccgtgacccagatcgtgtctgccgaagcctggggcagagccgatgatgtgattaagatccactggcaggaaaagaagtccaacaccatcctgggcagccaggaaggcaacaccatgaagaccaacgacacctacatgaagttcagctggctgaccgtgcccgagaagtccctggacaaagaacacagatgcatcgtgcggcacgaaaacaacaagaacggcgtggaccaggaaatcatcttcccacccatcaagaccgatgtgattacaatggaccccaaggacaactgctccaaggacgccaacgataccctgctgctccagctgaccaacaccagcgcctactacatgtacttgttgctgctgctgaagtccgtggtgtacttcgccatcatcacatgctgcctgctgcggagaaccgccttctgctgcaacggcgagaagtctagggccaagcgatctggatctggagcaacaaacttctcactactcaaacaagcaggtgacgtggaggagaatcccgggcctactagtatggactggatttggcgcatccttttccttgtcggcgctgctaccggcgcgcattccttcgaacaggtgcagctgaaagagagcggccctgagctggaaaagcctggggccagcgtgaagattagctgcaaggccagcggctacagcttcaccgcctacagcatgaactgggtcaagcagaacaacggcatgagcctggaatggatcggcagcatcgacccctactacggcgacaccaaatacgcccagaagttcaagggcaaggccaccctgaccgtggataaggccagcagcaccgcctacctccagctgaagtctctgaccagcgaggacagcgccgtgtactactgcgccagacggatgattaccaccggcgactggtacttcgacgtgtggggagccggaaccaccgtgacagtgtctagcacgcgtatccagaaccctgatcctgccgtgtaccagctgcgggatagcaagagcagcgacaagagcgtgtgtctgttcaccgacttcgacagccagaccaacgtgtcccagagcaaggactccgacgtgtacatcaccgataagtgcgtgctggacatgcggagcatggacttcaagagcaactccgccgtggcctggtccaacaagtccgatttcgcctgcgccaacgccttcaacaacagcattatccccgaggacacattcttcccaagccccgagagcagcgactccaccgaccacgtgaagcccaaagagacagagaacaccaagcagcccagcaagagctgccacaagcccaaggccatcgtgcacaccgagaaagtgaacatgatgagcctgaccgtgctgggcctgcggatgctgttcgccaaaaccgtggccgtgaacttcctgctgaccgccaagctgttcttcctc

SEQ ID NO: 7382 - DNA, 2580 bp, synthetic construct; identical to SEQ ID NO: 7381
  source 1..2580: mol_type = other DNA

SEQ ID NO: 7383 - DNA, 2580 bp, synthetic construct
  source 1..2580: mol_type = other DNA
atggccttaccagtgaccgccttgctcctgccgctggccttgctgctccacgccgccaggccggaagtgcagctggttgaatctggcggaggactggttcagcctggcggatctctgagactgtcttgtgccgccagcggcttcagcttcagcgacttttggatgagctgggtccgacaggcccctggcaaaggacttgaatgggtcgccacaatcagccaggccggcagcgagaaggactacgtggactctgtgaagggcagattcaccatcagccgggacaacgccaagaagtccctgtacctccagatgaacagcctgagagccgaggacaccgccgtgtactattgtgcctctggcgtgtacagcttcgactacagaggccagggcaccctggtcacagtctcttctggtaccggcggaggcggatctggcggcggaggtagcggtggcggaggatctgaattcgacgagatcgtgctgacacagagccctgccaccctgtctctgagccctggcgaaagagccaccctgagctgtagagccagccagagcgtgtccagctacctggcctggtatcagcagaagcccggccaggctccccggctgctgatctacgatgccagcaatagagccaccggcatccccgccagattttccggctctggcagcggcaccgacttcaccctgaccatcagctccctggaacccgaggacttcgccgtgtactactgccagcagcggagcaactggcccatcacattcggccagggcacccggctggaaatcaaactcgaggacctgaagaacgtgttcccacctgaggtggccgtgttcgagcctagcgaggccgagatcagccacacccagaaagccaccctcgtgtgcctggctaccggcttctaccccgaccatgtggaactgtcttggtgggtcaacggcaaagaggtgcacagcggcgtgtgtaccgacccccagccactgaaagaacagcccgccctgaacgacagccggtactgcctgagcagcagactgagagtgtccgccaccttctggcagaacccccggaaccacttcagatgccaggtgcagttctacggcctgagcgagaacgacgagtggacccaggacagagccaagcccgtgacccagatcgtgtctgccgaagcctggggcagagccgatgatgtgattaagatccactggcaggaaaagaagtccaacaccatcctgggcagccaggaaggcaacaccatgaagaccaacgacacctacatgaagttcagctggctgaccgtgcccgagaagtccctggacaaagaacacagatgcatcgtgcggcacgaaaacaacaagaacggcgtggaccaggaaatcatcttcccacccatcaagaccgatgtgattacaatggaccccaaggacaactgctccaaggacgccaacgataccctgctgctccagctgaccaacaccagcgcctactacatgtacttgttgctgctgctgaagtccgtggtgtacttcgccatcatcacatgctgcctgctgcggagaaccgccttctgctgcaacggcgagaagtctagggccaagcgatctggatctggagcaacaaacttctcactactcaaacaagcaggtgacgtggaggagaatcccgggcctactagtatggactggatttggcgcatccttttccttgtcggcgctgctaccggcgcgcattccttcgaagaagtgcagctggtggaatcaggcggcggactggtgcagcctggcagaagcctgagactgagctgtgccgccagcggcttcaccttcaacgactacgccatgcactgggtgcgccaggcccctggaaaaggactggaatgggtgtccacaatcagctggaacagcggcagcatcggctacgccgatagcgtgaagggccggttcaccatcagccgggacaacgccaagaagtccctgtacctccagatgaacagcctgcgggccgaggacacagccctgtactattgcgccaaggacatccagtacggcaactactactacggcatggacgtgtggggccagggaaccaccgtgaccgtgtcatctacgcgtatccagaaccctgatcctgccgtgtaccagctgcgggatagcaagagcagcgacaagagcgtgtgtctgttcaccgacttcgacagccagaccaacgtgtcccagagcaaggactccgacgtgtacatcaccgataagtgcgtgctggacatgcggagcatggacttcaagagcaactccgccgtggcctggtccaacaagtccgatttcgcctgcgccaacgccttcaacaacagcattatccccgaggacacattcttcccaagccccgagagcagcgactccaccgaccacgtgaagcccaaagagacagagaacaccaagcagcccagcaagagctgccacaagcccaaggccatcgtgcacaccgagaaagtgaacatgatgagcctgaccgtgctgggcctgcggatgctgttcgccaaaaccgtggccgtgaacttcctgctgaccgccaagctgttcttcctc

SEQ ID NO: 7384 - DNA, 2586 bp, synthetic construct
  source 1..2586: mol_type = other DNA
atggccttaccagtgaccgccttgctcctgccgctggccttgctgctccacgccgccaggccggaagtgcagctggttgaatctggcggaggactggttcagcctggcggatctctgagactgtcttgtgccgccagcggcttcagcttcagcgacttttggatgagctgggtccgacaggcccctggcaaaggacttgaatgggtcgccacaatcagccaggccggcagcgagaaggactacgtggactctgtgaagggcagattcaccatcagccgggacaacgccaagaagtccctgtacctccagatgaacagcctgagagccgaggacaccgccgtgtactattgtgcctctggcgtgtacagcttcgactacagaggccagggcaccctggtcacagtctcttctggtaccggcggaggcggatctggcggcggaggtagcggtggcggaggatctgaattcgacatcgtgatgacccagacccccctgagcctgcctgtgacacctggcgagcctgccagcatctcctgcagaagcagcaagagcctgctgcacagcaacggcatcacctacctgtactggtatctgcagaaacccggccagagcccccaactgctgatctaccagatgagcaacctggtgtccggcgtgcccgacagattttctggcagcggctccggcaccgacttcaccctgaagatcagccgggtggaagccgaggacgtgggcgtgtactactgcgcccagaacctggaactgccctacacctttggcggcggaacaaaggtggaaatcaagcggctcgaggacctgaagaacgtgttcccacctgaggtggccgtgttcgagcctagcgaggccgagatcagccacacccagaaagccaccctcgtgtgcctggctaccggcttctaccccgaccatgtggaactgtcttggtgggtcaacggcaaagaggtgcacagcggcgtgtgtaccgacccccagccactgaaagaacagcccgccctgaacgacagccggtactgcctgagcagcagactgagagtgtccgccaccttctggcagaacccccggaaccacttcagatgccaggtgcagttctacggcctgagcgagaacgacgagtggacccaggacagagccaagcccgtgacccagatcgtgtctgccgaagcctggggcagagccgatgatgtgattaagatccactggcaggaaaagaagtccaacaccatcctgggcagccaggaaggcaacaccatgaagaccaacgacacctacatgaagttcagctggctgaccgtgcccgagaagtccctggacaaagaacacagatgcatcgtgcggcacgaaaacaacaagaacggcgtggaccaggaaatcatcttcccacccatcaagaccgatgtgattacaatggaccccaaggacaactgctccaaggacgccaacgataccctgctgctccagctgaccaacaccagcgcctactacatgtacttgttgctgctgctgaagtccgtggtgtacttcgccatcatcacatgctgcctgctgcggagaaccgccttctgctgcaacggcgagaagtctagggccaagcgatctggatctggagcaacaaacttctcactactcaaacaagcaggtgacgtggaggagaatcccgggcctactagtatggactggatttggcgcatccttttccttgtcggcgctgctaccggcgcgcattccttcgaacaggtgcaactggtgcagagcggagccgaagtgaaaaagcccggcagcagcgtgaaggtgtcctgcaaggccagcggctacgccttcagctactcctggatcaactgggtgcgccaggcccctggacagggcctggaatggatgggcagaatcttccccggcgacggcgacaccgactacaacggcaagttcaagggcagagtgaccatcaccgccgacaagagcaccagcaccgcctacatggaactgagcagcctgcggagcgaggataccgccgtgtactattgtgccagaaacgtgttcgacggctactggctggtgtactggggccagggaacacttgtgaccgtgtccagcacgcgtatccagaaccctgatcctgccgtgtaccagctgcgggatagcaagagcagcgacaagagcgtgtgtctgttcaccgacttcgacagccagaccaacgtgtcccagagcaaggactccgacgtgtacatcaccgataagtgcgtgctggacatgcggagcatggacttcaagagcaactccgccgtggcctggtccaacaagtccgatttcgcctgcgccaacgccttcaacaacagcattatccccgaggacacattcttcccaagccccgagagcagcgactccaccgaccacgtgaagcccaaagagacagagaacaccaagcagcccagcaagagctgccacaagcccaaggccatcgtgcacaccgagaaagtgaacatgatgagcctgaccgtgctgggcctgcggatgctgttcgccaaaaccgtggccgtgaacttcctgctgaccgccaagctgttcttcctc

SEQ ID NO: 7385 - DNA, 2589 bp, synthetic construct
  source 1..2589: mol_type = other DNA
atggccttaccagtgaccgccttgctcctgccgctggccttgctgctccacgccgccaggccggaagtgcagctggttgaatctggcggaggactggttcagcctggcggatctctgagactgtcttgtgccgccagcggcttcagcttcagcgacttttggatgagctgggtccgacaggcccctggcaaaggacttgaatgggtcgccacaatcagccaggccggcagcgagaaggactacgtggactctgtgaagggcagattcaccatcagccgggacaacgccaagaagtccctgtacctccagatgaacagcctgagagccgaggacaccgccgtgtactattgtgcctctggcgtgtacagcttcgactacagaggccagggcaccctggtcacagtctcttctggtaccggcggaggcggatctggcggcggaggtagcggtggcggaggatctgaattcgacatccagatgacccagagccccagcagcctgtctgccagcgtgggcgacagagtgaccatcacctgtcggagcagccagagcatcgtgcactccgtgggcaacaccttcctggaatggtatcagcagaagcccggcaaggcccccaagctgctgatctacaaggtgtccaacagattcagcggcgtgcccagcaggtttagcggctctggcagcggcaccgacttcaccctgaccatctctagcctccagcccgaggacttcgccacctactactgttttcaaggcagccagttcccctacaccttcggccagggaacaaaggtggaaatcaagcggctcgaggacctgaagaacgtgttcccacctgaggtggccgtgttcgagcctagcgaggccgagatcagccacacccagaaagccaccctcgtgtgcctggctaccggcttctaccccgaccatgtggaactgtcttggtgggtcaacggcaaagaggtgcacagcggcgtgtgtaccgacccccagccactgaaagaacagcccgccctgaacgacagccggtactgcctgagcagcagactgagagtgtccgccaccttctggcagaacccccggaaccacttcagatgccaggtgcagttctacggcctgagcgagaacgacgagtggacccaggacagagccaagcccgtgacccagatcgtgtctgccgaagcctggggcagagccgatgatgtgattaagatccactggcaggaaaagaagtccaacaccatcctgggcagccaggaaggcaacaccatgaagaccaacgacacctacatgaagttcagctggctgaccgtgcccgagaagtccctggacaaagaacacagatgcatcgtgcggcacgaaaacaacaagaacggcgtggaccaggaaatcatcttcccacccatcaagaccgatgtgattacaatggaccccaaggacaactgctccaaggacgccaacgataccctgctgctccagctgaccaacaccagcgcctactacatgtacttgttgctgctgctgaagtccgtggtgtacttcgccatcatcacatgctgcctgctgcggagaaccgccttctgctgcaacggcgagaagtctagggccaagcgatctggatctggagcaacaaacttctcactactcaaacaagcaggtgacgtggaggagaatcccgggcctactagtatggactggatttggcgcatccttttccttgtcggcgctgctaccggcgcgcattccttcgaagaagtgcaactggtggaaagcggaggcggcctggtgcagcctggcggatctctgagactgagctgtgccgccagcggctacgagttcagccggtcctggatgaactgggtgcgccaggcccctggcaagggactggaatgggtgggaagaatctaccccggcgacggcgacaccaactacagcggcaagttcaagggccggttcaccatcagcgccgacaccagcaagaacaccgcctacctccagatgaacagcctgcgggccgaggataccgccgtgtactactgtgccagagatggcagctcctgggactggtacttcgacgtgtggggacagggaacccttgtgaccgtgtccagcacgcgtatccagaaccctgatcctgccgtgtaccagctgcgggatagcaagagcagcgacaagagcgtgtgtctgttcaccgacttcgacagccagaccaacgtgtcccagagcaaggactccgacgtgtacatcaccgataagtgcgtgctggacatgcggagcatggacttcaagagcaactccgccgtggcctggtccaacaagtccgatttcgcctgcgccaacgccttcaacaacagcattatccccgaggacacattcttcccaagccccgagagcagcgactccaccgaccacgtgaagcccaaagagacagagaacaccaagcagcccagcaagagctgccacaagcccaaggccatcgtgcacaccgagaaagtgaacatgatgagcctgaccgtgctgggcctgcggatgctgttcgccaaaaccgtggccgtgaacttcctgctgaccgccaagctgttcttcctc

SEQ ID NO: 7386 - DNA, 2583 bp, synthetic construct
  source 1..2583: mol_type = other DNA
atggccttaccagtgaccgccttgctcctgccgctggccttgctgctccacgccgccaggccggaagtgcagctggttgaatctggcggaggactggttcagcctggcggatctctgagactgtcttgtgccgccagcggcttcagcttcagcgacttttggatgagctgggtccgacaggcccctggcaaaggacttgaatgggtcgccacaatcagccaggccggcagcgagaaggactacgtggactctgtgaagggcagattcaccatcagccgggacaacgccaagaagtccctgtacctccagatgaacagcctgagagccgaggacaccgccgtgtactattgtgcctctggcgtgtacagcttcgactacagaggccagggcaccctggtcacagtctcttctggtaccggcggaggcggatctggcggcggaggtagcggtggcggaggatctgaattcgacatccagatgacccagagccccagcagcctgtctgccagcgtgggcgacagagtgaccatcacctgtagagccagccagaccatctggtcctacctgaactggtatcagcagaggcccggcaaggcccccaacctgctgatctatgccgccagctctctccagagcggcgtgcccagcagattttccggcagaggcagcggcaccgacttcaccctgaccatcagttccttgcaggccgaggacttcgccacctactactgccagcagagctacagcatcccccagattttcggccagggcaccaagctggaaatcaagctcgaggacctgaagaacgtgttcccacctgaggtggccgtgttcgagcctagcgaggccgagatcagccacacccagaaagccaccctcgtgtgcctggctaccggcttctaccccgaccatgtggaactgtcttggtgggtcaacggcaaagaggtgcacagcggcgtgtgtaccgacccccagccactgaaagaacagcccgccctgaacgacagccggtactgcctgagcagcagactgagagtgtccgccaccttctggcagaacccccggaaccacttcagatgccaggtgcagttctacggcctgagcgagaacgacgagtggacccaggacagagccaagcccgtgacccagatcgtgtctgccgaagcctggggcagagccgatgatgtgattaagatccactggcaggaaaagaagtccaacaccatcctgggcagccaggaaggcaacaccatgaagaccaacgacacctacatgaagttcagctggctgaccgtgcccgagaagtccctggacaaagaacacagatgcatcgtgcggcacgaaaacaacaagaacggcgtggaccaggaaatcatcttcccacccatcaagaccgatgtgattacaatggaccccaaggacaactgctccaaggacgccaacgataccctgctgctccagctgaccaacaccagcgcctactacatgtacttgttgctgctgctgaagtccgtggtgtacttcgccatcatcacatgctgcctgctgcggagaaccgccttctgctgcaacggcgagaagtctagggccaagcgatctggatctggagcaacaaacttctcactactcaaacaagcaggtgacgtggaggagaatcccgggcctactagtatggactggatttggcgcatccttttccttgtcggcgctgctaccggcgcgcattccttcgaacaggtgcagctccagcagtctggacccggcctcgtgaagcctagccagacactgagcctgacctgcgccatcagcggcgatagcgtgtccagcaatagcgccgcctggaactggatcagacagtccccctctcggggcctggaatggctgggccggacctactaccgcagcaagtggtacaacgactacgccgtgtccgtgaagtcccggatcaccatcaaccccgacaccagcaagaaccagttctccttgcaactgaacagcgtgacccccgaggacaccgccgtgtactactgcgccagagaagtgaccggcgacctggaagatgccttcgacatctggggccagggaacaatggtcacagtgtccagcacgcgtatccagaaccctgatcctgccgtgtaccagctgcgggatagcaagagcagcgacaagagcgtgtgtctgttcaccgacttcgacagccagaccaacgtgtcccagagcaaggactccgacgtgtacatcaccgataagtgcgtgctggacatgcggagcatggacttcaagagcaactccgccgtggcctggtccaacaagtccgatttcgcctgcgccaacgccttcaacaacagcattatccccgaggacacattcttcccaagccccgagagcagcgactccaccgaccacgtgaagcccaaagagacagagaacaccaagcagcccagcaagagctgccacaagcccaaggccatcgtgcacaccgagaaagtgaacatgatgagcctgaccgtgctgggcctgcggatgctgttcgccaaaaccgtggccgtgaacttcctgctgaccgccaagctgttcttcctc

SEQ ID NO: 7387 - DNA, 2562 bp, synthetic construct
  source 1..2562: mol_type = other DNA
atggccttaccagtgaccgccttgctcctgccgctggccttgctgctccacgccgccaggccggaagtgcagctggttgaatctggcggaggactggttcagcctggcggatctctgagactgtcttgtgccgccagcggcttcagcttcagcgacttttggatgagctgggtccgacaggcccctggcaaaggacttgaatgggtcgccacaatcagccaggccggcagcgagaaggactacgtggactctgtgaagggcagattcaccatcagccgggacaacgccaagaagtccctgtacctccagatgaacagcctgagagccgaggacaccgccgtgtactattgtgcctctggcgtgtacagcttcgactacagaggccagggcaccctggtcacagtctcttctggtaccggcggaggcggatctggcggcggaggtagcggtggcggaggatctgaattcgacatccagatgacccagagccccgccaccatcgagaacacaagcctgtctgccagcgtgggcgacagagtgaccatcacctgtagagccagccagggcatcagctcttggctgacctggtatcagcagaagcccgagaaggcccccaagagcctgatctacgccgccagctctctgcagtctggcgtgcccagcagattttccggcagcggctctggcaccgacttcaccctgacaatcagcagcctgcagcccgaggacttcgccacctactactgccagcagtacgacagctaccccatcaccttcggccagggcacccggctggaaatcaagctcgaggacctgaagaacgtgttcccacctgaggtggccgtgttcgagcctagcgaggccgagatcagccacacccagaaagccaccctcgtgtgcctggctaccggcttctaccccgaccatgtggaactgtcttggtgggtcaacggcaaagaggtgcacagcggcgtgtgtaccgacccccagccactgaaagaacagcccgccctgaacgacagccggtactgcctgagcagcagactgagagtgtccgccaccttctggcagaacccccggaaccacttcagatgccaggtgcagttctacggcctgagcgagaacgacgagtggacccaggacagagccaagcccgtgacccagatcgtgtctgccgaagcctggggcagagccgatgatgtgattaagatccactggcaggaaaagaagtccaacaccatcctgggcagccaggaaggcaacaccatgaagaccaacgacacctacatgaagttcagctggctgaccgtgcccgagaagtccctggacaaagaacacagatgcatcgtgcggcacgaaaacaacaagaacggcgtggaccaggaaatcatcttcccacccatcaagaccgatgtgattacaatggaccccaaggacaactgctccaaggacgccaacgataccctgctgctccagctgaccaacaccagcgcctactacatgtacttgttgctgctgctgaagtccgtggtgtacttcgccatcatcacatgctgcctgctgcggagaaccgccttctgctgcaacggcgagaagtctagggccaagcgatctggatctggagcaacaaacttctcactactcaaacaagcaggtgacgtggaggagaatcccgggcctactagtatggactggatttggcgcatccttttccttgtcggcgctgctaccggcgcgcattccttcgaacaggtgcaactgcagcagtggggagccggactgctgaagcctagcgagacactgagcctgacctgcgccgtgtacggcggcagcttcagcgcctactattggagctggatcagacagccccctggcaagggcctggaatggatcggcgacatcaatcacggcggaggcaccaactacaaccccagcctgaagtcccgcgtgaccatctccgtggacaccagcaagaaccagttctccctgaagctgaacagcgtgacagccgccgacacagccgtgtactactgtgccagcctgaccgcctattggggccagggatctcttgtgaccgtgtccagcacgcgtatccagaaccctgatcctgccgtgtaccagctgcgggatagcaagagcagcgacaagagcgtgtgtctgttcaccgacttcgacagccagaccaacgtgtcccagagcaaggactccgacgtgtacatcaccgataagtgcgtgctggacatgcggagcatggacttcaagagcaactccgccgtggcctggtccaacaagtccgatttcgcctgcgccaacgccttcaacaacagcattatccccgaggacacattcttcccaagccccgagagcagcgactccaccgaccacgtgaagcccaaagagacagagaacaccaagcagcccagcaagagctgccacaagcccaaggccatcgtgcacaccgagaaagtgaacatgatgagcctgaccgtgctgggcctgcggatgctgttcgccaaaaccgtggccgtgaacttcctgctgaccgccaagctgttcttcctc

SEQ ID NO: 7388 - DNA, 2577 bp, synthetic construct
  source 1..2577: mol_type = other DNA
atggccttaccagtgaccgccttgctcctgccgctggccttgctgctccacgccgccaggccggaagtgcagctggttgaatctggcggaggactggttcagcctggcggatctctgagactgtcttgtgccgccagcggcttcagcttcagcgacttttggatgagctgggtccgacaggcccctggcaaaggacttgaatgggtcgccacaatcagccaggccggcagcgagaaggactacgtggactctgtgaagggcagattcaccatcagccgggacaacgccaagaagtccctgtacctccagatgaacagcctgagagccgaggacaccgccgtgtactattgtgcctctggcgtgtacagcttcgactacagaggccagggcaccctggtcacagtctcttctggtaccggcggaggcggatctggcggcggaggtagcggtggcggaggatctgaattcgacgagatcgtgctgacccagagccctgatagcctggccgtgtctctgggcgagagagccaccatcaactgcaaggccagccagagcgtggacttcgacggcgacagctacctgaactggtatcagcagaagcccggccagccccccaaggtgctgatctatgccgccagcacactgcagagcggcgtgcccagcagattttctggcagcggctccggcaccgacttcaccctgaccatcaacagcctggaagccgaggacgccgccacctactactgccagcagagcaacgaggacccctggacctttggcggcggaacaaaggtggaaatcaagctcgaggacctgaagaacgtgttcccacctgaggtggccgtgttcgagcctagcgaggccgagatcagccacacccagaaagccaccctcgtgtgcctggctaccggcttctaccccgaccatgtggaactgtcttggtgggtcaacggcaaagaggtgcacagcggcgtgtgtaccgacccccagccactgaaagaacagcccgccctgaacgacagccggtactgcctgagcagcagactgagagtgtccgccaccttctggcagaacccccggaaccacttcagatgccaggtgcagttctacggcctgagcgagaacgacgagtggacccaggacagagccaagcccgtgacccagatcgtgtctgccgaagcctggggcagagccgatgatgtgattaagatccactggcaggaaaagaagtccaacaccatcctgggcagccaggaaggcaacaccatgaagaccaacgacacctacatgaagttcagctggctgaccgtgcccgagaagtccctggacaaagaacacagatgcatcgtgcggcacgaaaacaacaagaacggcgtggaccaggaaatcatcttcccacccatcaagaccgatgtgattacaatggaccccaaggacaactgctccaaggacgccaacgataccctgctgctccagctgaccaacaccagcgcctactacatgtacttgttgctgctgctgaagtccgtggtgtacttcgccatcatcacatgctgcctgctgcggagaaccgccttctgctgcaacggcgagaagtctagggccaagcgatctggatctggagcaacaaacttctcactactcaaacaagcaggtgacgtggaggagaatcccgggcctactagtatggactggatttggcgcatccttttccttgtcggcgctgctaccggcgcgcattccttcgaacaggtgcaactggtgcagtccggcgctgaagtgaagaaacctggggccagcgtgaaggtgtcctgcaaggtgtccggctacacctttaccgactactacattacctgggtgcgccaggcccctggacaggccctggaatggatgggctggatctaccccggcagcggcaacaccaagtacagccagaagttccagggcagattcgtgttcagcgtggacaccagcgccagcaccgcctacctgcaactgtctagcctgaaggccgaagataccgccgtgtactactgcgccaactacggcaactattggttcgcctattggggccagggaacccttgtgaccgtgtcctctacgcgtatccagaaccctgatcctgccgtgtaccagctgcgggatagcaagagcagcgacaagagcgtgtgtctgttcaccgacttcgacagccagaccaacgtgtcccagagcaaggactccgacgtgtacatcaccgataagtgcgtgctggacatgcggagcatggacttcaagagcaactccgccgtggcctggtccaacaagtccgatttcgcctgcgccaacgccttcaacaacagcattatccccgaggacacattcttcccaagccccgagagcagcgactccaccgaccacgtgaagcccaaagagacagagaacaccaagcagcccagcaagagctgccacaagcccaaggccatcgtgcacaccgagaaagtgaacatgatgagcctgaccgtgctgggcctgcggatgctgttcgccaaaaccgtggccgtgaacttcctgctgaccgccaagctgttcttcctc

SEQ ID NO: 7389 - DNA, 2568 bp, synthetic construct
  source 1..2568: mol_type = other DNA
atggccttaccagtgaccgccttgctcctgccgctggccttgctgctccacgccgccaggccggaagtgcagctggttgaatctggcggaggactggttcagcctggcggatctctgagactgtcttgtgccgccagcggcttcagcttcagcgacttttggatgagctgggtccgacaggcccctggcaaaggacttgaatgggtcgccacaatcagccaggccggcagcgagaaggactacgtggactctgtgaagggcagattcaccatcagccgggacaacgccaagaagtccctgtacctccagatgaacagcctgagagccgaggacaccgccgtgtactattgtgcctctggcgtgtacagcttcgactacagaggccagggcaccctggtcacagtctcttctggtaccggcggaggcggatctggcggcggaggtagcggtggcggaggatctgaattcgacatccagatgacccagagccccagcagcctgtctgccagcgtgggcgacagagtgaccatcacctgtagagccagccagggcatcagctcttggctggcctggtatcagcagaagcccgagaaggcccccaagagcctgatctacgccgcctctagtctccagagcggcgtgcccagcagattttctggcagcggctccggcaccgacttcaccctgacaatcagctccctccagcccgaggacttcgccacctactactgccagcagtacaacagctaccctcccacctttggcggaggcaccaaggtggaaatcaagctcgaggacctgaagaacgtgttcccacctgaggtggccgtgttcgagcctagcgaggccgagatcagccacacccagaaagccaccctcgtgtgcctggctaccggcttctaccccgaccatgtggaactgtcttggtgggtcaacggcaaagaggtgcacagcggcgtgtgtaccgacccccagccactgaaagaacagcccgccctgaacgacagccggtactgcctgagcagcagactgagagtgtccgccaccttctggcagaacccccggaaccacttcagatgccaggtgcagttctacggcctgagcgagaacgacgagtggacccaggacagagccaagcccgtgacccagatcgtgtctgccgaagcctggggcagagccgatgatgtgattaagatccactggcaggaaaagaagtccaacaccatcctgggcagccaggaaggcaacaccatgaagaccaacgacacctacatgaagttcagctggctgaccgtgcccgagaagtccctggacaaagaacacagatgcatcgtgcggcacgaaaacaacaagaacggcgtggaccaggaaatcatcttcccacccatcaagaccgatgtgattacaatggaccccaaggacaactgctccaaggacgccaacgataccctgctgctccagctgaccaacaccagcgcctactacatgtacttgttgctgctgctgaagtccgtggtgtacttcgccatcatcacatgctgcctgctgcggagaaccgccttctgctgcaacggcgagaagtctagggccaagcgatctggatctggagcaacaaacttctcactactcaaacaagcaggtgacgtggaggagaatcccgggcctactagtatggactggatttggcgcatccttttccttgtcggcgctgctaccggcgcgcattccttcgaagaagtgcaactggtgcagtctggcggagggctggtgcatcctgggggaagcctgagactgagctgtgccggctctggcttcgccttcagcagcagcaccatgcactggatcagacaggcccctggcaagggcctggaatggatcagcctgatcggaagcggagggggcatctactacggcgacagcgtgaagggccggttcaccatcagccgggacaacgccaagaacagcctgtacctccagatgaactccctgcgggccgaggacatggccgtgtactattgtgtgcggggctacttcgactgggtggactacttcgattactggggccagggcaccctcgtgaccgtgtcatctacgcgtatccagaaccctgatcctgccgtgtaccagctgcgggatagcaagagcagcgacaagagcgtgtgtctgttcaccgacttcgacagccagaccaacgtgtcccagagcaaggactccgacgtgtacatcaccgataagtgcgtgctggacatgcggagcatggacttcaagagcaactccgccgtggcctggtccaacaagtccgatttcgcctgcgccaacgccttcaacaacagcattatccccgaggacacattcttcccaagccccgagagcagcgactccaccgaccacgtgaagcccaaagagacagagaacaccaagcagcccagcaagagctgccacaagcccaaggccatcgtgcacaccgagaaagtgaacatgatgagcctgaccgtgctgggcctgcggatgctgttcgccaaaaccgtggccgtgaacttcctgctgaccgccaagctgttcttcctc

SEQ ID NO: 7390 - DNA, 2598 bp, synthetic construct
  source 1..2598: mol_type = other DNA
atggccttaccagtgaccgccttgctcctgccgctggccttgctgctccacgccgccaggccggaagtgcagctggttgaatctggcggaggactggttcagcctggcggatctctgagactgtcttgtgccgccagcggcttcagcttcagcgacttttggatgagctgggtccgacaggcccctggcaaaggacttgaatgggtcgccacaatcagccaggccggcagcgagaaggactacgtggactctgtgaagggcagattcaccatcagccgggacaacgccaagaagtccctgtacctccagatgaacagcctgagagccgaggacaccgccgtgtactattgtgcctctggcgtgtacagcttcgactacagaggccagggcaccctggtcacagtctcttctggtaccggcggaggcggatctggcggcggaggtagcggtggcggaggatctgaattcgacgacatcgtgatgacacagtcaccagatagcctcaccgtctccctgggggagcggaccaccattaattgtaaatccagccaaagcgtgctggactcaagcaagaacaagaatagcctcgcctggtatcagcagaagcccggtcagcctccaaagctgctgctttcttgggcctccaccagagagtccgggattcctgataggtttagtggttcaggctccggcacagattttactctgaccattgattctctccagccagaggattctgcaacttattactgccagcaaagcgcccactttcctataacttttggccagggaacccgacttgaaatcaagctcgaggacctgaagaacgtgttcccacctgaggtggccgtgttcgagcctagcgaggccgagatcagccacacccagaaagccaccctcgtgtgcctggctaccggcttctaccccgaccatgtggaactgtcttggtgggtcaacggcaaagaggtgcacagcggcgtgtgtaccgacccccagccactgaaagaacagcccgccctgaacgacagccggtactgcctgagcagcagactgagagtgtccgccaccttctggcagaacccccggaaccacttcagatgccaggtgcagttctacggcctgagcgagaacgacgagtggacccaggacagagccaagcccgtgacccagatcgtgtctgccgaagcctggggcagagccgatgatgtgattaagatccactggcaggaaaagaagtccaacaccatcctgggcagccaggaaggcaacaccatgaagaccaacgacacctacatgaagttcagctggctgaccgtgcccgagaagtccctggacaaagaacacagatgcatcgtgcggcacgaaaacaacaagaacggcgtggaccaggaaatcatcttcccacccatcaagaccgatgtgattacaatggaccccaaggacaactgctccaaggacgccaacgataccctgctgctccagctgaccaacaccagcgcctactacatgtacttgttgctgctgctgaagtccgtggtgtacttcgccatcatcacatgctgcctgctgcggagaaccgccttctgctgcaacggcgagaagtctagggccaagcgatctggatctggagcaacaaacttctcactactcaaacaagcaggtgacgtggaggagaatcccgggcctactagtatggactggatttggcgcatccttttccttgtcggcgctgctaccggcgcgcattccttcgaacaggtgcagctggtgcagagcggtgccgaagtgaagaaaccaggtgcatccgttaaagtttcatgtaaggctagtggatataccttcaccaattacggaatgaactgggtgaaacaggcccctggccagggactgaagtggatggggtggattaacacctacaccggggagccgacttatgcagacgactttaaggggcgggtcacgatgacctccgacacctccaccagtaccgcctacctggagctgcacaaccttaggtcagacgataccgccgtgtattactgtgcccgatggtcttggtccgacggatactatgtctacttcgactattggggccaggggaccacagttaccgtgtcctctacgcgtatccagaaccctgatcctgccgtgtaccagctgcgggatagcaagagcagcgacaagagcgtgtgtctgttcaccgacttcgacagccagaccaacgtgtcccagagcaaggactccgacgtgtacatcaccgataagtgcgtgctggacatgcggagcatggacttcaagagcaactccgccgtggcctggtccaacaagtccgatttcgcctgcgccaacgccttcaacaacagcattatccccgaggacacattcttcccaagccccgagagcagcgactccaccgaccacgtgaagcccaaagagacagagaacaccaagcagcccagcaagagctgccacaagcccaaggccatcgtgcacaccgagaaagtgaacatgatgagcctgaccgtgctgggcctgcggatgctgttcgccaaaaccgtggccgtgaacttcctgctgaccgccaagctgttcttcctc

SEQ ID NO: 7391 - DNA, 2586 bp, synthetic construct
  source 1..2586: mol_type = other DNA
atggccttaccagtgaccgccttgctcctgccgctggccttgctgctccacgccgccaggccggaagtgcagctggttgaatctggcggaggactggttcagcctggcggatctctgagactgtcttgtgccgccagcggcttcagcttcagcgacttttggatgagctgggtccgacaggcccctggcaaaggacttgaatgggtcgccacaatcagccaggccggcagcgagaaggactacgtggactctgtgaagggcagattcaccatcagccgggacaacgccaagaagtccctgtacctccagatgaacagcctgagagccgaggacaccgccgtgtactattgtgcctctggcgtgtacagcttcgactacagaggccagggcaccctggtcacagtctcttctggtaccggcggaggcggatctggcggcggaggtagcggtggcggaggatctgaattcgacgagatcgtgctgacacagagccctggaagcctggccgtgtctcctggcgagcgcgtgacaatgagctgcaagagcagccagagcgtgttcttcagcagctcccagaagaactacctggcctggtatcagcagatccccggccagagccccagactgctgatctactgggccagcaccagagaaagcggcgtgcccgatagattcaccggcagcggctctggcaccgacttcaccctgacaatcagcagcgtgcagcccgaggacctggctatctactactgccaccagtacctgagcagccggaccttcggccagggcaccaagctggaaatcaagagactcgaggacctgaagaacgtgttcccacctgaggtggccgtgttcgagcctagcgaggccgagatcagccacacccagaaagccaccctcgtgtgcctggctaccggcttctaccccgaccatgtggaactgtcttggtgggtcaacggcaaagaggtgcacagcggcgtgtgtaccgacccccagccactgaaagaacagcccgccctgaacgacagccggtactgcctgagcagcagactgagagtgtccgccaccttctggcagaacccccggaaccacttcagatgccaggtgcagttctacggcctgagcgagaacgacgagtggacccaggacagagccaagcccgtgacccagatcgtgtctgccgaagcctggggcagagccgatgatgtgattaagatccactggcaggaaaagaagtccaacaccatcctgggcagccaggaaggcaacaccatgaagaccaacgacacctacatgaagttcagctggctgaccgtgcccgagaagtccctggacaaagaacacagatgcatcgtgcggcacgaaaacaacaagaacggcgtggaccaggaaatcatcttcccacccatcaagaccgatgtgattacaatggaccccaaggacaactgctccaaggacgccaacgataccctgctgctccagctgaccaacaccagcgcctactacatgtacttgttgctgctgctgaagtccgtggtgtacttcgccatcatcacatgctgcctgctgcggagaaccgccttctgctgcaacggcgagaagtctagggccaagcgatctggatctggagcaacaaacttctcactactcaaacaagcaggtgacgtggaggagaatcccgggcctactagtatggactggatttggcgcatccttttccttgtcggcgctgctaccggcgcgcattccttcgaacaggtgcaactgcagcagcctggcgctgaggtcgtgaagccaggcgcttccgtgaagatgtcctgcaaggccagcggctacaccttcaccagctactacatccactggatcaagcagacccctggacagggcctggaatgggtgggagtgatctaccccggcaacgacgacatcagctacaaccagaagttccagggcaaggccaccctgaccgccgacaagtctagcaccaccgcctacatgcaactgtccagcctgaccagcgaggacagcgccgtgtactactgcgccagagaagtgcggctgcggtacttcgatgtgtggggccagggaaccaccgtgaccgtgtcatctacgcgtatccagaaccctgatcctgccgtgtaccagctgcgggatagcaagagcagcgacaagagcgtgtgtctgttcaccgacttcgacagccagaccaacgtgtcccagagcaaggactccgacgtgtacatcaccgataagtgcgtgctggacatgcggagcatggacttcaagagcaactccgccgtggcctggtccaacaagtccgatttcgcctgcgccaacgccttcaacaacagcattatccccgaggacacattcttcccaagccccgagagcagcgactccaccgaccacgtgaagcccaaagagacagagaacaccaagcagcccagcaagagctgccacaagcccaaggccatcgtgcacaccgagaaagtgaacatgatgagcctgaccgtgctgggcctgcggatgctgttcgccaaaaccgtggccgtgaacttcctgctgaccgccaagctgttcttcctc

SEQ ID NO: 7392 - DNA, 2598 bp, synthetic construct
  source 1..2598: mol_type = other DNA
atggccttaccagtgaccgccttgctcctgccgctggccttgctgctccacgccgccaggccggaagtgcagctggttgaatctggcggaggactggttcagcctggcggatctctgagactgtcttgtgccgccagcggcttcagcttcagcgacttttggatgagctgggtccgacaggcccctggcaaaggacttgaatgggtcgccacaatcagccaggccggcagcgagaaggactacgtggactctgtgaagggcagattcaccatcagccgggacaacgccaagaagtccctgtacctccagatgaacagcctgagagccgaggacaccgccgtgtactattgtgcctctggcgtgtacagcttcgactacagaggccagggcaccctggtcacagtctcttctggtaccggcggaggcggatctggcggcggaggtagcggtggcggaggatctgaattcgatgtgctgctgacccagagccctctgagcctgcctgtgacactgggacagcctgccagcatctcctgtcggagcagccagaccatcgtgcacagcaacggcaacacctacctggaatggttccagcagcggccaggccagagccccagactgctgatctaccaggtgtccaacagattcagcggcgtgcccgacagattctccggcagcggctctggcaccgacttcaccctgaagatcagccgggtggaagccgaggacgtgggcgtgtactactgttttcaaggcagccacgtgccccggacctttggcggaggaacaaaggtggaaatcaagagagccctcgaggacctgaagaacgtgttcccacctgaggtggccgtgttcgagcctagcgaggccgagatcagccacacccagaaagccaccctcgtgtgcctggctaccggcttctaccccgaccatgtggaactgtcttggtgggtcaacggcaaagaggtgcacagcggcgtgtgtaccgacccccagccactgaaagaacagcccgccctgaacgacagccggtactgcctgagcagcagactgagagtgtccgccaccttctggcagaacccccggaaccacttcagatgccaggtgcagttctacggcctgagcgagaacgacgagtggacccaggacagagccaagcccgtgacccagatcgtgtctgccgaagcctggggcagagccgatgatgtgattaagatccactggcaggaaaagaagtccaacaccatcctgggcagccaggaaggcaacaccatgaagaccaacgacacctacatgaagttcagctggctgaccgtgcccgagaagtccctggacaaagaacacagatgcatcgtgcggcacgaaaacaacaagaacggcgtggaccaggaaatcatcttcccacccatcaagaccgatgtgattacaatggaccccaaggacaactgctccaaggacgccaacgataccctgctgctccagctgaccaacaccagcgcctactacatgtacttgttgctgctgctgaagtccgtggtgtacttcgccatcatcacatgctgcctgctgcggagaaccgccttctgctgcaacggcgagaagtctagggccaagcgatctggatctggagcaacaaacttctcactactcaaacaagcaggtgacgtggaggagaatcccgggcctactagtatggactggatttggcgcatccttttccttgtcggcgctgctaccggcgcgcattccttcgaacagatccaactggtgcagagcggcagcgagctgaagaaacctggggccagcgtgaaggtgtcctgcaaggccagcggctacacctttaccaactacggcatgaactgggtgcgccaggcccctggacagggcctgaaatggatgggctggatcaacaccaacaccggcgagcctaagtacgccgaagagttcaagggcagattcgccctgagcctggacaccagcgtgtccacagcctacctccagatcaacagcctgaaggccgaggataccgccgtgtacttctgcgccagaggctacggcaactacgccagaggggcttggctggcctattggggccagggaacactcgtgaccgtgtcctctacgcgtatccagaaccctgatcctgccgtgtaccagctgcgggatagcaagagcagcgacaagagcgtgtgtctgttcaccgacttcgacagccagaccaacgtgtcccagagcaaggactccgacgtgtacatcaccgataagtgcgtgctggacatgcggagcatggacttcaagagcaactccgccgtggcctggtccaacaagtccgatttcgcctgcgccaacgccttcaacaacagcattatccccgaggacacattcttcccaagccccgagagcagcgactccaccgaccacgtgaagcccaaagagacagagaacaccaagcagcccagcaagagctgccacaagcccaaggccatcgtgcacaccgagaaagtgaacatgatgagcctgaccgtgctgggcctgcggatgctgttcgccaaaaccgtggccgtgaacttcctgctgaccgccaagctgttcttcctc

SEQ ID NO: 7393 - DNA, 2553 bp, synthetic construct
  source 1..2553: mol_type = other DNA
atggccttaccagtgaccgccttgctcctgccgctggccttgctgctccacgccgccaggccggaagtgcagctggttgaatctggcggaggactggttcagcctggcggatctctgagactgtcttgtgccgccagcggcttcagcttcagcgacttttggatgagctgggtccgacaggcccctggcaaaggacttgaatgggtcgccacaatcagccaggccggcagcgagaaggactacgtggactctgtgaagggcagattcaccatcagccgggacaacgccaagaagtccctgtacctccagatgaacagcctgagagccgaggacaccgccgtgtactattgtgcctctggcgtgtacagcttcgactacagaggccagggcaccctggtcacagtctcttctggtaccggcggaggcggatctggcggcggaggtagcggtggcggaggatctgaattcgacgagatcgtgctgacacagagccctgccacactctctctgagccctggcgaaagagccaccctgagctgtagcgccagcagcagcatcaactacatctactggctccagcagaagcccggccaggcccccagaatcctgatctacctgaccagcaacctggcctccggcgtgccagccagattttctggcagcggctccggcaccgacttcaccctgacaatcagcagcctggaacccgaggacttcgccgtgtactactgcctccagtggtccagcaaccccctgacctttggcggaggcaccaaggtggaaatcaagctcgaggacctgaagaacgtgttcccacctgaggtggccgtgttcgagcctagcgaggccgagatcagccacacccagaaagccaccctcgtgtgcctggctaccggcttctaccccgaccatgtggaactgtcttggtgggtcaacggcaaagaggtgcacagcggcgtgtgtaccgacccccagccactgaaagaacagcccgccctgaacgacagccggtactgcctgagcagcagactgagagtgtccgccaccttctggcagaacccccggaaccacttcagatgccaggtgcagttctacggcctgagcgagaacgacgagtggacccaggacagagccaagcccgtgacccagatcgtgtctgccgaagcctggggcagagccgatgatgtgattaagatccactggcaggaaaagaagtccaacaccatcctgggcagccaggaaggcaacaccatgaagaccaacgacacctacatgaagttcagctggctgaccgtgcccgagaagtccctggacaaagaacacagatgcatcgtgcggcacgaaaacaacaagaacggcgtggaccaggaaatcatcttcccacccatcaagaccgatgtgattacaatggaccccaaggacaactgctccaaggacgccaacgataccctgctgctccagctgaccaacaccagcgcctactacatgtacttgttgctgctgctgaagtccgtggtgtacttcgccatcatcacatgctgcctgctgcggagaaccgccttctgctgcaacggcgagaagtctagggccaagcgatctggatctggagcaacaaacttctcactactcaaacaagcaggtgacgtggaggagaatcccgggcctactagtatggactggatttggcgcatccttttccttgtcggcgctgctaccggcgcgcattccttcgaagaagtgcaactggtggaaagcgggggaggacttgtgaagcctggcggctctctgagactgagctgtgccgcctctggcttcaccttcagcagctacgacatgagctgggtgcgccaggctcctggcaagggactggaatgggtgtccaccatcagcagcggcggcagctacacctactacctggacagcatcaagggccggttcaccatctccagagacaacgccaagaacagcctgtacctccagatgaactccctgcgggccgaggacacagccgtgtattattgcgccagacagggcctggattactggggcagaggcacccttgtgaccgtgtcctctacgcgtatccagaaccctgatcctgccgtgtaccagctgcgggatagcaagagcagcgacaagagcgtgtgtctgttcaccgacttcgacagccagaccaacgtgtcccagagcaaggactccgacgtgtacatcaccgataagtgcgtgctggacatgcggagcatggacttcaagagcaactccgccgtggcctggtccaacaagtccgatttcgcctgcgccaacgccttcaacaacagcattatccccgaggacacattcttcccaagccccgagagcagcgactccaccgaccacgtgaagcccaaagagacagagaacaccaagcagcccagcaagagctgccacaagcccaaggccatcgtgcacaccgagaaagtgaacatgatgagcctgaccgtgctgggcctgcggatgctgttcgccaaaaccgtggccgtgaacttcctgctgaccgccaagctgttcttcctc

SEQ ID NO: 7394 - DNA, 2580 bp, synthetic construct
  source 1..2580: mol_type = other DNA
atggccttaccagtgaccgccttgctcctgccgctggccttgctgctccacgccgccaggccggaagtgcagctggttgaatctggcggaggactggttcagcctggcggatctctgagactgtcttgtgccgccagcggcttcagcttcagcgacttttggatgagctgggtccgacaggcccctggcaaaggacttgaatgggtcgccacaatcagccaggccggcagcgagaaggactacgtggactctgtgaagggcagattcaccatcagccgggacaacgccaagaagtccctgtacctccagatgaacagcctgagagccgaggacaccgccgtgtactattgtgcctctggcgtgtacagcttcgactacagaggccagggcaccctggtcacagtctcttctggtaccggcggaggcggatctggcggcggaggtagcggtggcggaggatctgaattcgacatcgtgatgacccagagccccgatagcctggccgtgtctctgggagagagagccaccatcaactgccgggccagcaagagcgtgtccaccagcggctacagcttcatgcactggtatcagcagaagcccggccagccccccaagctgctgatctacctggcctccaacctggaaagcggcgtgcccgatagattcagcggcagcggctctggcaccgacttcaccctgaccatcagttctcttcaggccgaggacgtggccgtgtactactgccagcacagcagagaggtgccctggacattcggccagggcacaaaggtggaaatcaagcggctcgaggacctgaagaacgtgttcccacctgaggtggccgtgttcgagcctagcgaggccgagatcagccacacccagaaagccaccctcgtgtgcctggctaccggcttctaccccgaccatgtggaactgtcttggtgggtcaacggcaaagaggtgcacagcggcgtgtgtaccgacccccagccactgaaagaacagcccgccctgaacgacagccggtactgcctgagcagcagactgagagtgtccgccaccttctggcagaacccccggaaccacttcagatgccaggtgcagttctacggcctgagcgagaacgacgagtggacccaggacagagccaagcccgtgacccagatcgtgtctgccgaagcctggggcagagccgatgatgtgattaagatccactggcaggaaaagaagtccaacaccatcctgggcagccaggaaggcaacaccatgaagaccaacgacacctacatgaagttcagctggctgaccgtgcccgagaagtccctggacaaagaacacagatgcatcgtgcggcacgaaaacaacaagaacggcgtggaccaggaaatcatcttcccacccatcaagaccgatgtgattacaatggaccccaaggacaactgctccaaggacgccaacgataccctgctgctccagctgaccaacaccagcgcctactacatgtacttgttgctgctgctgaagtccgtggtgtacttcgccatcatcacatgctgcctgctgcggagaaccgccttctgctgcaacggcgagaagtctagggccaagcgatctggatctggagcaacaaacttctcactactcaaacaagcaggtgacgtggaggagaatcccgggcctactagtatggactggatttggcgcatccttttccttgtcggcgctgctaccggcgcgcattccttcgaacaggtgcagctggtgcagtctggggccgaagtgaagaaacctggggccagcgtgaaggtgtcctgcaaggccagcggatacacctttaccaactacggcatgaactgggtgcgccaggcccctggacagggcctggaatggatgggctggatcaacacctacaccggcgagcccacatacgccgacgccttcaagggcagattcgccttcagcctggacaccagcacctccaccgcctacctccagatcaacagcctgcggagcgacgacaccgccgtgtattattgcgccagagattacggcgactacgggatggactattggggccagggaaccaccgtgaccgtgtcctctacgcgtatccagaaccctgatcctgccgtgtaccagctgcgggatagcaagagcagcgacaagagcgtgtgtctgttcaccgacttcgacagccagaccaacgtgtcccagagcaaggactccgacgtgtacatcaccgataagtgcgtgctggacatgcggagcatggacttcaagagcaactccgccgtggcctggtccaacaagtccgatttcgcctgcgccaacgccttcaacaacagcattatccccgaggacacattcttcccaagccccgagagcagcgactccaccgaccacgtgaagcccaaagagacagagaacaccaagcagcccagcaagagctgccacaagcccaaggccatcgtgcacaccgagaaagtgaacatgatgagcctgaccgtgctgggcctgcggatgctgttcgccaaaaccgtggccgtgaacttcctgctgaccgccaagctgttcttcctc

SEQ ID NO: 7395 - DNA, 2568 bp, synthetic construct
  source 1..2568: mol_type = other DNA
atggccttaccagtgaccgccttgctcctgccgctggccttgctgctccacgccgccaggccggaagtgcagctggttgaatctggcggaggactggttcagcctggcggatctctgagactgtcttgtgccgccagcggcttcagcttcagcgacttttggatgagctgggtccgacaggcccctggcaaaggacttgaatgggtcgccacaatcagccaggccggcagcgagaaggactacgtggactctgtgaagggcagattcaccatcagccgggacaacgccaagaagtccctgtacctccagatgaacagcctgagagccgaggacaccgccgtgtactattgtgcctctggcgtgtacagcttcgactacagaggccagggcaccctggtcacagtctcttctggtaccggcggaggcggatctggcggcggaggtagcggtggcggaggatctgaattcgacatcgtgatgacccagacccccctgaccctgagcgtgacaatcggacagcctgccagcatctcctgcaagagcagccagagcctgctggacagcgacggcaagacctacctgaactggctgctgcagaggccaggccagagccccgagagactgatctacctggtgtccaagctggactccggcgtgcccgatagattcacaggcagcggctccggcaccgacttcaccctgaagatcagccgggtggaagccgaggacctgggcgtgtactgttgttggcagggcacccacttcccttacaccttcggcggagggaccaaggtggaaatcaagggcctcgaggacctgaagaacgtgttcccacctgaggtggccgtgttcgagcctagcgaggccgagatcagccacacccagaaagccaccctcgtgtgcctggctaccggcttctaccccgaccatgtggaactgtcttggtgggtcaacggcaaagaggtgcacagcggcgtgtgtaccgacccccagccactgaaagaacagcccgccctgaacgacagccggtactgcctgagcagcagactgagagtgtccgccaccttctggcagaacccccggaaccacttcagatgccaggtgcagttctacggcctgagcgagaacgacgagtggacccaggacagagccaagcccgtgacccagatcgtgtctgccgaagcctggggcagagccgatgatgtgattaagatccactggcaggaaaagaagtccaacaccatcctgggcagccaggaaggcaacaccatgaagaccaacgacacctacatgaagttcagctggctgaccgtgcccgagaagtccctggacaaagaacacagatgcatcgtgcggcacgaaaacaacaagaacggcgtggaccaggaaatcatcttcccacccatcaagaccgatgtgattacaatggaccccaaggacaactgctccaaggacgccaacgataccctgctgctccagctgaccaacaccagcgcctactacatgtacttgttgctgctgctgaagtccgtggtgtacttcgccatcatcacatgctgcctgctgcggagaaccgccttctgctgcaacggcgagaagtctagggccaagcgatctggatctggagcaacaaacttctcactactcaaacaagcaggtgacgtggaggagaatcccgggcctactagtatggactggatttggcgcatccttttccttgtcggcgctgctaccggcgcgcattccttcgaacaggtgcaactgcagcagcctggcgctgaacttgtgcggccaggcgcctctgtgaagctgagctgtaaagccagcggctacaccttcaccagctactggatgaactgggtcaagcagcgcccaggccagggcctggaatggatcggaatgatcgaccccagcgacagcgagacacactacaaccacatcttcaaggacaaggccaccctgaccgtggacaagtccagcagcacagcctacctgcaactgtccagcctgaccagcgaggacagcgccgtgtactactgcgcccggaacctgtatctgtggggccagggaacaagcgtgaccgtgtctagcacgcgtatccagaaccctgatcctgccgtgtaccagctgcgggatagcaagagcagcgacaagagcgtgtgtctgttcaccgacttcgacagccagaccaacgtgtcccagagcaaggactccgacgtgtacatcaccgataagtgcgtgctggacatgcggagcatggacttcaagagcaactccgccgtggcctggtccaacaagtccgatttcgcctgcgccaacgccttcaacaacagcattatccccgaggacacattcttcccaagccccgagagcagcgactccaccgaccacgtgaagcccaaagagacagagaacaccaagcagcccagcaagagctgccacaagcccaaggccatcgtgcacaccgagaaagtgaacatgatgagcctgaccgtgctgggcctgcggatgctgttcgccaaaaccgtggccgtgaacttcctgctgaccgccaagctgttcttcctc

SEQ ID NO: 7396 - DNA, 2592 bp, synthetic construct
  source 1..2592: mol_type = other DNA
atggccttaccagtgaccgccttgctcctgccgctggccttgctgctccacgccgccaggccggaagtgcagctggttgaatctggcggaggactggttcagcctggcggatctctgagactgtcttgtgccgccagcggcttcagcttcagcgacttttggatgagctgggtccgacaggcccctggcaaaggacttgaatgggtcgccacaatcagccaggccggcagcgagaaggactacgtggactctgtgaagggcagattcaccatcagccgggacaacgccaagaagtccctgtacctccagatgaacagcctgagagccgaggacaccgccgtgtactattgtgcctctggcgtgtacagcttcgactacagaggccagggcaccctggtcacagtctcttctggtaccggcggaggcggatctggcggcggaggtagcggtggcggaggatctgaattcgacatcgtgatgacccagagccccgatagcctggccgtgtctctgggagagagagccaccatcaactgcgagagcagccagagcctgctgaacagcggcaaccagaagaactacctgacctggtatcagcagaagcccggccagccccccaagcccctgatctattgggccagcaccagagaaagcggcgtgcccgatagattcagcggcagcggaagcggcaccgacttcaccctgaccatcagttctcttcaggccgaggacgtggccgtgtactactgccagaacgactacagctacccctacaccttcggccagggcaccaagctggaaatcaagagactcgaggacctgaagaacgtgttcccacctgaggtggccgtgttcgagcctagcgaggccgagatcagccacacccagaaagccaccctcgtgtgcctggctaccggcttctaccccgaccatgtggaactgtcttggtgggtcaacggcaaagaggtgcacagcggcgtgtgtaccgacccccagccactgaaagaacagcccgccctgaacgacagccggtactgcctgagcagcagactgagagtgtccgccaccttctggcagaacccccggaaccacttcagatgccaggtgcagttctacggcctgagcgagaacgacgagtggacccaggacagagccaagcccgtgacccagatcgtgtctgccgaagcctggggcagagccgatgatgtgattaagatccactggcaggaaaagaagtccaacaccatcctgggcagccaggaaggcaacaccatgaagaccaacgacacctacatgaagttcagctggctgaccgtgcccgagaagtccctggacaaagaacacagatgcatcgtgcggcacgaaaacaacaagaacggcgtggaccaggaaatcatcttcccacccatcaagaccgatgtgattacaatggaccccaaggacaactgctccaaggacgccaacgataccctgctgctccagctgaccaacaccagcgcctactacatgtacttgttgctgctgctgaagtccgtggtgtacttcgccatcatcacatgctgcctgctgcggagaaccgccttctgctgcaacggcgagaagtctagggccaagcgatctggatctggagcaacaaacttctcactactcaaacaagcaggtgacgtggaggagaatcccgggcctactagtatggactggatttggcgcatccttttccttgtcggcgctgctaccggcgcgcattccttcgaagaagtgcagctggtgcagtctggggccgaagtgaagaagcctggcgagagcctgaagatcagctgcaagggcagcggctacagcttcaccgactactacatgaagtgggccagacagatgcccggcaagggcctggaatggatgggcgacatcatccccagcaacggggccaccttctacaaccagaaattcaagggccaagtgaccatctccgccgacaagagcatcagcaccacctacctccagtggtccagcctgaaggccagcgacaccgccatgtactattgcgccagaagccatctgctgcgggccagttggttcgcctattggggccagggaacaatggtcacagtgtccagcacgcgtatccagaaccctgatcctgccgtgtaccagctgcgggatagcaagagcagcgacaagagcgtgtgtctgttcaccgacttcgacagccagaccaacgtgtcccagagcaaggactccgacgtgtacatcaccgataagtgcgtgctggacatgcggagcatggacttcaagagcaactccgccgtggcctggtccaacaagtccgatttcgcctgcgccaacgccttcaacaacagcattatccccgaggacacattcttcccaagccccgagagcagcgactccaccgaccacgtgaagcccaaagagacagagaacaccaagcagcccagcaagagctgccacaagcccaaggccatcgtgcacaccgagaaagtgaacatgatgagcctgaccgtgctgggcctgcggatgctgttcgccaaaaccgtggccgtgaacttcctgctgaccgccaagctgttcttcctc

SEQ ID NO: 7397 - DNA, 2577 bp, synthetic construct
  source 1..2577: mol_type = other DNA
atggccttaccagtgaccgccttgctcctgccgctggccttgctgctccacgccgccaggccggaagtgcagctggttgaatctggcggaggactggttcagcctggcggatctctgagactgtcttgtgccgccagcggcttcagcttcagcgacttttggatgagctgggtccgacaggcccctggcaaaggacttgaatgggtcgccacaatcagccaggccggcagcgagaaggactacgtggactctgtgaagggcagattcaccatcagccgggacaacgccaagaagtccctgtacctccagatgaacagcctgagagccgaggacaccgccgtgtactattgtgcctctggcgtgtacagcttcgactacagaggccagggcaccctggtcacagtctcttctggtaccggcggaggcggatctggcggcggaggtagcggtggcggaggatctgaattcgacatccagatgacccagtctaccagttccctgagtgcatccctcggagacagggtgacgatcagttgcagcgcaagccaagggatcaataactatctgaactggtatcagcagaaaccggacggaacagtcgaactcctgatttattacaccagcacccttcagagtggcgtcccttcccggttcagtggctccggaagcgggaccgattactccctgaccatttctaatctggagccagaggacataggaacgtattattgccagcagtatagtaaactgccacgaacttttggaggggggacgaaactggagatcaaactcgaggacctgaagaacgtgttcccacctgaggtggccgtgttcgagcctagcgaggccgagatcagccacacccagaaagccaccctcgtgtgcctggctaccggcttctaccccgaccatgtggaactgtcttggtgggtcaacggcaaagaggtgcacagcggcgtgtgtaccgacccccagccactgaaagaacagcccgccctgaacgacagccggtactgcctgagcagcagactgagagtgtccgccaccttctggcagaacccccggaaccacttcagatgccaggtgcagttctacggcctgagcgagaacgacgagtggacccaggacagagccaagcccgtgacccagatcgtgtctgccgaagcctggggcagagccgatgatgtgattaagatccactggcaggaaaagaagtccaacaccatcctgggcagccaggaaggcaacaccatgaagaccaacgacacctacatgaagttcagctggctgaccgtgcccgagaagtccctggacaaagaacacagatgcatcgtgcggcacgaaaacaacaagaacggcgtggaccaggaaatcatcttcccacccatcaagaccgatgtgattacaatggaccccaaggacaactgctccaaggacgccaacgataccctgctgctccagctgaccaacaccagcgcctactacatgtacttgttgctgctgctgaagtccgtggtgtacttcgccatcatcacatgctgcctgctgcggagaaccgccttctgctgcaacggcgagaagtctagggccaagcgatctggatctggagcaacaaacttctcactactcaaacaagcaggtgacgtggaggagaatcccgggcctactagtatggactggatttggcgcatccttttccttgtcggcgctgctaccggcgcgcattccttcgaacaggtgcaactccagcagtccggaagcgagcttatgatgccaggggcatcagtgaagatcagctgcaaggctactggctacaccttctctaattactggatagagtgggttaaacaaaggccagggcacggcctggaatggatcggcgagatcctgcctgggacaggccgaaccatttataacgagaagttcaaaggcaaggctactttcaccgcagatataagctctaatacagtgcaaatgcagctctcttccctgacaagtgaggatagtgccgtgtattattgcgcacgaagagattactatggaaatttttattacgctatggattattggggtcaaggaacaagtgtgaccgttagcagcacgcgtatccagaaccctgatcctgccgtgtaccagctgcgggatagcaagagcagcgacaagagcgtgtgtctgttcaccgacttcgacagccagaccaacgtgtcccagagcaaggactccgacgtgtacatcaccgataagtgcgtgctggacatgcggagcatggacttcaagagcaactccgccgtggcctggtccaacaagtccgatttcgcctgcgccaacgccttcaacaacagcattatccccgaggacacattcttcccaagccccgagagcagcgactccaccgaccacgtgaagcccaaagagacagagaacaccaagcagcccagcaagagctgccacaagcccaaggccatcgtgcacaccgagaaagtgaacatgatgagcctgaccgtgctgggcctgcggatgctgttcgccaaaaccgtggccgtgaacttcctgctgaccgccaagctgttcttcctc

SEQ ID NO: 7398 - DNA, 2562 bp, synthetic construct
  source 1..2562: mol_type = other DNA
atggccttaccagtgaccgccttgctcctgccgctggccttgctgctccacgccgccaggccggaagtgcagctggttgaatctggcggaggactggttcagcctggcggatctctgagactgtcttgtgccgccagcggcttcagcttcagcgacttttggatgagctgggtccgacaggcccctggcaaaggacttgaatgggtcgccacaatcagccaggccggcagcgagaaggactacgtggactctgtgaagggcagattcaccatcagccgggacaacgccaagaagtccctgtacctccagatgaacagcctgagagccgaggacaccgccgtgtactattgtgcctctggcgtgtacagcttcgactacagaggccagggcaccctggtcacagtctcttctggtaccggcggaggcggatctggcggcggaggtagcggtggcggaggatctgaattcgacatccagatgacccagagccctgccagcctgtccgtgtctgtgggcgagacagtgaccatcacctgtcgggccagcgagaacatctacagcaacctggcctggtatcagcagaagcagggcaagagcccccaactgctggtgtacgccgccaccaatctggccgatggcgtgcccagcagattttccggctctggcagcggcacccagtacagcctgaagatcaacagcctccagagcgaggacttcggcagctactactgccagcacttctggggcacctggacctttggaggaggcaccaccctggaaatcaagctcgaggacctgaagaacgtgttcccacctgaggtggccgtgttcgagcctagcgaggccgagatcagccacacccagaaagccaccctcgtgtgcctggctaccggcttctaccccgaccatgtggaactgtcttggtgggtcaacggcaaagaggtgcacagcggcgtgtgtaccgacccccagccactgaaagaacagcccgccctgaacgacagccggtactgcctgagcagcagactgagagtgtccgccaccttctggcagaacccccggaaccacttcagatgccaggtgcagttctacggcctgagcgagaacgacgagtggacccaggacagagccaagcccgtgacccagatcgtgtctgccgaagcctggggcagagccgatgatgtgattaagatccactggcaggaaaagaagtccaacaccatcctgggcagccaggaaggcaacaccatgaagaccaacgacacctacatgaagttcagctggctgaccgtgcccgagaagtccctggacaaagaacacagatgcatcgtgcggcacgaaaacaacaagaacggcgtggaccaggaaatcatcttcccacccatcaagaccgatgtgattacaatggaccccaaggacaactgctccaaggacgccaacgataccctgctgctccagctgaccaacaccagcgcctactacatgtacttgttgctgctgctgaagtccgtggtgtacttcgccatcatcacatgctgcctgctgcggagaaccgccttctgctgcaacggcgagaagtctagggccaagcgatctggatctggagcaacaaacttctcactactcaaacaagcaggtgacgtggaggagaatcccgggcctactagtatggactggatttggcgcatccttttccttgtcggcgctgctaccggcgcgcattccttcgaagaagtgcaactccagcagagcggccctgagcttgtgaagcctggcgcttccgtgaagatgagctgcaaggccagcggctacaccttcaccgactactacatgaagtggatgaagcagagccacggcaagtccctggaatggatcggcgacatcaaccccaacaacggcggcaccacctacaaccagaagttcaagggcaaggccaccctgaccgtggacaagagcagcagcaccgcctacatgcaactgaacagcctgaccagcgaggacagcgccgtgtactactgcgccagagactacggctacggctatttcgactactggggccagggcacaaccctgacagtgtcctctacgcgtatccagaaccctgatcctgccgtgtaccagctgcgggatagcaagagcagcgacaagagcgtgtgtctgttcaccgacttcgacagccagaccaacgtgtcccagagcaaggactccgacgtgtacatcaccgataagtgcgtgctggacatgcggagcatggacttcaagagcaactccgccgtggcctggtccaacaagtccgatttcgcctgcgccaacgccttcaacaacagcattatccccgaggacacattcttcccaagccccgagagcagcgactccaccgaccacgtgaagcccaaagagacagagaacaccaagcagcccagcaagagctgccacaagcccaaggccatcgtgcacaccgagaaagtgaacatgatgagcctgaccgtgctgggcctgcggatgctgttcgccaaaaccgtggccgtgaacttcctgctgaccgccaagctgttcttcctc

SEQ ID NO: 7399 - DNA, 2571 bp, synthetic construct
  source 1..2571: mol_type = other DNA
atggccttaccagtgaccgccttgctcctgccgctggccttgctgctccacgccgccaggccggaagtgcagctggttgaatctggcggaggactggttcagcctggcggatctctgagactgtcttgtgccgccagcggcttcagcttcagcgacttttggatgagctgggtccgacaggcccctggcaaaggacttgaatgggtcgccacaatcagccaggccggcagcgagaaggactacgtggactctgtgaagggcagattcaccatcagccgggacaacgccaagaagtccctgtacctccagatgaacagcctgagagccgaggacaccgccgtgtactattgtgcctctggcgtgtacagcttcgactacagaggccagggcaccctggtcacagtctcttctggtaccggcggaggcggatctggcggcggaggtagcggtggcggaggatctgaattcgagatcgtgctgacacagagccctggcaccctgagcctgtctccaggcgaaagagccacactgagctgtcgggcctctcagagcgtgggaggctacctggcttggtatcagcagaagccaggccaggcccccagactgctgatctacgacgccagcaatcgggccacaggcatccccgccagattttctggcagcggctccggcaccgacttcaccctgacaatcagcagcctggaacccgaggacttcgccgtgtactactgccagcagcggaacaactggccccccatgtacacattcggccagggcaccaagctggaaatcaagagactcgaggacctgaagaacgtgttcccacctgaggtggccgtgttcgagcctagcgaggccgagatcagccacacccagaaagccaccctcgtgtgcctggctaccggcttctaccccgaccatgtggaactgtcttggtgggtcaacggcaaagaggtgcacagcggcgtgtgtaccgacccccagccactgaaagaacagcccgccctgaacgacagccggtactgcctgagcagcagactgagagtgtccgccaccttctggcagaacccccggaaccacttcagatgccaggtgcagttctacggcctgagcgagaacgacgagtggacccaggacagagccaagcccgtgacccagatcgtgtctgccgaagcctggggcagagccgatgatgtgattaagatccactggcaggaaaagaagtccaacaccatcctgggcagccaggaaggcaacaccatgaagaccaacgacacctacatgaagttcagctggctgaccgtgcccgagaagtccctggacaaagaacacagatgcatcgtgcggcacgaaaacaacaagaacggcgtggaccaggaaatcatcttcccacccatcaagaccgatgtgattacaatggaccccaaggacaactgctccaaggacgccaacgataccctgctgctccagctgaccaacaccagcgcctactacatgtacttgttgctgctgctgaagtccgtggtgtacttcgccatcatcacatgctgcctgctgcggagaaccgccttctgctgcaacggcgagaagtctagggccaagcgatctggatctggagcaacaaacttctcactactcaaacaagcaggtgacgtggaggagaatcccgggcctactagtatggactggatttggcgcatccttttccttgtcggcgctgctaccggcgcgcattccttcgaacaggtgcaactggtgcagagcggagccgaagtgaagaaacccggcagcagcgtgaaggtgtcctgcaaggcttccggcggcaccttcagcagctacgccatttcttgggtgcgccaggctcctggacagggcctggaatggatgggcggcatcatccctatcctgggcaccgccaactacgcccagaaattccagggcagagtgaccatcaccgccgacgagagcaccagcaccgcctacatggaactgagcagcctgcggagcgaggacacagccgtgtattattgcgccagatggggcggaggggccttcgacatttggggccagggaacaatggtcaccgtgtccagcacgcgtatccagaaccctgatcctgccgtgtaccagctgcgggatagcaagagcagcgacaagagcgtgtgtctgttcaccgacttcgacagccagaccaacgtgtcccagagcaaggactccgacgtgtacatcaccgataagtgcgtgctggacatgcggagcatggacttcaagagcaactccgccgtggcctggtccaacaagtccgatttcgcctgcgccaacgccttcaacaacagcattatccccgaggacacattcttcccaagccccgagagcagcgactccaccgaccacgtgaagcccaaagagacagagaacaccaagcagcccagcaagagctgccacaagcccaaggccatcgtgcacaccgagaaagtgaacatgatgagcctgaccgtgctgggcctgcggatgctgttcgccaaaaccgtggccgtgaacttcctgctgaccgccaagctgttcttcctc

SEQ ID NO: 7400 - DNA, 2556 bp, synthetic construct
  source 1..2556: mol_type = other DNA
atggccttaccagtgaccgccttgctcctgccgctggccttgctgctccacgccgccaggccggaagtgcagctggttgaatctggcggaggactggttcagcctggcggatctctgagactgtcttgtgccgccagcggcttcagcttcagcgacttttggatgagctgggtccgacaggcccctggcaaaggacttgaatgggtcgccacaatcagccaggccggcagcgagaaggactacgtggactctgtgaagggcagattcaccatcagccgggacaacgccaagaagtccctgtacctccagatgaacagcctgagagccgaggacaccgccgtgtactattgtgcctctggcgtgtacagcttcgactacagaggccagggcaccctggtcacagtctcttctggtaccggcggaggcggatctggcggcggaggtagcggtggcggaggatctgaattccagatcgtgctgacacagagccctgccctgatgagcgccagccctggcgagaaagtgaccatgacctgtagcgccagcagcagcgtgcgctacatgtactggtatcagcagaagcccagaagcagccccaagccctggattcacctgaccagcaatctggcctctggcgtgcccgctagattttccggctctggcagcggcaccagctacagcctgaccatcagcagcatggaagccgaggacgccgccacctactactgccagcagtggtccagccaccccttcacatttggctccggcaccaagctggaaatcaagctcgaggacctgaagaacgtgttcccacctgaggtggccgtgttcgagcctagcgaggccgagatcagccacacccagaaagccaccctcgtgtgcctggctaccggcttctaccccgaccatgtggaactgtcttggtgggtcaacggcaaagaggtgcacagcggcgtgtgtaccgacccccagccactgaaagaacagcccgccctgaacgacagccggtactgcctgagcagcagactgagagtgtccgccaccttctggcagaacccccggaaccacttcagatgccaggtgcagttctacggcctgagcgagaacgacgagtggacccaggacagagccaagcccgtgacccagatcgtgtctgccgaagcctggggcagagccgatgatgtgattaagatccactggcaggaaaagaagtccaacaccatcctgggcagccaggaaggcaacaccatgaagaccaacgacacctacatgaagttcagctggctgaccgtgcccgagaagtccctggacaaagaacacagatgcatcgtgcggcacgaaaacaacaagaacggcgtggaccaggaaatcatcttcccacccatcaagaccgatgtgattacaatggaccccaaggacaactgctccaaggacgccaacgataccctgctgctccagctgaccaacaccagcgcctactacatgtacttgttgctgctgctgaagtccgtggtgtacttcgccatcatcacatgctgcctgctgcggagaaccgccttctgctgcaacggcgagaagtctagggccaagcgatctggatctggagcaacaaacttctcactactcaaacaagcaggtgacgtggaggagaatcccgggcctactagtatggactggatttggcgcatccttttccttgtcggcgctgctaccggcgcgcattccttcgaagatgtgcaactccaggaaagcggccctggccttgtgaagcctagccagagcctgtccctgacctgtaccgtgaccggcttcagcatcaccagcgactactcttggaactggatcagacagttccctggcaacaaactggaatggatgggctacatcagctactccggccacacctcctacaaccccagcctggaaagccggatctccatcaccagagacaccagcaagaaccagttcttcttgcaactgaacagcgtgaccaccgaggataccgccacatattactgtaccagaggcaactgggacgtggtgtactggggccagggcacacttgtgaccgtgtctgctacgcgtatccagaaccctgatcctgccgtgtaccagctgcgggatagcaagagcagcgacaagagcgtgtgtctgttcaccgacttcgacagccagaccaacgtgtcccagagcaaggactccgacgtgtacatcaccgataagtgcgtgctggacatgcggagcatggacttcaagagcaactccgccgtggcctggtccaacaagtccgatttcgcctgcgccaacgccttcaacaacagcattatccccgaggacacattcttcccaagccccgagagcagcgactccaccgaccacgtgaagcccaaagagacagagaacaccaagcagcccagcaagagctgccacaagcccaaggccatcgtgcacaccgagaaagtgaacatgatgagcctgaccgtgctgggcctgcggatgctgttcgccaaaaccgtggccgtgaacttcctgctgaccgccaagctgttcttcctc

SEQ ID NO: 7401 - DNA, 2586 bp, synthetic construct
  source 1..2586: mol_type = other DNA
atggccttaccagtgaccgccttgctcctgccgctggccttgctgctccacgccgccaggccggaagtgcagctggttgaatctggcggaggactggttcagcctggcggatctctgagactgtcttgtgccgccagcggcttcagcttcagcgacttttggatgagctgggtccgacaggcccctggcaaaggacttgaatgggtcgccacaatcagccaggccggcagcgagaaggactacgtggactctgtgaagggcagattcaccatcagccgggacaacgccaagaagtccctgtacctccagatgaacagcctgagagccgaggacaccgccgtgtactattgtgcctctggcgtgtacagcttcgactacagaggccagggcaccctggtcacagtctcttctggtaccggcggaggcggatctggcggcggaggtagcggtggcggaggatctgaattcgacgtcgtgatgacccagagccctctgagcctgcctgtgacactgggacagcctgccagcatctcctgtcggagcagccagagcatcgtgcacagcgacggcaacacctacctggaatggtatcagcagcggccaggccagagccccagacggctgatctacaaggtgtccaacagattcagcggcgtgcccgacagattctccggcagcggctctggcaccgacttcaccctgaagatcagcagagtggaagccgaggacgtgggcgtgtactactgttttcaaggcagccacgccccctggacctttggcggaggaacaaaggtggaaatcaagctcgaggacctgaagaacgtgttcccacctgaggtggccgtgttcgagcctagcgaggccgagatcagccacacccagaaagccaccctcgtgtgcctggctaccggcttctaccccgaccatgtggaactgtcttggtgggtcaacggcaaagaggtgcacagcggcgtgtgtaccgacccccagccactgaaagaacagcccgccctgaacgacagccggtactgcctgagcagcagactgagagtgtccgccaccttctggcagaacccccggaaccacttcagatgccaggtgcagttctacggcctgagcgagaacgacgagtggacccaggacagagccaagcccgtgacccagatcgtgtctgccgaagcctggggcagagccgatgatgtgattaagatccactggcaggaaaagaagtccaacaccatcctgggcagccaggaaggcaacaccatgaagaccaacgacacctacatgaagttcagctggctgaccgtgcccgagaagtccctggacaaagaacacagatgcatcgtgcggcacgaaaacaacaagaacggcgtggaccaggaaatcatcttcccacccatcaagaccgatgtgattacaatggaccccaaggacaactgctccaaggacgccaacgataccctgctgctccagctgaccaacaccagcgcctactacatgtacttgttgctgctgctgaagtccgtggtgtacttcgccatcatcacatgctgcctgctgcggagaaccgccttctgctgcaacggcgagaagtctagggccaagcgatctggatctggagcaacaaacttctcactactcaaacaagcaggtgacgtggaggagaatcccgggcctactagtatggactggatttggcgcatccttttccttgtcggcgctgctaccggcgcgcattccttcgaagaagtgcaactggtggaatcaggcggcggactggtgcagcctggcggatctctgagactgagctgtgccgccagcggcttcaccttcagcagctacggaatgcactgggtgcgccaggcccctggcaaaggactggaatgggtggcctacatcaccaccagaagcagcaccatctactacgccgacagcgtgaagggccggttcaccatctccagagacaacgccaagaacagcctgtacctccagatgaactccctgcgggccgaggacaccgccgtgtactattgcaccagagagcccctgaccggctactacgctatggactattggggccagggcaccagcgtgaccgtgtctagtacgcgtatccagaaccctgatcctgccgtgtaccagctgcgggatagcaagagcagcgacaagagcgtgtgtctgttcaccgacttcgacagccagaccaacgtgtcccagagcaaggactccgacgtgtacatcaccgataagtgcgtgctggacatgcggagcatggacttcaagagcaactccgccgtggcctggtccaacaagtccgatttcgcctgcgccaacgccttcaacaacagcattatccccgaggacacattcttcccaagccccgagagcagcgactccaccgaccacgtgaagcccaaagagacagagaacaccaagcagcccagcaagagctgccacaagcccaaggccatcgtgcacaccgagaaagtgaacatgatgagcctgaccgtgctgggcctgcggatgctgttcgccaaaaccgtggccgtgaacttcctgctgaccgccaagctgttcttcctc

SEQ ID NO: 7402 - DNA, 2562 bp, synthetic construct
  source 1..2562: mol_type = other DNA
atggccttaccagtgaccgccttgctcctgccgctggccttgctgctccacgccgccaggccggaagtgcagctggttgaatctggcggaggactggttcagcctggcggatctctgagactgtcttgtgccgccagcggcttcagcttcagcgacttttggatgagctgggtccgacaggcccctggcaaaggacttgaatgggtcgccacaatcagccaggccggcagcgagaaggactacgtggactctgtgaagggcagattcaccatcagccgggacaacgccaagaagtccctgtacctccagatgaacagcctgagagccgaggacaccgccgtgtactattgtgcctctggcgtgtacagcttcgactacagaggccagggcaccctggtcacagtctcttctggtaccggcggaggcggatctggcggcggaggtagcggtggcggaggatctgaattcgacatccagatgacccagagccccagcagcctgtctgccagcgtgggcgacagagtgaccatcacctgtagagccagccagagcatcagcctgtggctgaactggtatcagcagaagcccggcaaggcccccaagctgctgatctacgccgccagcacactccagagcggcgtgccaagcagattttccggcagcggctccggcaccgacttcaccctgacaatcagctccctccagcccgaggacttcgccacctactactgccagcagtactacaccagcccctacaccttcggccagggcaccaaggtggaaatcaagagactcgaggacctgaagaacgtgttcccacctgaggtggccgtgttcgagcctagcgaggccgagatcagccacacccagaaagccaccctcgtgtgcctggctaccggcttctaccccgaccatgtggaactgtcttggtgggtcaacggcaaagaggtgcacagcggcgtgtgtaccgacccccagccactgaaagaacagcccgccctgaacgacagccggtactgcctgagcagcagactgagagtgtccgccaccttctggcagaacccccggaaccacttcagatgccaggtgcagttctacggcctgagcgagaacgacgagtggacccaggacagagccaagcccgtgacccagatcgtgtctgccgaagcctggggcagagccgatgatgtgattaagatccactggcaggaaaagaagtccaacaccatcctgggcagccaggaaggcaacaccatgaagaccaacgacacctacatgaagttcagctggctgaccgtgcccgagaagtccctggacaaagaacacagatgcatcgtgcggcacgaaaacaacaagaacggcgtggaccaggaaatcatcttcccacccatcaagaccgatgtgattacaatggaccccaaggacaactgctccaaggacgccaacgataccctgctgctccagctgaccaacaccagcgcctactacatgtacttgttgctgctgctgaagtccgtggtgtacttcgccatcatcacatgctgcctgctgcggagaaccgccttctgctgcaacggcgagaagtctagggccaagcgatctggatctggagcaacaaacttctcactactcaaacaagcaggtgacgtggaggagaatcccgggcctactagtatggactggatttggcgcatccttttccttgtcggcgctgctaccggcgcgcattccttcgaacaggtgcaactgctggaatctggcggcggactggtgcagcctggcggatctctgagactgagctgtgccgccagcggcttcaccttcagcagctacgccatgagctgggtgcgccaggcccctggaaaaggactggaatgggtgtccgtgatccggtccagcggcagcagcacctattacgccgatagcgtgaagggccggttcaccatcagccgggacaacagcaagaacaccctgtacctccagatgaacagcctgcgggccgaggacaccgccgtgtactattgtgctaggggaggcggctacttcgactactggggccagggaacactcgtgaccgtgtcctctacgcgtatccagaaccctgatcctgccgtgtaccagctgcgggatagcaagagcagcgacaagagcgtgtgtctgttcaccgacttcgacagccagaccaacgtgtcccagagcaaggactccgacgtgtacatcaccgataagtgcgtgctggacatgcggagcatggacttcaagagcaactccgccgtggcctggtccaacaagtccgatttcgcctgcgccaacgccttcaacaacagcattatccccgaggacacattcttcccaagccccgagagcagcgactccaccgaccacgtgaagcccaaagagacagagaacaccaagcagcccagcaagagctgccacaagcccaaggccatcgtgcacaccgagaaagtgaacatgatgagcctgaccgtgctgggcctgcggatgctgttcgccaaaaccgtggccgtgaacttcctgctgaccgccaagctgttcttcctc

SEQ ID NO: 7403 - DNA, 2571 bp, synthetic construct
  source 1..2571: mol_type = other DNA
atggccttaccagtgaccgccttgctcctgccgctggccttgctgctccacgccgccaggccggaagtgcagctggttgaatctggcggaggactggttcagcctggcggatctctgagactgtcttgtgccgccagcggcttcagcttcagcgacttttggatgagctgggtccgacaggcccctggcaaaggacttgaatgggtcgccacaatcagccaggccggcagcgagaaggactacgtggactctgtgaagggcagattcaccatcagccgggacaacgccaagaagtccctgtacctccagatgaacagcctgagagccgaggacaccgccgtgtactattgtgcctctggcgtgtacagcttcgactacagaggccagggcaccctggtcacagtctcttctggtaccggcggaggcggatctggcggcggaggtagcggtggcggaggatctgaattcgacatccagatgacccagagccccagcagcctgtctgccagcgtgggcgacagagtgaccatcacctgtagagccagccagagcatcagcagctacctgaactggtatcagcagaagcccggcaaggcccccaaactgctgatctacgccgtgtccacactccagagcggcgtgcccagcagattttctggcagcggctccggcaccgacttcaccctgacaatcagctccctccagcccgaggacttcgccacctactactgtcagcagagcggcaccttccctcccaccacatttggacagggcaccaaggtggaaatcaagagactcgaggacctgaagaacgtgttcccacctgaggtggccgtgttcgagcctagcgaggccgagatcagccacacccagaaagccaccctcgtgtgcctggctaccggcttctaccccgaccatgtggaactgtcttggtgggtcaacggcaaagaggtgcacagcggcgtgtgtaccgacccccagccactgaaagaacagcccgccctgaacgacagccggtactgcctgagcagcagactgagagtgtccgccaccttctggcagaacccccggaaccacttcagatgccaggtgcagttctacggcctgagcgagaacgacgagtggacccaggacagagccaagcccgtgacccagatcgtgtctgccgaagcctggggcagagccgatgatgtgattaagatccactggcaggaaaagaagtccaacaccatcctgggcagccaggaaggcaacaccatgaagaccaacgacacctacatgaagttcagctggctgaccgtgcccgagaagtccctggacaaagaacacagatgcatcgtgcggcacgaaaacaacaagaacggcgtggaccaggaaatcatcttcccacccatcaagaccgatgtgattacaatggaccccaaggacaactgctccaaggacgccaacgataccctgctgctccagctgaccaacaccagcgcctactacatgtacttgttgctgctgctgaagtccgtggtgtacttcgccatcatcacatgctgcctgctgcggagaaccgccttctgctgcaacggcgagaagtctagggccaagcgatctggatctggagcaacaaacttctcactactcaaacaagcaggtgacgtggaggagaatcccgggcctactagtatggactggatttggcgcatccttttccttgtcggcgctgctaccggcgcgcattccttcgaacaggtgcaactgctggaatctggcggcggactggtgcagcctggcggatctctgagactgagctgtgccgccagcggcttcaccttcagcagccacggaatgcactgggtgcgccaggcccctggaaagggactggaatgggtgtccgtgatctccggcagcggcagcaataccggctacgccgatagcgtgaagggccggttcaccatcagccgggacaacagcaagaacaccctgtacctccagatgaacagcctgcgggccgaggacaccgccgtgtactattgtgccagacagtggggcagctacgccttcgattcttggggccagggcaccctcgtgaccgtgtcatctacgcgtatccagaaccctgatcctgccgtgtaccagctgcgggatagcaagagcagcgacaagagcgtgtgtctgttcaccgacttcgacagccagaccaacgtgtcccagagcaaggactccgacgtgtacatcaccgataagtgcgtgctggacatgcggagcatggacttcaagagcaactccgccgtggcctggtccaacaagtccgatttcgcctgcgccaacgccttcaacaacagcattatccccgaggacacattcttcccaagccccgagagcagcgactccaccgaccacgtgaagcccaaagagacagagaacaccaagcagcccagcaagagctgccacaagcccaaggccatcgtgcacaccgagaaagtgaacatgatgagcctgaccgtgctgggcctgcggatgctgttcgccaaaaccgtggccgtgaacttcctgctgaccgccaagctgttcttcctc

SEQ ID NO: 7404 - DNA, 2601 bp, synthetic construct
  source 1..2601: mol_type = other DNA
atggccttaccagtgaccgccttgctcctgccgctggccttgctgctccacgccgccaggccggaagtgcagctggttgaatctggcggaggactggttcagcctggcggatctctgagactgtcttgtgccgccagcggcttcagcttcagcgacttttggatgagctgggtccgacaggcccctggcaaaggacttgaatgggtcgccacaatcagccaggccggcagcgagaaggactacgtggactctgtgaagggcagattcaccatcagccgggacaacgccaagaagtccctgtacctccagatgaacagcctgagagccgaggacaccgccgtgtactattgtgcctctggcgtgtacagcttcgactacagaggccagggcaccctggtcacagtctcttctggtaccggcggaggcggatctggcggcggaggtagcggtggcggaggatctgaattcgacatcgtgatgagccagagccctagcagcctggccgtgtccgtgggcgagaaagtgaccatgagctgcaagagcagccagtccctgctgcacagcagcaaccagaagaactacctggcctggtatcagcagaagcccggccagtcccccaaggtgctgatctactgggccagcaccagagaaagcggcgtgcccgatagattcaccggcagcggctctggcaccgacttcaccctgaccatcaccagcgtgaagtccgaggacctggctgtgtactactgccagcagtattacagctacccctggaccttcggcggaggcacccggctggaaatcaaaagactcgaggacctgaagaacgtgttcccacctgaggtggccgtgttcgagcctagcgaggccgagatcagccacacccagaaagccaccctcgtgtgcctggctaccggcttctaccccgaccatgtggaactgtcttggtgggtcaacggcaaagaggtgcacagcggcgtgtgtaccgacccccagccactgaaagaacagcccgccctgaacgacagccggtactgcctgagcagcagactgagagtgtccgccaccttctggcagaacccccggaaccacttcagatgccaggtgcagttctacggcctgagcgagaacgacgagtggacccaggacagagccaagcccgtgacccagatcgtgtctgccgaagcctggggcagagccgatgatgtgattaagatccactggcaggaaaagaagtccaacaccatcctgggcagccaggaaggcaacaccatgaagaccaacgacacctacatgaagttcagctggctgaccgtgcccgagaagtccctggacaaagaacacagatgcatcgtgcggcacgaaaacaacaagaacggcgtggaccaggaaatcatcttcccacccatcaagaccgatgtgattacaatggaccccaaggacaactgctccaaggacgccaacgataccctgctgctccagctgaccaacaccagcgcctactacatgtacttgttgctgctgctgaagtccgtggtgtacttcgccatcatcacatgctgcctgctgcggagaaccgccttctgctgcaacggcgagaagtctagggccaagcgatctggatctggagcaacaaacttctcactactcaaacaagcaggtgacgtggaggagaatcccgggcctactagtatggactggatttggcgcatccttttccttgtcggcgctgctaccggcgcgcattccttcgaagaagtgcaactccagcagagcgtggccgagcttgtgaagcctggcgcttccgtgaagatgtcctgcaaggtgtccggctacaccctgacagaccacaccatccactggatgaagcagcggcctgagcagggcctggaatggatcggctacatctaccccagggacggcatcaccggctacaacgagaagttcaagggcaaggccacactgaccgccgacaccagcagcagcacagcctacatgcaactgaacagcctgaccagcgaggacagcgccgtgtacttctgtgccagatggggctacagctacagaaactacgcctactactacgactactggggccagggcacaaccctgaccgtgtctagtacgcgtatccagaaccctgatcctgccgtgtaccagctgcgggatagcaagagcagcgacaagagcgtgtgtctgttcaccgacttcgacagccagaccaacgtgtcccagagcaaggactccgacgtgtacatcaccgataagtgcgtgctggacatgcggagcatggacttcaagagcaactccgccgtggcctggtccaacaagtccgatttcgcctgcgccaacgccttcaacaacagcattatccccgaggacacattcttcccaagccccgagagcagcgactccaccgaccacgtgaagcccaaagagacagagaacaccaagcagcccagcaagagctgccacaagcccaaggccatcgtgcacaccgagaaagtgaacatgatgagcctgaccgtgctgggcctgcggatgctgttcgccaaaaccgtggccgtgaacttcctgctgaccgccaagctgttcttcctc

SEQ ID NO: 7405 - DNA, 2592 bp, synthetic construct
  source 1..2592: mol_type = other DNA
atggccttaccagtgaccgccttgctcctgccgctggccttgctgctccacgccgccaggccggaagtgcagctggttgaatctggcggaggactggttcagcctggcggatctctgagactgtcttgtgccgccagcggcttcagcttcagcgacttttggatgagctgggtccgacaggcccctggcaaaggacttgaatgggtcgccacaatcagccaggccggcagcgagaaggactacgtggactctgtgaagggcagattcaccatcagccgggacaacgccaagaagtccctgtacctccagatgaacagcctgagagccgaggacaccgccgtgtactattgtgcctctggcgtgtacagcttcgactacagaggccagggcaccctggtcacagtctcttctggtaccggcggaggcggatctggcggcggaggtagcggtggcggaggatctgaattcgagatcgtgctgacacagagccctggcaccctgagcctgtctccaggcgaaagagccacactgagctgtcgggccagccagagcgtgtccagctcttacctggcctggtatcagcagaagcccggccaggctccccggctgctgatctacggaacaagcagcagagccaccggcatccccgacagattttctggcagcggctccggcaccgacttcaccctgacaatcagcagactggaacccgaggacttcgccgtgtactactgccagcagtacggcagcagccccttcacctttggcggaggcaccaaggtggaaatcaagagactcgaggacctgaagaacgtgttcccacctgaggtggccgtgttcgagcctagcgaggccgagatcagccacacccagaaagccaccctcgtgtgcctggctaccggcttctaccccgaccatgtggaactgtcttggtgggtcaacggcaaagaggtgcacagcggcgtgtgtaccgacccccagccactgaaagaacagcccgccctgaacgacagccggtactgcctgagcagcagactgagagtgtccgccaccttctggcagaacccccggaaccacttcagatgccaggtgcagttctacggcctgagcgagaacgacgagtggacccaggacagagccaagcccgtgacccagatcgtgtctgccgaagcctggggcagagccgatgatgtgattaagatccactggcaggaaaagaagtccaacaccatcctgggcagccaggaaggcaacaccatgaagaccaacgacacctacatgaagttcagctggctgaccgtgcccgagaagtccctggacaaagaacacagatgcatcgtgcggcacgaaaacaacaagaacggcgtggaccaggaaatcatcttcccacccatcaagaccgatgtgattacaatggaccccaaggacaactgctccaaggacgccaacgataccctgctgctccagctgaccaacaccagcgcctactacatgtacttgttgctgctgctgaagtccgtggtgtacttcgccatcatcacatgctgcctgctgcggagaaccgccttctgctgcaacggcgagaagtctagggccaagcgatctggatctggagcaacaaacttctcactactcaaacaagcaggtgacgtggaggagaatcccgggcctactagtatggactggatttggcgcatccttttccttgtcggcgctgctaccggcgcgcattccttcgaacaggtgcaactccaggaatctggccccggactggctaagcccagcgagacactgagcctgacctgtaccgtgtccggcgacagcatcaccagctactactggtcctggatcagacagccccctggcaagggcctggaatggatcggctacatctactacagcggcagcaccaactacaaccccagcctgaagtccagagtgaccatcagcgtggacaccagcaagaaccagttctccctgaagctgagcagcgtgacagccgccgacaccgccgtgtattattgcgccagagatcagcggagaatcgccgctgccggcacccacttttacggcatggatgtgtggggccagggcaccaccgtgaccgtgtcatctacgcgtatccagaaccctgatcctgccgtgtaccagctgcgggatagcaagagcagcgacaagagcgtgtgtctgttcaccgacttcgacagccagaccaacgtgtcccagagcaaggactccgacgtgtacatcaccgataagtgcgtgctggacatgcggagcatggacttcaagagcaactccgccgtggcctggtccaacaagtccgatttcgcctgcgccaacgccttcaacaacagcattatccccgaggacacattcttcccaagccccgagagcagcgactccaccgaccacgtgaagcccaaagagacagagaacaccaagcagcccagcaagagctgccacaagcccaaggccatcgtgcacaccgagaaagtgaacatgatgagcctgaccgtgctgggcctgcggatgctgttcgccaaaaccgtggccgtgaacttcctgctgaccgccaagctgttcttcctc

SEQ ID NO: 7406 - DNA, 2568 bp, synthetic construct
  source 1..2568: mol_type = other DNA
atggccttaccagtgaccgccttgctcctgccgctggccttgctgctccacgccgccaggccggaagtgcagctggttgaatctggcggaggactggttcagcctggcggatctctgagactgtcttgtgccgccagcggcttcagcttcagcgacttttggatgagctgggtccgacaggcccctggcaaaggacttgaatgggtcgccacaatcagccaggccggcagcgagaaggactacgtggactctgtgaagggcagattcaccatcagccgggacaacgccaagaagtccctgtacctccagatgaacagcctgagagccgaggacaccgccgtgtactattgtgcctctggcgtgtacagcttcgactacagaggccagggcaccctggtcacagtctcttctggtaccggcggaggcggatctggcggcggaggtagcggtggcggaggatctgaattcgacatcctgctgacccagagccccgtgatcctgtccgtgtctcctggcgagagagtgtccttcagctgtcgggccagccagagcatcggcaccaacatccactggtatcagcagcggaccaacggcagccccagactgctgattaagtacgccagcgagtccatcagcggcatccccagcagattttccggcagcggctccggcaccgacttcaccctgagcatcaacagcgtggaaagcgaggacattgccgactactactgccagcagaacaacaactggcccaccaccttcggagccggcaccaagctggaactgaagctcgaggacctgaagaacgtgttcccacctgaggtggccgtgttcgagcctagcgaggccgagatcagccacacccagaaagccaccctcgtgtgcctggctaccggcttctaccccgaccatgtggaactgtcttggtgggtcaacggcaaagaggtgcacagcggcgtgtgtaccgacccccagccactgaaagaacagcccgccctgaacgacagccggtactgcctgagcagcagactgagagtgtccgccaccttctggcagaacccccggaaccacttcagatgccaggtgcagttctacggcctgagcgagaacgacgagtggacccaggacagagccaagcccgtgacccagatcgtgtctgccgaagcctggggcagagccgatgatgtgattaagatccactggcaggaaaagaagtccaacaccatcctgggcagccaggaaggcaacaccatgaagaccaacgacacctacatgaagttcagctggctgaccgtgcccgagaagtccctggacaaagaacacagatgcatcgtgcggcacgaaaacaacaagaacggcgtggaccaggaaatcatcttcccacccatcaagaccgatgtgattacaatggaccccaaggacaactgctccaaggacgccaacgataccctgctgctccagctgaccaacaccagcgcctactacatgtacttgttgctgctgctgaagtccgtggtgtacttcgccatcatcacatgctgcctgctgcggagaaccgccttctgctgcaacggcgagaagtctagggccaagcgatctggatctggagcaacaaacttctcactactcaaacaagcaggtgacgtggaggagaatcccgggcctactagtatggactggatttggcgcatccttttccttgtcggcgctgctaccggcgcgcattccttcgaacaggtgcagctgaagcagagcggacctggcctggtgcagcctagccagagcctgtccatcacctgtaccgtgtccggcttcagcctgaccaactacggcgtgcactgggtgcgccagagccctggaaaaggactggaatggctgggagtgatttggagcggcggcaacaccgactacaacacccccttcaccagcagactgtctatcaacaaggacaacagcaagagccaggtgttcttcaagatgaacagcctccagagcaacgacaccgccatctactactgtgctagagccctgacctactatgactacgagttcgcctactggggccagggcacactcgtgacagtgtctgctacgcgtatccagaaccctgatcctgccgtgtaccagctgcgggatagcaagagcagcgacaagagcgtgtgtctgttcaccgacttcgacagccagaccaacgtgtcccagagcaaggactccgacgtgtacatcaccgataagtgcgtgctggacatgcggagcatggacttcaagagcaactccgccgtggcctggtccaacaagtccgatttcgcctgcgccaacgccttcaacaacagcattatccccgaggacacattcttcccaagccccgagagcagcgactccaccgaccacgtgaagcccaaagagacagagaacaccaagcagcccagcaagagctgccacaagcccaaggccatcgtgcacaccgagaaagtgaacatgatgagcctgaccgtgctgggcctgcggatgctgttcgccaaaaccgtggccgtgaacttcctgctgaccgccaagctgttcttcctc

SEQ ID NO: 7407 - DNA, 2547 bp, synthetic construct
  source 1..2547: mol_type = other DNA
atggccttaccagtgaccgccttgctcctgccgctggccttgctgctccacgccgccaggccggaagtgcagctggttgaatctggcggaggactggttcagcctggcggatctctgagactgtcttgtgccgccagcggcttcagcttcagcgacttttggatgagctgggtccgacaggcccctggcaaaggacttgaatgggtcgccacaatcagccaggccggcagcgagaaggactacgtggactctgtgaagggcagattcaccatcagccgggacaacgccaagaagtccctgtacctccagatgaacagcctgagagccgaggacaccgccgtgtactattgtgcctctggcgtgtacagcttcgactacagaggccagggcaccctggtcacagtctcttctggtaccggcggaggcggatctggcggcggaggtagcggtggcggaggatctgaattcatgacccagagccccaagttcctgctggtgtctgccggcgacagagtgaccctgacatgcaaggccagccagagcgtgaacaacgacgtgtactggtatcagcaggaacccggccagtcccccaagctgctgatctactgggccagcaccagagaaagcggcgtgcccgatagattcaccggcagcggctctggcaccgacttcaccctgacaatcagcagcgtgcaggccgaggacctggccgtgtactactgcaagcagagctacaacctgtacaccttcggcggaggcaccaagctggaaatcaagagactcgaggacctgaagaacgtgttcccacctgaggtggccgtgttcgagcctagcgaggccgagatcagccacacccagaaagccaccctcgtgtgcctggctaccggcttctaccccgaccatgtggaactgtcttggtgggtcaacggcaaagaggtgcacagcggcgtgtgtaccgacccccagccactgaaagaacagcccgccctgaacgacagccggtactgcctgagcagcagactgagagtgtccgccaccttctggcagaacccccggaaccacttcagatgccaggtgcagttctacggcctgagcgagaacgacgagtggacccaggacagagccaagcccgtgacccagatcgtgtctgccgaagcctggggcagagccgatgatgtgattaagatccactggcaggaaaagaagtccaacaccatcctgggcagccaggaaggcaacaccatgaagaccaacgacacctacatgaagttcagctggctgaccgtgcccgagaagtccctggacaaagaacacagatgcatcgtgcggcacgaaaacaacaagaacggcgtggaccaggaaatcatcttcccacccatcaagaccgatgtgattacaatggaccccaaggacaactgctccaaggacgccaacgataccctgctgctccagctgaccaacaccagcgcctactacatgtacttgttgctgctgctgaagtccgtggtgtacttcgccatcatcacatgctgcctgctgcggagaaccgccttctgctgcaacggcgagaagtctagggccaagcgatctggatctggagcaacaaacttctcactactcaaacaagcaggtgacgtggaggagaatcccgggcctactagtatggactggatttggcgcatccttttccttgtcggcgctgctaccggcgcgcattccttcgaagaatctggaagaggactggtgcagcctggcggcagcagaaagctgtcttgtgccgccagcggcttcaccttcagcaccagcggaatgcactgggtgcgccaggcccctgagaagggactggaatgggtggcctacatcagctccggcagcaccaccatctaccacgccgataccgtgaagggccggttcaccatcagccgggacaaccccaagaataccctgttcctccagatgaccagcctgcggagcgaggacaccgccatgtactattgctgcgccagaagcggccagttcggcaactacttcgactactggggccagggcaccaccctgaccgtgtcatctacgcgtatccagaaccctgatcctgccgtgtaccagctgcgggatagcaagagcagcgacaagagcgtgtgtctgttcaccgacttcgacagccagaccaacgtgtcccagagcaaggactccgacgtgtacatcaccgataagtgcgtgctggacatgcggagcatggacttcaagagcaactccgccgtggcctggtccaacaagtccgatttcgcctgcgccaacgccttcaacaacagcattatccccgaggacacattcttcccaagccccgagagcagcgactccaccgaccacgtgaagcccaaagagacagagaacaccaagcagcccagcaagagctgccacaagcccaaggccatcgtgcacaccgagaaagtgaacatgatgagcctgaccgtgctgggcctgcggatgctgttcgccaaaaccgtggccgtgaacttcctgctgaccgccaagctgttcttcctc

SEQ ID NO: 7408 - DNA, 2562 bp, synthetic construct
  source 1..2562: mol_type = other DNA
atggccttaccagtgaccgccttgctcctgccgctggccttgctgctccacgccgccaggccggaagtgcagctggttgaatctggcggaggactggttcagcctggcggatctctgagactgtcttgtgccgccagcggcttcagcttcagcgacttttggatgagctgggtccgacaggcccctggcaaaggacttgaatgggtcgccacaatcagccaggccggcagcgagaaggactacgtggactctgtgaagggcagattcaccatcagccgggacaacgccaagaagtccctgtacctccagatgaacagcctgagagccgaggacaccgccgtgtactattgtgcctctggcgtgtacagcttcgactacagaggccagggcaccctggtcacagtctcttctggtaccggcggaggcggatctggcggcggaggtagcggtggcggaggatctgaattccagagcccatctagcctggctgtgtctgccggcgagaaagtgaccatgagctgcaagagcagccagagcctgctgaacagccggacccggaagaactacctggcctggtatcagcagaagcccggccagagccccaagctgctgatctactgggccagcaccagagaaagcggcgtgcccgatagattcaccggctctggcagcggcaccgacttcaccctgacaatcagcagcgtgcaggccgaggacctggccgtgtactactgcaagcagagcaacctgtacaccttcggcggaggcaccaagctggaaatcaagctcgaggacctgaagaacgtgttcccacctgaggtggccgtgttcgagcctagcgaggccgagatcagccacacccagaaagccaccctcgtgtgcctggctaccggcttctaccccgaccatgtggaactgtcttggtgggtcaacggcaaagaggtgcacagcggcgtgtgtaccgacccccagccactgaaagaacagcccgccctgaacgacagccggtactgcctgagcagcagactgagagtgtccgccaccttctggcagaacccccggaaccacttcagatgccaggtgcagttctacggcctgagcgagaacgacgagtggacccaggacagagccaagcccgtgacccagatcgtgtctgccgaagcctggggcagagccgatgatgtgattaagatccactggcaggaaaagaagtccaacaccatcctgggcagccaggaaggcaacaccatgaagaccaacgacacctacatgaagttcagctggctgaccgtgcccgagaagtccctggacaaagaacacagatgcatcgtgcggcacgaaaacaacaagaacggcgtggaccaggaaatcatcttcccacccatcaagaccgatgtgattacaatggaccccaaggacaactgctccaaggacgccaacgataccctgctgctccagctgaccaacaccagcgcctactacatgtacttgttgctgctgctgaagtccgtggtgtacttcgccatcatcacatgctgcctgctgcggagaaccgccttctgctgcaacggcgagaagtctagggccaagcgatctggatctggagcaacaaacttctcactactcaaacaagcaggtgacgtggaggagaatcccgggcctactagtatggactggatttggcgcatccttttccttgtcggcgctgctaccggcgcgcattccttcgaacaggtgcagctggaagagtctggacccgagcttgtgaagcctggggccagcgtgaagctgtcctgtaaagccagcggctacaccttcaccgagtacatcatccactgggtcaagcagcggagcggccagggcctggaatggatcggctggttttaccctggctccggcagcatcaagtacaacgagaagttcaaggacaaggccaccctgaccgccgacaagtccagcagcaccgtgtacatggaactgagcggcctgaccagcgaggacagcgccgtgtatttctgcgccagacacgacggctacagctacttcgactattggggccagggcaccacactgaccgtgtcctctacgcgtatccagaaccctgatcctgccgtgtaccagctgcgggatagcaagagcagcgacaagagcgtgtgtctgttcaccgacttcgacagccagaccaacgtgtcccagagcaaggactccgacgtgtacatcaccgataagtgcgtgctggacatgcggagcatggacttcaagagcaactccgccgtggcctggtccaacaagtccgatttcgcctgcgccaacgccttcaacaacagcattatccccgaggacacattcttcccaagccccgagagcagcgactccaccgaccacgtgaagcccaaagagacagagaacaccaagcagcccagcaagagctgccacaagcccaaggccatcgtgcacaccgagaaagtgaacatgatgagcctgaccgtgctgggcctgcggatgctgttcgccaaaaccgtggccgtgaacttcctgctgaccgccaagctgttcttcctc

SEQ ID NO: 7409 - DNA, 2571 bp, synthetic construct
  source 1..2571: mol_type = other DNA
atggccttaccagtgaccgccttgctcctgccgctggccttgctgctccacgccgccaggccggaagtgcagctggttgaatctggcggaggactggttcagcctggcggatctctgagactgtcttgtgccgccagcggcttcagcttcagcgacttttggatgagctgggtccgacaggcccctggcaaaggacttgaatgggtcgccacaatcagccaggccggcagcgagaaggactacgtggactctgtgaagggcagattcaccatcagccgggacaacgccaagaagtccctgtacctccagatgaacagcctgagagccgaggacaccgccgtgtactattgtgcctctggcgtgtacagcttcgactacagaggccagggcaccctggtcacagtctcttctggtaccggcggaggcggatctggcggcggaggtagcggtggcggaggatctgaattcgacatccagatgacccagagccccagcagcctgtctgcctctctgggcgagagagtgtccctgacctgtcgggccacacaggaactgagcggctacctgtcttggctgcagcagaagcccgacggcaccatcaagcggctgatctacgccgccagcaccctggatagcggcgtgcccaagagattcagcggcaacagaagcggcagcgactacagcctgaccatcagctccctggaaagcgaggacttcgccgactactactgcctgcagtacgccatctacccctacaccttcggcggaggcaccaagctggaaatcaagctcgaggacctgaagaacgtgttcccacctgaggtggccgtgttcgagcctagcgaggccgagatcagccacacccagaaagccaccctcgtgtgcctggctaccggcttctaccccgaccatgtggaactgtcttggtgggtcaacggcaaagaggtgcacagcggcgtgtgtaccgacccccagccactgaaagaacagcccgccctgaacgacagccggtactgcctgagcagcagactgagagtgtccgccaccttctggcagaacccccggaaccacttcagatgccaggtgcagttctacggcctgagcgagaacgacgagtggacccaggacagagccaagcccgtgacccagatcgtgtctgccgaagcctggggcagagccgatgatgtgattaagatccactggcaggaaaagaagtccaacaccatcctgggcagccaggaaggcaacaccatgaagaccaacgacacctacatgaagttcagctggctgaccgtgcccgagaagtccctggacaaagaacacagatgcatcgtgcggcacgaaaacaacaagaacggcgtggaccaggaaatcatcttcccacccatcaagaccgatgtgattacaatggaccccaaggacaactgctccaaggacgccaacgataccctgctgctccagctgaccaacaccagcgcctactacatgtacttgttgctgctgctgaagtccgtggtgtacttcgccatcatcacatgctgcctgctgcggagaaccgccttctgctgcaacggcgagaagtctagggccaagcgatctggatctggagcaacaaacttctcactactcaaacaagcaggtgacgtggaggagaatcccgggcctactagtatggactggatttggcgcatccttttccttgtcggcgctgctaccggcgcgcattccttcgaagaggtgcaactgcagcagtctggccccgagcttgtgaagcctggcgcctccgtgaagatgagctgcaaggccagcggctacacctttaccagctacttcatccactgggtcaagcagaaacccggccagggcctggaatggatcggcttcatcaacccttacaacgacggcagcaagtacaacgagaagttcaagggcaaggccaccctgaccagcgacaagagcagcagcaccgcctacatggaactgtccagcctgacatccgaggacagcgccgtgtactactgcaccagggacgacggctactacggctacgccatggactactggggccagggaacaagcgtcaccgtgtcctctacgcgtatccagaaccctgatcctgccgtgtaccagctgcgggatagcaagagcagcgacaagagcgtgtgtctgttcaccgacttcgacagccagaccaacgtgtcccagagcaaggactccgacgtgtacatcaccgataagtgcgtgctggacatgcggagcatggacttcaagagcaactccgccgtggcctggtccaacaagtccgatttcgcctgcgccaacgccttcaacaacagcattatccccgaggacacattcttcccaagccccgagagcagcgactccaccgaccacgtgaagcccaaagagacagagaacaccaagcagcccagcaagagctgccacaagcccaaggccatcgtgcacaccgagaaagtgaacatgatgagcctgaccgtgctgggcctgcggatgctgttcgccaaaaccgtggccgtgaacttcctgctgaccgccaagctgttcttcctc

SEQ ID NO: 7410 - DNA, 2586 bp, synthetic construct
  source 1..2586: mol_type = other DNA
atggccttaccagtgaccgccttgctcctgccgctggccttgctgctccacgccgccaggccggaagtgcagctggttgaatctggcggaggactggttcagcctggcggatctctgagactgtcttgtgccgccagcggcttcagcttcagcgacttttggatgagctgggtccgacaggcccctggcaaaggacttgaatgggtcgccacaatcagccaggccggcagcgagaaggactacgtggactctgtgaagggcagattcaccatcagccgggacaacgccaagaagtccctgtacctccagatgaacagcctgagagccgaggacaccgccgtgtactattgtgcctctggcgtgtacagcttcgactacagaggccagggcaccctggtcacagtctcttctggtaccggcggaggcggatctggcggcggaggtagcggtggcggaggatctgaattcgacaccatcgtgctgacacagagccctgcttccctggccgtgtccctgggacagagagccaccatctcttgcagagccagcgagagcgtggacagctacggcaacagcttcatgcactggtatcagcagaagcccggccagccccccaagctgctgatctacctggcctccaacctggaaagcggcgtgcccgccagattttctggcagcggcagcagaaccgacttcaccctgaccatcgaccccgtggaagccgatgatgccgccacctactactgccagcagaacaactacgacccctggaccttcggcggaggcaccaagctggaaatcaagctcgaggacctgaagaacgtgttcccacctgaggtggccgtgttcgagcctagcgaggccgagatcagccacacccagaaagccaccctcgtgtgcctggctaccggcttctaccccgaccatgtggaactgtcttggtgggtcaacggcaaagaggtgcacagcggcgtgtgtaccgacccccagccactgaaagaacagcccgccctgaacgacagccggtactgcctgagcagcagactgagagtgtccgccaccttctggcagaacccccggaaccacttcagatgccaggtgcagttctacggcctgagcgagaacgacgagtggacccaggacagagccaagcccgtgacccagatcgtgtctgccgaagcctggggcagagccgatgatgtgattaagatccactggcaggaaaagaagtccaacaccatcctgggcagccaggaaggcaacaccatgaagaccaacgacacctacatgaagttcagctggctgaccgtgcccgagaagtccctggacaaagaacacagatgcatcgtgcggcacgaaaacaacaagaacggcgtggaccaggaaatcatcttcccacccatcaagaccgatgtgattacaatggaccccaaggacaactgctccaaggacgccaacgataccctgctgctccagctgaccaacaccagcgcctactacatgtacttgttgctgctgctgaagtccgtggtgtacttcgccatcatcacatgctgcctgctgcggagaaccgccttctgctgcaacggcgagaagtctagggccaagcgatctggatctggagcaacaaacttctcactactcaaacaagcaggtgacgtggaggagaatcccgggcctactagtatggactggatttggcgcatccttttccttgtcggcgctgctaccggcgcgcattccttcgaagaagtgcaactccagcagagcggccctgagcttgtgaagcctggcgcttccgtgaagatgagctgcaaggccagcggctacaccttcaccagctacgtgatgcactgggtcaagcagaaacctggacagggcctggaatggatcggctacatcaacccctacaacgacggcaccaagtacaacgagaagttcaagggcaaggccaccctgacaagcgacaccagcagcagcaccgcctacatggaactgaacagcctgaccagcgaggacagcgccgtgtacttctgcgccagacccatctacttcgacaacgactacttcgattactggggccagggcaccaccctgaaggtgtcctctacgcgtatccagaaccctgatcctgccgtgtaccagctgcgggatagcaagagcagcgacaagagcgtgtgtctgttcaccgacttcgacagccagaccaacgtgtcccagagcaaggactccgacgtgtacatcaccgataagtgcgtgctggacatgcggagcatggacttcaagagcaactccgccgtggcctggtccaacaagtccgatttcgcctgcgccaacgccttcaacaacagcattatccccgaggacacattcttcccaagccccgagagcagcgactccaccgaccacgtgaagcccaaagagacagagaacaccaagcagcccagcaagagctgccacaagcccaaggccatcgtgcacaccgagaaagtgaacatgatgagcctgaccgtgctgggcctgcggatgctgttcgccaaaaccgtggccgtgaacttcctgctgaccgccaagctgttcttcctc

SEQ ID NO: 7411 - DNA, 2571 bp, synthetic construct
  source 1..2571: mol_type = other DNA
atggccttaccagtgaccgccttgctcctgccgctggccttgctgctccacgccgccaggccggaagtgcagctggttgaatctggcggaggactggttcagcctggcggatctctgagactgtcttgtgccgccagcggcttcagcttcagcgacttttggatgagctgggtccgacaggcccctggcaaaggacttgaatgggtcgccacaatcagccaggccggcagcgagaaggactacgtggactctgtgaagggcagattcaccatcagccgggacaacgccaagaagtccctgtacctccagatgaacagcctgagagccgaggacaccgccgtgtactattgtgcctctggcgtgtacagcttcgactacagaggccagggcaccctggtcacagtctcttctggtaccggcggaggcggatctggcggcggaggtagcggtggcggaggatctgaattcgacatccagatgacccagagccccagcagcctgtctgccagcgtgggcgacagagtgaccatcacatgcaaggccagccaggacgtgggaatcgccgtggcctggtatcagcagaaacccggcaaggtgcccaagctgctgatctactgggccagcaccagacacaccggcgtgcccgatagattttccggcagcggctccggcaccgacttcaccctgacaatcagctccctccagcccgaggacgtggcaacctactactgccagcagtacagcagctacccctacaccttcggccagggcaccaaggtggaaatcaagagactcgaggacctgaagaacgtgttcccacctgaggtggccgtgttcgagcctagcgaggccgagatcagccacacccagaaagccaccctcgtgtgcctggctaccggcttctaccccgaccatgtggaactgtcttggtgggtcaacggcaaagaggtgcacagcggcgtgtgtaccgacccccagccactgaaagaacagcccgccctgaacgacagccggtactgcctgagcagcagactgagagtgtccgccaccttctggcagaacccccggaaccacttcagatgccaggtgcagttctacggcctgagcgagaacgacgagtggacccaggacagagccaagcccgtgacccagatcgtgtctgccgaagcctggggcagagccgatgatgtgattaagatccactggcaggaaaagaagtccaacaccatcctgggcagccaggaaggcaacaccatgaagaccaacgacacctacatgaagttcagctggctgaccgtgcccgagaagtccctggacaaagaacacagatgcatcgtgcggcacgaaaacaacaagaacggcgtggaccaggaaatcatcttcccacccatcaagaccgatgtgattacaatggaccccaaggacaactgctccaaggacgccaacgataccctgctgctccagctgaccaacaccagcgcctactacatgtacttgttgctgctgctgaagtccgtggtgtacttcgccatcatcacatgctgcctgctgcggagaaccgccttctgctgcaacggcgagaagtctagggccaagcgatctggatctggagcaacaaacttctcactactcaaacaagcaggtgacgtggaggagaatcccgggcctactagtatggactggatttggcgcatccttttccttgtcggcgctgctaccggcgcgcattccttcgaagaagtgcaactggtggaatcaggcggcggactggtgcagcctggcggatctctgagactgagctgtgccgccagcggcttcgacttcagccggtactggatgagctgggtgcgccaggcccctggcaaaggactggaatggatcggcgagatcaaccccgacagcagcaccatcaactacgcccccagcctgaaggacaagttcatcatcagccgggacaacgccaagaacagcctgtacctccagatgaactccctgcgggccgaggacaccgccgtgtactattgcgccagacccgacggcaactactggtacttcgacgtgtggggccagggaaccctcgtgaccgtgtcatctacgcgtatccagaaccctgatcctgccgtgtaccagctgcgggatagcaagagcagcgacaagagcgtgtgtctgttcaccgacttcgacagccagaccaacgtgtcccagagcaaggactccgacgtgtacatcaccgataagtgcgtgctggacatgcggagcatggacttcaagagcaactccgccgtggcctggtccaacaagtccgatttcgcctgcgccaacgccttcaacaacagcattatccccgaggacacattcttcccaagccccgagagcagcgactccaccgaccacgtgaagcccaaagagacagagaacaccaagcagcccagcaagagctgccacaagcccaaggccatcgtgcacaccgagaaagtgaacatgatgagcctgaccgtgctgggcctgcggatgctgttcgccaaaaccgtggccgtgaacttcctgctgaccgccaagctgttcttcctc

SEQ ID NO: 7412 - DNA, 2571 bp, synthetic construct
  source 1..2571: mol_type = other DNA
atggccttaccagtgaccgccttgctcctgccgctggccttgctgctccacgccgccaggccggaagtgcagctggttgaatctggcggaggactggttcagcctggcggatctctgagactgtcttgtgccgccagcggcttcagcttcagcgacttttggatgagctgggtccgacaggcccctggcaaaggacttgaatgggtcgccacaatcagccaggccggcagcgagaaggactacgtggactctgtgaagggcagattcaccatcagccgggacaacgccaagaagtccctgtacctccagatgaacagcctgagagccgaggacaccgccgtgtactattgtgcctctggcgtgtacagcttcgactacagaggccagggcaccctggtcacagtctcttctggtaccggcggaggcggatctggcggcggaggtagcggtggcggaggatctgaattcgacatcgtgatgacccagagccagaagagcatgagcaccagcgtgggcgacagagtgagcatcacctgcaaggccagccaggacgtgatcaccggcgtggcctggtaccagcagaagcccggccagagccccaagctgctgatctacagcgccagctacagatacaccggcgtgcccgacagattcaccggcagcggcagcggcaccgacttcaccttcaccatcagcaacgtgcaggccgaggacctggccgtgtactactgccagcagcactacagcacccccctgaccttcggcgccggcaccaagctggagctgaagctcgaggacctgaagaacgtgttcccacctgaggtggccgtgttcgagcctagcgaggccgagatcagccacacccagaaagccaccctcgtgtgcctggctaccggcttctaccccgaccatgtggaactgtcttggtgggtcaacggcaaagaggtgcacagcggcgtgtgtaccgacccccagccactgaaagaacagcccgccctgaacgacagccggtactgcctgagcagcagactgagagtgtccgccaccttctggcagaacccccggaaccacttcagatgccaggtgcagttctacggcctgagcgagaacgacgagtggacccaggacagagccaagcccgtgacccagatcgtgtctgccgaagcctggggcagagccgatgatgtgattaagatccactggcaggaaaagaagtccaacaccatcctgggcagccaggaaggcaacaccatgaagaccaacgacacctacatgaagttcagctggctgaccgtgcccgagaagtccctggacaaagaacacagatgcatcgtgcggcacgaaaacaacaagaacggcgtggaccaggaaatcatcttcccacccatcaagaccgatgtgattacaatggaccccaaggacaactgctccaaggacgccaacgataccctgctgctccagctgaccaacaccagcgcctactacatgtacttgttgctgctgctgaagtccgtggtgtacttcgccatcatcacatgctgcctgctgcggagaaccgccttctgctgcaacggcgagaagtctagggccaagcgatctggatctggagcaacaaacttctcactactcaaacaagcaggtgacgtggaggagaatcccgggcctactagtatggactggatttggcgcatccttttccttgtcggcgctgctaccggcgcgcattccttcgaacaggtgcagctgcagcagcccggcgccgagctggtgagacccggcgccagcgtgaagctgagctgcaaggccagcggctacagcttcaccacctactggatgaactgggtgaagcagagacccggccagggcctggagtggatcggcatgatccaccccagcgacagcgagaccagactgaaccagaagttcaaggacaaggccaccctgaccgtggacaagagcagcagcaccgcctacatgcagctgagcagccccaccagcgaggacagcgccgtgtactactgcgccagaagcaccatgatcgccaccagagccatggactactggggccagggcaccagcgtgaccgtgagcagcacgcgtatccagaaccctgatcctgccgtgtaccagctgcgggatagcaagagcagcgacaagagcgtgtgtctgttcaccgacttcgacagccagaccaacgtgtcccagagcaaggactccgacgtgtacatcaccgataagtgcgtgctggacatgcggagcatggacttcaagagcaactccgccgtggcctggtccaacaagtccgatttcgcctgcgccaacgccttcaacaacagcattatccccgaggacacattcttcccaagccccgagagcagcgactccaccgaccacgtgaagcccaaagagacagagaacaccaagcagcccagcaagagctgccacaagcccaaggccatcgtgcacaccgagaaagtgaacatgatgagcctgaccgtgctgggcctgcggatgctgttcgccaaaaccgtggccgtgaacttcctgctgaccgccaagctgttcttcctc

SEQ ID NO: 7413 - DNA, 2589 bp, synthetic construct
  source 1..2589: mol_type = other DNA
atggccttaccagtgaccgccttgctcctgccgctggccttgctgctccacgccgccaggccggaagtgcagctggttgaatctggcggaggactggttcagcctggcggatctctgagactgtcttgtgccgccagcggcttcagcttcagcgacttttggatgagctgggtccgacaggcccctggcaaaggacttgaatgggtcgccacaatcagccaggccggcagcgagaaggactacgtggactctgtgaagggcagattcaccatcagccgggacaacgccaagaagtccctgtacctccagatgaacagcctgagagccgaggacaccgccgtgtactattgtgcctctggcgtgtacagcttcgactacagaggccagggcaccctggtcacagtctcttctggtaccggcggaggcggatctggcggcggaggtagcggtggcggaggatctgaattccagagcgtgctgacacagcctccatccgtgtctggcgctccaggccagagagtgaccatctcctgtaccggcagcggcagcaacatcggagccccctacgacgtgtcctggtatcagcaactgcctggcaccgcccccaagctgctgatctaccacaacaacaagcggcccagcggcgtgcccgatagattcagcggctctaagagcggcaccagcgccagcctggctatcactggactccaggccgaggacgaggccgactactactgtgccacagtggaagccggcctgagcggctctgtgtttggcggcggaacaaagctgaccgtgctgggagctctcgaggacctgaagaacgtgttcccacctgaggtggccgtgttcgagcctagcgaggccgagatcagccacacccagaaagccaccctcgtgtgcctggctaccggcttctaccccgaccatgtggaactgtcttggtgggtcaacggcaaagaggtgcacagcggcgtgtgtaccgacccccagccactgaaagaacagcccgccctgaacgacagccggtactgcctgagcagcagactgagagtgtccgccaccttctggcagaacccccggaaccacttcagatgccaggtgcagttctacggcctgagcgagaacgacgagtggacccaggacagagccaagcccgtgacccagatcgtgtctgccgaagcctggggcagagccgatgatgtgattaagatccactggcaggaaaagaagtccaacaccatcctgggcagccaggaaggcaacaccatgaagaccaacgacacctacatgaagttcagctggctgaccgtgcccgagaagtccctggacaaagaacacagatgcatcgtgcggcacgaaaacaacaagaacggcgtggaccaggaaatcatcttcccacccatcaagaccgatgtgattacaatggaccccaaggacaactgctccaaggacgccaacgataccctgctgctccagctgaccaacaccagcgcctactacatgtacttgttgctgctgctgaagtccgtggtgtacttcgccatcatcacatgctgcctgctgcggagaaccgccttctgctgcaacggcgagaagtctagggccaagcgatctggatctggagcaacaaacttctcactactcaaacaagcaggtgacgtggaggagaatcccgggcctactagtatggactggatttggcgcatccttttccttgtcggcgctgctaccggcgcgcattccttcgaacaggtgcaactggtgcagagcggagccgaagtgaagaaacctggggccagcgtgaaggtgtcctgcaaggtgtccggctacaccctgaccgagctgagcattcactgggtgcgccaggcccctggcaagggactggaatggatgggcggcttcgaccccgaagagaacgagatcgtgtacgcccagcggttccagggcagagtgacaatgaccgaggacaccagcaccgacaccgcctacatggaactgagcagcctgcggagcgaggataccgccgtgtactactgcgccatcgtgggcagcttcagccctctgacactgggcctgtggggccagggaactatggtcaccgtgtccagcacgcgtatccagaaccctgatcctgccgtgtaccagctgcgggatagcaagagcagcgacaagagcgtgtgtctgttcaccgacttcgacagccagaccaacgtgtcccagagcaaggactccgacgtgtacatcaccgataagtgcgtgctggacatgcggagcatggacttcaagagcaactccgccgtggcctggtccaacaagtccgatttcgcctgcgccaacgccttcaacaacagcattatccccgaggacacattcttcccaagccccgagagcagcgactccaccgaccacgtgaagcccaaagagacagagaacaccaagcagcccagcaagagctgccacaagcccaaggccatcgtgcacaccgagaaagtgaacatgatgagcctgaccgtgctgggcctgcggatgctgttcgccaaaaccgtggccgtgaacttcctgctgaccgccaagctgttcttcctc

SEQ ID NO: 7414 - DNA, 2589 bp, synthetic construct
  source 1..2589: mol_type = other DNA
atggccttaccagtgaccgccttgctcctgccgctggccttgctgctccacgccgccaggccggaagtgcagctggttgaatctggcggaggactggttcagcctggcggatctctgagactgtcttgtgccgccagcggcttcagcttcagcgacttttggatgagctgggtccgacaggcccctggcaaaggacttgaatgggtcgccacaatcagccaggccggcagcgagaaggactacgtggactctgtgaagggcagattcaccatcagccgggacaacgccaagaagtccctgtacctccagatgaacagcctgagagccgaggacaccgccgtgtactattgtgcctctggcgtgtacagcttcgactacagaggccagggcaccctggtcacagtctcttctggtaccggcggaggcggatctggcggcggaggtagcggtggcggaggatctgaattccagagcgtgctgacacagcctccatccgtgtctggcgctccaggccagagagtgaccatctcctgtaccggcagcggcagcaacatcggagccccctacgacgtgtcctggtatcagcaactgcctggcaccgcccccaagctgctgatctaccacaacaacaagcggcccagcggcgtgcccgatagattcagcggctctaagagcggcaccagcgccagcctggctatcactggactccaggccgaggacgaggccgactactactgccagagctacgacagcagcagcatcagcaccatcttcggcggaggcaccaagctgacagtgctgggagctctcgaggacctgaagaacgtgttcccacctgaggtggccgtgttcgagcctagcgaggccgagatcagccacacccagaaagccaccctcgtgtgcctggctaccggcttctaccccgaccatgtggaactgtcttggtgggtcaacggcaaagaggtgcacagcggcgtgtgtaccgacccccagccactgaaagaacagcccgccctgaacgacagccggtactgcctgagcagcagactgagagtgtccgccaccttctggcagaacccccggaaccacttcagatgccaggtgcagttctacggcctgagcgagaacgacgagtggacccaggacagagccaagcccgtgacccagatcgtgtctgccgaagcctggggcagagccgatgatgtgattaagatccactggcaggaaaagaagtccaacaccatcctgggcagccaggaaggcaacaccatgaagaccaacgacacctacatgaagttcagctggctgaccgtgcccgagaagtccctggacaaagaacacagatgcatcgtgcggcacgaaaacaacaagaacggcgtggaccaggaaatcatcttcccacccatcaagaccgatgtgattacaatggaccccaaggacaactgctccaaggacgccaacgataccctgctgctccagctgaccaacaccagcgcctactacatgtacttgttgctgctgctgaagtccgtggtgtacttcgccatcatcacatgctgcctgctgcggagaaccgccttctgctgcaacggcgagaagtctagggccaagcgatctggatctggagcaacaaacttctcactactcaaacaagcaggtgacgtggaggagaatcccgggcctactagtatggactggatttggcgcatccttttccttgtcggcgctgctaccggcgcgcattccttcgaacaggtgcaactggtgcagagcggagccgaagtgaagaaacctggggccagcgtgaaggtgtcctgcaaggtgtccggctacaccctgaccgagctgagcattcactgggtgcgccaggcccctggcaagggactggaatggatgggcggcttcgaccccgaagagaacgagatcgtgtacgcccagcggttccagggcagagtgacaatgaccgaggacaccagcaccgacaccgcctacatggaactgagcagcctgcggagcgaggataccgccgtgtactactgtgccatcgtgggcagcttcagcggaatcgcctacagaccttggggccagggcacaatggtcaccgtgtctagcacgcgtatccagaaccctgatcctgccgtgtaccagctgcgggatagcaagagcagcgacaagagcgtgtgtctgttcaccgacttcgacagccagaccaacgtgtcccagagcaaggactccgacgtgtacatcaccgataagtgcgtgctggacatgcggagcatggacttcaagagcaactccgccgtggcctggtccaacaagtccgatttcgcctgcgccaacgccttcaacaacagcattatccccgaggacacattcttcccaagccccgagagcagcgactccaccgaccacgtgaagcccaaagagacagagaacaccaagcagcccagcaagagctgccacaagcccaaggccatcgtgcacaccgagaaagtgaacatgatgagcctgaccgtgctgggcctgcggatgctgttcgccaaaaccgtggccgtgaacttcctgctgaccgccaagctgttcttcctc

SEQ ID NO: 7415 - DNA, 2553 bp, synthetic construct
  source 1..2553: mol_type = other DNA
atggccttaccagtgaccgccttgctcctgccgctggccttgctgctccacgccgccaggccggaagtgcagctggttgaatctggcggaggactggttcagcctggcggatctctgagactgtcttgtgccgccagcggcttcagcttcagcgacttttggatgagctgggtccgacaggcccctggcaaaggacttgaatgggtcgccacaatcagccaggccggcagcgagaaggactacgtggactctgtgaagggcagattcaccatcagccgggacaacgccaagaagtccctgtacctccagatgaacagcctgagagccgaggacaccgccgtgtactattgtgcctctggcgtgtacagcttcgactacagaggccagggcaccctggtcacagtctcttctggtaccggcggaggcggatctggcggcggaggtagcggtggcggaggatctgaattcgacatccagatgacccagagccccagcagcctgtctgccagcgtgggcgacagagtgaccatcacctgtagagccagccagggcatcagaaacaacctggcctggtatcagcagaagcccggcaaggcccccaagcggctgatctacgccgccagcaatctccagagcggcgtgcccagcagattcacaggctctggcagcggcaccgagttcaccctgatcgtgtctagcctccagcccgaggacttcgccacctactactgcctccagcaccacagctaccccctgacatctggcggaggcaccaaggtggaactcgaggacctgaagaacgtgttcccacctgaggtggccgtgttcgagcctagcgaggccgagatcagccacacccagaaagccaccctcgtgtgcctggctaccggcttctaccccgaccatgtggaactgtcttggtgggtcaacggcaaagaggtgcacagcggcgtgtgtaccgacccccagccactgaaagaacagcccgccctgaacgacagccggtactgcctgagcagcagactgagagtgtccgccaccttctggcagaacccccggaaccacttcagatgccaggtgcagttctacggcctgagcgagaacgacgagtggacccaggacagagccaagcccgtgacccagatcgtgtctgccgaagcctggggcagagccgatgatgtgattaagatccactggcaggaaaagaagtccaacaccatcctgggcagccaggaaggcaacaccatgaagaccaacgacacctacatgaagttcagctggctgaccgtgcccgagaagtccctggacaaagaacacagatgcatcgtgcggcacgaaaacaacaagaacggcgtggaccaggaaatcatcttcccacccatcaagaccgatgtgattacaatggaccccaaggacaactgctccaaggacgccaacgataccctgctgctccagctgaccaacaccagcgcctactacatgtacttgttgctgctgctgaagtccgtggtgtacttcgccatcatcacatgctgcctgctgcggagaaccgccttctgctgcaacggcgagaagtctagggccaagcgatctggatctggagcaacaaacttctcactactcaaacaagcaggtgacgtggaggagaatcccgggcctactagtatggactggatttggcgcatccttttccttgtcggcgctgctaccggcgcgcattccttcgaagaggtgcaggtgctggaaagtggcggaggactggtgcagcctggcggctctctgagactgtcttgtgccgccagcggcttcaccttcagcagctacgccatgagctgggtgcgccaggcccctggaaaaggactggaatgggtgtccgccatcagcggctctggcgggtctaccaactacgccgatagcgtgaagggccggttcaccatcagccgggacaacagcaagaacaccctgtacctccagatgaacagcctgcgggccgaggacaccgccgtgtattattgtgccggcagcagcgggtggagcgagtattggggacagggcaccctcgtgaccgtgtcctctacgcgtatccagaaccctgatcctgccgtgtaccagctgcgggatagcaagagcagcgacaagagcgtgtgtctgttcaccgacttcgacagccagaccaacgtgtcccagagcaaggactccgacgtgtacatcaccgataagtgcgtgctggacatgcggagcatggacttcaagagcaactccgccgtggcctggtccaacaagtccgatttcgcctgcgccaacgccttcaacaacagcattatccccgaggacacattcttcccaagccccgagagcagcgactccaccgaccacgtgaagcccaaagagacagagaacaccaagcagcccagcaagagctgccacaagcccaaggccatcgtgcacaccgagaaagtgaacatgatgagcctgaccgtgctgggcctgcggatgctgttcgccaaaaccgtggccgtgaacttcctgctgaccgccaagctgttcttcctc

SEQ ID NO: 7416 - DNA, 2571 bp, synthetic construct
  source 1..2571: mol_type = other DNA
atggccttaccagtgaccgccttgctcctgccgctggccttgctgctccacgccgccaggccggaagtgcagctggttgaatctggcggaggactggttcagcctggcggatctctgagactgtcttgtgccgccagcggcttcagcttcagcgacttttggatgagctgggtccgacaggcccctggcaaaggacttgaatgggtcgccacaatcagccaggccggcagcgagaaggactacgtggactctgtgaagggcagattcaccatcagccgggacaacgccaagaagtccctgtacctccagatgaacagcctgagagccgaggacaccgccgtgtactattgtgcctctggcgtgtacagcttcgactacagaggccagggcaccctggtcacagtctcttctggtaccggcggaggcggatctggcggcggaggtagcggtggcggaggatctgaattcgacgagatccagctggtgcagagcggagccgaagtgaagaagcctggcgagagcctgcggatcagctgcaagggcagcggcttcaacatcgaggactactacatccactgggtgcgccagatgcccggcaagggcctggaatggatgggcagaatcgaccccgagaacgacgagactaagtacggccccatcttccagggccacgtgaccatcagcgccgacaccagcatcaacaccgtgtacctccagtggtccagcctgaaggccagcgacaccgccatgtactactgcgcctttagaggcggcgtgtactggggccagggcaccacagtgacagtgtctagcctcgaggacctgaagaacgtgttcccacctgaggtggccgtgttcgagcctagcgaggccgagatcagccacacccagaaagccaccctcgtgtgcctggctaccggcttctaccccgaccatgtggaactgtcttggtgggtcaacggcaaagaggtgcacagcggcgtgtgtaccgacccccagccactgaaagaacagcccgccctgaacgacagccggtactgcctgagcagcagactgagagtgtccgccaccttctggcagaacccccggaaccacttcagatgccaggtgcagttctacggcctgagcgagaacgacgagtggacccaggacagagccaagcccgtgacccagatcgtgtctgccgaagcctggggcagagccgatgatgtgattaagatccactggcaggaaaagaagtccaacaccatcctgggcagccaggaaggcaacaccatgaagaccaacgacacctacatgaagttcagctggctgaccgtgcccgagaagtccctggacaaagaacacagatgcatcgtgcggcacgaaaacaacaagaacggcgtggaccaggaaatcatcttcccacccatcaagaccgatgtgattacaatggaccccaaggacaactgctccaaggacgccaacgataccctgctgctccagctgaccaacaccagcgcctactacatgtacttgttgctgctgctgaagtccgtggtgtacttcgccatcatcacatgctgcctgctgcggagaaccgccttctgctgcaacggcgagaagtctagggccaagcgatctggatctggagcaacaaacttctcactactcaaacaagcaggtgacgtggaggagaatcccgggcctactagtatggactggatttggcgcatccttttccttgtcggcgctgctaccggcgcgcattccttcgaagatgtcgtgatgacccagagccccgacagcctggctgtgtctctgggagagagagccaccatcaactgcaagtccagccagtccctgctggacagcgacggcaagacctacctgaactggctccagcagaagcccggccagccccccaagagactgatctccctggtgtccaagctggactccggcgtgcccgatagattttccggctctggcagcggcaccgacttcaccctgacaatcagctcccttcaggccgaggacgtggccgtgtactattgctggcagggcacacacttccccggcacctttggcggaggcaccaaggtggaaatcaagacgcgtatccagaaccctgatcctgccgtgtaccagctgcgggatagcaagagcagcgacaagagcgtgtgtctgttcaccgacttcgacagccagaccaacgtgtcccagagcaaggactccgacgtgtacatcaccgataagtgcgtgctggacatgcggagcatggacttcaagagcaactccgccgtggcctggtccaacaagtccgatttcgcctgcgccaacgccttcaacaacagcattatccccgaggacacattcttcccaagccccgagagcagcgactccaccgaccacgtgaagcccaaagagacagagaacaccaagcagcccagcaagagctgccacaagcccaaggccatcgtgcacaccgagaaagtgaacatgatgagcctgaccgtgctgggcctgcggatgctgttcgccaaaaccgtggccgtgaacttcctgctgaccgccaagctgttcttcctc

SEQ ID NO: 7417 - DNA, 2592 bp, synthetic construct
  source 1..2592: mol_type = other DNA
atggccttaccagtgaccgccttgctcctgccgctggccttgctgctccacgccgccaggccggaagtgcagctggttgaatctggcggaggactggttcagcctggcggatctctgagactgtcttgtgccgccagcggcttcagcttcagcgacttttggatgagctgggtccgacaggcccctggcaaaggacttgaatgggtcgccacaatcagccaggccggcagcgagaaggactacgtggactctgtgaagggcagattcaccatcagccgggacaacgccaagaagtccctgtacctccagatgaacagcctgagagccgaggacaccgccgtgtactattgtgcctctggcgtgtacagcttcgactacagaggccagggcaccctggtcacagtctcttctggtaccggcggaggcggatctggcggcggaggtagcggtggcggaggatctgaattcgacgagcttgtgatgacccagagccccagcagcctgacagtgacagccggcgagaaagtgaccatgagctgcaagagcagccagagcctgctgaacagcggcaaccagaagaactacctgacctggtatcagcagaagcccggccagccccccaagctgctgatctactgggccagcaccagagaaagcggcgtgcccgatagattcaccggctctggcagcggcaccgacttcaccctgacaatcagcagcgtgcaggccgaggacctggccgtgtactactgccagaacgactacagctaccccctgaccttcggagccggcaccaagctggaaatcaagctcgaggacctgaagaacgtgttcccacctgaggtggccgtgttcgagcctagcgaggccgagatcagccacacccagaaagccaccctcgtgtgcctggctaccggcttctaccccgaccatgtggaactgtcttggtgggtcaacggcaaagaggtgcacagcggcgtgtgtaccgacccccagccactgaaagaacagcccgccctgaacgacagccggtactgcctgagcagcagactgagagtgtccgccaccttctggcagaacccccggaaccacttcagatgccaggtgcagttctacggcctgagcgagaacgacgagtggacccaggacagagccaagcccgtgacccagatcgtgtctgccgaagcctggggcagagccgatgatgtgattaagatccactggcaggaaaagaagtccaacaccatcctgggcagccaggaaggcaacaccatgaagaccaacgacacctacatgaagttcagctggctgaccgtgcccgagaagtccctggacaaagaacacagatgcatcgtgcggcacgaaaacaacaagaacggcgtggaccaggaaatcatcttcccacccatcaagaccgatgtgattacaatggaccccaaggacaactgctccaaggacgccaacgataccctgctgctccagctgaccaacaccagcgcctactacatgtacttgttgctgctgctgaagtccgtggtgtacttcgccatcatcacatgctgcctgctgcggagaaccgccttctgctgcaacggcgagaagtctagggccaagcgatctggatctggagcaacaaacttctcactactcaaacaagcaggtgacgtggaggagaatcccgggcctactagtatggactggatttggcgcatccttttccttgtcggcgctgctaccggcgcgcattccttcgaagaagtgcagctgctggaacagtctggcgccgaacttgtgcggcctggcaccagcgtgaagatcagctgtaaagccagcggctacgccttcaccaactactggctgggctgggtcaagcagaggcctggacacggcctggaatggatcggcgacatctttcccggctccggcaacatccactacaacgagaagttcaagggcaaggccaccctgaccgccgacaagtctagcagcaccgcctacatgcagctgtccagcctgacctttgaggacagcgccgtgtatttctgtgcccggctgcggaactgggacgagcccatggattattggggccagggcaccaccgtgaccgtgtctagtacgcgtatccagaaccctgatcctgccgtgtaccagctgcgggatagcaagagcagcgacaagagcgtgtgtctgttcaccgacttcgacagccagaccaacgtgtcccagagcaaggactccgacgtgtacatcaccgataagtgcgtgctggacatgcggagcatggacttcaagagcaactccgccgtggcctggtccaacaagtccgatttcgcctgcgccaacgccttcaacaacagcattatccccgaggacacattcttcccaagccccgagagcagcgactccaccgaccacgtgaagcccaaagagacagagaacaccaagcagcccagcaagagctgccacaagcccaaggccatcgtgcacaccgagaaagtgaacatgatgagcctgaccgtgctgggcctgcggatgctgttcgccaaaaccgtggccgtgaacttcctgctgaccgccaagctgttcttcctc

SEQ ID NO: 7418 - DNA, 2595 bp, synthetic construct
  source 1..2595: mol_type = other DNA
atggccttaccagtgaccgccttgctcctgccgctggccttgctgctccacgccgccaggccggaagtgcagctggttgaatctggcggaggactggttcagcctggcggatctctgagactgtcttgtgccgccagcggcttcagcttcagcgacttttggatgagctgggtccgacaggcccctggcaaaggacttgaatgggtcgccacaatcagccaggccggcagcgagaaggactacgtggactctgtgaagggcagattcaccatcagccgggacaacgccaagaagtccctgtacctccagatgaacagcctgagagccgaggacaccgccgtgtactattgtgcctctggcgtgtacagcttcgactacagaggccagggcaccctggtcacagtctcttctggtaccggcggaggcggatctggcggcggaggtagcggtggcggaggatctgaattcgacgagctgcagatgacccagagccctagcagcctgtctgccagcgtgggcgacagagtgaccatcacctgtagagccagccagagcatcagcagctacctgaactggtatcagcagaagcccggccagccccccaaactgctgatctactgggccagcaccagagaaagcggcgtgcccgatagattcagcggcagcgagagcggcaccaactacaccctgaccatcagctccctgcagcccgaggacttcgccacctacttttgccagcagagcgacagcctgcccatcacctttggacagggcacccggctggacattcagctcgaggacctgaagaacgtgttcccacctgaggtggccgtgttcgagcctagcgaggccgagatcagccacacccagaaagccaccctcgtgtgcctggctaccggcttctaccccgaccatgtggaactgtcttggtgggtcaacggcaaagaggtgcacagcggcgtgtgtaccgacccccagccactgaaagaacagcccgccctgaacgacagccggtactgcctgagcagcagactgagagtgtccgccaccttctggcagaacccccggaaccacttcagatgccaggtgcagttctacggcctgagcgagaacgacgagtggacccaggacagagccaagcccgtgacccagatcgtgtctgccgaagcctggggcagagccgatgatgtgattaagatccactggcaggaaaagaagtccaacaccatcctgggcagccaggaaggcaacaccatgaagaccaacgacacctacatgaagttcagctggctgaccgtgcccgagaagtccctggacaaagaacacagatgcatcgtgcggcacgaaaacaacaagaacggcgtggaccaggaaatcatcttcccacccatcaagaccgatgtgattacaatggaccccaaggacaactgctccaaggacgccaacgataccctgctgctccagctgaccaacaccagcgcctactacatgtacttgttgctgctgctgaagtccgtggtgtacttcgccatcatcacatgctgcctgctgcggagaaccgccttctgctgcaacggcgagaagtctagggccaagcgatctggatctggagcaacaaacttctcactactcaaacaagcaggtgacgtggaggagaatcccgggcctactagtatggactggatttggcgcatccttttccttgtcggcgctgctaccggcgcgcattccttcgaagaggtgcaactgctggaatctgggggcggagtggtgcagcctggcagaagcctgagactgagctgtgccgccagcggcttcaccttcagctcctacggaatgcactgggtgcgccaggcccctggcaaaggactggaatgggtggccgtgatctcctacgacggcagcaacaagtactacgccgacagcgtgaagggccggttcaccatcagccgggacaacagcaagaacaccctgtacctgcagatgaacagcctgcgggccgaggacaccgccgtgtactactgcgccaaggatatgggctggggcagcggctggcggccttactactactacggcatggacgtgtggggccagggcaccaccgtgacagtgtcatctacgcgtatccagaaccctgatcctgccgtgtaccagctgcgggatagcaagagcagcgacaagagcgtgtgtctgttcaccgacttcgacagccagaccaacgtgtcccagagcaaggactccgacgtgtacatcaccgataagtgcgtgctggacatgcggagcatggacttcaagagcaactccgccgtggcctggtccaacaagtccgatttcgcctgcgccaacgccttcaacaacagcattatccccgaggacacattcttcccaagccccgagagcagcgactccaccgaccacgtgaagcccaaagagacagagaacaccaagcagcccagcaagagctgccacaagcccaaggccatcgtgcacaccgagaaagtgaacatgatgagcctgaccgtgctgggcctgcggatgctgttcgccaaaaccgtggccgtgaacttcctgctgaccgccaagctgttcttcctc

SEQ ID NO: 7419 - DNA, 2586 bp, synthetic construct
  source 1..2586: mol_type = other DNA
atggccttaccagtgaccgccttgctcctgccgctggccttgctgctccacgccgccaggccggaagtgcagctggttgaatctggcggaggactggttcagcctggcggatctctgagactgtcttgtgccgccagcggcttcagcttcagcgacttttggatgagctgggtccgacaggcccctggcaaaggacttgaatgggtcgccacaatcagccaggccggcagcgagaaggactacgtggactctgtgaagggcagattcaccatcagccgggacaacgccaagaagtccctgtacctccagatgaacagcctgagagccgaggacaccgccgtgtactattgtgcctctggcgtgtacagcttcgactacagaggccagggcaccctggtcacagtctcttctggtaccggcggaggcggatctggcggcggaggtagcggtggcggaggatctgaattcgacgacatccaaatgacacagagtccttctagtttgagtgcgagcgtgggggacagggtgaccattacctgcagggccagccagagcataagctcataccttaattggtaccagcaaaaaccaggtaaggcccctaagctcctgatctacgcggcctcttcacttcaatctggggtcccttcccgcttcagtggctccggcagcggcaccgacttcacgctcactatatcaagtctgcagcctgaggatctcgccacctattactgtcaacaaagttattccacccctttcacctttggaccgggcacgaaagtggatattaagctcgaggacctgaagaacgtgttcccacctgaggtggccgtgttcgagcctagcgaggccgagatcagccacacccagaaagccaccctcgtgtgcctggctaccggcttctaccccgaccatgtggaactgtcttggtgggtcaacggcaaagaggtgcacagcggcgtgtgtaccgacccccagccactgaaagaacagcccgccctgaacgacagccggtactgcctgagcagcagactgagagtgtccgccaccttctggcagaacccccggaaccacttcagatgccaggtgcagttctacggcctgagcgagaacgacgagtggacccaggacagagccaagcccgtgacccagatcgtgtctgccgaagcctggggcagagccgatgatgtgattaagatccactggcaggaaaagaagtccaacaccatcctgggcagccaggaaggcaacaccatgaagaccaacgacacctacatgaagttcagctggctgaccgtgcccgagaagtccctggacaaagaacacagatgcatcgtgcggcacgaaaacaacaagaacggcgtggaccaggaaatcatcttcccacccatcaagaccgatgtgattacaatggaccccaaggacaactgctccaaggacgccaacgataccctgctgctccagctgaccaacaccagcgcctactacatgtacttgttgctgctgctgaagtccgtggtgtacttcgccatcatcacatgctgcctgctgcggagaaccgccttctgctgcaacggcgagaagtctagggccaagcgatctggatctggagcaacaaacttctcactactcaaacaagcaggtgacgtggaggagaatcccgggcctactagtatggactggatttggcgcatccttttccttgtcggcgctgctaccggcgcgcattccttcgaagtgcacgaggtccagcttgtgcagtccggggcagaggtcaagaagcctggttctagcgtaaaagtgagttgcaaagcctcaggtgggacattttcatcctacgcgatcagttgggttagacaggctcctggtcaagggctggaatggatgggcggaattattccaatcttcggaacagcgaattacgcgcagaagttccagggtagagtaaccatcactgctgacaagtccacctccaccgcatacatggaattgtctagtctccggagcgaggatacggcggtgtattattgtgctacgttcgccctgtttggcttccgcgaacaggctttcgacatctgggggcagggcacgacagtcacggttagtagtacgcgtatccagaaccctgatcctgccgtgtaccagctgcgggatagcaagagcagcgacaagagcgtgtgtctgttcaccgacttcgacagccagaccaacgtgtcccagagcaaggactccgacgtgtacatcaccgataagtgcgtgctggacatgcggagcatggacttcaagagcaactccgccgtggcctggtccaacaagtccgatttcgcctgcgccaacgccttcaacaacagcattatccccgaggacacattcttcccaagccccgagagcagcgactccaccgaccacgtgaagcccaaagagacagagaacaccaagcagcccagcaagagctgccacaagcccaaggccatcgtgcacaccgagaaagtgaacatgatgagcctgaccgtgctgggcctgcggatgctgttcgccaaaaccgtggccgtgaacttcctgctgaccgccaagctgttcttcctc

SEQ ID NO: 7420 - DNA, 2580 bp, synthetic construct
  source 1..2580: mol_type = other DNA
atggccttaccagtgaccgccttgctcctgccgctggccttgctgctccacgccgccaggccggaagtgcagctggttgaatctggcggaggactggttcagcctggcggatctctgagactgtcttgtgccgccagcggcttcagcttcagcgacttttggatgagctgggtccgacaggcccctggcaaaggacttgaatgggtcgccacaatcagccaggccggcagcgagaaggactacgtggactctgtgaagggcagattcaccatcagccgggacaacgccaagaagtccctgtacctccagatgaacagcctgagagccgaggacaccgccgtgtactattgtgcctctggcgtgtacagcttcgactacagaggccagggcaccctggtcacagtctcttctggtaccggcggaggcggatctggcggcggaggtagcggtggcggaggatctgaattcgacatcgtgctgacccagagccctctgagcctggccgtgtctctgggacagcctgccatcatcagctgcaaggccagccagagcgtgtcctttgccggcacctctctgatgcactggtatcaccagaagcccggccagcagcccagactgctgatctacagagccagcaacctggaagccggcgtgcccgatagattttccggcagcggcagcaagaccgacttcaccctgaccatcagccccgtggaagccgaagatgccgccacctactactgccagcagagcagagagtacccctacaccttcggcggaggcaccaagctggaaatcaagaggctcgaggacctgaagaacgtgttcccacctgaggtggccgtgttcgagcctagcgaggccgagatcagccacacccagaaagccaccctcgtgtgcctggctaccggcttctaccccgaccatgtggaactgtcttggtgggtcaacggcaaagaggtgcacagcggcgtgtgtaccgacccccagccactgaaagaacagcccgccctgaacgacagccggtactgcctgagcagcagactgagagtgtccgccaccttctggcagaacccccggaaccacttcagatgccaggtgcagttctacggcctgagcgagaacgacgagtggacccaggacagagccaagcccgtgacccagatcgtgtctgccgaagcctggggcagagccgatgatgtgattaagatccactggcaggaaaagaagtccaacaccatcctgggcagccaggaaggcaacaccatgaagaccaacgacacctacatgaagttcagctggctgaccgtgcccgagaagtccctggacaaagaacacagatgcatcgtgcggcacgaaaacaacaagaacggcgtggaccaggaaatcatcttcccacccatcaagaccgatgtgattacaatggaccccaaggacaactgctccaaggacgccaacgataccctgctgctccagctgaccaacaccagcgcctactacatgtacttgttgctgctgctgaagtccgtggtgtacttcgccatcatcacatgctgcctgctgcggagaaccgccttctgctgcaacggcgagaagtctagggccaagcgatctggatctggagcaacaaacttctcactactcaaacaagcaggtgacgtggaggagaatcccgggcctactagtatggactggatttggcgcatccttttccttgtcggcgctgctaccggcgcgcattccttcgaacaggtccaactggtgcagagcggagccgaggtcgtgaagcctggcgcttccgtgaagattagctgcaaagccagcggctacacctttaccggctactttatgaactgggtcaagcagagccctggccagagcctggaatggatcggcagaatccacccctacgacggcgacaccttctacaaccagaagttccagggcaaggccaccctgacagtggacaagagcagcaacaccgcccacatggaactgctgagcctgaccagcgaggacttcgccgtgtactactgcaccagatacgacggcagccgggctatggactattggggccagggcaccaccgtgaccgtgtctagtacgcgtatccagaaccctgatcctgccgtgtaccagctgcgggatagcaagagcagcgacaagagcgtgtgtctgttcaccgacttcgacagccagaccaacgtgtcccagagcaaggactccgacgtgtacatcaccgataagtgcgtgctggacatgcggagcatggacttcaagagcaactccgccgtggcctggtccaacaagtccgatttcgcctgcgccaacgccttcaacaacagcattatccccgaggacacattcttcccaagccccgagagcagcgactccaccgaccacgtgaagcccaaagagacagagaacaccaagcagcccagcaagagctgccacaagcccaaggccatcgtgcacaccgagaaagtgaacatgatgagcctgaccgtgctgggcctgcggatgctgttcgccaaaaccgtggccgtgaacttcctgctgaccgccaagctgttcttcctc

SEQ ID NO: 7421 - DNA, 2571 bp, synthetic construct
  source 1..2571: mol_type = other DNA
atggccttaccagtgaccgccttgctcctgccgctggccttgctgctccacgccgccaggccggaagtgcagctggttgaatctggcggaggactggttcagcctggcggatctctgagactgtcttgtgccgccagcggcttcagcttcagcgacttttggatgagctgggtccgacaggcccctggcaaaggacttgaatgggtcgccacaatcagccaggccggcagcgagaaggactacgtggactctgtgaagggcagattcaccatcagccgggacaacgccaagaagtccctgtacctccagatgaacagcctgagagccgaggacaccgccgtgtactattgtgcctctggcgtgtacagcttcgactacagaggccagggcaccctggtcacagtctcttctggtaccggcggaggcggatctggcggcggaggtagcggtggcggaggatctgaattcgacgacgttgtgatgacccagacccccctgagcctgcctgtgacacctggcgaacctgccagcatcagctgtcggagcagccagagcctggtgcacagaaacggcaacacctacctgcactggtatctccagaagcccggccagagccccaagctgctgatccacaaggtgtccaacagattcagcggcgtgcccgacagattctccggcagcggctctggcaccgacttcaccctgaagatcagccgggtggaagccgaggacctgggcgtgtacttctgtagccagagcacccatgtgccccccctgacatttggagccggcaccaagctggaactgaagctcgaggacctgaagaacgtgttcccacctgaggtggccgtgttcgagcctagcgaggccgagatcagccacacccagaaagccaccctcgtgtgcctggctaccggcttctaccccgaccatgtggaactgtcttggtgggtcaacggcaaagaggtgcacagcggcgtgtgtaccgacccccagccactgaaagaacagcccgccctgaacgacagccggtactgcctgagcagcagactgagagtgtccgccaccttctggcagaacccccggaaccacttcagatgccaggtgcagttctacggcctgagcgagaacgacgagtggacccaggacagagccaagcccgtgacccagatcgtgtctgccgaagcctggggcagagccgatgatgtgattaagatccactggcaggaaaagaagtccaacaccatcctgggcagccaggaaggcaacaccatgaagaccaacgacacctacatgaagttcagctggctgaccgtgcccgagaagtccctggacaaagaacacagatgcatcgtgcggcacgaaaacaacaagaacggcgtggaccaggaaatcatcttcccacccatcaagaccgatgtgattacaatggaccccaaggacaactgctccaaggacgccaacgataccctgctgctccagctgaccaacaccagcgcctactacatgtacttgttgctgctgctgaagtccgtggtgtacttcgccatcatcacatgctgcctgctgcggagaaccgccttctgctgcaacggcgagaagtctagggccaagcgatctggatctggagcaacaaacttctcactactcaaacaagcaggtgacgtggaggagaatcccgggcctactagtatggactggatttggcgcatccttttccttgtcggcgctgctaccggcgcgcattccttcgaagaagtgcagctggtgcagtctggcgctgaggtggaaaagcctggggccagcgtgaagattagctgcaaggccagcggcagcagcttcaccggctacaacatgaactgggtgcgccagaacatcggcaagagcctggaatggatcggagccatcgacccctactacggcggcaccagctacaaccagaagttcaagggcagagccaccctgaccgtggacaagagcaccagcaccgcctacatgcacctgaagtccctgcggagcgaggacaccgccgtgtactactgtgtgtccggcatggaatattggggccagggcaccagcgtgaccgtgtctagtacgcgtatccagaaccctgatcctgccgtgtaccagctgcgggatagcaagagcagcgacaagagcgtgtgtctgttcaccgacttcgacagccagaccaacgtgtcccagagcaaggactccgacgtgtacatcaccgataagtgcgtgctggacatgcggagcatggacttcaagagcaactccgccgtggcctggtccaacaagtccgatttcgcctgcgccaacgccttcaacaacagcattatccccgaggacacattcttcccaagccccgagagcagcgactccaccgaccacgtgaagcccaaagagacagagaacaccaagcagcccagcaagagctgccacaagcccaaggccatcgtgcacaccgagaaagtgaacatgatgagcctgaccgtgctgggcctgcggatgctgttcgccaaaaccgtggccgtgaacttcctgctgaccgccaagctgttcttcctc

SEQ ID NO: 7422 - DNA, 2565 bp, synthetic construct
  source 1..2565: mol_type = other DNA
atggccttaccagtgaccgccttgctcctgccgctggccttgctgctccacgccgccaggccggaagtgcagctggttgaatctggcggaggactggttcagcctggcggatctctgagactgtcttgtgccgccagcggcttcagcttcagcgacttttggatgagctgggtccgacaggcccctggcaaaggacttgaatgggtcgccacaatcagccaggccggcagcgagaaggactacgtggactctgtgaagggcagattcaccatcagccgggacaacgccaagaagtccctgtacctccagatgaacagcctgagagccgaggacaccgccgtgtactattgtgcctctggcgtgtacagcttcgactacagaggccagggcaccctggtcacagtctcttctggtaccggcggaggcggatctggcggcggaggtagcggtggcggaggatctgaattcgacgagatcgtgatgacccagacccctgccaccctgtctgtgtctgccggcgagagagtgaccattacctgcaaggccagccagagcgtgtccaacgacgtgacctggtatcagcagaagcccggccaggcccccagactgctgatctacagcgccagcaacagatacagcggcgtgcccgccagattttccggcagcggctacggcaccgagttcaccttcaccatcagcagcgtgcagagcgaggacttcgccgtgtacttctgtcagcaagactacagcagcttcggccagggcaccaagctggaaatcaagaggctcgaggacctgaagaacgtgttcccacctgaggtggccgtgttcgagcctagcgaggccgagatcagccacacccagaaagccaccctcgtgtgcctggctaccggcttctaccccgaccatgtggaactgtcttggtgggtcaacggcaaagaggtgcacagcggcgtgtgtaccgacccccagccactgaaagaacagcccgccctgaacgacagccggtactgcctgagcagcagactgagagtgtccgccaccttctggcagaacccccggaaccacttcagatgccaggtgcagttctacggcctgagcgagaacgacgagtggacccaggacagagccaagcccgtgacccagatcgtgtctgccgaagcctggggcagagccgatgatgtgattaagatccactggcaggaaaagaagtccaacaccatcctgggcagccaggaaggcaacaccatgaagaccaacgacacctacatgaagttcagctggctgaccgtgcccgagaagtccctggacaaagaacacagatgcatcgtgcggcacgaaaacaacaagaacggcgtggaccaggaaatcatcttcccacccatcaagaccgatgtgattacaatggaccccaaggacaactgctccaaggacgccaacgataccctgctgctccagctgaccaacaccagcgcctactacatgtacttgttgctgctgctgaagtccgtggtgtacttcgccatcatcacatgctgcctgctgcggagaaccgccttctgctgcaacggcgagaagtctagggccaagcgatctggatctggagcaacaaacttctcactactcaaacaagcaggtgacgtggaggagaatcccgggcctactagtatggactggatttggcgcatccttttccttgtcggcgctgctaccggcgcgcattccttcgaacaggtgcagctggtggaatctggacctggcgtggtgcagcctggcagaagcctgagaatcagctgtgccgtgtccggcttcagcgtgaccaactacggcgtgcactgggtgcgccagccacctggaaaaggactggaatggctgggcgtgatctgggctggcggcatcaccaactacaacagcgccttcatgtcccggctgaccatctccaaggacaacagcaagaacaccgtgtacctccagatgaacagcctgcgggccgaggacaccgccatgtactactgtgcttccagaggcggccactacggctacgccctggattattggggccagggaaccctcgtgaccgtgtcctctacgcgtatccagaaccctgatcctgccgtgtaccagctgcgggatagcaagagcagcgacaagagcgtgtgtctgttcaccgacttcgacagccagaccaacgtgtcccagagcaaggactccgacgtgtacatcaccgataagtgcgtgctggacatgcggagcatggacttcaagagcaactccgccgtggcctggtccaacaagtccgatttcgcctgcgccaacgccttcaacaacagcattatccccgaggacacattcttcccaagccccgagagcagcgactccaccgaccacgtgaagcccaaagagacagagaacaccaagcagcccagcaagagctgccacaagcccaaggccatcgtgcacaccgagaaagtgaacatgatgagcctgaccgtgctgggcctgcggatgctgttcgccaaaaccgtggccgtgaacttcctgctgaccgccaagctgttcttcctc

SEQ ID NO: 7423 - DNA, 2571 bp, synthetic construct
  source 1..2571: mol_type = other DNA
atggccttaccagtgaccgccttgctcctgccgctggccttgctgctccacgccgccaggccggaagtgcagctggttgaatctggcggaggactggttcagcctggcggatctctgagactgtcttgtgccgccagcggcttcagcttcagcgacttttggatgagctgggtccgacaggcccctggcaaaggacttgaatgggtcgccacaatcagccaggccggcagcgagaaggactacgtggactctgtgaagggcagattcaccatcagccgggacaacgccaagaagtccctgtacctccagatgaacagcctgagagccgaggacaccgccgtgtactattgtgcctctggcgtgtacagcttcgactacagaggccagggcaccctggtcacagtctcttctggtaccggcggaggcggatctggcggcggaggtagcggtggcggaggatctgaattcgacatccagatgacccagaccgccagcagcctgcctgcctctctgggcgacagagtgaccatctcctgtagcgccagccaggacatcagcaactacctgaactggtatcagcagaaacccgacggcaccgtgaagctgctgatcttctacagcagcaacctgcacagcggcgtgcccagcagattttctggcggcggaagcggcaccgactacagcctgaccatcagcaatctggaacccgaggacattgccacctacttttgccaccagtacagcaagctgccctggacctttggcggaggcaccaagctggaaatcaagagactcgaggacctgaagaacgtgttcccacctgaggtggccgtgttcgagcctagcgaggccgagatcagccacacccagaaagccaccctcgtgtgcctggctaccggcttctaccccgaccatgtggaactgtcttggtgggtcaacggcaaagaggtgcacagcggcgtgtgtaccgacccccagccactgaaagaacagcccgccctgaacgacagccggtactgcctgagcagcagactgagagtgtccgccaccttctggcagaacccccggaaccacttcagatgccaggtgcagttctacggcctgagcgagaacgacgagtggacccaggacagagccaagcccgtgacccagatcgtgtctgccgaagcctggggcagagccgatgatgtgattaagatccactggcaggaaaagaagtccaacaccatcctgggcagccaggaaggcaacaccatgaagaccaacgacacctacatgaagttcagctggctgaccgtgcccgagaagtccctggacaaagaacacagatgcatcgtgcggcacgaaaacaacaagaacggcgtggaccaggaaatcatcttcccacccatcaagaccgatgtgattacaatggaccccaaggacaactgctccaaggacgccaacgataccctgctgctccagctgaccaacaccagcgcctactacatgtacttgttgctgctgctgaagtccgtggtgtacttcgccatcatcacatgctgcctgctgcggagaaccgccttctgctgcaacggcgagaagtctagggccaagcgatctggatctggagcaacaaacttctcactactcaaacaagcaggtgacgtggaggagaatcccgggcctactagtatggactggatttggcgcatccttttccttgtcggcgctgctaccggcgcgcattccttcgaagaagtgaccctggtggaaagcggcggagacttcgtgaagcctggcggctctctgaaggtgtcctgtgccgccagcggcttcgcctttagccactacgccatgagctgggtgcgccagacccctgccaagagactggaatgggtggcctacatcagcagcggcggctccggcacctactactccgatagcgtgaagggccggttcaccatcagccgggacaacgccaagaacaccctgtacctccagatgcggagcctgcggagcgaggacagcgccatgtatttctgcaccagagtgaagctgggcacctattacttcgactcttggggccagggcaccaccctgaccgtgtcatctacgcgtatccagaaccctgatcctgccgtgtaccagctgcgggatagcaagagcagcgacaagagcgtgtgtctgttcaccgacttcgacagccagaccaacgtgtcccagagcaaggactccgacgtgtacatcaccgataagtgcgtgctggacatgcggagcatggacttcaagagcaactccgccgtggcctggtccaacaagtccgatttcgcctgcgccaacgccttcaacaacagcattatccccgaggacacattcttcccaagccccgagagcagcgactccaccgaccacgtgaagcccaaagagacagagaacaccaagcagcccagcaagagctgccacaagcccaaggccatcgtgcacaccgagaaagtgaacatgatgagcctgaccgtgctgggcctgcggatgctgttcgccaaaaccgtggccgtgaacttcctgctgaccgccaagctgttcttcctc

SEQ ID NO: 7424 - DNA, 2577 bp, synthetic construct
  source 1..2577: mol_type = other DNA
atggccttaccagtgaccgccttgctcctgccgctggccttgctgctccacgccgccaggccggaagtgcagctggttgaatctggcggaggactggttcagcctggcggatctctgagactgtcttgtgccgccagcggcttcagcttcagcgacttttggatgagctgggtccgacaggcccctggcaaaggacttgaatgggtcgccacaatcagccaggccggcagcgagaaggactacgtggactctgtgaagggcagattcaccatcagccgggacaacgccaagaagtccctgtacctccagatgaacagcctgagagccgaggacaccgccgtgtactattgtgcctctggcgtgtacagcttcgactacagaggccagggcaccctggtcacagtctcttctggtaccggcggaggcggatctggcggcggaggtagcggtggcggaggatctgaattccagttcgtgctgacccagagcccttctgcctctgctgccctgggagcctctgccaagctgacctgtacactgagcagcgcccacaagacctacaccatcgactggtatcagcagcagaagggaaaggcccccagatacctgatccaagtgaagtccgacggcacctacacaaaggccaccggcgtgcccgatagattcagcggcagtagcagcggagccgatagatacctgattatccccagcgtgcaggccgacgacgaggccgattactactgcggcaccgattacaccggcggctacgtgttcggcggaggcacacaactgaccgtgacactcgaggacctgaagaacgtgttcccacctgaggtggccgtgttcgagcctagcgaggccgagatcagccacacccagaaagccaccctcgtgtgcctggctaccggcttctaccccgaccatgtggaactgtcttggtgggtcaacggcaaagaggtgcacagcggcgtgtgtaccgacccccagccactgaaagaacagcccgccctgaacgacagccggtactgcctgagcagcagactgagagtgtccgccaccttctggcagaacccccggaaccacttcagatgccaggtgcagttctacggcctgagcgagaacgacgagtggacccaggacagagccaagcccgtgacccagatcgtgtctgccgaagcctggggcagagccgatgatgtgattaagatccactggcaggaaaagaagtccaacaccatcctgggcagccaggaaggcaacaccatgaagaccaacgacacctacatgaagttcagctggctgaccgtgcccgagaagtccctggacaaagaacacagatgcatcgtgcggcacgaaaacaacaagaacggcgtggaccaggaaatcatcttcccacccatcaagaccgatgtgattacaatggaccccaaggacaactgctccaaggacgccaacgataccctgctgctccagctgaccaacaccagcgcctactacatgtacttgttgctgctgctgaagtccgtggtgtacttcgccatcatcacatgctgcctgctgcggagaaccgccttctgctgcaacggcgagaagtctagggccaagcgatctggatctggagcaacaaacttctcactactcaaacaagcaggtgacgtggaggagaatcccgggcctactagtatggactggatttggcgcatccttttccttgtcggcgctgctaccggcgcgcattccttcgaagagcaactgaaagagtctggcggcggactgttcaagcccaccgataccctgaccctgacctgcaccgtgtccggcttcagcctgagctactacggcgtgaactgggtgcgccaggcccctggcaatggcctggaatggatcggcacaatcggcggcagcggcgacacctactatgcctcttgggccaagtccagaagcaccatcatcagaaacaccaacgagaacaccgtgaccctgaagatgaccagcctgacagccgccgacaccgccacctacttttgcgtcagatacgccaacatcggctacgagtatttcaacgtgtggggacccggcaccctcgtgaccgtgtcatctacgcgtatccagaaccctgatcctgccgtgtaccagctgcgggatagcaagagcagcgacaagagcgtgtgtctgttcaccgacttcgacagccagaccaacgtgtcccagagcaaggactccgacgtgtacatcaccgataagtgcgtgctggacatgcggagcatggacttcaagagcaactccgccgtggcctggtccaacaagtccgatttcgcctgcgccaacgccttcaacaacagcattatccccgaggacacattcttcccaagccccgagagcagcgactccaccgaccacgtgaagcccaaagagacagagaacaccaagcagcccagcaagagctgccacaagcccaaggccatcgtgcacaccgagaaagtgaacatgatgagcctgaccgtgctgggcctgcggatgctgttcgccaaaaccgtggccgtgaacttcctgctgaccgccaagctgttcttcctc

SEQ ID NO: 7425 - DNA, 2592 bp, synthetic construct
  source 1..2592: mol_type = other DNA
atggccttaccagtgaccgccttgctcctgccgctggccttgctgctccacgccgccaggccggaagtgcagctggttgaatctggcggaggactggttcagcctggcggatctctgagactgtcttgtgccgccagcggcttcagcttcagcgacttttggatgagctgggtccgacaggcccctggcaaaggacttgaatgggtcgccacaatcagccaggccggcagcgagaaggactacgtggactctgtgaagggcagattcaccatcagccgggacaacgccaagaagtccctgtacctccagatgaacagcctgagagccgaggacaccgccgtgtactattgtgcctctggcgtgtacagcttcgactacagaggccagggcaccctggtcacagtctcttctggtaccggcggaggcggatctggcggcggaggtagcggtggcggaggatctgaattccagttcgtgctgacccagagcccttctgtgtctgccgccctgggagcctctgccaagctgacctgtacactgagcagcgcccacaagacctacaccatcgactggtatcagcagcagcagggcgaggcccccagatacctgatgcaagtgaagtccgacggcagctacaccaagggcaccggcgtgcccgatagattcagcggcagtagcagcggagccgatagatacctgattatccccagcgtgcaggccgacgacgaggccggatatgtgtgcggcgctgacgacaatggcggctacgtgttcggcggaggcacccaactgacagtgacactcgaggacctgaagaacgtgttcccacctgaggtggccgtgttcgagcctagcgaggccgagatcagccacacccagaaagccaccctcgtgtgcctggctaccggcttctaccccgaccatgtggaactgtcttggtgggtcaacggcaaagaggtgcacagcggcgtgtgtaccgacccccagccactgaaagaacagcccgccctgaacgacagccggtactgcctgagcagcagactgagagtgtccgccaccttctggcagaacccccggaaccacttcagatgccaggtgcagttctacggcctgagcgagaacgacgagtggacccaggacagagccaagcccgtgacccagatcgtgtctgccgaagcctggggcagagccgatgatgtgattaagatccactggcaggaaaagaagtccaacaccatcctgggcagccaggaaggcaacaccatgaagaccaacgacacctacatgaagttcagctggctgaccgtgcccgagaagtccctggacaaagaacacagatgcatcgtgcggcacgaaaacaacaagaacggcgtggaccaggaaatcatcttcccacccatcaagaccgatgtgattacaatggaccccaaggacaactgctccaaggacgccaacgataccctgctgctccagctgaccaacaccagcgcctactacatgtacttgttgctgctgctgaagtccgtggtgtacttcgccatcatcacatgctgcctgctgcggagaaccgccttctgctgcaacggcgagaagtctagggccaagcgatctggatctggagcaacaaacttctcactactcaaacaagcaggtgacgtggaggagaatcccgggcctactagtatggactggatttggcgcatccttttccttgtcggcgctgctaccggcgcgcattccttcgaacagagcgtgaaagagtctgagggcggcctgttcaagcccaccgataccctgaccctgacctgcaccgtgtccggcttcagcctgagcagacacgccctgacatgggtgcgccaggcccctggaaatggcctggaatggatcggagccatcgacaacgccggcaccacctactatgcctcttgggccaagtccagaagcaccatcacccggaacaccgacctgcacaccgtgaccctgaagatgaccagcctgaccgccagcgacaccgccacctacttttgcgccagagtgttctacgacatcaacagcggctactacctggacggcatggacctgtggggacctggcacacttgtgaccgtgtccagcacgcgtatccagaaccctgatcctgccgtgtaccagctgcgggatagcaagagcagcgacaagagcgtgtgtctgttcaccgacttcgacagccagaccaacgtgtcccagagcaaggactccgacgtgtacatcaccgataagtgcgtgctggacatgcggagcatggacttcaagagcaactccgccgtggcctggtccaacaagtccgatttcgcctgcgccaacgccttcaacaacagcattatccccgaggacacattcttcccaagccccgagagcagcgactccaccgaccacgtgaagcccaaagagacagagaacaccaagcagcccagcaagagctgccacaagcccaaggccatcgtgcacaccgagaaagtgaacatgatgagcctgaccgtgctgggcctgcggatgctgttcgccaaaaccgtggccgtgaacttcctgctgaccgccaagctgttcttcctc

SEQ ID NO: 7426 - DNA, 2574 bp, synthetic construct
  source 1..2574: mol_type = other DNA
atggccttaccagtgaccgccttgctcctgccgctggccttgctgctccacgccgccaggccggaagtgcagctggttgaatctggcggaggactggttcagcctggcggatctctgagactgtcttgtgccgccagcggcttcagcttcagcgacttttggatgagctgggtccgacaggcccctggcaaaggacttgaatgggtcgccacaatcagccaggccggcagcgagaaggactacgtggactctgtgaagggcagattcaccatcagccgggacaacgccaagaagtccctgtacctccagatgaacagcctgagagccgaggacaccgccgtgtactattgtgcctctggcgtgtacagcttcgactacagaggccagggcaccctggtcacagtctcttctggtaccggcggaggcggatctggcggcggaggtagcggtggcggaggatctgaattcgacatccagatgacccagagccccagcagcctgtctgccagcgtgggcgacagagtgaccatcacctgtagagccagccagggcatcagctcttggctggcctggtatcagcagaagcccgagaaggcccccaagagcctgatctacgccgcctctagtctccagagcggcgtgcccagcagattttctggcagcggctccggcaccgacttcaccctgacaatcagctccctccagcccgaggacttcgccacctactactgccagcagtacaacagctacccccccacctttggcggaggcaccaaggtggaaatcaagctcgaggacctgaagaacgtgttcccacctgaggtggccgtgttcgagcctagcgaggccgagatcagccacacccagaaagccaccctcgtgtgcctggctaccggcttctaccccgaccatgtggaactgtcttggtgggtcaacggcaaagaggtgcacagcggcgtgtgtaccgacccccagccactgaaagaacagcccgccctgaacgacagccggtactgcctgagcagcagactgagagtgtccgccaccttctggcagaacccccggaaccacttcagatgccaggtgcagttctacggcctgagcgagaacgacgagtggacccaggacagagccaagcccgtgacccagatcgtgtctgccgaagcctggggcagagccgatgatgtgattaagatccactggcaggaaaagaagtccaacaccatcctgggcagccaggaaggcaacaccatgaagaccaacgacacctacatgaagttcagctggctgaccgtgcccgagaagtccctggacaaagaacacagatgcatcgtgcggcacgaaaacaacaagaacggcgtggaccaggaaatcatcttcccacccatcaagaccgatgtgattacaatggaccccaaggacaactgctccaaggacgccaacgataccctgctgctccagctgaccaacaccagcgcctactacatgtacttgttgctgctgctgaagtccgtggtgtacttcgccatcatcacatgctgcctgctgcggagaaccgccttctgctgcaacggcgagaagtctagggccaagcgatctggatctggagcaacaaacttctcactactcaaacaagcaggtgacgtggaggagaatcccgggcctactagtatggactggatttggcgcatccttttccttgtcggcgctgctaccggcgcgcattccttcgaagaagtgcaactggtggaatcaggcggcggactggtgcagcctggcgagtctctgagactgagctgtgtggcctccggcttcaccttcagccggtacaagatgaactgggtgcgccaggcccctggcaagggactggaatgggtgtcctacatcagccgcagcggcagagacatctactacgccgacagcgtgaagggccggttcaccatcagcagagacaacgccaagaacagcctgtacctccagatgaactccctgcgggacgaggacaccgccgtgtactactgtgccggaaccgtgaccacctattactacttcggcatggacgtgtggggccacggcaccaccgtgacagtgtcatctacgcgtatccagaaccctgatcctgccgtgtaccagctgcgggatagcaagagcagcgacaagagcgtgtgtctgttcaccgacttcgacagccagaccaacgtgtcccagagcaaggactccgacgtgtacatcaccgataagtgcgtgctggacatgcggagcatggacttcaagagcaactccgccgtggcctggtccaacaagtccgatttcgcctgcgccaacgccttcaacaacagcattatccccgaggacacattcttcccaagccccgagagcagcgactccaccgaccacgtgaagcccaaagagacagagaacaccaagcagcccagcaagagctgccacaagcccaaggccatcgtgcacaccgagaaagtgaacatgatgagcctgaccgtgctgggcctgcggatgctgttcgccaaaaccgtggccgtgaacttcctgctgaccgccaagctgttcttcctc

SEQ ID NO: 7427 - DNA, 2577 bp, synthetic construct
  source 1..2577: mol_type = other DNA
atggccttaccagtgaccgccttgctcctgccgctggccttgctgctccacgccgccaggccggaagtgcagctggttgaatctggcggaggactggttcagcctggcggatctctgagactgtcttgtgccgccagcggcttcagcttcagcgacttttggatgagctgggtccgacaggcccctggcaaaggacttgaatgggtcgccacaatcagccaggccggcagcgagaaggactacgtggactctgtgaagggcagattcaccatcagccgggacaacgccaagaagtccctgtacctccagatgaacagcctgagagccgaggacaccgccgtgtactattgtgcctctggcgtgtacagcttcgactacagaggccagggcaccctggtcacagtctcttctggtaccggcggaggcggatctggcggcggaggtagcggtggcggaggatctgaattcgacatccagatgacccagagccccagcagcctgtctgccagcgtgggcgacagagtgaccatcacctgtagagccagccagggcatcagctcttggctggcctggtatcagcagaagcccgagaaggcccccaagagcctgatctacgccgcctctagtctccagagcggcgtgcccagcagattttctggcagcggctccggcaccgacttcaccctgacaatcagctccctccagcccgaggacttcgccacctactactgccagcagtacaacagctaccctcccacctttggcggaggcaccaaggtggaaatcaagctcgaggacctgaagaacgtgttcccacctgaggtggccgtgttcgagcctagcgaggccgagatcagccacacccagaaagccaccctcgtgtgcctggctaccggcttctaccccgaccatgtggaactgtcttggtgggtcaacggcaaagaggtgcacagcggcgtgtgtaccgacccccagccactgaaagaacagcccgccctgaacgacagccggtactgcctgagcagcagactgagagtgtccgccaccttctggcagaacccccggaaccacttcagatgccaggtgcagttctacggcctgagcgagaacgacgagtggacccaggacagagccaagcccgtgacccagatcgtgtctgccgaagcctggggcagagccgatgatgtgattaagatccactggcaggaaaagaagtccaacaccatcctgggcagccaggaaggcaacaccatgaagaccaacgacacctacatgaagttcagctggctgaccgtgcccgagaagtccctggacaaagaacacagatgcatcgtgcggcacgaaaacaacaagaacggcgtggaccaggaaatcatcttcccacccatcaagaccgatgtgattacaatggaccccaaggacaactgctccaaggacgccaacgataccctgctgctccagctgaccaacaccagcgcctactacatgtacttgttgctgctgctgaagtccgtggtgtacttcgccatcatcacatgctgcctgctgcggagaaccgccttctgctgcaacggcgagaagtctagggccaagcgatctggatctggagcaacaaacttctcactactcaaacaagcaggtgacgtggaggagaatcccgggcctactagtatggactggatttggcgcatccttttccttgtcggcgctgctaccggcgcgcattccttcgaagaagtgcaactggtggaatccgggggaggctctgtgcagcctggcgagtctctgagactgagctgtgtggcctccggcttcaccttcagccggtacaagatgaactgggtgcgccaggcccctggcaagggactggaatgggtgtcctacatcagccgcagcggcagagacatctactacgccgacagcgtgaagggccggttcaccatcagcagagacaacgccaagaacagcctgtacctccagatgaactccctgcgggacgaggacaccgccgtgtactactgtgccggaaccgtgaccacctattactacgacttcggcatggacgtgtggggccagggcacaaccgtgacagtgtctagcacgcgtatccagaaccctgatcctgccgtgtaccagctgcgggatagcaagagcagcgacaagagcgtgtgtctgttcaccgacttcgacagccagaccaacgtgtcccagagcaaggactccgacgtgtacatcaccgataagtgcgtgctggacatgcggagcatggacttcaagagcaactccgccgtggcctggtccaacaagtccgatttcgcctgcgccaacgccttcaacaacagcattatccccgaggacacattcttcccaagccccgagagcagcgactccaccgaccacgtgaagcccaaagagacagagaacaccaagcagcccagcaagagctgccacaagcccaaggccatcgtgcacaccgagaaagtgaacatgatgagcctgaccgtgctgggcctgcggatgctgttcgccaaaaccgtggccgtgaacttcctgctgaccgccaagctgttcttcctc

SEQ ID NO: 7428 - DNA, 2571 bp, synthetic construct
  source 1..2571: mol_type = other DNA
atggccttaccagtgaccgccttgctcctgccgctggccttgctgctccacgccgccaggccggaagtgcagctggttgaatctggcggaggactggttcagcctggcggatctctgagactgtcttgtgccgccagcggcttcagcttcagcgacttttggatgagctgggtccgacaggcccctggcaaaggacttgaatgggtcgccacaatcagccaggccggcagcgagaaggactacgtggactctgtgaagggcagattcaccatcagccgggacaacgccaagaagtccctgtacctccagatgaacagcctgagagccgaggacaccgccgtgtactattgtgcctctggcgtgtacagcttcgactacagaggccagggcaccctggtcacagtctcttctggtaccggcggaggcggatctggcggcggaggtagcggtggcggaggatctgaattccagtctgtgctgacacagcctccatctgcctctggcacacctggacagagagtgaccatcagctgtagcggcagcagaagcaacgtcggcggcaactacgtgttctggtatcagcaggtcccaggcgctacccctaagctgctgatctacagaagcaatcagcggcctagcggcgtgcccgatagatttgccggaagcaagagcggcagctctgccagccttgccatctctggactgagaagcgaggacgaggccgactactactgtgccacctgggatgatagcctgagcggcttcgtgtttggcaccggcaccaaagtgacagtgcttggtctcgaggacctgaagaacgtgttcccacctgaggtggccgtgttcgagcctagcgaggccgagatcagccacacccagaaagccaccctcgtgtgcctggctaccggcttctaccccgaccatgtggaactgtcttggtgggtcaacggcaaagaggtgcacagcggcgtgtgtaccgacccccagccactgaaagaacagcccgccctgaacgacagccggtactgcctgagcagcagactgagagtgtccgccaccttctggcagaacccccggaaccacttcagatgccaggtgcagttctacggcctgagcgagaacgacgagtggacccaggacagagccaagcccgtgacccagatcgtgtctgccgaagcctggggcagagccgatgatgtgattaagatccactggcaggaaaagaagtccaacaccatcctgggcagccaggaaggcaacaccatgaagaccaacgacacctacatgaagttcagctggctgaccgtgcccgagaagtccctggacaaagaacacagatgcatcgtgcggcacgaaaacaacaagaacggcgtggaccaggaaatcatcttcccacccatcaagaccgatgtgattacaatggaccccaaggacaactgctccaaggacgccaacgataccctgctgctccagctgaccaacaccagcgcctactacatgtacttgttgctgctgctgaagtccgtggtgtacttcgccatcatcacatgctgcctgctgcggagaaccgccttctgctgcaacggcgagaagtctagggccaagcgatctggatctggagcaacaaacttctcactactcaaacaagcaggtgacgtggaggagaatcccgggcctactagtatggactggatttggcgcatccttttccttgtcggcgctgctaccggcgcgcattccttcgaagttcagctggttgaatctggcggcggactggttaagcctggcggatctctgagactgtcttgtgccgccagcggcttcaccttcagcgattactacatgagctggatcagacaggcccctggcaaaggactggaatgggtgtcctacatcagcagcagcggctccaccatctactacgccgatagcgtgaagggcagattcaccatcagccgggacaacgccaagaacagcctgtacctccagatgaactccctgagagccgaggacaccgccgtgtactattgcgccagaggctacggcaaagcctacgatcaatggggccagggcacactggtcaccgtttcttctacgcgtatccagaaccctgatcctgccgtgtaccagctgcgggatagcaagagcagcgacaagagcgtgtgtctgttcaccgacttcgacagccagaccaacgtgtcccagagcaaggactccgacgtgtacatcaccgataagtgcgtgctggacatgcggagcatggacttcaagagcaactccgccgtggcctggtccaacaagtccgatttcgcctgcgccaacgccttcaacaacagcattatccccgaggacacattcttcccaagccccgagagcagcgactccaccgaccacgtgaagcccaaagagacagagaacaccaagcagcccagcaagagctgccacaagcccaaggccatcgtgcacaccgagaaagtgaacatgatgagcctgaccgtgctgggcctgcggatgctgttcgccaaaaccgtggccgtgaacttcctgctgaccgccaagctgttcttcctc

SEQ ID NO: 7429 - DNA, 2568 bp, synthetic construct
  source 1..2568: mol_type = other DNA
atggccttaccagtgaccgccttgctcctgccgctggccttgctgctccacgccgccaggccggaagtgcagctggttgaatctggcggaggactggttcagcctggcggatctctgagactgtcttgtgccgccagcggcttcagcttcagcgacttttggatgagctgggtccgacaggcccctggcaaaggacttgaatgggtcgccacaatcagccaggccggcagcgagaaggactacgtggactctgtgaagggcagattcaccatcagccgggacaacgccaagaagtccctgtacctccagatgaacagcctgagagccgaggacaccgccgtgtactattgtgcctctggcgtgtacagcttcgactacagaggccagggcaccctggtcacagtctcttctggtaccggcggaggcggatctggcggcggaggtagcggtggcggaggatctgaattccagtctgtggtcacacagccacctagcatgtctgccgctccaggccagcaagtgaccatctcttgtagcggcggcaacagcaacatcgagcggaactacgtgtcctggtatctgcaactgcctggcacagcccctaagctggtcatcttcgacaacgacagacggcccagcggcatccccgatagattttctggcagcaagagcggcaccagcgccacactgggaattaccggacttcagacaggcgacgaggccgactactactgtggcacatgggactctagcctgagaggctgggttttcggcggaggcacaaagctgacagtgcttggtctcgaggacctgaagaacgtgttcccacctgaggtggccgtgttcgagcctagcgaggccgagatcagccacacccagaaagccaccctcgtgtgcctggctaccggcttctaccccgaccatgtggaactgtcttggtgggtcaacggcaaagaggtgcacagcggcgtgtgtaccgacccccagccactgaaagaacagcccgccctgaacgacagccggtactgcctgagcagcagactgagagtgtccgccaccttctggcagaacccccggaaccacttcagatgccaggtgcagttctacggcctgagcgagaacgacgagtggacccaggacagagccaagcccgtgacccagatcgtgtctgccgaagcctggggcagagccgatgatgtgattaagatccactggcaggaaaagaagtccaacaccatcctgggcagccaggaaggcaacaccatgaagaccaacgacacctacatgaagttcagctggctgaccgtgcccgagaagtccctggacaaagaacacagatgcatcgtgcggcacgaaaacaacaagaacggcgtggaccaggaaatcatcttcccacccatcaagaccgatgtgattacaatggaccccaaggacaactgctccaaggacgccaacgataccctgctgctccagctgaccaacaccagcgcctactacatgtacttgttgctgctgctgaagtccgtggtgtacttcgccatcatcacatgctgcctgctgcggagaaccgccttctgctgcaacggcgagaagtctagggccaagcgatctggatctggagcaacaaacttctcactactcaaacaagcaggtgacgtggaggagaatcccgggcctactagtatggactggatttggcgcatccttttccttgtcggcgctgctaccggcgcgcattccttcgaagtgcagctcgttgagtctggcggcggactgattcaacctggcggaagcctgagactgagctgtgccgcttccggcttcaccttcagcaactacgccatgaactgggttcgacaggcccctggcaaaggactggaatgggtgtccaccatcaacggcagaggcagcagcaccatctacgccgattctgtgaagggcagattcaccatcagccgggacaacagcaagaacaccctgtacctccagatgaactccctgagagccgaggacaccgccacctattactgtgcccggtacatcagcagaggactgggcgattcttggggccagggcacactggttacagtgacgcgtatccagaaccctgatcctgccgtgtaccagctgcgggatagcaagagcagcgacaagagcgtgtgtctgttcaccgacttcgacagccagaccaacgtgtcccagagcaaggactccgacgtgtacatcaccgataagtgcgtgctggacatgcggagcatggacttcaagagcaactccgccgtggcctggtccaacaagtccgatttcgcctgcgccaacgccttcaacaacagcattatccccgaggacacattcttcccaagccccgagagcagcgactccaccgaccacgtgaagcccaaagagacagagaacaccaagcagcccagcaagagctgccacaagcccaaggccatcgtgcacaccgagaaagtgaacatgatgagcctgaccgtgctgggcctgcggatgctgttcgccaaaaccgtggccgtgaacttcctgctgaccgccaagctgttcttcctc

SEQ ID NO: 7430 - DNA, 2571 bp, synthetic construct
  source 1..2571: mol_type = other DNA
atggccttaccagtgaccgccttgctcctgccgctggccttgctgctccacgccgccaggccggaagtgcagctggttgaatctggcggaggactggttcagcctggcggatctctgagactgtcttgtgccgccagcggcttcagcttcagcgacttttggatgagctgggtccgacaggcccctggcaaaggacttgaatgggtcgccacaatcagccaggccggcagcgagaaggactacgtggactctgtgaagggcagattcaccatcagccgggacaacgccaagaagtccctgtacctccagatgaacagcctgagagccgaggacaccgccgtgtactattgtgcctctggcgtgtacagcttcgactacagaggccagggcaccctggtcacagtctcttctggtaccggcggaggcggatctggcggcggaggtagcggtggcggaggatctgaattcgacgtcgtgatgacccagacccctctgagcctgcctgtgtccctgggcgatcaggccagcatcagctgtagaagcagccagagcctggtgcacagcaacggcaacacctacctgcactggtatctccagaagcccggccagagccccaagctgctgatctacaaggtgtccaacagattcagcggcgtgcccgacagattctccggcagcggctctggcaccgacttcaccctgaagatcagccgggtggaagccgaggacctgggcgtgtacttctgtagccagaacacccccgtgccccccaagtttggcagcggcaccaagctggaaatcaagctcgaggacctgaagaacgtgttcccacctgaggtggccgtgttcgagcctagcgaggccgagatcagccacacccagaaagccaccctcgtgtgcctggctaccggcttctaccccgaccatgtggaactgtcttggtgggtcaacggcaaagaggtgcacagcggcgtgtgtaccgacccccagccactgaaagaacagcccgccctgaacgacagccggtactgcctgagcagcagactgagagtgtccgccaccttctggcagaacccccggaaccacttcagatgccaggtgcagttctacggcctgagcgagaacgacgagtggacccaggacagagccaagcccgtgacccagatcgtgtctgccgaagcctggggcagagccgatgatgtgattaagatccactggcaggaaaagaagtccaacaccatcctgggcagccaggaaggcaacaccatgaagaccaacgacacctacatgaagttcagctggctgaccgtgcccgagaagtccctggacaaagaacacagatgcatcgtgcggcacgaaaacaacaagaacggcgtggaccaggaaatcatcttcccacccatcaagaccgatgtgattacaatggaccccaaggacaactgctccaaggacgccaacgataccctgctgctccagctgaccaacaccagcgcctactacatgtacttgttgctgctgctgaagtccgtggtgtacttcgccatcatcacatgctgcctgctgcggagaaccgccttctgctgcaacggcgagaagtctagggccaagcgatctggatctggagcaacaaacttctcactactcaaacaagcaggtgacgtggaggagaatcccgggcctactagtatggactggatttggcgcatccttttccttgtcggcgctgctaccggcgcgcattccttcgaacaggtgcagctccagcagtctggcgctgaactcgtgcggcctggcgcttctgtgaagctgtcttgcaaggccagcggctacaccttcaacgactacgagatgcactgggtcaagcagacccctgtgcacggcctgaagtggatcggagccctggaacccaagaccggcgataccgcctacagccagaagttcaagggcaaggccaccctgaccgccgacaagagcagcagcacagcctacatggaactgcggagcctgaccagcgaggacagcgccgtgtactactgcaccagctgctactactacacctacagcggccagggcaccctcgtgacagtgtctgctacgcgtatccagaaccctgatcctgccgtgtaccagctgcgggatagcaagagcagcgacaagagcgtgtgtctgttcaccgacttcgacagccagaccaacgtgtcccagagcaaggactccgacgtgtacatcaccgataagtgcgtgctggacatgcggagcatggacttcaagagcaactccgccgtggcctggtccaacaagtccgatttcgcctgcgccaacgccttcaacaacagcattatccccgaggacacattcttcccaagccccgagagcagcgactccaccgaccacgtgaagcccaaagagacagagaacaccaagcagcccagcaagagctgccacaagcccaaggccatcgtgcacaccgagaaagtgaacatgatgagcctgaccgtgctgggcctgcggatgctgttcgccaaaaccgtggccgtgaacttcctgctgaccgccaagctgttcttcctc

SEQ ID NO: 7431 - DNA, 2568 bp, synthetic construct
  source 1..2568: mol_type = other DNA
atggccttaccagtgaccgccttgctcctgccgctggccttgctgctccacgccgccaggccggaagtgcagctggttgaatctggcggaggactggttcagcctggcggatctctgagactgtcttgtgccgccagcggcttcagcttcagcgacttttggatgagctgggtccgacaggcccctggcaaaggacttgaatgggtcgccacaatcagccaggccggcagcgagaaggactacgtggactctgtgaagggcagattcaccatcagccgggacaacgccaagaagtccctgtacctccagatgaacagcctgagagccgaggacaccgccgtgtactattgtgcctctggcgtgtacagcttcgactacagaggccagggcaccctggtcacagtctcttctggtaccggcggaggcggatctggcggcggaggtagcggtggcggaggatctgaattcgacatccaactgacccagagccccagcagcctgtctgcctctgtgggcgacagagtgaccatcacctgtagagccagccagggcatcagaaacgacctgggctggtatcagcagaagcccggcaaggcccccaagcggctgatctatgctgccagctccctccagaatggcgtgcccagcagattttccggcagcggctctggcaccgagttcaccctgaccatcagctccctccagcccgaggacttcgccacctactactgcctccagcacaacacctaccccgccttcggccagggcaccaaggtggaaatcaagagactcgaggacctgaagaacgtgttcccacctgaggtggccgtgttcgagcctagcgaggccgagatcagccacacccagaaagccaccctcgtgtgcctggctaccggcttctaccccgaccatgtggaactgtcttggtgggtcaacggcaaagaggtgcacagcggcgtgtgtaccgacccccagccactgaaagaacagcccgccctgaacgacagccggtactgcctgagcagcagactgagagtgtccgccaccttctggcagaacccccggaaccacttcagatgccaggtgcagttctacggcctgagcgagaacgacgagtggacccaggacagagccaagcccgtgacccagatcgtgtctgccgaagcctggggcagagccgatgatgtgattaagatccactggcaggaaaagaagtccaacaccatcctgggcagccaggaaggcaacaccatgaagaccaacgacacctacatgaagttcagctggctgaccgtgcccgagaagtccctggacaaagaacacagatgcatcgtgcggcacgaaaacaacaagaacggcgtggaccaggaaatcatcttcccacccatcaagaccgatgtgattacaatggaccccaaggacaactgctccaaggacgccaacgataccctgctgctccagctgaccaacaccagcgcctactacatgtacttgttgctgctgctgaagtccgtggtgtacttcgccatcatcacatgctgcctgctgcggagaaccgccttctgctgcaacggcgagaagtctagggccaagcgatctggatctggagcaacaaacttctcactactcaaacaagcaggtgacgtggaggagaatcccgggcctactagtatggactggatttggcgcatccttttccttgtcggcgctgctaccggcgcgcattccttcgaacaggtgcaactccaggaatctggccctggcctcgtgaagcctagccagaccctgagcctgacctgtaccgtgtctggcggcagcatcagcagcttcaactactactggtcctggatcagacaccaccctggcaagggcctggaatggatcggctacatctactacagcggcagcacctacagcaaccccagcctgaagtcccgcgtgaccatctccgtggacaccagcaagaaccagtttagcctgaccctgtccagcgtgacagccgccgataccgccgtgtactactgcgccagaggctacaactggaactacttcgactactggggccagggaaccctcgtgaccgtgtctagtacgcgtatccagaaccctgatcctgccgtgtaccagctgcgggatagcaagagcagcgacaagagcgtgtgtctgttcaccgacttcgacagccagaccaacgtgtcccagagcaaggactccgacgtgtacatcaccgataagtgcgtgctggacatgcggagcatggacttcaagagcaactccgccgtggcctggtccaacaagtccgatttcgcctgcgccaacgccttcaacaacagcattatccccgaggacacattcttcccaagccccgagagcagcgactccaccgaccacgtgaagcccaaagagacagagaacaccaagcagcccagcaagagctgccacaagcccaaggccatcgtgcacaccgagaaagtgaacatgatgagcctgaccgtgctgggcctgcggatgctgttcgccaaaaccgtggccgtgaacttcctgctgaccgccaagctgttcttcctc

SEQ ID NO: 7432 - DNA, 2574 bp, synthetic construct
  source 1..2574: mol_type = other DNA
atggccttaccagtgaccgccttgctcctgccgctggccttgctgctccacgccgccaggccggaagtgcagctggttgaatctggcggaggactggttcagcctggcggatctctgagactgtcttgtgccgccagcggcttcagcttcagcgacttttggatgagctgggtccgacaggcccctggcaaaggacttgaatgggtcgccacaatcagccaggccggcagcgagaaggactacgtggactctgtgaagggcagattcaccatcagccgggacaacgccaagaagtccctgtacctccagatgaacagcctgagagccgaggacaccgccgtgtactattgtgcctctggcgtgtacagcttcgactacagaggccagggcaccctggtcacagtctcttctggtaccggcggaggcggatctggcggcggaggtagcggtggcggaggatctgaattcgacgacatcgtgctgacccagagccccgccagcctggccgtgagcctgggccagagcgtgaccatcagctgcagagccagcgagagcgtggagtactacggcaccagcctgatgcagtggtaccagcagaagcccggccagccccccaagctgctgatctacgccaccagcaacgtggagagcggcgtgcccgccagattcagcggcagcggcagcggcaccgacttcagcctgaacatccaccccgtggaggaggacgacatcgccatgtacttctgccagcagagcagaaagctgcccagcaccttcggcggcggcaccaagctggagatcaagctcgaggacctgaagaacgtgttcccacctgaggtggccgtgttcgagcctagcgaggccgagatcagccacacccagaaagccaccctcgtgtgcctggctaccggcttctaccccgaccatgtggaactgtcttggtgggtcaacggcaaagaggtgcacagcggcgtgtgtaccgacccccagccactgaaagaacagcccgccctgaacgacagccggtactgcctgagcagcagactgagagtgtccgccaccttctggcagaacccccggaaccacttcagatgccaggtgcagttctacggcctgagcgagaacgacgagtggacccaggacagagccaagcccgtgacccagatcgtgtctgccgaagcctggggcagagccgatgatgtgattaagatccactggcaggaaaagaagtccaacaccatcctgggcagccaggaaggcaacaccatgaagaccaacgacacctacatgaagttcagctggctgaccgtgcccgagaagtccctggacaaagaacacagatgcatcgtgcggcacgaaaacaacaagaacggcgtggaccaggaaatcatcttcccacccatcaagaccgatgtgattacaatggaccccaaggacaactgctccaaggacgccaacgataccctgctgctccagctgaccaacaccagcgcctactacatgtacttgttgctgctgctgaagtccgtggtgtacttcgccatcatcacatgctgcctgctgcggagaaccgccttctgctgcaacggcgagaagtctagggccaagcgatctggatctggagcaacaaacttctcactactcaaacaagcaggtgacgtggaggagaatcccgggcctactagtatggactggatttggcgcatccttttccttgtcggcgctgctaccggcgcgcattccttcgaagacgtgagactgcaggagagcggccccggccaggtgaagcccagccagaccgtgagcctgacctgcagcgtgaccggctacagcatcaccaacggcaaccactggtggaactggatcagacaggtgagcggcagcaagctggagtggatcggctacatcagcagcagcggcagcaccgacagcaaccccagcctgaagagcagaatcagcatcaccagagacaccagcaagaaccagctgttcctgcagctgaacagcgtgaccaccgaggacatcgccacctactactgcgccagaggctactacttcgactactggggccagggcaccaccctgaccgtgagcagcacgcgtatccagaaccctgatcctgccgtgtaccagctgcgggatagcaagagcagcgacaagagcgtgtgtctgttcaccgacttcgacagccagaccaacgtgtcccagagcaaggactccgacgtgtacatcaccgataagtgcgtgctggacatgcggagcatggacttcaagagcaactccgccgtggcctggtccaacaagtccgatttcgcctgcgccaacgccttcaacaacagcattatccccgaggacacattcttcccaagccccgagagcagcgactccaccgaccacgtgaagcccaaagagacagagaacaccaagcagcccagcaagagctgccacaagcccaaggccatcgtgcacaccgagaaagtgaacatgatgagcctgaccgtgctgggcctgcggatgctgttcgccaaaaccgtggccgtgaacttcctgctgaccgccaagctgttcttcctc

SEQ ID NO: 7433 - DNA, 2571 bp, synthetic construct
  source 1..2571: mol_type = other DNA
atggccttaccagtgaccgccttgctcctgccgctggccttgctgctccacgccgccaggccggaagtgcagctggttgaatctggcggaggactggttcagcctggcggatctctgagactgtcttgtgccgccagcggcttcagcttcagcgacttttggatgagctgggtccgacaggcccctggcaaaggacttgaatgggtcgccacaatcagccaggccggcagcgagaaggactacgtggactctgtgaagggcagattcaccatcagccgggacaacgccaagaagtccctgtacctccagatgaacagcctgagagccgaggacaccgccgtgtactattgtgcctctggcgtgtacagcttcgactacagaggccagggcaccctggtcacagtctcttctggtaccggcggaggcggatctggcggcggaggtagcggtggcggaggatctgaattcgacatccagatgacccagagccccagcagcctgtctgccagcgtgggcgacagagtgaccatcacctgtagagccagccaggacgtgaacaccgccgtggcctggtatcagcagaagcctggcaaggcccccaagctgctgatctacagcgccagcttcctggaaagcggcgtgcccagcagattcagcggaagcagaagcggcaccgacttcaccctgaccatcagctccctccagcccgaggacttcgccacctactactgccagcagcactacaccacccctcccaccttcggccagaccaaggtggaaatcaagagactcgaggacctgaagaacgtgttcccacctgaggtggccgtgttcgagcctagcgaggccgagatcagccacacccagaaagccaccctcgtgtgcctggctaccggcttctaccccgaccatgtggaactgtcttggtgggtcaacggcaaagaggtgcacagcggcgtgtgtaccgacccccagccactgaaagaacagcccgccctgaacgacagccggtactgcctgagcagcagactgagagtgtccgccaccttctggcagaacccccggaaccacttcagatgccaggtgcagttctacggcctgagcgagaacgacgagtggacccaggacagagccaagcccgtgacccagatcgtgtctgccgaagcctggggcagagccgatgatgtgattaagatccactggcaggaaaagaagtccaacaccatcctgggcagccaggaaggcaacaccatgaagaccaacgacacctacatgaagttcagctggctgaccgtgcccgagaagtccctggacaaagaacacagatgcatcgtgcggcacgaaaacaacaagaacggcgtggaccaggaaatcatcttcccacccatcaagaccgatgtgattacaatggaccccaaggacaactgctccaaggacgccaacgataccctgctgctccagctgaccaacaccagcgcctactacatgtacttgttgctgctgctgaagtccgtggtgtacttcgccatcatcacatgctgcctgctgcggagaaccgccttctgctgcaacggcgagaagtctagggccaagcgatctggatctggagcaacaaacttctcactactcaaacaagcaggtgacgtggaggagaatcccgggcctactagtatggactggatttggcgcatccttttccttgtcggcgctgctaccggcgcgcattccttcgaagaagtgcaactggtggaatctggcggcggactggtgcagcctggcggatctctgagactgagctgtgccgccagcggcttcaacatcaaggacacctacatccactgggtgcgccaggcccctggaaagggactggaatgggtggcccggatctaccccaccaacggctacaccagatacgccgacagcgtgaagggccggttcaccatcagcgccgacaccagcaagaataccgcctacctccagatgaacagcctgcgggccgaggataccgccgtgtactactgctcaagatggggaggcgacggcttctacgctatggacgtgtggggccagggcacccttgtgaccgtgtcatctacgcgtatccagaaccctgatcctgccgtgtaccagctgcgggatagcaagagcagcgacaagagcgtgtgtctgttcaccgacttcgacagccagaccaacgtgtcccagagcaaggactccgacgtgtacatcaccgataagtgcgtgctggacatgcggagcatggacttcaagagcaactccgccgtggcctggtccaacaagtccgatttcgcctgcgccaacgccttcaacaacagcattatccccgaggacacattcttcccaagccccgagagcagcgactccaccgaccacgtgaagcccaaagagacagagaacaccaagcagcccagcaagagctgccacaagcccaaggccatcgtgcacaccgagaaagtgaacatgatgagcctgaccgtgctgggcctgcggatgctgttcgccaaaaccgtggccgtgaacttcctgctgaccgccaagctgttcttcctc

SEQ ID NO: 7434 - DNA, 2568 bp, synthetic construct
  source 1..2568: mol_type = other DNA
atggccttaccagtgaccgccttgctcctgccgctggccttgctgctccacgccgccaggccggaagtgcagctggttgaatctggcggaggactggttcagcctggcggatctctgagactgtcttgtgccgccagcggcttcagcttcagcgacttttggatgagctgggtccgacaggcccctggcaaaggacttgaatgggtcgccacaatcagccaggccggcagcgagaaggactacgtggactctgtgaagggcagattcaccatcagccgggacaacgccaagaagtccctgtacctccagatgaacagcctgagagccgaggacaccgccgtgtactattgtgcctctggcgtgtacagcttcgactacagaggccagggcaccctggtcacagtctcttctggtaccggcggaggcggatctggcggcggaggtagcggtggcggaggatctgaattcgaccagagcgtgctgacacagcctcctagcgtgtcagtggcccctggcaagaccgccagaatcccctgcgagggcaactacatcggcagcagcaacgtgcactggtatcagcagaagcccggccaggctcccgtgctcgtgatccacttcgacagcgacagacccagcggcatccccgacagattcagcggcagcaacagcggcaacatggctaccctgaccatcagcagagtggaagccggggacgaggccgactactactgtcaagtgtgggagaaccacggctgggtgttcggcggaggcaccaagctgacagtgctgtctctcgaggacctgaagaacgtgttcccacctgaggtggccgtgttcgagcctagcgaggccgagatcagccacacccagaaagccaccctcgtgtgcctggctaccggcttctaccccgaccatgtggaactgtcttggtgggtcaacggcaaagaggtgcacagcggcgtgtgtaccgacccccagccactgaaagaacagcccgccctgaacgacagccggtactgcctgagcagcagactgagagtgtccgccaccttctggcagaacccccggaaccacttcagatgccaggtgcagttctacggcctgagcgagaacgacgagtggacccaggacagagccaagcccgtgacccagatcgtgtctgccgaagcctggggcagagccgatgatgtgattaagatccactggcaggaaaagaagtccaacaccatcctgggcagccaggaaggcaacaccatgaagaccaacgacacctacatgaagttcagctggctgaccgtgcccgagaagtccctggacaaagaacacagatgcatcgtgcggcacgaaaacaacaagaacggcgtggaccaggaaatcatcttcccacccatcaagaccgatgtgattacaatggaccccaaggacaactgctccaaggacgccaacgataccctgctgctccagctgaccaacaccagcgcctactacatgtacttgttgctgctgctgaagtccgtggtgtacttcgccatcatcacatgctgcctgctgcggagaaccgccttctgctgcaacggcgagaagtctagggccaagcgatctggatctggagcaacaaacttctcactactcaaacaagcaggtgacgtggaggagaatcccgggcctactagtatggactggatttggcgcatccttttccttgtcggcgctgctaccggcgcgcattccttcgaagaggtgcaactggtggaaacaggcggcggactggtgcagcctggcgagtctctgagactgagctgtgccgccagcggcttcaccttcagcgactacgagatgaactgggtgcgccaggcccctggaaagggcctggaatgggtgtcctacatcagcagctccggcagcaccatctactacgccgacagcgtgaagggccggtttaccatctaccgggacaacgccaagaacagcctgtacctccagatgaactccctgcgggccgaggacaccgccctgtactattgtgccagagcctggggcgtgggaccccctgattattggggacagggcaccctcgtgaccgtgtcctctacgcgtatccagaaccctgatcctgccgtgtaccagctgcgggatagcaagagcagcgacaagagcgtgtgtctgttcaccgacttcgacagccagaccaacgtgtcccagagcaaggactccgacgtgtacatcaccgataagtgcgtgctggacatgcggagcatggacttcaagagcaactccgccgtggcctggtccaacaagtccgatttcgcctgcgccaacgccttcaacaacagcattatccccgaggacacattcttcccaagccccgagagcagcgactccaccgaccacgtgaagcccaaagagacagagaacaccaagcagcccagcaagagctgccacaagcccaaggccatcgtgcacaccgagaaagtgaacatgatgagcctgaccgtgctgggcctgcggatgctgttcgccaaaaccgtggccgtgaacttcctgctgaccgccaagctgttcttcctc

SEQ ID NO: 7435 - DNA, 2592 bp, synthetic construct
  source 1..2592: mol_type = other DNA
atggccttaccagtgaccgccttgctcctgccgctggccttgctgctccacgccgccaggccggaagtgcagctggttgaatctggcggaggactggttcagcctggcggatctctgagactgtcttgtgccgccagcggcttcagcttcagcgacttttggatgagctgggtccgacaggcccctggcaaaggacttgaatgggtcgccacaatcagccaggccggcagcgagaaggactacgtggactctgtgaagggcagattcaccatcagccgggacaacgccaagaagtccctgtacctccagatgaacagcctgagagccgaggacaccgccgtgtactattgtgcctctggcgtgtacagcttcgactacagaggccagggcaccctggtcacagtctcttctggtaccggcggaggcggatctggcggcggaggtagcggtggcggaggatctgaattcgacatccagatgacccagagccccagcagcctgtctgccagcgtgggcgataccgtgaccatcacctgtcaggccaacggctacctgaactggtatcagcagcggagaggcaaggcccccaagctgctgatctacgacggcagcaagctggaaagaggcgtgcccagcagattcagcggcagaagatggggccaggagtacaacctgaccatcaacaacctccagcccgaggatattgccacatacttttgccaggtgtacgagttcgtggtgcccggcacacggctggacctgaagagaacagtggctgctcctctcgaggacctgaagaacgtgttcccacctgaggtggccgtgttcgagcctagcgaggccgagatcagccacacccagaaagccaccctcgtgtgcctggctaccggcttctaccccgaccatgtggaactgtcttggtgggtcaacggcaaagaggtgcacagcggcgtgtgtaccgacccccagccactgaaagaacagcccgccctgaacgacagccggtactgcctgagcagcagactgagagtgtccgccaccttctggcagaacccccggaaccacttcagatgccaggtgcagttctacggcctgagcgagaacgacgagtggacccaggacagagccaagcccgtgacccagatcgtgtctgccgaagcctggggcagagccgatgatgtgattaagatccactggcaggaaaagaagtccaacaccatcctgggcagccaggaaggcaacaccatgaagaccaacgacacctacatgaagttcagctggctgaccgtgcccgagaagtccctggacaaagaacacagatgcatcgtgcggcacgaaaacaacaagaacggcgtggaccaggaaatcatcttcccacccatcaagaccgatgtgattacaatggaccccaaggacaactgctccaaggacgccaacgataccctgctgctccagctgaccaacaccagcgcctactacatgtacttgttgctgctgctgaagtccgtggtgtacttcgccatcatcacatgctgcctgctgcggagaaccgccttctgctgcaacggcgagaagtctagggccaagcgatctggatctggagcaacaaacttctcactactcaaacaagcaggtgacgtggaggagaatcccgggcctactagtatggactggatttggcgcatccttttccttgtcggcgctgctaccggcgcgcattccttcgaacaggtgcagctgctccagtctggcgctgccgtgacaaagcctggcgcttctgtgcgggtgtcctgtgaagccagcggctacaacatccgggactacttcatccactggtggcggcaggctccaggccagggactccagtgggtgggatggatcaaccccaagaccggccagcccaacaaccccagacagttccagggcagagtgtccctgaccagacacgccagctgggacttcgacaccttcagcttctacatggatctgaaggccctgcggagcgacgataccgccgtgtacttctgcgccagacagagaagcgactactgggatttcgacgtgtggggcagcggcacccaagtgacagtgtctagcgccagcaccaagggacccacgcgtatccagaaccctgatcctgccgtgtaccagctgcgggatagcaagagcagcgacaagagcgtgtgtctgttcaccgacttcgacagccagaccaacgtgtcccagagcaaggactccgacgtgtacatcaccgataagtgcgtgctggacatgcggagcatggacttcaagagcaactccgccgtggcctggtccaacaagtccgatttcgcctgcgccaacgccttcaacaacagcattatccccgaggacacattcttcccaagccccgagagcagcgactccaccgaccacgtgaagcccaaagagacagagaacaccaagcagcccagcaagagctgccacaagcccaaggccatcgtgcacaccgagaaagtgaacatgatgagcctgaccgtgctgggcctgcggatgctgttcgccaaaaccgtggccgtgaacttcctgctgaccgccaagctgttcttcctc

SEQ ID NO: 7436 - DNA, 2610 bp, synthetic construct
  source 1..2610: mol_type = other DNA
atggccttaccagtgaccgccttgctcctgccgctggccttgctgctccacgccgccaggccggaagtgcagctggttgaatctggcggaggactggttcagcctggcggatctctgagactgtcttgtgccgccagcggcttcagcttcagcgacttttggatgagctgggtccgacaggcccctggcaaaggacttgaatgggtcgccacaatcagccaggccggcagcgagaaggactacgtggactctgtgaagggcagattcaccatcagccgggacaacgccaagaagtccctgtacctccagatgaacagcctgagagccgaggacaccgccgtgtactattgtgcctctggcgtgtacagcttcgactacagaggccagggcaccctggtcacagtctcttctggtaccggcggaggcggatctggcggcggaggtagcggtggcggaggatctgaattccagtctgccctgacacagcctcctagcgcctctggctctcccggccagagcatcaccatcagctgtaccggcaccagcaacaacttcgtgtcctggtatcagcagcacgccggcaaggcccccaagctcgtgatctacgacgtgaacaagcggcccagcggcgtgcccgatagattcagcggcagcaagagcggcaacaccgccagcctgacagtgtctggcctccagaccgatgacgaggccgtgtactactgcggcagcctcgtgggcaactgggacgtgatctttggcggaggcaccaagctgaccgtgctgctcgaggacctgaagaacgtgttcccacctgaggtggccgtgttcgagcctagcgaggccgagatcagccacacccagaaagccaccctcgtgtgcctggctaccggcttctaccccgaccatgtggaactgtcttggtgggtcaacggcaaagaggtgcacagcggcgtgtgtaccgacccccagccactgaaagaacagcccgccctgaacgacagccggtactgcctgagcagcagactgagagtgtccgccaccttctggcagaacccccggaaccacttcagatgccaggtgcagttctacggcctgagcgagaacgacgagtggacccaggacagagccaagcccgtgacccagatcgtgtctgccgaagcctggggcagagccgatgatgtgattaagatccactggcaggaaaagaagtccaacaccatcctgggcagccaggaaggcaacaccatgaagaccaacgacacctacatgaagttcagctggctgaccgtgcccgagaagtccctggacaaagaacacagatgcatcgtgcggcacgaaaacaacaagaacggcgtggaccaggaaatcatcttcccacccatcaagaccgatgtgattacaatggaccccaaggacaactgctccaaggacgccaacgataccctgctgctccagctgaccaacaccagcgcctactacatgtacttgttgctgctgctgaagtccgtggtgtacttcgccatcatcacatgctgcctgctgcggagaaccgccttctgctgcaacggcgagaagtctagggccaagcgatctggatctggagcaacaaacttctcactactcaaacaagcaggtgacgtggaggagaatcccgggcctactagtatggactggatttggcgcatccttttccttgtcggcgctgctaccggcgcgcattccttcgaacagccccagctccaggaatctggccccacactggtggaagccagcgagacactgagcctgacctgtgccgtgtccggcgattctaccgccgcctgcaatagcttctggggctgggtgcgccagcctcctggaaagggactggaatgggtgggaagcctgagccactgcgccagctattggaaccggggctggacctaccacaaccccagcctgaagtccagactgaccctggccctggacacccccaagaacctggtgttcctgaagctgaacagcgtgacagccgccgacaccgccacctactactgtgccagatttggcggcgaggtgctgcggtacaccgactggcctaaacctgcctgggtggacctgtggggcagaggaacactcgtgaccgtgtccagcacgcgtatccagaaccctgatcctgccgtgtaccagctgcgggatagcaagagcagcgacaagagcgtgtgtctgttcaccgacttcgacagccagaccaacgtgtcccagagcaaggactccgacgtgtacatcaccgataagtgcgtgctggacatgcggagcatggacttcaagagcaactccgccgtggcctggtccaacaagtccgatttcgcctgcgccaacgccttcaacaacagcattatccccgaggacacattcttcccaagccccgagagcagcgactccaccgaccacgtgaagcccaaagagacagagaacaccaagcagcccagcaagagctgccacaagcccaaggccatcgtgcacaccgagaaagtgaacatgatgagcctgaccgtgctgggcctgcggatgctgttcgccaaaaccgtggccgtgaacttcctgctgaccgccaagctgttcttcctc

SEQ ID NO: 7437 - DNA, 2565 bp, synthetic construct
  source 1..2565: mol_type = other DNA
atggccttaccagtgaccgccttgctcctgccgctggccttgctgctccacgccgccaggccggaagtgcagctggttgaatctggcggaggactggttcagcctggcggatctctgagactgtcttgtgccgccagcggcttcagcttcagcgacttttggatgagctgggtccgacaggcccctggcaaaggacttgaatgggtcgccacaatcagccaggccggcagcgagaaggactacgtggactctgtgaagggcagattcaccatcagccgggacaacgccaagaagtccctgtacctccagatgaacagcctgagagccgaggacaccgccgtgtactattgtgcctctggcgtgtacagcttcgactacagaggccagggcaccctggtcacagtctcttctggtaccggcggaggcggatctggcggcggaggtagcggtggcggaggatctgaattcgagatcgtgctgacacagagccctggcaccctgagcctgtctccaggcgagacagccatcatcagctgccggacaagccagtacggcagcctggcctggtatcagcagaggccaggacaggcccccagactcgtgatctacagcggcagcacaagagccgccggaatccccgatagattcagcggctccagatggggacccgactacaacctgaccatcagcaacctggaaagcggcgacttcggcgtgtactactgccagcagtacgagttcttcggccagggcaccaaggtgcaggtggacatcaaaagactcgaggacctgaagaacgtgttcccacctgaggtggccgtgttcgagcctagcgaggccgagatcagccacacccagaaagccaccctcgtgtgcctggctaccggcttctaccccgaccatgtggaactgtcttggtgggtcaacggcaaagaggtgcacagcggcgtgtgtaccgacccccagccactgaaagaacagcccgccctgaacgacagccggtactgcctgagcagcagactgagagtgtccgccaccttctggcagaacccccggaaccacttcagatgccaggtgcagttctacggcctgagcgagaacgacgagtggacccaggacagagccaagcccgtgacccagatcgtgtctgccgaagcctggggcagagccgatgatgtgattaagatccactggcaggaaaagaagtccaacaccatcctgggcagccaggaaggcaacaccatgaagaccaacgacacctacatgaagttcagctggctgaccgtgcccgagaagtccctggacaaagaacacagatgcatcgtgcggcacgaaaacaacaagaacggcgtggaccaggaaatcatcttcccacccatcaagaccgatgtgattacaatggaccccaaggacaactgctccaaggacgccaacgataccctgctgctccagctgaccaacaccagcgcctactacatgtacttgttgctgctgctgaagtccgtggtgtacttcgccatcatcacatgctgcctgctgcggagaaccgccttctgctgcaacggcgagaagtctagggccaagcgatctggatctggagcaacaaacttctcactactcaaacaagcaggtgacgtggaggagaatcccgggcctactagtatggactggatttggcgcatccttttccttgtcggcgctgctaccggcgcgcattccttcgaacaggtgcagctggtgcagtctggcggccagatgaagaaacccggcgagagcatgagaatcagctgtcgggcctccggctacgagttcatcgactgcaccctgaactggatcagactggcccctggcaagcggcctgagtggatgggatggctgaagcctagaggcggagccgtgaactacgccagacctctccagggcagagtgaccatgaccagggacgtgtacagcgataccgccttcctggaactgcggagcctgaccgtggatgataccgccgtgtacttctgcaccagaggcaagaactgcgattacaactgggacttcgagcactggggcagaggcacccctgtgatcgtgtctagcacgcgtatccagaaccctgatcctgccgtgtaccagctgcgggatagcaagagcagcgacaagagcgtgtgtctgttcaccgacttcgacagccagaccaacgtgtcccagagcaaggactccgacgtgtacatcaccgataagtgcgtgctggacatgcggagcatggacttcaagagcaactccgccgtggcctggtccaacaagtccgatttcgcctgcgccaacgccttcaacaacagcattatccccgaggacacattcttcccaagccccgagagcagcgactccaccgaccacgtgaagcccaaagagacagagaacaccaagcagcccagcaagagctgccacaagcccaaggccatcgtgcacaccgagaaagtgaacatgatgagcctgaccgtgctgggcctgcggatgctgttcgccaaaaccgtggccgtgaacttcctgctgaccgccaagctgttcttcctc

SEQ ID NO: 7438 - DNA, 2595 bp, synthetic construct
  source 1..2595: mol_type = other DNA
atggccttaccagtgaccgccttgctcctgccgctggccttgctgctccacgccgccaggccggaagtgcagctggttgaatctggcggaggactggttcagcctggcggatctctgagactgtcttgtgccgccagcggcttcagcttcagcgacttttggatgagctgggtccgacaggcccctggcaaaggacttgaatgggtcgccacaatcagccaggccggcagcgagaaggactacgtggactctgtgaagggcagattcaccatcagccgggacaacgccaagaagtccctgtacctccagatgaacagcctgagagccgaggacaccgccgtgtactattgtgcctctggcgtgtacagcttcgactacagaggccagggcaccctggtcacagtctcttctggtaccggcggaggcggatctggcggcggaggtagcggtggcggaggatctgaattcgagctggtgctgacacagagccctggcaccctgtctctgtctgccggcgaaagagccaccctgagctgtagagccagccagagcgtgtcctctggcagcctggcttggtatcagcagaagccaggccaggcccccagactgctgatctacggcgcttctaccagagccaccggcatccccgatagattcagcggctctggctccggcaccgacttcaccctgacaatcggcagactggaacccgaggacctggccgtgtactactgccagcagtacggcaccagcccctacacattcggccagggcaccaagctggaaatcctcgaggacctgaagaacgtgttcccacctgaggtggccgtgttcgagcctagcgaggccgagatcagccacacccagaaagccaccctcgtgtgcctggctaccggcttctaccccgaccatgtggaactgtcttggtgggtcaacggcaaagaggtgcacagcggcgtgtgtaccgacccccagccactgaaagaacagcccgccctgaacgacagccggtactgcctgagcagcagactgagagtgtccgccaccttctggcagaacccccggaaccacttcagatgccaggtgcagttctacggcctgagcgagaacgacgagtggacccaggacagagccaagcccgtgacccagatcgtgtctgccgaagcctggggcagagccgatgatgtgattaagatccactggcaggaaaagaagtccaacaccatcctgggcagccaggaaggcaacaccatgaagaccaacgacacctacatgaagttcagctggctgaccgtgcccgagaagtccctggacaaagaacacagatgcatcgtgcggcacgaaaacaacaagaacggcgtggaccaggaaatcatcttcccacccatcaagaccgatgtgattacaatggaccccaaggacaactgctccaaggacgccaacgataccctgctgctccagctgaccaacaccagcgcctactacatgtacttgttgctgctgctgaagtccgtggtgtacttcgccatcatcacatgctgcctgctgcggagaaccgccttctgctgcaacggcgagaagtctagggccaagcgatctggatctggagcaacaaacttctcactactcaaacaagcaggtgacgtggaggagaatcccgggcctactagtatggactggatttggcgcatccttttccttgtcggcgctgctaccggcgcgcattccttcgaactggaacagagcggagccgaagtgaagaaacccggcagcagcgtgcaggtgtcctgcaaagcaagcggcggcaccttctctatgtacggcttcaactgggtgcgccaggctcctggacacggcctggaatggatgggcggcatcatccccatcttcggcacctccaactacgcccagaaattccggggcagagtgaccttcaccgccgaccaggccacaagcaccgcctacatggaactgaccaacctgcggagcgacgacaccgccgtgtattattgcgccagagacttcggccccgactgggaggatggcgacagctacgatggcagcggcagaggcttcttcgacttctggggccagggaacccttgtgaccgtgtcctcaacgcgtatccagaaccctgatcctgccgtgtaccagctgcgggatagcaagagcagcgacaagagcgtgtgtctgttcaccgacttcgacagccagaccaacgtgtcccagagcaaggactccgacgtgtacatcaccgataagtgcgtgctggacatgcggagcatggacttcaagagcaactccgccgtggcctggtccaacaagtccgatttcgcctgcgccaacgccttcaacaacagcattatccccgaggacacattcttcccaagccccgagagcagcgactccaccgaccacgtgaagcccaaagagacagagaacaccaagcagcccagcaagagctgccacaagcccaaggccatcgtgcacaccgagaaagtgaacatgatgagcctgaccgtgctgggcctgcggatgctgttcgccaaaaccgtggccgtgaacttcctgctgaccgccaagctgttcttcctc

SEQ ID NO: 7439 - DNA, 2535 bp, synthetic construct
  source 1..2535: mol_type = other DNA
atggccttaccagtgaccgccttgctcctgccgctggccttgctgctccacgccgccaggccggaagtgcagctggttgaatctggcggaggactggttcagcctggcggatctctgagactgtcttgtgccgccagcggcttcagcttcagcgacttttggatgagctgggtccgacaggcccctggcaaaggacttgaatgggtcgccacaatcagccaggccggcagcgagaaggactacgtggactctgtgaagggcagattcaccatcagccgggacaacgccaagaagtccctgtacctccagatgaacagcctgagagccgaggacaccgccgtgtactattgtgcctctggcgtgtacagcttcgactacagaggccagggcaccctggtcacagtctcttctggtaccggcggaggcggatctggcggcggaggtagcggtggcggaggatctgaattcgacatccagatgacccagagccccagcagcctgtctgccagcgtgggcgacagagtgaccatcacctgtcaggccagccaggacatcaacaactacctgaactggtatcagcagaagcccggcaaggcccccaagctgctgatctacgacgccagcaatctgcagaccggcgtgcccagcagattttccggctctggcagcggcaccgacttcaccttcaccatcgaggacattgccacctactactgccagcagtacaccttcggccctggcaccaaggtggacatcaaactcgaggacctgaagaacgtgttcccacctgaggtggccgtgttcgagcctagcgaggccgagatcagccacacccagaaagccaccctcgtgtgcctggctaccggcttctaccccgaccatgtggaactgtcttggtgggtcaacggcaaagaggtgcacagcggcgtgtgtaccgacccccagccactgaaagaacagcccgccctgaacgacagccggtactgcctgagcagcagactgagagtgtccgccaccttctggcagaacccccggaaccacttcagatgccaggtgcagttctacggcctgagcgagaacgacgagtggacccaggacagagccaagcccgtgacccagatcgtgtctgccgaagcctggggcagagccgatgatgtgattaagatccactggcaggaaaagaagtccaacaccatcctgggcagccaggaaggcaacaccatgaagaccaacgacacctacatgaagttcagctggctgaccgtgcccgagaagtccctggacaaagaacacagatgcatcgtgcggcacgaaaacaacaagaacggcgtggaccaggaaatcatcttcccacccatcaagaccgatgtgattacaatggaccccaaggacaactgctccaaggacgccaacgataccctgctgctccagctgaccaacaccagcgcctactacatgtacttgttgctgctgctgaagtccgtggtgtacttcgccatcatcacatgctgcctgctgcggagaaccgccttctgctgcaacggcgagaagtctagggccaagcgatctggatctggagcaacaaacttctcactactcaaacaagcaggtgacgtggaggagaatcccgggcctactagtatggactggatttggcgcatccttttccttgtcggcgctgctaccggcgcgcattccttcgaagaagtgcaactgctggaatctggcggcggactggtgcagcctggcggatctctgagactgagctgtgccgccagcggcttcacctttagctggtacagcatgacctgggtgcgccaggcccctggcaaaggactggaatgggtgtccagcatcgtgccctggggcgatttcacccagtacgccgatagcgtgaagggccggttcaccatcagccgggacaacagcaagaacaccctgtacctgcagatgaacagcctgcgggccgaggacaccgccgtgtactattgtgccaagggacctggctggggcagcttcgatctgtggggcagaggaacccttgtgaccgtgtccagcacgcgtatccagaaccctgatcctgccgtgtaccagctgcgggatagcaagagcagcgacaagagcgtgtgtctgttcaccgacttcgacagccagaccaacgtgtcccagagcaaggactccgacgtgtacatcaccgataagtgcgtgctggacatgcggagcatggacttcaagagcaactccgccgtggcctggtccaacaagtccgatttcgcctgcgccaacgccttcaacaacagcattatccccgaggacacattcttcccaagccccgagagcagcgactccaccgaccacgtgaagcccaaagagacagagaacaccaagcagcccagcaagagctgccacaagcccaaggccatcgtgcacaccgagaaagtgaacatgatgagcctgaccgtgctgggcctgcggatgctgttcgccaaaaccgtggccgtgaacttcctgctgaccgccaagctgttcttcctc

SEQ ID NO: 7440 - DNA, 2565 bp, synthetic construct
  source 1..2565: mol_type = other DNA
atggccttaccagtgaccgccttgctcctgccgctggccttgctgctccacgccgccaggccggaagtgcagctggttgaatctggcggaggactggttcagcctggcggatctctgagactgtcttgtgccgccagcggcttcagcttcagcgacttttggatgagctgggtccgacaggcccctggcaaaggacttgaatgggtcgccacaatcagccaggccggcagcgagaaggactacgtggactctgtgaagggcagattcaccatcagccgggacaacgccaagaagtccctgtacctccagatgaacagcctgagagccgaggacaccgccgtgtactattgtgcctctggcgtgtacagcttcgactacagaggccagggcaccctggtcacagtctcttctggtaccggcggaggcggatctggcggcggaggtagcggtggcggaggatctgaattcgacatccagatgacccagagccccagcagcctgtctgccagcgtgggcgacagagtgaccatcacctgtaccgccagcctgagcgtgtccagcacctacctgcactggtatcagcagaagcccggcagcagccccaagctgtggatctacagcaccagcaacctggcctccggcgtgcccagcagattttctggcagcggctctggcaccagctacaccctgaccatcagctccctccagcccgaggacttcgccacctactactgccaccagtaccacagaagccccctgacctttggcggaggcaccaaggtggaaatcaagagactcgaggacctgaagaacgtgttcccacctgaggtggccgtgttcgagcctagcgaggccgagatcagccacacccagaaagccaccctcgtgtgcctggctaccggcttctaccccgaccatgtggaactgtcttggtgggtcaacggcaaagaggtgcacagcggcgtgtgtaccgacccccagccactgaaagaacagcccgccctgaacgacagccggtactgcctgagcagcagactgagagtgtccgccaccttctggcagaacccccggaaccacttcagatgccaggtgcagttctacggcctgagcgagaacgacgagtggacccaggacagagccaagcccgtgacccagatcgtgtctgccgaagcctggggcagagccgatgatgtgattaagatccactggcaggaaaagaagtccaacaccatcctgggcagccaggaaggcaacaccatgaagaccaacgacacctacatgaagttcagctggctgaccgtgcccgagaagtccctggacaaagaacacagatgcatcgtgcggcacgaaaacaacaagaacggcgtggaccaggaaatcatcttcccacccatcaagaccgatgtgattacaatggaccccaaggacaactgctccaaggacgccaacgataccctgctgctccagctgaccaacaccagcgcctactacatgtacttgttgctgctgctgaagtccgtggtgtacttcgccatcatcacatgctgcctgctgcggagaaccgccttctgctgcaacggcgagaagtctagggccaagcgatctggatctggagcaacaaacttctcactactcaaacaagcaggtgacgtggaggagaatcccgggcctactagtatggactggatttggcgcatccttttccttgtcggcgctgctaccggcgcgcattccttcgaagaagtgcaactggtggaatctggcggcggactggtgcagcctggcggatctctgagactgagctgtgccgccagcggcttcagcctgaccaaatacggcgtgcactgggtgcgccaggcccctggaaaaggactggaatgggtgggagtgaagtgggctggcggctccaccgactacaacagcgccctgatgagccggttcaccatcagcaaggacaacgccaagaacagcctgtacctccagatgaactccctgcgggccgaggacaccgccgtgtactactgtgccagagatcaccgggacgctatggactactggggccagggaacactcgtgaccgtgtcctctacgcgtatccagaaccctgatcctgccgtgtaccagctgcgggatagcaagagcagcgacaagagcgtgtgtctgttcaccgacttcgacagccagaccaacgtgtcccagagcaaggactccgacgtgtacatcaccgataagtgcgtgctggacatgcggagcatggacttcaagagcaactccgccgtggcctggtccaacaagtccgatttcgcctgcgccaacgccttcaacaacagcattatccccgaggacacattcttcccaagccccgagagcagcgactccaccgaccacgtgaagcccaaagagacagagaacaccaagcagcccagcaagagctgccacaagcccaaggccatcgtgcacaccgagaaagtgaacatgatgagcctgaccgtgctgggcctgcggatgctgttcgccaaaaccgtggccgtgaacttcctgctgaccgccaagctgttcttcctc

SEQ ID NO: 7441 - DNA, 2577 bp, synthetic construct
  source 1..2577: mol_type = other DNA
atggccttaccagtgaccgccttgctcctgccgctggccttgctgctccacgccgccaggccggaagtgcagctggttgaatctggcggaggactggttcagcctggcggatctctgagactgtcttgtgccgccagcggcttcagcttcagcgacttttggatgagctgggtccgacaggcccctggcaaaggacttgaatgggtcgccacaatcagccaggccggcagcgagaaggactacgtggactctgtgaagggcagattcaccatcagccgggacaacgccaagaagtccctgtacctccagatgaacagcctgagagccgaggacaccgccgtgtactattgtgcctctggcgtgtacagcttcgactacagaggccagggcaccctggtcacagtctcttctggtaccggcggaggcggatctggcggcggaggtagcggtggcggaggatctgaattcgacatccagatgacccagagccccagcagcctgtctgccagcgtgggcgacagagtgaccatcacatgcaaggccagccaggacgtgggaacagccgtggcctggtatcagcagaagcctggcaaggcccccaagctgctgatctacagcgccagctacagatccaccggcgtgcccagcagattttccggctctggcagcggcaccgacttcaccctgaccatctctagcctccagcccgaggacttcgccacctactactgccagcaccactactccgccccctggacatttggcggaggcaccaaggtggaaatcaagctcgaggacctgaagaacgtgttcccacctgaggtggccgtgttcgagcctagcgaggccgagatcagccacacccagaaagccaccctcgtgtgcctggctaccggcttctaccccgaccatgtggaactgtcttggtgggtcaacggcaaagaggtgcacagcggcgtgtgtaccgacccccagccactgaaagaacagcccgccctgaacgacagccggtactgcctgagcagcagactgagagtgtccgccaccttctggcagaacccccggaaccacttcagatgccaggtgcagttctacggcctgagcgagaacgacgagtggacccaggacagagccaagcccgtgacccagatcgtgtctgccgaagcctggggcagagccgatgatgtgattaagatccactggcaggaaaagaagtccaacaccatcctgggcagccaggaaggcaacaccatgaagaccaacgacacctacatgaagttcagctggctgaccgtgcccgagaagtccctggacaaagaacacagatgcatcgtgcggcacgaaaacaacaagaacggcgtggaccaggaaatcatcttcccacccatcaagaccgatgtgattacaatggaccccaaggacaactgctccaaggacgccaacgataccctgctgctccagctgaccaacaccagcgcctactacatgtacttgttgctgctgctgaagtccgtggtgtacttcgccatcatcacatgctgcctgctgcggagaaccgccttctgctgcaacggcgagaagtctagggccaagcgatctggatctggagcaacaaacttctcactactcaaacaagcaggtgacgtggaggagaatcccgggcctactagtatggactggatttggcgcatccttttccttgtcggcgctgctaccggcgcgcattccttcgaagaagtgcaactggtggaatcaggcggcggactggtgcagcctggcggatctctgagactgagctgtgccgccagcggcttcaccttcagcagaaacggcatgagctgggtgcgccaggcccctggaaaaggactggaatgggtggcaaccgtgtccagcggcggcagctacatctactacgccgacagcgtgaagggccggttcaccatctccagagacaacgccaagaacagcctgtacctccagatgaactccctgcgggccgaggacaccgccgtgtactattgtgccagacagggcaccaccgccctggctaccagattcttcgatgtgtggggccagggcaccctcgtgaccgtgtcatctacgcgtatccagaaccctgatcctgccgtgtaccagctgcgggatagcaagagcagcgacaagagcgtgtgtctgttcaccgacttcgacagccagaccaacgtgtcccagagcaaggactccgacgtgtacatcaccgataagtgcgtgctggacatgcggagcatggacttcaagagcaactccgccgtggcctggtccaacaagtccgatttcgcctgcgccaacgccttcaacaacagcattatccccgaggacacattcttcccaagccccgagagcagcgactccaccgaccacgtgaagcccaaagagacagagaacaccaagcagcccagcaagagctgccacaagcccaaggccatcgtgcacaccgagaaagtgaacatgatgagcctgaccgtgctgggcctgcggatgctgttcgccaaaaccgtggccgtgaacttcctgctgaccgccaagctgttcttcctc

SEQ ID NO: 7442 - DNA, 2565 bp, synthetic construct
  source 1..2565: mol_type = other DNA
atggccttaccagtgaccgccttgctcctgccgctggccttgctgctccacgccgccaggccggaagtgcagctggttgaatctggcggaggactggttcagcctggcggatctctgagactgtcttgtgccgccagcggcttcagcttcagcgacttttggatgagctgggtccgacaggcccctggcaaaggacttgaatgggtcgccacaatcagccaggccggcagcgagaaggactacgtggactctgtgaagggcagattcaccatcagccgggacaacgccaagaagtccctgtacctccagatgaacagcctgagagccgaggacaccgccgtgtactattgtgcctctggcgtgtacagcttcgactacagaggccagggcaccctggtcacagtctcttctggtaccggcggaggcggatctggcggcggaggtagcggtggcggaggatctgaattcgacatccagatgacccagagcccccctagcctgtctgcctctgtgggcggcaaagtgaccatcacatgcaaggccagccaggacatcgaccgctacatggcctggtatcaggacaagcccggcaagggacccaagctgctgatccacgataccagcaccctccagcccggcatccccagcagattttctggcagcggctccggcagagactacagcttcagcatcagcaacctggaacccgaggacattgccacctactactgcctccagtacgacaacctgtggaccttcggcggaggcaccaagctggaaatcaagagactcgaggacctgaagaacgtgttcccacctgaggtggccgtgttcgagcctagcgaggccgagatcagccacacccagaaagccaccctcgtgtgcctggctaccggcttctaccccgaccatgtggaactgtcttggtgggtcaacggcaaagaggtgcacagcggcgtgtgtaccgacccccagccactgaaagaacagcccgccctgaacgacagccggtactgcctgagcagcagactgagagtgtccgccaccttctggcagaacccccggaaccacttcagatgccaggtgcagttctacggcctgagcgagaacgacgagtggacccaggacagagccaagcccgtgacccagatcgtgtctgccgaagcctggggcagagccgatgatgtgattaagatccactggcaggaaaagaagtccaacaccatcctgggcagccaggaaggcaacaccatgaagaccaacgacacctacatgaagttcagctggctgaccgtgcccgagaagtccctggacaaagaacacagatgcatcgtgcggcacgaaaacaacaagaacggcgtggaccaggaaatcatcttcccacccatcaagaccgatgtgattacaatggaccccaaggacaactgctccaaggacgccaacgataccctgctgctccagctgaccaacaccagcgcctactacatgtacttgttgctgctgctgaagtccgtggtgtacttcgccatcatcacatgctgcctgctgcggagaaccgccttctgctgcaacggcgagaagtctagggccaagcgatctggatctggagcaacaaacttctcactactcaaacaagcaggtgacgtggaggagaatcccgggcctactagtatggactggatttggcgcatccttttccttgtcggcgctgctaccggcgcgcattccttcgaacaggtgcaactggtgcagagcggagccgagcttgtgaagcctggcgcttccgtgaagatgagctgcaaagccagcggctacatcttcaccaactacaacatccactgggtcaagaagtccccaggccagggcctggaatggatcggagccatctaccccggaaacggcgacgccccttacagccagaagttccaggacagagccaccctgaccgccgacaccagcagcagcaccacctacatggaactgagcagcctgaccagcgaggacagcgccgtgtactattgcgtgcgggccaactgggatgtggccttcgcctattggggccagggcacactggtgtccgtgtcctctacgcgtatccagaaccctgatcctgccgtgtaccagctgcgggatagcaagagcagcgacaagagcgtgtgtctgttcaccgacttcgacagccagaccaacgtgtcccagagcaaggactccgacgtgtacatcaccgataagtgcgtgctggacatgcggagcatggacttcaagagcaactccgccgtggcctggtccaacaagtccgatttcgcctgcgccaacgccttcaacaacagcattatccccgaggacacattcttcccaagccccgagagcagcgactccaccgaccacgtgaagcccaaagagacagagaacaccaagcagcccagcaagagctgccacaagcccaaggccatcgtgcacaccgagaaagtgaacatgatgagcctgaccgtgctgggcctgcggatgctgttcgccaaaaccgtggccgtgaacttcctgctgaccgccaagctgttcttcctc

SEQ ID NO: 7443 - DNA, 2568 bp, synthetic construct
  source 1..2568: mol_type = other DNA
atggccttaccagtgaccgccttgctcctgccgctggccttgctgctccacgccgccaggccggaagtgcagctggttgaatctggcggaggactggttcagcctggcggatctctgagactgtcttgtgccgccagcggcttcagcttcagcgacttttggatgagctgggtccgacaggcccctggcaaaggacttgaatgggtcgccacaatcagccaggccggcagcgagaaggactacgtggactctgtgaagggcagattcaccatcagccgggacaacgccaagaagtccctgtacctccagatgaacagcctgagagccgaggacaccgccgtgtactattgtgcctctggcgtgtacagcttcgactacagaggccagggcaccctggtcacagtctcttctggtaccggcggaggcggatctggcggcggaggtagcggtggcggaggatctgaattcgacatccagatgacccagagccctgccagcctgtctgcctctgtgggcgagacagtgaccatcacctgtcgggtgtccggcaacatccacaactacctggcctggtatcagcagaagcagggcaagagcccccaactgctggtgtacaacgccaagaccctggccgatggcgtgcccagcagattttctggctctggcagcggcacccagtacagcctgaagatcaacagcctccagcccgaggacttcggcagctactactgccagcacttctggtccaacccctacaccttcggcggaggcaccaagctggaaatcaagctcgaggacctgaagaacgtgttcccacctgaggtggccgtgttcgagcctagcgaggccgagatcagccacacccagaaagccaccctcgtgtgcctggctaccggcttctaccccgaccatgtggaactgtcttggtgggtcaacggcaaagaggtgcacagcggcgtgtgtaccgacccccagccactgaaagaacagcccgccctgaacgacagccggtactgcctgagcagcagactgagagtgtccgccaccttctggcagaacccccggaaccacttcagatgccaggtgcagttctacggcctgagcgagaacgacgagtggacccaggacagagccaagcccgtgacccagatcgtgtctgccgaagcctggggcagagccgatgatgtgattaagatccactggcaggaaaagaagtccaacaccatcctgggcagccaggaaggcaacaccatgaagaccaacgacacctacatgaagttcagctggctgaccgtgcccgagaagtccctggacaaagaacacagatgcatcgtgcggcacgaaaacaacaagaacggcgtggaccaggaaatcatcttcccacccatcaagaccgatgtgattacaatggaccccaaggacaactgctccaaggacgccaacgataccctgctgctccagctgaccaacaccagcgcctactacatgtacttgttgctgctgctgaagtccgtggtgtacttcgccatcatcacatgctgcctgctgcggagaaccgccttctgctgcaacggcgagaagtctagggccaagcgatctggatctggagcaacaaacttctcactactcaaacaagcaggtgacgtggaggagaatcccgggcctactagtatggactggatttggcgcatccttttccttgtcggcgctgctaccggcgcgcattccttcgaacaggtgcaactccagcagtctggcgcttccgtgaaggtgtcctgcaaggccagcgaactcgtgcggcctggcacaggctacgccttcaccaattacctgatcgagtgggtcaagcagaggcccggacagggcctggaatggatcggagtgattaacccaggcagcggcggcaccaactacaacgagaagttcaagggcaaggccaccctgaccgccgacaagagcagcagcacagcctacatgcaactgagcagcctgaccagcgacgacagcgccgtgtacttctgcgcccggtacagaagctacgactggtacttcgacgtgtggggagccggcaccaccgtgacagtgtcatctacgcgtatccagaaccctgatcctgccgtgtaccagctgcgggatagcaagagcagcgacaagagcgtgtgtctgttcaccgacttcgacagccagaccaacgtgtcccagagcaaggactccgacgtgtacatcaccgataagtgcgtgctggacatgcggagcatggacttcaagagcaactccgccgtggcctggtccaacaagtccgatttcgcctgcgccaacgccttcaacaacagcattatccccgaggacacattcttcccaagccccgagagcagcgactccaccgaccacgtgaagcccaaagagacagagaacaccaagcagcccagcaagagctgccacaagcccaaggccatcgtgcacaccgagaaagtgaacatgatgagcctgaccgtgctgggcctgcggatgctgttcgccaaaaccgtggccgtgaacttcctgctgaccgccaagctgttcttcctc

SEQ ID NO: 7444 - DNA, 2565 bp, synthetic construct
  source 1..2565: mol_type = other DNA
atggccttaccagtgaccgccttgctcctgccgctggccttgctgctccacgccgccaggccggaagtgcagctggttgaatctggcggaggactggttcagcctggcggatctctgagactgtcttgtgccgccagcggcttcagcttcagcgacttttggatgagctgggtccgacaggcccctggcaaaggacttgaatgggtcgccacaatcagccaggccggcagcgagaaggactacgtggactctgtgaagggcagattcaccatcagccgggacaacgccaagaagtccctgtacctccagatgaacagcctgagagccgaggacaccgccgtgtactattgtgcctctggcgtgtacagcttcgactacagaggccagggcaccctggtcacagtctcttctggtaccggcggaggcggatctggcggcggaggtagcggtggcggaggatctgaattcgacatccagatgacccagagcttcagcagcctgagcgccagcgtgggcgacagagtgaccatcacctgtagagccagccaggacatcagcaactacctgaactggtatcagcagaagcccggcaaggcccccaagctgctgatctactacaccagcagactgcacagcggcgtgcccagcagattttctggcagcggctccggcaccgactacaccctgacaatcagctccctgcagcccgaggacttcgctacctacttctgtcagcaaggcaacaccctgccctggacctttggcggaggcaccaagctggaaatcaagagactcgaggacctgaagaacgtgttcccacctgaggtggccgtgttcgagcctagcgaggccgagatcagccacacccagaaagccaccctcgtgtgcctggctaccggcttctaccccgaccatgtggaactgtcttggtgggtcaacggcaaagaggtgcacagcggcgtgtgtaccgacccccagccactgaaagaacagcccgccctgaacgacagccggtactgcctgagcagcagactgagagtgtccgccaccttctggcagaacccccggaaccacttcagatgccaggtgcagttctacggcctgagcgagaacgacgagtggacccaggacagagccaagcccgtgacccagatcgtgtctgccgaagcctggggcagagccgatgatgtgattaagatccactggcaggaaaagaagtccaacaccatcctgggcagccaggaaggcaacaccatgaagaccaacgacacctacatgaagttcagctggctgaccgtgcccgagaagtccctggacaaagaacacagatgcatcgtgcggcacgaaaacaacaagaacggcgtggaccaggaaatcatcttcccacccatcaagaccgatgtgattacaatggaccccaaggacaactgctccaaggacgccaacgataccctgctgctccagctgaccaacaccagcgcctactacatgtacttgttgctgctgctgaagtccgtggtgtacttcgccatcatcacatgctgcctgctgcggagaaccgccttctgctgcaacggcgagaagtctagggccaagcgatctggatctggagcaacaaacttctcactactcaaacaagcaggtgacgtggaggagaatcccgggcctactagtatggactggatttggcgcatccttttccttgtcggcgctgctaccggcgcgcattccttcgaagaagtgcaactggtgcagtccggcggagggctggtgcagagcggaggatctctgagactgagctgcagagccagcggctacaccttcacccggtactggatgctgtgggtgcgccagaggccaggcaagggactggaatgggtggccgagatcaacccccggaacgaccggaccaactacaacgagaagttcaagacccggttcaccatcagcgtggacagaagcaagaacaccctgtacctgcagatggacagcctgcgggccgaggataccgccgtgtacttttgtgctctgggaggcggctacgctatggactactggggccagggaacccttgtgaccgtgtcctctacgcgtatccagaaccctgatcctgccgtgtaccagctgcgggatagcaagagcagcgacaagagcgtgtgtctgttcaccgacttcgacagccagaccaacgtgtcccagagcaaggactccgacgtgtacatcaccgataagtgcgtgctggacatgcggagcatggacttcaagagcaactccgccgtggcctggtccaacaagtccgatttcgcctgcgccaacgccttcaacaacagcattatccccgaggacacattcttcccaagccccgagagcagcgactccaccgaccacgtgaagcccaaagagacagagaacaccaagcagcccagcaagagctgccacaagcccaaggccatcgtgcacaccgagaaagtgaacatgatgagcctgaccgtgctgggcctgcggatgctgttcgccaaaaccgtggccgtgaacttcctgctgaccgccaagctgttcttcctc

SEQ ID NO: 7445 - DNA, 2568 bp, synthetic construct
  source 1..2568: mol_type = other DNA
atggccttaccagtgaccgccttgctcctgccgctggccttgctgctccacgccgccaggccggaagtgcagctggttgaatctggcggaggactggttcagcctggcggatctctgagactgtcttgtgccgccagcggcttcagcttcagcgacttttggatgagctgggtccgacaggcccctggcaaaggacttgaatgggtcgccacaatcagccaggccggcagcgagaaggactacgtggactctgtgaagggcagattcaccatcagccgggacaacgccaagaagtccctgtacctccagatgaacagcctgagagccgaggacaccgccgtgtactattgtgcctctggcgtgtacagcttcgactacagaggccagggcaccctggtcacagtctcttctggtaccggcggaggcggatctggcggcggaggtagcggtggcggaggatctgaattcgacatccagatgacacagtctccggcgtcactgtccgcctccgtgggggagactgtgactattatttgtagggcatcagttaacatctactcttatttggcctggtaccagcagaagcaaggcaagagtcctcagctgctggtgtataatgcgaagatcctggcagagggcgtgccgagccggttctccggcagcggctcaggtacccaattttccctcaagatcaattcactgcagccagaggactttggcagttactattgtcaacaccactacggcacattcactttcgggtccggtacaaaattggagattaagcgactcgaggacctgaagaacgtgttcccacctgaggtggccgtgttcgagcctagcgaggccgagatcagccacacccagaaagccaccctcgtgtgcctggctaccggcttctaccccgaccatgtggaactgtcttggtgggtcaacggcaaagaggtgcacagcggcgtgtgtaccgacccccagccactgaaagaacagcccgccctgaacgacagccggtactgcctgagcagcagactgagagtgtccgccaccttctggcagaacccccggaaccacttcagatgccaggtgcagttctacggcctgagcgagaacgacgagtggacccaggacagagccaagcccgtgacccagatcgtgtctgccgaagcctggggcagagccgatgatgtgattaagatccactggcaggaaaagaagtccaacaccatcctgggcagccaggaaggcaacaccatgaagaccaacgacacctacatgaagttcagctggctgaccgtgcccgagaagtccctggacaaagaacacagatgcatcgtgcggcacgaaaacaacaagaacggcgtggaccaggaaatcatcttcccacccatcaagaccgatgtgattacaatggaccccaaggacaactgctccaaggacgccaacgataccctgctgctccagctgaccaacaccagcgcctactacatgtacttgttgctgctgctgaagtccgtggtgtacttcgccatcatcacatgctgcctgctgcggagaaccgccttctgctgcaacggcgagaagtctagggccaagcgatctggatctggagcaacaaacttctcactactcaaacaagcaggtgacgtggaggagaatcccgggcctactagtatggactggatttggcgcatccttttccttgtcggcgctgctaccggcgcgcattccttcgaacaggtacagttgaaagaaagcgggcctggactggtagcgccttcccaatctctctccatcacgtgcaccatctctggcttctccctgacttcctatggagttcactgggtgaggcagccccccggcaagggactggaatggctggtcgtcatctggtccgacgggtccacaacctacaactccgctctgaaaagtcggctctctatttctaaagataatagcaagagccaggtgtttctgaaaatgaactctctgcagaccgatgatacggccatttactactgcgcttcacactatggctcaaccttggcattcgcttcctggggccacggaacactggtgaccgtttccgcagccacgcgtatccagaaccctgatcctgccgtgtaccagctgcgggatagcaagagcagcgacaagagcgtgtgtctgttcaccgacttcgacagccagaccaacgtgtcccagagcaaggactccgacgtgtacatcaccgataagtgcgtgctggacatgcggagcatggacttcaagagcaactccgccgtggcctggtccaacaagtccgatttcgcctgcgccaacgccttcaacaacagcattatccccgaggacacattcttcccaagccccgagagcagcgactccaccgaccacgtgaagcccaaagagacagagaacaccaagcagcccagcaagagctgccacaagcccaaggccatcgtgcacaccgagaaagtgaacatgatgagcctgaccgtgctgggcctgcggatgctgttcgccaaaaccgtggccgtgaacttcctgctgaccgccaagctgttcttcctc

SEQ ID NO: 7446 - DNA, 2592 bp, synthetic construct
  source 1..2592: mol_type = other DNA
atggccttaccagtgaccgccttgctcctgccgctggccttgctgctccacgccgccaggccggaagtgcagctggttgaatctggcggaggactggttcagcctggcggatctctgagactgtcttgtgccgccagcggcttcagcttcagcgacttttggatgagctgggtccgacaggcccctggcaaaggacttgaatgggtcgccacaatcagccaggccggcagcgagaaggactacgtggactctgtgaagggcagattcaccatcagccgggacaacgccaagaagtccctgtacctccagatgaacagcctgagagccgaggacaccgccgtgtactattgtgcctctggcgtgtacagcttcgactacagaggccagggcaccctggtcacagtctcttctggtaccggcggaggcggatctggcggcggaggtagcggtggcggaggatctgaattcgacattgtgatgacccagtctcacaaattcatgtccacatcagtaggagacagggtcagcgtcacctgcaaggccagtcagaatgtgggtaataatgtagcctggtatcaacagaaaccagggcaatctcctaaagtactgatttactcggcatcctaccggtacagtggagtccctgatcgcttcacaggcagtggatctgggacagatttcactctcaccatcagtaatgtgcagtctgaagacttggcagagtatttctgtcagcaatataacacctatccattcacgttcggctcggggacaaagttggaaataaaactcgaggacctgaagaacgtgttcccacctgaggtggccgtgttcgagcctagcgaggccgagatcagccacacccagaaagccaccctcgtgtgcctggctaccggcttctaccccgaccatgtggaactgtcttggtgggtcaacggcaaagaggtgcacagcggcgtgtgtaccgacccccagccactgaaagaacagcccgccctgaacgacagccggtactgcctgagcagcagactgagagtgtccgccaccttctggcagaacccccggaaccacttcagatgccaggtgcagttctacggcctgagcgagaacgacgagtggacccaggacagagccaagcccgtgacccagatcgtgtctgccgaagcctggggcagagccgatgatgtgattaagatccactggcaggaaaagaagtccaacaccatcctgggcagccaggaaggcaacaccatgaagaccaacgacacctacatgaagttcagctggctgaccgtgcccgagaagtccctggacaaagaacacagatgcatcgtgcggcacgaaaacaacaagaacggcgtggaccaggaaatcatcttcccacccatcaagaccgatgtgattacaatggaccccaaggacaactgctccaaggacgccaacgataccctgctgctccagctgaccaacaccagcgcctactacatgtacttgttgctgctgctgaagtccgtggtgtacttcgccatcatcacatgctgcctgctgcggagaaccgccttctgctgcaacggcgagaagtctagggccaagcgatctggatctggagcaacaaacttctcactactcaaacaagcaggtgacgtggaggagaatcccgggcctactagtatggactggatttggcgcatccttttccttgtcggcgctgctaccggcgcgcattccttcgaagaggtacagctggaggaaagcggtggaggactggtgcaacctggagggtctatgaagctctcttgcgtagcttctgggttcacgttctccaattactggatgaactgggtgcggcagtcccccgagaaaggcctggaatgggtagcagaaattcggttcaagtcccataactatgctacacactttgccgagtctgtcaaaggccggttcactattagtcgagacgacagcaagtcttcagtctacctgcagatgaataacttgcgggcagaggacacaggtatctactactgcaccaggagaatcggcaactccgactatgactggtggtactttgacgtctggggagcaggcaccagcgtgacggtgagttcagcctcaacgcgtatccagaaccctgatcctgccgtgtaccagctgcgggatagcaagagcagcgacaagagcgtgtgtctgttcaccgacttcgacagccagaccaacgtgtcccagagcaaggactccgacgtgtacatcaccgataagtgcgtgctggacatgcggagcatggacttcaagagcaactccgccgtggcctggtccaacaagtccgatttcgcctgcgccaacgccttcaacaacagcattatccccgaggacacattcttcccaagccccgagagcagcgactccaccgaccacgtgaagcccaaagagacagagaacaccaagcagcccagcaagagctgccacaagcccaaggccatcgtgcacaccgagaaagtgaacatgatgagcctgaccgtgctgggcctgcggatgctgttcgccaaaaccgtggccgtgaacttcctgctgaccgccaagctgttcttcctc

SEQ ID NO: 7447 - DNA, 2571 bp, synthetic construct
  source 1..2571: mol_type = other DNA
atggccttaccagtgaccgccttgctcctgccgctggccttgctgctccacgccgccaggccggaagtgcagctggttgaatctggcggaggactggttcagcctggcggatctctgagactgtcttgtgccgccagcggcttcagcttcagcgacttttggatgagctgggtccgacaggcccctggcaaaggacttgaatgggtcgccacaatcagccaggccggcagcgagaaggactacgtggactctgtgaagggcagattcaccatcagccgggacaacgccaagaagtccctgtacctccagatgaacagcctgagagccgaggacaccgccgtgtactattgtgcctctggcgtgtacagcttcgactacagaggccagggcaccctggtcacagtctcttctggtaccggcggaggcggatctggcggcggaggtagcggtggcggaggatctgaattcgaccagatcgtgctgacccagtcccccgctattatgtccgcatcaccgggcgaaaaagtgacgatctcctgtagcgcttcatctagcgtctcctacatgtattggtatcaacagaaacctgggtctagcccaaagccgtggatctacagaaccagtaaccttgccagtggggtgccagcccgcttcagcggtagtggcagtggaacttcctatagcctcacaataagcaacatggaggctgaagatgccgctgcctattactgccagcagtaccacagttacccaaccacgttcggcgggggaactaagctcgaagtaaaactcgaggacctgaagaacgtgttcccacctgaggtggccgtgttcgagcctagcgaggccgagatcagccacacccagaaagccaccctcgtgtgcctggctaccggcttctaccccgaccatgtggaactgtcttggtgggtcaacggcaaagaggtgcacagcggcgtgtgtaccgacccccagccactgaaagaacagcccgccctgaacgacagccggtactgcctgagcagcagactgagagtgtccgccaccttctggcagaacccccggaaccacttcagatgccaggtgcagttctacggcctgagcgagaacgacgagtggacccaggacagagccaagcccgtgacccagatcgtgtctgccgaagcctggggcagagccgatgatgtgattaagatccactggcaggaaaagaagtccaacaccatcctgggcagccaggaaggcaacaccatgaagaccaacgacacctacatgaagttcagctggctgaccgtgcccgagaagtccctggacaaagaacacagatgcatcgtgcggcacgaaaacaacaagaacggcgtggaccaggaaatcatcttcccacccatcaagaccgatgtgattacaatggaccccaaggacaactgctccaaggacgccaacgataccctgctgctccagctgaccaacaccagcgcctactacatgtacttgttgctgctgctgaagtccgtggtgtacttcgccatcatcacatgctgcctgctgcggagaaccgccttctgctgcaacggcgagaagtctagggccaagcgatctggatctggagcaacaaacttctcactactcaaacaagcaggtgacgtggaggagaatcccgggcctactagtatggactggatttggcgcatccttttccttgtcggcgctgctaccggcgcgcattccttcgaagaggtgcagctggtggaatctgggggcggcctggtccaacctaagggatcactcaagctctcttgtgcggccagcggattctctttcaatacctatgctatgaattgggtgagacaggcgcccggaaagggcctcgaatggatagcccatatccggtcaaaatcaaacaatttcgcaacctactatgcggactccgtgaaggaccgattttccatctcccgagatgcctccgagaatattctgttcctgcagatgaataacctcaagacagaggacaccgccatgtactactgtgtgcgccagggcggtgactttcccatggattactgggggcaggggaccagcgtgaccgtgagctctacgcgtatccagaaccctgatcctgccgtgtaccagctgcgggatagcaagagcagcgacaagagcgtgtgtctgttcaccgacttcgacagccagaccaacgtgtcccagagcaaggactccgacgtgtacatcaccgataagtgcgtgctggacatgcggagcatggacttcaagagcaactccgccgtggcctggtccaacaagtccgatttcgcctgcgccaacgccttcaacaacagcattatccccgaggacacattcttcccaagccccgagagcagcgactccaccgaccacgtgaagcccaaagagacagagaacaccaagcagcccagcaagagctgccacaagcccaaggccatcgtgcacaccgagaaagtgaacatgatgagcctgaccgtgctgggcctgcggatgctgttcgccaaaaccgtggccgtgaacttcctgctgaccgccaagctgttcttcctc

SEQ ID NO: 7448 - DNA, 2568 bp, synthetic construct
  source 1..2568: mol_type = other DNA
atggccttaccagtgaccgccttgctcctgccgctggccttgctgctccacgccgccaggccggaagtgcagctggttgaatctggcggaggactggttcagcctggcggatctctgagactgtcttgtgccgccagcggcttcagcttcagcgacttttggatgagctgggtccgacaggcccctggcaaaggacttgaatgggtcgccacaatcagccaggccggcagcgagaaggactacgtggactctgtgaagggcagattcaccatcagccgggacaacgccaagaagtccctgtacctccagatgaacagcctgagagccgaggacaccgccgtgtactattgtgcctctggcgtgtacagcttcgactacagaggccagggcaccctggtcacagtctcttctggtaccggcggaggcggatctggcggcggaggtagcggtggcggaggatctgaattcgacgacatccagatgacccagagcagcagcagcttcagcgtgagcctgggcgacagagtgaccatcacctgcatggccagcgaggacatctacatcagactggcctggtaccagcagaagcccggcaacgcccccagactgctgatcagcgccgccaccagcctggagaccggcgtgcccagcagattcagcggcagcggcagcggcaaggactacaccctgagcatcaccagcctgcagaccgaggacgtgggcacctactactgccagcagtactggagcagcccctggaccttcggcggcggcaccaagctggagatcaacctcgaggacctgaagaacgtgttcccacctgaggtggccgtgttcgagcctagcgaggccgagatcagccacacccagaaagccaccctcgtgtgcctggctaccggcttctaccccgaccatgtggaactgtcttggtgggtcaacggcaaagaggtgcacagcggcgtgtgtaccgacccccagccactgaaagaacagcccgccctgaacgacagccggtactgcctgagcagcagactgagagtgtccgccaccttctggcagaacccccggaaccacttcagatgccaggtgcagttctacggcctgagcgagaacgacgagtggacccaggacagagccaagcccgtgacccagatcgtgtctgccgaagcctggggcagagccgatgatgtgattaagatccactggcaggaaaagaagtccaacaccatcctgggcagccaggaaggcaacaccatgaagaccaacgacacctacatgaagttcagctggctgaccgtgcccgagaagtccctggacaaagaacacagatgcatcgtgcggcacgaaaacaacaagaacggcgtggaccaggaaatcatcttcccacccatcaagaccgatgtgattacaatggaccccaaggacaactgctccaaggacgccaacgataccctgctgctccagctgaccaacaccagcgcctactacatgtacttgttgctgctgctgaagtccgtggtgtacttcgccatcatcacatgctgcctgctgcggagaaccgccttctgctgcaacggcgagaagtctagggccaagcgatctggatctggagcaacaaacttctcactactcaaacaagcaggtgacgtggaggagaatcccgggcctactagtatggactggatttggcgcatccttttccttgtcggcgctgctaccggcgcgcattccttcgaagacgtgcagctgcaggagagcggccccggcctggtgaagcccagccagagcctgagcctgacctgcaccgtgaccggctacagcatcaccagcgactacacctggaactggatcagacagttccccggcaacaagctggagtggatgggctacatcacctacagcggcagcaccagctacaaccccagcctgaagagcagaaacagcatcaccagagacaccagcaagaaccagttcttcctgcagctgaacagcgtgaccaccgaggacaccgccacctactactgcgccagactgggcagaagatacacaatggactactggggccagggcaccagcgtgaccgtgagcagcacgcgtatccagaaccctgatcctgccgtgtaccagctgcgggatagcaagagcagcgacaagagcgtgtgtctgttcaccgacttcgacagccagaccaacgtgtcccagagcaaggactccgacgtgtacatcaccgataagtgcgtgctggacatgcggagcatggacttcaagagcaactccgccgtggcctggtccaacaagtccgatttcgcctgcgccaacgccttcaacaacagcattatccccgaggacacattcttcccaagccccgagagcagcgactccaccgaccacgtgaagcccaaagagacagagaacaccaagcagcccagcaagagctgccacaagcccaaggccatcgtgcacaccgagaaagtgaacatgatgagcctgaccgtgctgggcctgcggatgctgttcgccaaaaccgtggccgtgaacttcctgctgaccgccaagctgttcttcctc

SEQ ID NO: 7449 - DNA, 2577 bp, synthetic construct
  source 1..2577: mol_type = other DNA
atggccttaccagtgaccgccttgctcctgccgctggccttgctgctccacgccgccaggccggaagtgcagctggttgaatctggcggaggactggttcagcctggcggatctctgagactgtcttgtgccgccagcggcttcagcttcagcgacttttggatgagctgggtccgacaggcccctggcaaaggacttgaatgggtcgccacaatcagccaggccggcagcgagaaggactacgtggactctgtgaagggcagattcaccatcagccgggacaacgccaagaagtccctgtacctccagatgaacagcctgagagccgaggacaccgccgtgtactattgtgcctctggcgtgtacagcttcgactacagaggccagggcaccctggtcacagtctcttctggtaccggcggaggcggatctggcggcggaggtagcggtggcggaggatctgaattcgacgacatccagatgacccagagccccagcagcctgtctgccagcgtgggcgacagagtgaccatcacctgtagagccagccagagcatcagcagctacctgaactggtatcagcagaagcccggcaaggcccccaaactgctgatctacgacgccagcaacctggaaaccggcgtgcccagcagattttccggcagcggctctggcaccgacttcaccttcaccatcagctccctccagcccgaggacattgccacctactactgccagcagtacgacaacctgcccctgacctttggcggaggcaccaaggtggacatcaagagactcgaggacctgaagaacgtgttcccacctgaggtggccgtgttcgagcctagcgaggccgagatcagccacacccagaaagccaccctcgtgtgcctggctaccggcttctaccccgaccatgtggaactgtcttggtgggtcaacggcaaagaggtgcacagcggcgtgtgtaccgacccccagccactgaaagaacagcccgccctgaacgacagccggtactgcctgagcagcagactgagagtgtccgccaccttctggcagaacccccggaaccacttcagatgccaggtgcagttctacggcctgagcgagaacgacgagtggacccaggacagagccaagcccgtgacccagatcgtgtctgccgaagcctggggcagagccgatgatgtgattaagatccactggcaggaaaagaagtccaacaccatcctgggcagccaggaaggcaacaccatgaagaccaacgacacctacatgaagttcagctggctgaccgtgcccgagaagtccctggacaaagaacacagatgcatcgtgcggcacgaaaacaacaagaacggcgtggaccaggaaatcatcttcccacccatcaagaccgatgtgattacaatggaccccaaggacaactgctccaaggacgccaacgataccctgctgctccagctgaccaacaccagcgcctactacatgtacttgttgctgctgctgaagtccgtggtgtacttcgccatcatcacatgctgcctgctgcggagaaccgccttctgctgcaacggcgagaagtctagggccaagcgatctggatctggagcaacaaacttctcactactcaaacaagcaggtgacgtggaggagaatcccgggcctactagtatggactggatttggcgcatccttttccttgtcggcgctgctaccggcgcgcattccttcgaacaggtgcaactggtggaatctggcggcggagtggtgcagcctggcagaagcctgagactgagctgtgccgccagcggcttcacctttagcagctacgccatgcactgggtgcgccaggcccctggaaaaggcctggaatgggtggccgtgatctcctacgacggctccaacaagtattacgccgacagcgtgaagggccggttcaccatctccagagacaacagcaagaacaccctgtacctccagatgaacagcctgcgggccgaggacaccgccgtgtactattgtgccagggctcacaacagcagctcttggagcttcgactactggggccagggcaccctcgtgaccgtgtcatctacgcgtatccagaaccctgatcctgccgtgtaccagctgcgggatagcaagagcagcgacaagagcgtgtgtctgttcaccgacttcgacagccagaccaacgtgtcccagagcaaggactccgacgtgtacatcaccgataagtgcgtgctggacatgcggagcatggacttcaagagcaactccgccgtggcctggtccaacaagtccgatttcgcctgcgccaacgccttcaacaacagcattatccccgaggacacattcttcccaagccccgagagcagcgactccaccgaccacgtgaagcccaaagagacagagaacaccaagcagcccagcaagagctgccacaagcccaaggccatcgtgcacaccgagaaagtgaacatgatgagcctgaccgtgctgggcctgcggatgctgttcgccaaaaccgtggccgtgaacttcctgctgaccgccaagctgttcttcctc

SEQ ID NO: 7450 - DNA, 2604 bp, synthetic construct
  source 1..2604: mol_type = other DNA
atggccttaccagtgaccgccttgctcctgccgctggccttgctgctccacgccgccaggccggaagtgcagctggttgaatctggcggaggactggttcagcctggcggatctctgagactgtcttgtgccgccagcggcttcagcttcagcgacttttggatgagctgggtccgacaggcccctggcaaaggacttgaatgggtcgccacaatcagccaggccggcagcgagaaggactacgtggactctgtgaagggcagattcaccatcagccgggacaacgccaagaagtccctgtacctccagatgaacagcctgagagccgaggacaccgccgtgtactattgtgcctctggcgtgtacagcttcgactacagaggccagggcaccctggtcacagtctcttctggtaccggcggaggcggatctggcggcggaggtagcggtggcggaggatctgaattcgacgacgtcgtgatgacccagagccctctgagcctgcctgtgtccctgggcgatcaggccagcatctcctgcagatccagccagagactggtgcacagcaacggcaacacctacctgcactggtatctgcagaagcccggccagagccccaagctgctgatctaccgggtgtccaacagattccccggcgtgcccgatagattcagcggctctggcagcggcaccgacttcaccctgaagatcagccgggtggaagccgaggacctgggcatctatttctgcagccagagcacccacgtgccctacacctttggcggaggcaccaagctggaaatcaagcggctcgaggacctgaagaacgtgttcccacctgaggtggccgtgttcgagcctagcgaggccgagatcagccacacccagaaagccaccctcgtgtgcctggctaccggcttctaccccgaccatgtggaactgtcttggtgggtcaacggcaaagaggtgcacagcggcgtgtgtaccgacccccagccactgaaagaacagcccgccctgaacgacagccggtactgcctgagcagcagactgagagtgtccgccaccttctggcagaacccccggaaccacttcagatgccaggtgcagttctacggcctgagcgagaacgacgagtggacccaggacagagccaagcccgtgacccagatcgtgtctgccgaagcctggggcagagccgatgatgtgattaagatccactggcaggaaaagaagtccaacaccatcctgggcagccaggaaggcaacaccatgaagaccaacgacacctacatgaagttcagctggctgaccgtgcccgagaagtccctggacaaagaacacagatgcatcgtgcggcacgaaaacaacaagaacggcgtggaccaggaaatcatcttcccacccatcaagaccgatgtgattacaatggaccccaaggacaactgctccaaggacgccaacgataccctgctgctccagctgaccaacaccagcgcctactacatgtacttgttgctgctgctgaagtccgtggtgtacttcgccatcatcacatgctgcctgctgcggagaaccgccttctgctgcaacggcgagaagtctagggccaagcgatctggatctggagcaacaaacttctcactactcaaacaagcaggtgacgtggaggagaatcccgggcctactagtatggactggatttggcgcatccttttccttgtcggcgctgctaccggcgcgcattccttcgaagaagtgcggctgcagcagtctggccccgacctgattaagcctggggccagcgtgaagatgagctgcaaggccagcggctacaccttcaccggctacgtgatgcactgggtcaagcagaggccaggccagggcctggaatggatcggcttcatcaacccctacaacgacgacatccagagcaacgagcggttccggggcaaggccaccctgaccagcgataagagcagcaccaccgcctacatggaactgagcagcctgacctccgaggacagcgccgtgtactactgtgctaggggagccggctacaacttcgacggggcctacagattcttcgacttttggggccagggcaccacactgaccgtgtcctctacgcgtatccagaaccctgatcctgccgtgtaccagctgcgggatagcaagagcagcgacaagagcgtgtgtctgttcaccgacttcgacagccagaccaacgtgtcccagagcaaggactccgacgtgtacatcaccgataagtgcgtgctggacatgcggagcatggacttcaagagcaactccgccgtggcctggtccaacaagtccgatttcgcctgcgccaacgccttcaacaacagcattatccccgaggacacattcttcccaagccccgagagcagcgactccaccgaccacgtgaagcccaaagagacagagaacaccaagcagcccagcaagagctgccacaagcccaaggccatcgtgcacaccgagaaagtgaacatgatgagcctgaccgtgctgggcctgcggatgctgttcgccaaaaccgtggccgtgaacttcctgctgaccgccaagctgttcttcctc

SEQ ID NO: 7451 - DNA, 2577 bp, synthetic construct
  source 1..2577: mol_type = other DNA
atggccttaccagtgaccgccttgctcctgccgctggccttgctgctccacgccgccaggccggaagtgcagctggttgaatctggcggaggactggttcagcctggcggatctctgagactgtcttgtgccgccagcggcttcagcttcagcgacttttggatgagctgggtccgacaggcccctggcaaaggacttgaatgggtcgccacaatcagccaggccggcagcgagaaggactacgtggactctgtgaagggcagattcaccatcagccgggacaacgccaagaagtccctgtacctccagatgaacagcctgagagccgaggacaccgccgtgtactattgtgcctctggcgtgtacagcttcgactacagaggccagggcaccctggtcacagtctcttctggtaccggcggaggcggatctggcggcggaggtagcggtggcggaggatctgaattcgacagctacgagctgacccagcctcctagcgtgtccgtgtctcctggacagaccgccaccatctcttgcagcggcgatcaactgggcgggaagtacggccactggtatcagaagaagcccggccagagccccgtgctggtgctgtaccaggacagaaaacggcctgccggcatccccgagagattcagcggaagcagcagcggcaacaccatcaccctgaccatcagcggcacccaggccgtggatgaggccgactactactgccaggcttgggacaccaatctgggcggcgtgttcggcggaggcaccaaagtgacagtgctgggacagctcgaggacctgaagaacgtgttcccacctgaggtggccgtgttcgagcctagcgaggccgagatcagccacacccagaaagccaccctcgtgtgcctggctaccggcttctaccccgaccatgtggaactgtcttggtgggtcaacggcaaagaggtgcacagcggcgtgtgtaccgacccccagccactgaaagaacagcccgccctgaacgacagccggtactgcctgagcagcagactgagagtgtccgccaccttctggcagaacccccggaaccacttcagatgccaggtgcagttctacggcctgagcgagaacgacgagtggacccaggacagagccaagcccgtgacccagatcgtgtctgccgaagcctggggcagagccgatgatgtgattaagatccactggcaggaaaagaagtccaacaccatcctgggcagccaggaaggcaacaccatgaagaccaacgacacctacatgaagttcagctggctgaccgtgcccgagaagtccctggacaaagaacacagatgcatcgtgcggcacgaaaacaacaagaacggcgtggaccaggaaatcatcttcccacccatcaagaccgatgtgattacaatggaccccaaggacaactgctccaaggacgccaacgataccctgctgctccagctgaccaacaccagcgcctactacatgtacttgttgctgctgctgaagtccgtggtgtacttcgccatcatcacatgctgcctgctgcggagaaccgccttctgctgcaacggcgagaagtctagggccaagcgatctggatctggagcaacaaacttctcactactcaaacaagcaggtgacgtggaggagaatcccgggcctactagtatggactggatttggcgcatccttttccttgtcggcgctgctaccggcgcgcattccttcgaacaggtgcaactggtggaaagcggagccgaagtgaagaaacctggggccagcgtgaaggtgtcctgcaaggccagcggctacacctttaccggctactacatgcactgggtgcgccaggctccaggccagggactggaatggatgggccggatcaaccccaatagcggcggcaccaactacgcccagaaattccagggcagagtgaccatgaccagagacaccagcatcagcaccgcctacatggaactgagccggctgagaagcgacgacaccgccgtgtactactgcgccagccctagaggcagaggcagcgccttcgatatttggggccagggcacactcgtgaccgtgtcctctacgcgtatccagaaccctgatcctgccgtgtaccagctgcgggatagcaagagcagcgacaagagcgtgtgtctgttcaccgacttcgacagccagaccaacgtgtcccagagcaaggactccgacgtgtacatcaccgataagtgcgtgctggacatgcggagcatggacttcaagagcaactccgccgtggcctggtccaacaagtccgatttcgcctgcgccaacgccttcaacaacagcattatccccgaggacacattcttcccaagccccgagagcagcgactccaccgaccacgtgaagcccaaagagacagagaacaccaagcagcccagcaagagctgccacaagcccaaggccatcgtgcacaccgagaaagtgaacatgatgagcctgaccgtgctgggcctgcggatgctgttcgccaaaaccgtggccgtgaacttcctgctgaccgccaagctgttcttcctc

SEQ ID NO: 7452 - DNA, 2586 bp, synthetic construct
  source 1..2586: mol_type = other DNA
atggccttaccagtgaccgccttgctcctgccgctggccttgctgctccacgccgccaggccggaagtgcagctggttgaatctggcggaggactggttcagcctggcggatctctgagactgtcttgtgccgccagcggcttcagcttcagcgacttttggatgagctgggtccgacaggcccctggcaaaggacttgaatgggtcgccacaatcagccaggccggcagcgagaaggactacgtggactctgtgaagggcagattcaccatcagccgggacaacgccaagaagtccctgtacctccagatgaacagcctgagagccgaggacaccgccgtgtactattgtgcctctggcgtgtacagcttcgactacagaggccagggcaccctggtcacagtctcttctggtaccggcggaggcggatctggcggcggaggtagcggtggcggaggatctgaattcgacaacttcatgctgacccagccccacagcgtgtccgagagccctggcaagaccgtgaccatctcctgcaccagaagcagcggctctatcgccagcaaatacgtgcagtggtatcagcagaggcccggcagcagccctaccaccgtgatctacgaggacaaccagaggcctagcggcgtgcccgatagattcagcggcagcatcgacaccagcagcaacagcgccagcctgaccatcagcggcctgagaacagaggacgaggccgactactactgccacagctacgacagcaacaaccactccgtgttcggcggaggcaccaaagtgacagtgctgggacagctcgaggacctgaagaacgtgttcccacctgaggtggccgtgttcgagcctagcgaggccgagatcagccacacccagaaagccaccctcgtgtgcctggctaccggcttctaccccgaccatgtggaactgtcttggtgggtcaacggcaaagaggtgcacagcggcgtgtgtaccgacccccagccactgaaagaacagcccgccctgaacgacagccggtactgcctgagcagcagactgagagtgtccgccaccttctggcagaacccccggaaccacttcagatgccaggtgcagttctacggcctgagcgagaacgacgagtggacccaggacagagccaagcccgtgacccagatcgtgtctgccgaagcctggggcagagccgatgatgtgattaagatccactggcaggaaaagaagtccaacaccatcctgggcagccaggaaggcaacaccatgaagaccaacgacacctacatgaagttcagctggctgaccgtgcccgagaagtccctggacaaagaacacagatgcatcgtgcggcacgaaaacaacaagaacggcgtggaccaggaaatcatcttcccacccatcaagaccgatgtgattacaatggaccccaaggacaactgctccaaggacgccaacgataccctgctgctccagctgaccaacaccagcgcctactacatgtacttgttgctgctgctgaagtccgtggtgtacttcgccatcatcacatgctgcctgctgcggagaaccgccttctgctgcaacggcgagaagtctagggccaagcgatctggatctggagcaacaaacttctcactactcaaacaagcaggtgacgtggaggagaatcccgggcctactagtatggactggatttggcgcatccttttccttgtcggcgctgctaccggcgcgcattccttcgaagaagtgcaactggtggaaagcgggggaggcgtggtgcagccaggcggatctctgagactgagctgtgccgccagcggcttcaccttcagcagctacgccatgagctgggtgcgccaggcccctggaaaaggcctggaatgggtgtccgccatctctggctctggcggcagcacctactacgccgatagcgtgaagggccggttcagcatcagccgggacaacagcaagaacaccctgtacctccagatgaacagcctgcgggccgaggacaccgccgtgtactactgtgccagaaccagaagctccggggccttcgacatctggggccagggaacactcgtgaccgtgtcctctacgcgtatccagaaccctgatcctgccgtgtaccagctgcgggatagcaagagcagcgacaagagcgtgtgtctgttcaccgacttcgacagccagaccaacgtgtcccagagcaaggactccgacgtgtacatcaccgataagtgcgtgctggacatgcggagcatggacttcaagagcaactccgccgtggcctggtccaacaagtccgatttcgcctgcgccaacgccttcaacaacagcattatccccgaggacacattcttcccaagccccgagagcagcgactccaccgaccacgtgaagcccaaagagacagagaacaccaagcagcccagcaagagctgccacaagcccaaggccatcgtgcacaccgagaaagtgaacatgatgagcctgaccgtgctgggcctgcggatgctgttcgccaaaaccgtggccgtgaacttcctgctgaccgccaagctgttcttcctc

SEQ ID NO: 7453 - DNA, 2571 bp, synthetic construct
  source 1..2571: mol_type = other DNA
atggccttaccagtgaccgccttgctcctgccgctggccttgctgctccacgccgccaggccggaagtgcagctggttgaatctggcggaggactggttcagcctggcggatctctgagactgtcttgtgccgccagcggcttcagcttcagcgacttttggatgagctgggtccgacaggcccctggcaaaggacttgaatgggtcgccacaatcagccaggccggcagcgagaaggactacgtggactctgtgaagggcagattcaccatcagccgggacaacgccaagaagtccctgtacctccagatgaacagcctgagagccgaggacaccgccgtgtactattgtgcctctggcgtgtacagcttcgactacagaggccagggcaccctggtcacagtctcttctggtaccggcggaggcggatctggcggcggaggtagcggtggcggaggatctgaattcgacatccagatgaaccagagccccagcagcctgagcgccagcctgggcgataccatcaccatcacctgtcacgccagccagaacatcaacgtgtggctgagctggtatcagcagaagcccggcaacatccccaagctgctgatctacaaggccagcaacctgcacaccggcgtgcccagcagattttctggcagcggctctggcaccggcttcaccattaccatcagctccctccagcccgaggacattgccacctactactgccagcagggccagagctacccctggacatttggcggaggcaccaagctggaaatcaagagactcgaggacctgaagaacgtgttcccacctgaggtggccgtgttcgagcctagcgaggccgagatcagccacacccagaaagccaccctcgtgtgcctggctaccggcttctaccccgaccatgtggaactgtcttggtgggtcaacggcaaagaggtgcacagcggcgtgtgtaccgacccccagccactgaaagaacagcccgccctgaacgacagccggtactgcctgagcagcagactgagagtgtccgccaccttctggcagaacccccggaaccacttcagatgccaggtgcagttctacggcctgagcgagaacgacgagtggacccaggacagagccaagcccgtgacccagatcgtgtctgccgaagcctggggcagagccgatgatgtgattaagatccactggcaggaaaagaagtccaacaccatcctgggcagccaggaaggcaacaccatgaagaccaacgacacctacatgaagttcagctggctgaccgtgcccgagaagtccctggacaaagaacacagatgcatcgtgcggcacgaaaacaacaagaacggcgtggaccaggaaatcatcttcccacccatcaagaccgatgtgattacaatggaccccaaggacaactgctccaaggacgccaacgataccctgctgctccagctgaccaacaccagcgcctactacatgtacttgttgctgctgctgaagtccgtggtgtacttcgccatcatcacatgctgcctgctgcggagaaccgccttctgctgcaacggcgagaagtctagggccaagcgatctggatctggagcaacaaacttctcactactcaaacaagcaggtgacgtggaggagaatcccgggcctactagtatggactggatttggcgcatccttttccttgtcggcgctgctaccggcgcgcattccttcgaagaagtgcaactccagcagagcggcccagagcttgtgaagcctggcgcttccgtgaagattagctgcaaagccagcggctacagcttcaccggctacttcatgaactgggtcaagcagagccacggcaagagcctggagtacatcggcagattcaacccctacaacggcgagacactgtacaaccagaagttcaagggcaaggccaccctgaccgtggacaagagcagcagcaccgtgcacatggaactgctgagcgtgaccagcgaggacagcgccgtgtactactgtggcagaagcggcaacgacgacgctatggactattggggccagggcaccagcgtgaccgtgtctagtgctacgcgtatccagaaccctgatcctgccgtgtaccagctgcgggatagcaagagcagcgacaagagcgtgtgtctgttcaccgacttcgacagccagaccaacgtgtcccagagcaaggactccgacgtgtacatcaccgataagtgcgtgctggacatgcggagcatggacttcaagagcaactccgccgtggcctggtccaacaagtccgatttcgcctgcgccaacgccttcaacaacagcattatccccgaggacacattcttcccaagccccgagagcagcgactccaccgaccacgtgaagcccaaagagacagagaacaccaagcagcccagcaagagctgccacaagcccaaggccatcgtgcacaccgagaaagtgaacatgatgagcctgaccgtgctgggcctgcggatgctgttcgccaaaaccgtggccgtgaacttcctgctgaccgccaagctgttcttcctc

SEQ ID NO: 7454 - DNA, 2574 bp, synthetic construct
  source 1..2574: mol_type = other DNA
atggccttaccagtgaccgccttgctcctgccgctggccttgctgctccacgccgccaggccggaagtgcagctggttgaatctggcggaggactggttcagcctggcggatctctgagactgtcttgtgccgccagcggcttcagcttcagcgacttttggatgagctgggtccgacaggcccctggcaaaggacttgaatgggtcgccacaatcagccaggccggcagcgagaaggactacgtggactctgtgaagggcagattcaccatcagccgggacaacgccaagaagtccctgtacctccagatgaacagcctgagagccgaggacaccgccgtgtactattgtgcctctggcgtgtacagcttcgactacagaggccagggcaccctggtcacagtctcttctggtaccggcggaggcggatctggcggcggaggtagcggtggcggaggatctgaattcgagatcgtgctgacacagagccctgccaccctgtctctgagccctggcgaaagagccaccctgagctgtagagccagccagagcgtgcggagctacctggcctggtatcagcagaagcctggacaggcccccagactgctgatctacgacgccagcaatcgggccacaggcatccccgccagattttctggctctggcagcggcaccgacttcaccctgacaatcagcagcctggaacccgaggacttcgccgtgtactactgccagcagcggagcaactggccccctacctttggacagggcaccaaggtggaaatcaagctcgaggacctgaagaacgtgttcccacctgaggtggccgtgttcgagcctagcgaggccgagatcagccacacccagaaagccaccctcgtgtgcctggctaccggcttctaccccgaccatgtggaactgtcttggtgggtcaacggcaaagaggtgcacagcggcgtgtgtaccgacccccagccactgaaagaacagcccgccctgaacgacagccggtactgcctgagcagcagactgagagtgtccgccaccttctggcagaacccccggaaccacttcagatgccaggtgcagttctacggcctgagcgagaacgacgagtggacccaggacagagccaagcccgtgacccagatcgtgtctgccgaagcctggggcagagccgatgatgtgattaagatccactggcaggaaaagaagtccaacaccatcctgggcagccaggaaggcaacaccatgaagaccaacgacacctacatgaagttcagctggctgaccgtgcccgagaagtccctggacaaagaacacagatgcatcgtgcggcacgaaaacaacaagaacggcgtggaccaggaaatcatcttcccacccatcaagaccgatgtgattacaatggaccccaaggacaactgctccaaggacgccaacgataccctgctgctccagctgaccaacaccagcgcctactacatgtacttgttgctgctgctgaagtccgtggtgtacttcgccatcatcacatgctgcctgctgcggagaaccgccttctgctgcaacggcgagaagtctagggccaagcgatctggatctggagcaacaaacttctcactactcaaacaagcaggtgacgtggaggagaatcccgggcctactagtatggactggatttggcgcatccttttccttgtcggcgctgctaccggcgcgcattccttcgaacaactccaggtgcaggaatctggccccggactcgtgaagcccagcgagacactgagcctgacctgtaccgtgtccggcggcagcatcagcaacagctacttctcctggggctggatcagacagccccctggcaagggcctggaatggatcggcagcttctactacggcgagaaaacctactacaaccccagcctgaagtccagagccaccatcagcatcgacaccagcaagagccagttctccctgaagctgagcagcgtgacagccgccgacaccgccgtgtattattgccccagaggccccaccatgatccggggcgtgatcgactcttggggccagggaacactcgtgaccgtgtcctctacgcgtatccagaaccctgatcctgccgtgtaccagctgcgggatagcaagagcagcgacaagagcgtgtgtctgttcaccgacttcgacagccagaccaacgtgtcccagagcaaggactccgacgtgtacatcaccgataagtgcgtgctggacatgcggagcatggacttcaagagcaactccgccgtggcctggtccaacaagtccgatttcgcctgcgccaacgccttcaacaacagcattatccccgaggacacattcttcccaagccccgagagcagcgactccaccgaccacgtgaagcccaaagagacagagaacaccaagcagcccagcaagagctgccacaagcccaaggccatcgtgcacaccgagaaagtgaacatgatgagcctgaccgtgctgggcctgcggatgctgttcgccaaaaccgtggccgtgaacttcctgctgaccgccaagctgttcttcctc

SEQ ID NO: 7455 - DNA, 2601 bp, synthetic construct
  source 1..2601: mol_type = other DNA
atggccttaccagtgaccgccttgctcctgccgctggccttgctgctccacgccgccaggccggaagtgcagctggttgaatctggcggaggactggttcagcctggcggatctctgagactgtcttgtgccgccagcggcttcagcttcagcgacttttggatgagctgggtccgacaggcccctggcaaaggacttgaatgggtcgccacaatcagccaggccggcagcgagaaggactacgtggactctgtgaagggcagattcaccatcagccgggacaacgccaagaagtccctgtacctccagatgaacagcctgagagccgaggacaccgccgtgtactattgtgcctctggcgtgtacagcttcgactacagaggccagggcaccctggtcacagtctcttctggtaccggcggaggcggatctggcggcggaggtagcggtggcggaggatctgaattcgacatcgtgatgacccagacccccctgagcctgcctgtgacacctggcgagcctgccagcatctcctgcagaagcagcagaagcctgctggacagcgacgacggcaacacctacctggactggtatctgcagaaacccggccagagcccccaactgctgatctacaccctgagctacagagccagcggcgtgcccgatagattttccggctctggcagcggcaccgacttcaccctgaagatcagccgggtggaagccgaggacgtgggcgtgtactactgtatgcagcgggtggaatttcccatcaccttcggccagggcaccagactggaaatcaagagactcgaggacctgaagaacgtgttcccacctgaggtggccgtgttcgagcctagcgaggccgagatcagccacacccagaaagccaccctcgtgtgcctggctaccggcttctaccccgaccatgtggaactgtcttggtgggtcaacggcaaagaggtgcacagcggcgtgtgtaccgacccccagccactgaaagaacagcccgccctgaacgacagccggtactgcctgagcagcagactgagagtgtccgccaccttctggcagaacccccggaaccacttcagatgccaggtgcagttctacggcctgagcgagaacgacgagtggacccaggacagagccaagcccgtgacccagatcgtgtctgccgaagcctggggcagagccgatgatgtgattaagatccactggcaggaaaagaagtccaacaccatcctgggcagccaggaaggcaacaccatgaagaccaacgacacctacatgaagttcagctggctgaccgtgcccgagaagtccctggacaaagaacacagatgcatcgtgcggcacgaaaacaacaagaacggcgtggaccaggaaatcatcttcccacccatcaagaccgatgtgattacaatggaccccaaggacaactgctccaaggacgccaacgataccctgctgctccagctgaccaacaccagcgcctactacatgtacttgttgctgctgctgaagtccgtggtgtacttcgccatcatcacatgctgcctgctgcggagaaccgccttctgctgcaacggcgagaagtctagggccaagcgatctggatctggagcaacaaacttctcactactcaaacaagcaggtgacgtggaggagaatcccgggcctactagtatggactggatttggcgcatccttttccttgtcggcgctgctaccggcgcgcattccttcgaacaggtgcaactggtggaatctggcgggggagtggtgcagcctggcagatccctgagactgagctgtgccgccagcggcttcatcttcagcagatacggaatgcactgggtgcgccaggcccctggcaagggactgaaatgggtggccgtgatttggtacgacggcagcaacaagctgtacgccgacagcgtgaagggccggttcaccatcagcagagacaacagcaagaacaccctgtacctgcagatgaacagcctgcgggccgaggacaccgccgtgtactattgcgccagagactactacgacaacagccggcaccactggggcttcgactattggggccagggaacccttgtgaccgtgtcctctacgcgtatccagaaccctgatcctgccgtgtaccagctgcgggatagcaagagcagcgacaagagcgtgtgtctgttcaccgacttcgacagccagaccaacgtgtcccagagcaaggactccgacgtgtacatcaccgataagtgcgtgctggacatgcggagcatggacttcaagagcaactccgccgtggcctggtccaacaagtccgatttcgcctgcgccaacgccttcaacaacagcattatccccgaggacacattcttcccaagccccgagagcagcgactccaccgaccacgtgaagcccaaagagacagagaacaccaagcagcccagcaagagctgccacaagcccaaggccatcgtgcacaccgagaaagtgaacatgatgagcctgaccgtgctgggcctgcggatgctgttcgccaaaaccgtggccgtgaacttcctgctgaccgccaagctgttcttcctc

SEQ ID NO: 7456 - DNA, 2571 bp, synthetic construct
  source 1..2571: mol_type = other DNA
atggccttaccagtgaccgccttgctcctgccgctggccttgctgctccacgccgccaggccggaagtgcagctggttgaatctggcggaggactggttcagcctggcggatctctgagactgtcttgtgccgccagcggcttcagcttcagcgacttttggatgagctgggtccgacaggcccctggcaaaggacttgaatgggtcgccacaatcagccaggccggcagcgagaaggactacgtggactctgtgaagggcagattcaccatcagccgggacaacgccaagaagtccctgtacctccagatgaacagcctgagagccgaggacaccgccgtgtactattgtgcctctggcgtgtacagcttcgactacagaggccagggcaccctggtcacagtctcttctggtaccggcggaggcggatctggcggcggaggtagcggtggcggaggatctgaattcgagatccagatgacccagagccccagcagcatgtctgccagcctgggcgacaccatcaccatcacatgccaggccacccaggacatcttcaagaacctgaactggtatcagcagaagcccggcaagccccccagcctgctgatctactatgccaccgaactggccgagggcgtgcccagcagattttctggcagcggcagcggctccgactacagcctgaccatcagcaacctggaaagcgaggacttcgccgcctactactgcctccagttcttcgagttcccattcaccttcggctccggcaccaagctggaaatgaagctcgaggacctgaagaacgtgttcccacctgaggtggccgtgttcgagcctagcgaggccgagatcagccacacccagaaagccaccctcgtgtgcctggctaccggcttctaccccgaccatgtggaactgtcttggtgggtcaacggcaaagaggtgcacagcggcgtgtgtaccgacccccagccactgaaagaacagcccgccctgaacgacagccggtactgcctgagcagcagactgagagtgtccgccaccttctggcagaacccccggaaccacttcagatgccaggtgcagttctacggcctgagcgagaacgacgagtggacccaggacagagccaagcccgtgacccagatcgtgtctgccgaagcctggggcagagccgatgatgtgattaagatccactggcaggaaaagaagtccaacaccatcctgggcagccaggaaggcaacaccatgaagaccaacgacacctacatgaagttcagctggctgaccgtgcccgagaagtccctggacaaagaacacagatgcatcgtgcggcacgaaaacaacaagaacggcgtggaccaggaaatcatcttcccacccatcaagaccgatgtgattacaatggaccccaaggacaactgctccaaggacgccaacgataccctgctgctccagctgaccaacaccagcgcctactacatgtacttgttgctgctgctgaagtccgtggtgtacttcgccatcatcacatgctgcctgctgcggagaaccgccttctgctgcaacggcgagaagtctagggccaagcgatctggatctggagcaacaaacttctcactactcaaacaagcaggtgacgtggaggagaatcccgggcctactagtatggactggatttggcgcatccttttccttgtcggcgctgctaccggcgcgcattccttcgaacaggtgcaactccagcagtctggcgctgagcttgtgcggcctggcacctctgtgaaggtgtcctgtaaagccagcggctacgtgttcaccaactactggatcgagtggatcaagcagcggccaggccagggcctggaatggatcggcgtgatgaatccaggcagcggcgagacaacctacaacgagaagttcaagggcaaggccaccctgaccgccgacaagagcagcagcacagcctacatgcaactgtcctccctgaccagcgtggacagcgccgtgtacttctgcgccagggaccacgaccgggactactacgctatggactactggggccagggcaccagcgtgaccgtgtcatctacgcgtatccagaaccctgatcctgccgtgtaccagctgcgggatagcaagagcagcgacaagagcgtgtgtctgttcaccgacttcgacagccagaccaacgtgtcccagagcaaggactccgacgtgtacatcaccgataagtgcgtgctggacatgcggagcatggacttcaagagcaactccgccgtggcctggtccaacaagtccgatttcgcctgcgccaacgccttcaacaacagcattatccccgaggacacattcttcccaagccccgagagcagcgactccaccgaccacgtgaagcccaaagagacagagaacaccaagcagcccagcaagagctgccacaagcccaaggccatcgtgcacaccgagaaagtgaacatgatgagcctgaccgtgctgggcctgcggatgctgttcgccaaaaccgtggccgtgaacttcctgctgaccgccaagctgttcttcctc

SEQ ID NO: 7457 - DNA, 2562 bp, synthetic construct
  source 1..2562: mol_type = other DNA
atggccttaccagtgaccgccttgctcctgccgctggccttgctgctccacgccgccaggccggaagtgcagctggttgaatctggcggaggactggttcagcctggcggatctctgagactgtcttgtgccgccagcggcttcagcttcagcgacttttggatgagctgggtccgacaggcccctggcaaaggacttgaatgggtcgccacaatcagccaggccggcagcgagaaggactacgtggactctgtgaagggcagattcaccatcagccgggacaacgccaagaagtccctgtacctccagatgaacagcctgagagccgaggacaccgccgtgtactattgtgcctctggcgtgtacagcttcgactacagaggccagggcaccctggtcacagtctcttctggtaccggcggaggcggatctggcggcggaggtagcggtggcggaggatctgaattcgacatcctgctgacacagagccccgccatcctgtccgtgtctccaggcgagagagtgtcctttagctgccgggccagccagaacatcggcaccagcatccactggtatcagcagcggaccaacggcagccccagactgctgattaagtacgccagcgagtccgtgtccggcatccccagcagattttctggcagcggctccggcaccgacttcaccctgagcatcaacagcgtggaaagcgaggacattgccgactactactgccagcacaccaatagctggcccaccacctttggcggaggcaccaagctggaaatcaagagactcgaggacctgaagaacgtgttcccacctgaggtggccgtgttcgagcctagcgaggccgagatcagccacacccagaaagccaccctcgtgtgcctggctaccggcttctaccccgaccatgtggaactgtcttggtgggtcaacggcaaagaggtgcacagcggcgtgtgtaccgacccccagccactgaaagaacagcccgccctgaacgacagccggtactgcctgagcagcagactgagagtgtccgccaccttctggcagaacccccggaaccacttcagatgccaggtgcagttctacggcctgagcgagaacgacgagtggacccaggacagagccaagcccgtgacccagatcgtgtctgccgaagcctggggcagagccgatgatgtgattaagatccactggcaggaaaagaagtccaacaccatcctgggcagccaggaaggcaacaccatgaagaccaacgacacctacatgaagttcagctggctgaccgtgcccgagaagtccctggacaaagaacacagatgcatcgtgcggcacgaaaacaacaagaacggcgtggaccaggaaatcatcttcccacccatcaagaccgatgtgattacaatggaccccaaggacaactgctccaaggacgccaacgataccctgctgctccagctgaccaacaccagcgcctactacatgtacttgttgctgctgctgaagtccgtggtgtacttcgccatcatcacatgctgcctgctgcggagaaccgccttctgctgcaacggcgagaagtctagggccaagcgatctggatctggagcaacaaacttctcactactcaaacaagcaggtgacgtggaggagaatcccgggcctactagtatggactggatttggcgcatccttttccttgtcggcgctgctaccggcgcgcattccttcgaacaggtgcaactccagcagtccgacgccgagcttgtgaagcctggcgcttccgtgaagattagctgcaaggccagcggctacaccttcaccgaccacgccattcactgggtcaagcagaagcccgagcagggcctggaatggatcggctacttcagccccggcaacggcgacatcaagtacaacgagaagttcaagggcaaggccaccctgaccgccgacaagagcagcagcacagcctacatgcaactgaacagcctgaccagcgaggactccgccgtgtacttctgcaagcggagctacggcaactacgactactggggccagggcaccacactgaccgtgtctagtacgcgtatccagaaccctgatcctgccgtgtaccagctgcgggatagcaagagcagcgacaagagcgtgtgtctgttcaccgacttcgacagccagaccaacgtgtcccagagcaaggactccgacgtgtacatcaccgataagtgcgtgctggacatgcggagcatggacttcaagagcaactccgccgtggcctggtccaacaagtccgatttcgcctgcgccaacgccttcaacaacagcattatccccgaggacacattcttcccaagccccgagagcagcgactccaccgaccacgtgaagcccaaagagacagagaacaccaagcagcccagcaagagctgccacaagcccaaggccatcgtgcacaccgagaaagtgaacatgatgagcctgaccgtgctgggcctgcggatgctgttcgccaaaaccgtggccgtgaacttcctgctgaccgccaagctgttcttcctc

SEQ ID NO: 7458 - DNA, 2577 bp, synthetic construct
  source 1..2577: mol_type = other DNA
atggccttaccagtgaccgccttgctcctgccgctggccttgctgctccacgccgccaggccggaagtgcagctggttgaatctggcggaggactggttcagcctggcggatctctgagactgtcttgtgccgccagcggcttcagcttcagcgacttttggatgagctgggtccgacaggcccctggcaaaggacttgaatgggtcgccacaatcagccaggccggcagcgagaaggactacgtggactctgtgaagggcagattcaccatcagccgggacaacgccaagaagtccctgtacctccagatgaacagcctgagagccgaggacaccgccgtgtactattgtgcctctggcgtgtacagcttcgactacagaggccagggcaccctggtcacagtctcttctggtaccggcggaggcggatctggcggcggaggtagcggtggcggaggatctgaattcgacatcgtgatgacccagagccccgatagcctggccgtgtctctgggagagagagccaccatcaactgcaagagcagccagagcctgctgaacagcggcgaccagaagaactacctgacctggtatcagcagaagcccggccagccccccaagctgctgatctactgggccagcaccagagaaagcggcgtgcccgatagattcagcggcagcggaagtggcaccgacttcaccctgaccatcagttctcttcaggccgaggacgtggccgtgtactactgccagaacgactacagctaccccctgaccttcggccagggcaccaaggtggaaatcaagctcgaggacctgaagaacgtgttcccacctgaggtggccgtgttcgagcctagcgaggccgagatcagccacacccagaaagccaccctcgtgtgcctggctaccggcttctaccccgaccatgtggaactgtcttggtgggtcaacggcaaagaggtgcacagcggcgtgtgtaccgacccccagccactgaaagaacagcccgccctgaacgacagccggtactgcctgagcagcagactgagagtgtccgccaccttctggcagaacccccggaaccacttcagatgccaggtgcagttctacggcctgagcgagaacgacgagtggacccaggacagagccaagcccgtgacccagatcgtgtctgccgaagcctggggcagagccgatgatgtgattaagatccactggcaggaaaagaagtccaacaccatcctgggcagccaggaaggcaacaccatgaagaccaacgacacctacatgaagttcagctggctgaccgtgcccgagaagtccctggacaaagaacacagatgcatcgtgcggcacgaaaacaacaagaacggcgtggaccaggaaatcatcttcccacccatcaagaccgatgtgattacaatggaccccaaggacaactgctccaaggacgccaacgataccctgctgctccagctgaccaacaccagcgcctactacatgtacttgttgctgctgctgaagtccgtggtgtacttcgccatcatcacatgctgcctgctgcggagaaccgccttctgctgcaacggcgagaagtctagggccaagcgatctggatctggagcaacaaacttctcactactcaaacaagcaggtgacgtggaggagaatcccgggcctactagtatggactggatttggcgcatccttttccttgtcggcgctgctaccggcgcgcattccttcgaacaggtgcagctggtgcagtctggggccgaagtgaagaaaaccggcagcagcgtgaaggtgtcctgcaaggccagcggctacacctttaccgaccacgccattcacgtgtggcggcaggctccaggacaggccctggaatggatgggccacttcagccccggcaacaccgacatcaagtacaacgacaagttcaagggcagagtgaccctgaccgtggaccgcagcatgagcaccgcctacatggaactgagcagcctgcggagcgaggacaccgccatgtactattgcaagaccagcaccttctttttcgactactggggccagggaacaatggtcaccgtgtccagcacgcgtatccagaaccctgatcctgccgtgtaccagctgcgggatagcaagagcagcgacaagagcgtgtgtctgttcaccgacttcgacagccagaccaacgtgtcccagagcaaggactccgacgtgtacatcaccgataagtgcgtgctggacatgcggagcatggacttcaagagcaactccgccgtggcctggtccaacaagtccgatttcgcctgcgccaacgccttcaacaacagcattatccccgaggacacattcttcccaagccccgagagcagcgactccaccgaccacgtgaagcccaaagagacagagaacaccaagcagcccagcaagagctgccacaagcccaaggccatcgtgcacaccgagaaagtgaacatgatgagcctgaccgtgctgggcctgcggatgctgttcgccaaaaccgtggccgtgaacttcctgctgaccgccaagctgttcttcctc

SEQ ID NO: 7459 - DNA, 2574 bp, synthetic construct
  source 1..2574: mol_type = other DNA
atggccttaccagtgaccgccttgctcctgccgctggccttgctgctccacgccgccaggccggaagtgcagctggttgaatctggcggaggactggttcagcctggcggatctctgagactgtcttgtgccgccagcggcttcagcttcagcgacttttggatgagctgggtccgacaggcccctggcaaaggacttgaatgggtcgccacaatcagccaggccggcagcgagaaggactacgtggactctgtgaagggcagattcaccatcagccgggacaacgccaagaagtccctgtacctccagatgaacagcctgagagccgaggacaccgccgtgtactattgtgcctctggcgtgtacagcttcgactacagaggccagggcaccctggtcacagtctcttctggtaccggcggaggcggatctggcggcggaggtagcggtggcggaggatctgaattcgacatccagatgacccagagccccagcagcctgtctgccagcgtgggcgacagagtgaccatcacatgcaaggccagccaggacgtgtccattgccgtggcctggtatcagcagaagcccggcaaggcccccaaggtgctgatctacagcgccagctacagatacaccggcgtgcccgacagattcagcggctctggcagcggcaccgacttcaccttcaccatcagctccctccagcccgaggatattgccgtgtactactgccagcagcactacatcacccccctgacctttggcggaggcaccaaggtggaaatcaagctcgaggacctgaagaacgtgttcccacctgaggtggccgtgttcgagcctagcgaggccgagatcagccacacccagaaagccaccctcgtgtgcctggctaccggcttctaccccgaccatgtggaactgtcttggtgggtcaacggcaaagaggtgcacagcggcgtgtgtaccgacccccagccactgaaagaacagcccgccctgaacgacagccggtactgcctgagcagcagactgagagtgtccgccaccttctggcagaacccccggaaccacttcagatgccaggtgcagttctacggcctgagcgagaacgacgagtggacccaggacagagccaagcccgtgacccagatcgtgtctgccgaagcctggggcagagccgatgatgtgattaagatccactggcaggaaaagaagtccaacaccatcctgggcagccaggaaggcaacaccatgaagaccaacgacacctacatgaagttcagctggctgaccgtgcccgagaagtccctggacaaagaacacagatgcatcgtgcggcacgaaaacaacaagaacggcgtggaccaggaaatcatcttcccacccatcaagaccgatgtgattacaatggaccccaaggacaactgctccaaggacgccaacgataccctgctgctccagctgaccaacaccagcgcctactacatgtacttgttgctgctgctgaagtccgtggtgtacttcgccatcatcacatgctgcctgctgcggagaaccgccttctgctgcaacggcgagaagtctagggccaagcgatctggatctggagcaacaaacttctcactactcaaacaagcaggtgacgtggaggagaatcccgggcctactagtatggactggatttggcgcatccttttccttgtcggcgctgctaccggcgcgcattccttcgaacagatccaactggtgcagagcggccacgaagtgaagaaacctggggccagcgtgaaggtgtcctgcaaagccagcggctacacctttaccaactacggcatgaactgggtgcgccaggcccctggacagggcctggaatggatgggctggatcaacaccaagaccggcgagcccacctacgccgaagagttcaagggcagattcgtgttcagcctggaaaccagcgcctccaccgcctacctccagatcagctctctgaaggccgaggacaccgccatgtacttttgcggcagaggcggctacggcagcagctactggtacttcgatgtgtggggccagggcaccaccgtgaccgtgtcatctacgcgtatccagaaccctgatcctgccgtgtaccagctgcgggatagcaagagcagcgacaagagcgtgtgtctgttcaccgacttcgacagccagaccaacgtgtcccagagcaaggactccgacgtgtacatcaccgataagtgcgtgctggacatgcggagcatggacttcaagagcaactccgccgtggcctggtccaacaagtccgatttcgcctgcgccaacgccttcaacaacagcattatccccgaggacacattcttcccaagccccgagagcagcgactccaccgaccacgtgaagcccaaagagacagagaacaccaagcagcccagcaagagctgccacaagcccaaggccatcgtgcacaccgagaaagtgaacatgatgagcctgaccgtgctgggcctgcggatgctgttcgccaaaaccgtggccgtgaacttcctgctgaccgccaagctgttcttcctc

SEQ ID NO: 7460 - DNA, 2580 bp, synthetic construct
  source 1..2580: mol_type = other DNA
atggccttaccagtgaccgccttgctcctgccgctggccttgctgctccacgccgccaggccggaagtgcagctggttgaatctggcggaggactggttcagcctggcggatctctgagactgtcttgtgccgccagcggcttcagcttcagcgacttttggatgagctgggtccgacaggcccctggcaaaggacttgaatgggtcgccacaatcagccaggccggcagcgagaaggactacgtggactctgtgaagggcagattcaccatcagccgggacaacgccaagaagtccctgtacctccagatgaacagcctgagagccgaggacaccgccgtgtactattgtgcctctggcgtgtacagcttcgactacagaggccagggcaccctggtcacagtctcttctggtaccggcggaggcggatctggcggcggaggtagcggtggcggaggatctgaattcgacatcgtgatgacccagagccccgatagcctggccgtgtctctgggagagagagccaccatcaactgccgggccagcaagagcgtgtccaccagcggctacagctacatgcactggtatcagcagaagcccggccagccccccaagctgctgatctacctggcctccaacctggaaagcggcgtgcccgatagattcagcggcagcggctctggcaccgacttcaccctgaccatcagttctcttcaggccgaggacgtggccgtgtactactgccagcacagcagagagctgccctacaccttcggccagggcaccaagctggaaatcaagctcgaggacctgaagaacgtgttcccacctgaggtggccgtgttcgagcctagcgaggccgagatcagccacacccagaaagccaccctcgtgtgcctggctaccggcttctaccccgaccatgtggaactgtcttggtgggtcaacggcaaagaggtgcacagcggcgtgtgtaccgacccccagccactgaaagaacagcccgccctgaacgacagccggtactgcctgagcagcagactgagagtgtccgccaccttctggcagaacccccggaaccacttcagatgccaggtgcagttctacggcctgagcgagaacgacgagtggacccaggacagagccaagcccgtgacccagatcgtgtctgccgaagcctggggcagagccgatgatgtgattaagatccactggcaggaaaagaagtccaacaccatcctgggcagccaggaaggcaacaccatgaagaccaacgacacctacatgaagttcagctggctgaccgtgcccgagaagtccctggacaaagaacacagatgcatcgtgcggcacgaaaacaacaagaacggcgtggaccaggaaatcatcttcccacccatcaagaccgatgtgattacaatggaccccaaggacaactgctccaaggacgccaacgataccctgctgctccagctgaccaacaccagcgcctactacatgtacttgttgctgctgctgaagtccgtggtgtacttcgccatcatcacatgctgcctgctgcggagaaccgccttctgctgcaacggcgagaagtctagggccaagcgatctggatctggagcaacaaacttctcactactcaaacaagcaggtgacgtggaggagaatcccgggcctactagtatggactggatttggcgcatccttttccttgtcggcgctgctaccggcgcgcattccttcgaacaggtgcaactccaggaatctggccctggccttgtgaagcccagcgagacactgagcctgacctgtaccgtgtccggcggcagcatcagctcttacggcgtgcactggattcggcagcctccaggcaagggcctggaatggatcggcgtgatctggacctccggcgtgaccgactacaacagcgccctgatgggcagagtgaccatctccgtggacaccagcaagaaccagttcagcctgaagctgagcagcgtgacagccgccgataccgccgtgtattattgcgccagagatggcgactacgaccgctacacaatggactactggggccagggaacccttgtgaccgtgtcctctacgcgtatccagaaccctgatcctgccgtgtaccagctgcgggatagcaagagcagcgacaagagcgtgtgtctgttcaccgacttcgacagccagaccaacgtgtcccagagcaaggactccgacgtgtacatcaccgataagtgcgtgctggacatgcggagcatggacttcaagagcaactccgccgtggcctggtccaacaagtccgatttcgcctgcgccaacgccttcaacaacagcattatccccgaggacacattcttcccaagccccgagagcagcgactccaccgaccacgtgaagcccaaagagacagagaacaccaagcagcccagcaagagctgccacaagcccaaggccatcgtgcacaccgagaaagtgaacatgatgagcctgaccgtgctgggcctgcggatgctgttcgccaaaaccgtggccgtgaacttcctgctgaccgccaagctgttcttcctc

SEQ ID NO: 7461 - DNA, 2580 bp, synthetic construct
  source 1..2580: mol_type = other DNA
atggccttaccagtgaccgccttgctcctgccgctggccttgctgctccacgccgccaggccggaagtgcagctggttgaatctggcggaggactggttcagcctggcggatctctgagactgtcttgtgccgccagcggcttcagcttcagcgacttttggatgagctgggtccgacaggcccctggcaaaggacttgaatgggtcgccacaatcagccaggccggcagcgagaaggactacgtggactctgtgaagggcagattcaccatcagccgggacaacgccaagaagtccctgtacctccagatgaacagcctgagagccgaggacaccgccgtgtactattgtgcctctggcgtgtacagcttcgactacagaggccagggcaccctggtcacagtctcttctggtaccggcggaggcggatctggcggcggaggtagcggtggcggaggatctgaattcgacatccagatgacccagagccccagcagcctgtctgccagcgtgggcgacagagtgaccatcacctgtagagccagccagagcatcggcaccagcctgcactggtatcagcagaagcctggcaaggcccccaagctgctgattaagttcgccagcagactgcagagcggcgtgcccagcagattttctggcagcggctccggcaccgacttcaccctgacaatcagctccctgcagcccgaggacttcgccacctactactgccagcagagccccggcttccctccaacctttggacagggcaccaagctggaaatcaagcggctcgaggacctgaagaacgtgttcccacctgaggtggccgtgttcgagcctagcgaggccgagatcagccacacccagaaagccaccctcgtgtgcctggctaccggcttctaccccgaccatgtggaactgtcttggtgggtcaacggcaaagaggtgcacagcggcgtgtgtaccgacccccagccactgaaagaacagcccgccctgaacgacagccggtactgcctgagcagcagactgagagtgtccgccaccttctggcagaacccccggaaccacttcagatgccaggtgcagttctacggcctgagcgagaacgacgagtggacccaggacagagccaagcccgtgacccagatcgtgtctgccgaagcctggggcagagccgatgatgtgattaagatccactggcaggaaaagaagtccaacaccatcctgggcagccaggaaggcaacaccatgaagaccaacgacacctacatgaagttcagctggctgaccgtgcccgagaagtccctggacaaagaacacagatgcatcgtgcggcacgaaaacaacaagaacggcgtggaccaggaaatcatcttcccacccatcaagaccgatgtgattacaatggaccccaaggacaactgctccaaggacgccaacgataccctgctgctccagctgaccaacaccagcgcctactacatgtacttgttgctgctgctgaagtccgtggtgtacttcgccatcatcacatgctgcctgctgcggagaaccgccttctgctgcaacggcgagaagtctagggccaagcgatctggatctggagcaacaaacttctcactactcaaacaagcaggtgacgtggaggagaatcccgggcctactagtatggactggatttggcgcatccttttccttgtcggcgctgctaccggcgcgcattccttcgaacaggtgcaactggtggaatctggcggcggacttgtgaagccaggcggcagcctgagactgagctgtgccgccagcggcttcagcatcaccaccagcggctactactggacctggatcagacagttccccggcaagggcctggaatggatgggctacatcggctacaacagcaagacctactacaaccccgccctgaagtcccggatcaccatcagcagagacaacgccaagaacagcctgtacctgcagatgaactccctgagagccgaggataccgccgtgtactactgcgccagatccctgtacggcggctacaaggacgccttcgatagctggggccagggaacccttgtgaccgtgtctagcacgcgtatccagaaccctgatcctgccgtgtaccagctgcgggatagcaagagcagcgacaagagcgtgtgtctgttcaccgacttcgacagccagaccaacgtgtcccagagcaaggactccgacgtgtacatcaccgataagtgcgtgctggacatgcggagcatggacttcaagagcaactccgccgtggcctggtccaacaagtccgatttcgcctgcgccaacgccttcaacaacagcattatccccgaggacacattcttcccaagccccgagagcagcgactccaccgaccacgtgaagcccaaagagacagagaacaccaagcagcccagcaagagctgccacaagcccaaggccatcgtgcacaccgagaaagtgaacatgatgagcctgaccgtgctgggcctgcggatgctgttcgccaaaaccgtggccgtgaacttcctgctgaccgccaagctgttcttcctc

SEQ ID NO: 7462 - DNA, 2595 bp, synthetic construct
  source 1..2595: mol_type = other DNA
atggccttaccagtgaccgccttgctcctgccgctggccttgctgctccacgccgccaggccggaagtgcagctggttgaatctggcggaggactggttcagcctggcggatctctgagactgtcttgtgccgccagcggcttcagcttcagcgacttttggatgagctgggtccgacaggcccctggcaaaggacttgaatgggtcgccacaatcagccaggccggcagcgagaaggactacgtggactctgtgaagggcagattcaccatcagccgggacaacgccaagaagtccctgtacctccagatgaacagcctgagagccgaggacaccgccgtgtactattgtgcctctggcgtgtacagcttcgactacagaggccagggcaccctggtcacagtctcttctggtaccggcggaggcggatctggcggcggaggtagcggtggcggaggatctgaattcgacgagatcgtgctgacccagagccctctgagcctgcctgtgacacctggcgagcctgccagcatctcctgtagaagcagccagagcctgctgcacagcatcggctacaactacctggactggtatctccagaagcccggccagagcccccaactgctgatctacctgggcagcaacagagccagcggcgtgcccgatagattttccggcagcggctccggcaccgacttcaccctgaagatcagccgggtggaagccgaggacgtgggcgtgtactactgtatgcaggccctccagacccccctgacctttggcggaggcaccaaggtggaaatcaagcggctcgaggacctgaagaacgtgttcccacctgaggtggccgtgttcgagcctagcgaggccgagatcagccacacccagaaagccaccctcgtgtgcctggctaccggcttctaccccgaccatgtggaactgtcttggtgggtcaacggcaaagaggtgcacagcggcgtgtgtaccgacccccagccactgaaagaacagcccgccctgaacgacagccggtactgcctgagcagcagactgagagtgtccgccaccttctggcagaacccccggaaccacttcagatgccaggtgcagttctacggcctgagcgagaacgacgagtggacccaggacagagccaagcccgtgacccagatcgtgtctgccgaagcctggggcagagccgatgatgtgattaagatccactggcaggaaaagaagtccaacaccatcctgggcagccaggaaggcaacaccatgaagaccaacgacacctacatgaagttcagctggctgaccgtgcccgagaagtccctggacaaagaacacagatgcatcgtgcggcacgaaaacaacaagaacggcgtggaccaggaaatcatcttcccacccatcaagaccgatgtgattacaatggaccccaaggacaactgctccaaggacgccaacgataccctgctgctccagctgaccaacaccagcgcctactacatgtacttgttgctgctgctgaagtccgtggtgtacttcgccatcatcacatgctgcctgctgcggagaaccgccttctgctgcaacggcgagaagtctagggccaagcgatctggatctggagcaacaaacttctcactactcaaacaagcaggtgacgtggaggagaatcccgggcctactagtatggactggatttggcgcatccttttccttgtcggcgctgctaccggcgcgcattccttcgaagaagtgcaactggtggaaagcggaggcggcgtggtgcagcctggaagaagcctgagactgagctgtgccgccagcggcttcaccttccggtcctacggaatgcactgggtgcgccaggcccctggcaaaggactggaatgggtggccgtgatctcctacgacggctccaacaagtactacaccgacagcgtgaacggcagattcaccatcagcagagacaacagcaagaacaccctgtacctccagatgaacagcctgcgggccgaggacaccgccgtgtactattgtgctagaggcggaggctactacgagacaagcggccctgattactggggccagggcacactcgtgaccgtgtctagtacgcgtatccagaaccctgatcctgccgtgtaccagctgcgggatagcaagagcagcgacaagagcgtgtgtctgttcaccgacttcgacagccagaccaacgtgtcccagagcaaggactccgacgtgtacatcaccgataagtgcgtgctggacatgcggagcatggacttcaagagcaactccgccgtggcctggtccaacaagtccgatttcgcctgcgccaacgccttcaacaacagcattatccccgaggacacattcttcccaagccccgagagcagcgactccaccgaccacgtgaagcccaaagagacagagaacaccaagcagcccagcaagagctgccacaagcccaaggccatcgtgcacaccgagaaagtgaacatgatgagcctgaccgtgctgggcctgcggatgctgttcgccaaaaccgtggccgtgaacttcctgctgaccgccaagctgttcttcctc

SEQ ID NO: 7463 - DNA, 2589 bp, synthetic construct
  source 1..2589: mol_type = other DNA
atggccttaccagtgaccgccttgctcctgccgctggccttgctgctccacgccgccaggccggaagtgcagctggttgaatctggcggaggactggttcagcctggcggatctctgagactgtcttgtgccgccagcggcttcagcttcagcgacttttggatgagctgggtccgacaggcccctggcaaaggacttgaatgggtcgccacaatcagccaggccggcagcgagaaggactacgtggactctgtgaagggcagattcaccatcagccgggacaacgccaagaagtccctgtacctccagatgaacagcctgagagccgaggacaccgccgtgtactattgtgcctctggcgtgtacagcttcgactacagaggccagggcaccctggtcacagtctcttctggtaccggcggaggcggatctggcggcggaggtagcggtggcggaggatctgaattcgacgacgtcgtgatgacccagagccctctgagcctgcctgtgacacctggcgagcctgccagcatctcctgtagaagcagccagagcctgctgcacagcatcggctacaactacctgcactggtttctccagaagcccggccagagcccccaactgctgatctacctgggcagcaacagagccagcggcgtgcccgatagattttccggcagcggctccggcaccgacttcaccctgaagatcagccgggtggaagccgaggacgtgggcgtgtactactgtatgcaggccctccagacccctcccacctttggacagggcaccagactggaaatcaagcggctcgaggacctgaagaacgtgttcccacctgaggtggccgtgttcgagcctagcgaggccgagatcagccacacccagaaagccaccctcgtgtgcctggctaccggcttctaccccgaccatgtggaactgtcttggtgggtcaacggcaaagaggtgcacagcggcgtgtgtaccgacccccagccactgaaagaacagcccgccctgaacgacagccggtactgcctgagcagcagactgagagtgtccgccaccttctggcagaacccccggaaccacttcagatgccaggtgcagttctacggcctgagcgagaacgacgagtggacccaggacagagccaagcccgtgacccagatcgtgtctgccgaagcctggggcagagccgatgatgtgattaagatccactggcaggaaaagaagtccaacaccatcctgggcagccaggaaggcaacaccatgaagaccaacgacacctacatgaagttcagctggctgaccgtgcccgagaagtccctggacaaagaacacagatgcatcgtgcggcacgaaaacaacaagaacggcgtggaccaggaaatcatcttcccacccatcaagaccgatgtgattacaatggaccccaaggacaactgctccaaggacgccaacgataccctgctgctccagctgaccaacaccagcgcctactacatgtacttgttgctgctgctgaagtccgtggtgtacttcgccatcatcacatgctgcctgctgcggagaaccgccttctgctgcaacggcgagaagtctagggccaagcgatctggatctggagcaacaaacttctcactactcaaacaagcaggtgacgtggaggagaatcccgggcctactagtatggactggatttggcgcatccttttccttgtcggcgctgctaccggcgcgcattccttcgaacaactccaactccaggaaagcggccctggcctcgtgaagcctagcggcacactgagcctgacatgtgccgtgtctggcggcagcatcagcagcagcaactggtggtcttgggtgcgccagcctcctggcaagggcctggaatggatcggcgaaatctaccacagcggcagcaccaactacaaccccagcctgaagtccagagtgaccatcagcgtggacaagagcaagaaccagttctccctgaagctgagcagcgtgacagccgccgataccgccgtgtactattgcgtgggcagcccctacggcgactacgtgctggattattggggccagggcaccctcgtgaccgtgtctagtacgcgtatccagaaccctgatcctgccgtgtaccagctgcgggatagcaagagcagcgacaagagcgtgtgtctgttcaccgacttcgacagccagaccaacgtgtcccagagcaaggactccgacgtgtacatcaccgataagtgcgtgctggacatgcggagcatggacttcaagagcaactccgccgtggcctggtccaacaagtccgatttcgcctgcgccaacgccttcaacaacagcattatccccgaggacacattcttcccaagccccgagagcagcgactccaccgaccacgtgaagcccaaagagacagagaacaccaagcagcccagcaagagctgccacaagcccaaggccatcgtgcacaccgagaaagtgaacatgatgagcctgaccgtgctgggcctgcggatgctgttcgccaaaaccgtggccgtgaacttcctgctgaccgccaagctgttcttcctc

SEQ ID NO: 7464 - DNA, 2583 bp, synthetic construct
  source 1..2583: mol_type = other DNA
atggccttaccagtgaccgccttgctcctgccgctggccttgctgctccacgccgccaggccggaagtgcagctggttgaatctggcggaggactggttcagcctggcggatctctgagactgtcttgtgccgccagcggcttcagcttcagcgacttttggatgagctgggtccgacaggcccctggcaaaggacttgaatgggtcgccacaatcagccaggccggcagcgagaaggactacgtggactctgtgaagggcagattcaccatcagccgggacaacgccaagaagtccctgtacctccagatgaacagcctgagagccgaggacaccgccgtgtactattgtgcctctggcgtgtacagcttcgactacagaggccagggcaccctggtcacagtctcttctggtaccggcggaggcggatctggcggcggaggtagcggtggcggaggatctgaattcgacgagatcgtgctgacacagagccctggcaccctgagcctgtctctgggagagagagccacactgagctgtcgggccagccagtctatcagcagcagcttcctggcctggtatcagcagaagcccggccaggcccctaagctgctgatctacgccgccagcacaagagccaccggcatccccgatagattcagcggctctggcagcggcaccgacttcaccctgaccatcagcagactggaacccgaggacttcgccgtgtactactgccagcagtacggcagaagcctgagcttcggcggaggcaccaaggtggaagtgaagctcgaggacctgaagaacgtgttcccacctgaggtggccgtgttcgagcctagcgaggccgagatcagccacacccagaaagccaccctcgtgtgcctggctaccggcttctaccccgaccatgtggaactgtcttggtgggtcaacggcaaagaggtgcacagcggcgtgtgtaccgacccccagccactgaaagaacagcccgccctgaacgacagccggtactgcctgagcagcagactgagagtgtccgccaccttctggcagaacccccggaaccacttcagatgccaggtgcagttctacggcctgagcgagaacgacgagtggacccaggacagagccaagcccgtgacccagatcgtgtctgccgaagcctggggcagagccgatgatgtgattaagatccactggcaggaaaagaagtccaacaccatcctgggcagccaggaaggcaacaccatgaagaccaacgacacctacatgaagttcagctggctgaccgtgcccgagaagtccctggacaaagaacacagatgcatcgtgcggcacgaaaacaacaagaacggcgtggaccaggaaatcatcttcccacccatcaagaccgatgtgattacaatggaccccaaggacaactgctccaaggacgccaacgataccctgctgctccagctgaccaacaccagcgcctactacatgtacttgttgctgctgctgaagtccgtggtgtacttcgccatcatcacatgctgcctgctgcggagaaccgccttctgctgcaacggcgagaagtctagggccaagcgatctggatctggagcaacaaacttctcactactcaaacaagcaggtgacgtggaggagaatcccgggcctactagtatggactggatttggcgcatccttttccttgtcggcgctgctaccggcgcgcattccttcgaacaggtgcaactccagcagtctggccccggactcgtgaagcctagccagacactgagcctgacctgcgccatcagcggcgatagcgtgtccggcaatagcgccacctggaactggatcagacagagcccatctcggggcctggaatggctgggccggacctactaccgcagcaagtggaaccacgactacgccgagagcgtgaagtcccggatcaccatcaaccccgacaccagcaagaaccagttctccttgcaactgaacagcgtgacccccgaggacacagccgtgtattattgcgccagaggcgacagcagctcttggtacgccttcgactattggggccagggcaccctcgtgaccgtgtctagtacgcgtatccagaaccctgatcctgccgtgtaccagctgcgggatagcaagagcagcgacaagagcgtgtgtctgttcaccgacttcgacagccagaccaacgtgtcccagagcaaggactccgacgtgtacatcaccgataagtgcgtgctggacatgcggagcatggacttcaagagcaactccgccgtggcctggtccaacaagtccgatttcgcctgcgccaacgccttcaacaacagcattatccccgaggacacattcttcccaagccccgagagcagcgactccaccgaccacgtgaagcccaaagagacagagaacaccaagcagcccagcaagagctgccacaagcccaaggccatcgtgcacaccgagaaagtgaacatgatgagcctgaccgtgctgggcctgcggatgctgttcgccaaaaccgtggccgtgaacttcctgctgaccgccaagctgttcttcctc

SEQ ID NO: 7465 - DNA, 2580 bp, synthetic construct
  source 1..2580: mol_type = other DNA
atggccttaccagtgaccgccttgctcctgccgctggccttgctgctccacgccgccaggccggaagtgcagctggttgaatctggcggaggactggttcagcctggcggatctctgagactgtcttgtgccgccagcggcttcagcttcagcgacttttggatgagctgggtccgacaggcccctggcaaaggacttgaatgggtcgccacaatcagccaggccggcagcgagaaggactacgtggactctgtgaagggcagattcaccatcagccgggacaacgccaagaagtccctgtacctccagatgaacagcctgagagccgaggacaccgccgtgtactattgtgcctctggcgtgtacagcttcgactacagaggccagggcaccctggtcacagtctcttctggtaccggcggaggcggatctggcggcggaggtagcggtggcggaggatctgaattcgaccagagcgtcgtgacacagcctcctagcgtgtcagtggcccctggcaagaccgccagaatcacctgtggccggaacaacatcggcagcaagagcgtgcactggtatcagcagaagcccggccaggctcctgtgctggtggtgtacgacgacagcgacagacccagcggcatccccgagagattcagcggcagcaactccggcaataccgccaccctgaccatcagcagagtggaagccggcgacgaggccgactactactgccaagtgtgggacagcagcagcgatcacgtggtgtttggcggaggcaccaagctgacagtgctgggtctcgaggacctgaagaacgtgttcccacctgaggtggccgtgttcgagcctagcgaggccgagatcagccacacccagaaagccaccctcgtgtgcctggctaccggcttctaccccgaccatgtggaactgtcttggtgggtcaacggcaaagaggtgcacagcggcgtgtgtaccgacccccagccactgaaagaacagcccgccctgaacgacagccggtactgcctgagcagcagactgagagtgtccgccaccttctggcagaacccccggaaccacttcagatgccaggtgcagttctacggcctgagcgagaacgacgagtggacccaggacagagccaagcccgtgacccagatcgtgtctgccgaagcctggggcagagccgatgatgtgattaagatccactggcaggaaaagaagtccaacaccatcctgggcagccaggaaggcaacaccatgaagaccaacgacacctacatgaagttcagctggctgaccgtgcccgagaagtccctggacaaagaacacagatgcatcgtgcggcacgaaaacaacaagaacggcgtggaccaggaaatcatcttcccacccatcaagaccgatgtgattacaatggaccccaaggacaactgctccaaggacgccaacgataccctgctgctccagctgaccaacaccagcgcctactacatgtacttgttgctgctgctgaagtccgtggtgtacttcgccatcatcacatgctgcctgctgcggagaaccgccttctgctgcaacggcgagaagtctagggccaagcgatctggatctggagcaacaaacttctcactactcaaacaagcaggtgacgtggaggagaatcccgggcctactagtatggactggatttggcgcatccttttccttgtcggcgctgctaccggcgcgcattccttcgaagtgcaactggtgcagtctggcggaggggtcatgcggcctggcggatctctgagactgtcttgtgccgccagcggcttcaccttcgacgactacggcatgagctgggtgcgccaggcccctggaaaaggcctggaatgggtgtccggcatcaactggaatggcggcagcaccggctacgccgattctgtgcggggcagattcaccatcagccgggacaacgccaagaacagcctgtacctgcagatgaactccctgcgggccgaggacaccgccctgtactattgcgccagagagcggggctacggctaccacgaccctcacgattattggggccagggcacccttgttaccgtgtcctctacgcgtatccagaaccctgatcctgccgtgtaccagctgcgggatagcaagagcagcgacaagagcgtgtgtctgttcaccgacttcgacagccagaccaacgtgtcccagagcaaggactccgacgtgtacatcaccgataagtgcgtgctggacatgcggagcatggacttcaagagcaactccgccgtggcctggtccaacaagtccgatttcgcctgcgccaacgccttcaacaacagcattatccccgaggacacattcttcccaagccccgagagcagcgactccaccgaccacgtgaagcccaaagagacagagaacaccaagcagcccagcaagagctgccacaagcccaaggccatcgtgcacaccgagaaagtgaacatgatgagcctgaccgtgctgggcctgcggatgctgttcgccaaaaccgtggccgtgaacttcctgctgaccgccaagctgttcttcctc

SEQ ID NO: 7466 - DNA, 2619 bp, synthetic construct
  source 1..2619: mol_type = other DNA
atggccttaccagtgaccgccttgctcctgccgctggccttgctgctccacgccgccaggccggaagtgcagctggttgaatctggcggaggactggttcagcctggcggatctctgagactgtcttgtgccgccagcggcttcagcttcagcgacttttggatgagctgggtccgacaggcccctggcaaaggacttgaatgggtcgccacaatcagccaggccggcagcgagaaggactacgtggactctgtgaagggcagattcaccatcagccgggacaacgccaagaagtccctgtacctccagatgaacagcctgagagccgaggacaccgccgtgtactattgtgcctctggcgtgtacagcttcgactacagaggccagggcaccctggtcacagtctcttctggtaccggcggaggcggatctggcggcggaggtagcggtggcggaggatctgaattcgaacagaaactcatcagtgaagaagacctggaattccaggctgtcgtgacacagcctcctagcgcctctggcacaccaggccagagagtgaccatctcctgtagcggcagcagcagcaacatcggcagcaacaccgtgaactggtatcagcaggtgcccggcaccgctcccaagctgctgatctacagcaacaaccagcggcccagcggcgtgcccgatagattttctggcagcaagagcggcaccagcgccagcctggctatctctggactccagtccgaggacgaggccgactactattgcgccgcctgggacgatagcctgaacggctgggtgttcggcggaggcaccaagctgacagtgctgctcgaggacctgaagaacgtgttcccacctgaggtggccgtgttcgagcctagcgaggccgagatcagccacacccagaaagccaccctcgtgtgcctggctaccggcttctaccccgaccatgtggaactgtcttggtgggtcaacggcaaagaggtgcacagcggcgtgtgtaccgacccccagccactgaaagaacagcccgccctgaacgacagccggtactgcctgagcagcagactgagagtgtccgccaccttctggcagaacccccggaaccacttcagatgccaggtgcagttctacggcctgagcgagaacgacgagtggacccaggacagagccaagcccgtgacccagatcgtgtctgccgaagcctggggcagagccgatgatgtgattaagatccactggcaggaaaagaagtccaacaccatcctgggcagccaggaaggcaacaccatgaagaccaacgacacctacatgaagttcagctggctgaccgtgcccgagaagtccctggacaaagaacacagatgcatcgtgcggcacgaaaacaacaagaacggcgtggaccaggaaatcatcttcccacccatcaagaccgatgtgattacaatggaccccaaggacaactgctccaaggacgccaacgataccctgctgctccagctgaccaacaccagcgcctactacatgtacttgttgctgctgctgaagtccgtggtgtacttcgccatcatcacatgctgcctgctgcggagaaccgccttctgctgcaacggcgagaagtctagggccaagcgatctggatctggagcaacaaacttctcactactcaaacaagcaggtgacgtggaggagaatcccgggcctactagtatggactggatttggcgcatccttttccttgtcggcgctgctaccggcgcgcattccttcgaacagatgcaactggtgcagagcggagccgaagtgaaagagcctggcgagagcctgcggatctcctgcaagggcagcggctacagcttcaccaatttctggatctcttgggtgcgccagatgcccggcaagggcctggaatggatgggcagagtggaccccggctactcctacagcacctacagccctagcttccagggccacgtgaccatcagcgccgacaagagcaccagcaccgcctacctccagtggaacagcctgaaggccagcgacaccgccatgtactactgcgccagagtgcagtacagcggctattacgattggttcgacccctggggccagggcacactcgtgacagtgtcaagcacgcgtatccagaaccctgatcctgccgtgtaccagctgcgggatagcaagagcagcgacaagagcgtgtgtctgttcaccgacttcgacagccagaccaacgtgtcccagagcaaggactccgacgtgtacatcaccgataagtgcgtgctggacatgcggagcatggacttcaagagcaactccgccgtggcctggtccaacaagtccgatttcgcctgcgccaacgccttcaacaacagcattatccccgaggacacattcttcccaagccccgagagcagcgactccaccgaccacgtgaagcccaaagagacagagaacaccaagcagcccagcaagagctgccacaagcccaaggccatcgtgcacaccgagaaagtgaacatgatgagcctgaccgtgctgggcctgcggatgctgttcgccaaaaccgtggccgtgaacttcctgctgaccgccaagctgttcttcctc

SEQ ID NO: 7467 - DNA, 2601 bp, synthetic construct
  source 1..2601: mol_type = other DNA
atggccttaccagtgaccgccttgctcctgccgctggccttgctgctccacgccgccaggccggaagtgcagctggttgaatctggcggaggactggttcagcctggcggatctctgagactgtcttgtgccgccagcggcttcagcttcagcgacttttggatgagctgggtccgacaggcccctggcaaaggacttgaatgggtcgccacaatcagccaggccggcagcgagaaggactacgtggactctgtgaagggcagattcaccatcagccgggacaacgccaagaagtccctgtacctccagatgaacagcctgagagccgaggacaccgccgtgtactattgtgcctctggcgtgtacagcttcgactacagaggccagggcaccctggtcacagtctcttctggtaccggcggaggcggatctggcggcggaggtagcggtggcggaggatctgaattcgaacagaaactcatcagtgaagaagacctggaattcgacatccagatgacccagagccccagcacactgagcgccagcgtgggcgacagagtgaccatcacctgtcgggccagccagaacatcaacaagtggctggcctggtatcagcagaggcccggaaaagccccccagctgctgatctacaaggccagcagcctggaaagcggcgtgcccagcagattttctggcagcggctctggcaccgagtacaccctgaccatcagctccctccagcccgacgacttcgccacctactactgccagcagtacaacagctacgccaccttcggccagggcaccaaggtggaaatcaagagactcgaggacctgaagaacgtgttcccacctgaggtggccgtgttcgagcctagcgaggccgagatcagccacacccagaaagccaccctcgtgtgcctggctaccggcttctaccccgaccatgtggaactgtcttggtgggtcaacggcaaagaggtgcacagcggcgtgtgtaccgacccccagccactgaaagaacagcccgccctgaacgacagccggtactgcctgagcagcagactgagagtgtccgccaccttctggcagaacccccggaaccacttcagatgccaggtgcagttctacggcctgagcgagaacgacgagtggacccaggacagagccaagcccgtgacccagatcgtgtctgccgaagcctggggcagagccgatgatgtgattaagatccactggcaggaaaagaagtccaacaccatcctgggcagccaggaaggcaacaccatgaagaccaacgacacctacatgaagttcagctggctgaccgtgcccgagaagtccctggacaaagaacacagatgcatcgtgcggcacgaaaacaacaagaacggcgtggaccaggaaatcatcttcccacccatcaagaccgatgtgattacaatggaccccaaggacaactgctccaaggacgccaacgataccctgctgctccagctgaccaacaccagcgcctactacatgtacttgttgctgctgctgaagtccgtggtgtacttcgccatcatcacatgctgcctgctgcggagaaccgccttctgctgcaacggcgagaagtctagggccaagcgatctggatctggagcaacaaacttctcactactcaaacaagcaggtgacgtggaggagaatcccgggcctactagtatggactggatttggcgcatccttttccttgtcggcgctgctaccggcgcgcattccttcgaacaggtgcagctggtgcagtctggggccgaagtgaagaagcctggcgagagcctgaagatcagctgcaagggctccggctacaacttctctaacaagtggatcggctgggtgcgccagctgcctggcagaggactggaatggatcgccatcatctaccccggctacagcgacatcacctacagccccagcttccagggccgcgtgacaatcagcgccgacaccagcatcaacaccgcctacctgcactggcacagcctgaaggccagcgacaccgccatgtactactgcgtgcggcatacagccctggctggcttcgattattggggcctgggcaccctcgtgaccgtgtctagtacgcgtatccagaaccctgatcctgccgtgtaccagctgcgggatagcaagagcagcgacaagagcgtgtgtctgttcaccgacttcgacagccagaccaacgtgtcccagagcaaggactccgacgtgtacatcaccgataagtgcgtgctggacatgcggagcatggacttcaagagcaactccgccgtggcctggtccaacaagtccgatttcgcctgcgccaacgccttcaacaacagcattatccccgaggacacattcttcccaagccccgagagcagcgactccaccgaccacgtgaagcccaaagagacagagaacaccaagcagcccagcaagagctgccacaagcccaaggccatcgtgcacaccgagaaagtgaacatgatgagcctgaccgtgctgggcctgcggatgctgttcgccaaaaccgtggccgtgaacttcctgctgaccgccaagctgttcttcctc

SEQ ID NO: 7468 - DNA, 2574 bp, synthetic construct
  source 1..2574: mol_type = other DNA
atggccttaccagtgaccgccttgctcctgccgctggccttgctgctccacgccgccaggccggaagtgcagctggttgaatctggcggaggactggttcagcctggcggatctctgagactgtcttgtgccgccagcggcttcagcttcagcgacttttggatgagctgggtccgacaggcccctggcaaaggacttgaatgggtcgccacaatcagccaggccggcagcgagaaggactacgtggactctgtgaagggcagattcaccatcagccgggacaacgccaagaagtccctgtacctccagatgaacagcctgagagccgaggacaccgccgtgtactattgtgcctctggcgtgtacagcttcgactacagaggccagggcaccctggtcacagtctcttctggtaccggcggaggcggatctggcggcggaggtagcggtggcggaggatctgaattcatcgtgctgacacagagccctgcttctctggccgtgtctctgggacagagagccaccatcagctgtagagccagcgagagcgtggacaactacggcaacaccttcatgcactggtatcagcagaagcccggccagcctcctaagctgctgatctacagagccagcaacctggaaagcggcatccccgccagattttctggcagcggcagcagaaccgacttcaccctgaccatcaatcccgtggaagccgacgacgtggcaacctactactgccagcagagcaacgaggaccctcctacatttggagccggcaccaagctggaactgaaactcgaggacctgaagaacgtgttcccacctgaggtggccgtgttcgagcctagcgaggccgagatcagccacacccagaaagccaccctcgtgtgcctggctaccggcttctaccccgaccatgtggaactgtcttggtgggtcaacggcaaagaggtgcacagcggcgtgtgtaccgacccccagccactgaaagaacagcccgccctgaacgacagccggtactgcctgagcagcagactgagagtgtccgccaccttctggcagaacccccggaaccacttcagatgccaggtgcagttctacggcctgagcgagaacgacgagtggacccaggacagagccaagcccgtgacccagatcgtgtctgccgaagcctggggcagagccgatgatgtgattaagatccactggcaggaaaagaagtccaacaccatcctgggcagccaggaaggcaacaccatgaagaccaacgacacctacatgaagttcagctggctgaccgtgcccgagaagtccctggacaaagaacacagatgcatcgtgcggcacgaaaacaacaagaacggcgtggaccaggaaatcatcttcccacccatcaagaccgatgtgattacaatggaccccaaggacaactgctccaaggacgccaacgataccctgctgctccagctgaccaacaccagcgcctactacatgtacttgttgctgctgctgaagtccgtggtgtacttcgccatcatcacatgctgcctgctgcggagaaccgccttctgctgcaacggcgagaagtctagggccaagcgatctggatctggagcaacaaacttctcactactcaaacaagcaggtgacgtggaggagaatcccgggcctactagtatggactggatttggcgcatccttttccttgtcggcgctgctaccggcgcgcattccttcgaacagattcagctggtgcagtctggccccgagctgaagaaacctggcgagacagtgaagatcagctgcaaggccagcggctacatcttcaccaattacggcatgaactgggtcaagcaggcccctggcaagagcttcaagtggatgggctggatcaacacctacaccggcgagagcacatacagcgccgacttcaagggcagattcgccttcagcctggaaaccagcgccagcacagcctacctgcacatcaacgacctgaagaacgaggacaccgccacctacttttgcgccagaagcggcggctacgaccctatggattattggggccagggcaccagcgtgaccgtttcttctacgcgtatccagaaccctgatcctgccgtgtaccagctgcgggatagcaagagcagcgacaagagcgtgtgtctgttcaccgacttcgacagccagaccaacgtgtcccagagcaaggactccgacgtgtacatcaccgataagtgcgtgctggacatgcggagcatggacttcaagagcaactccgccgtggcctggtccaacaagtccgatttcgcctgcgccaacgccttcaacaacagcattatccccgaggacacattcttcccaagccccgagagcagcgactccaccgaccacgtgaagcccaaagagacagagaacaccaagcagcccagcaagagctgccacaagcccaaggccatcgtgcacaccgagaaagtgaacatgatgagcctgaccgtgctgggcctgcggatgctgttcgccaaaaccgtggccgtgaacttcctgctgaccgccaagctgttcttcctc

SEQ ID NO: 7469 - DNA, 2571 bp, synthetic construct
  source 1..2571: mol_type = other DNA
atggccttaccagtgaccgccttgctcctgccgctggccttgctgctccacgccgccaggccggaagtgcagctggttgaatctggcggaggactggttcagcctggcggatctctgagactgtcttgtgccgccagcggcttcagcttcagcgacttttggatgagctgggtccgacaggcccctggcaaaggacttgaatgggtcgccacaatcagccaggccggcagcgagaaggactacgtggactctgtgaagggcagattcaccatcagccgggacaacgccaagaagtccctgtacctccagatgaacagcctgagagccgaggacaccgccgtgtactattgtgcctctggcgtgtacagcttcgactacagaggccagggcaccctggtcacagtctcttctggtaccggcggaggcggatctggcggcggaggtagcggtggcggaggatctgaattcgagatcgtgctgacacagagccctggcaccctgagcctgtctccaggcgaaagagccacactgagctgtcgggccagccagagcgtgtccaatacctacctggcctggtatcaccagaggcccggacaggctccccggctgctgatctatggcgcttctagcagagccaccggcatccccgatagattcagcggctctggcagcggcaccgacttcgccctgacaatcagctccctggaacccgaggacttcgccgtgtactactgccagcagtacagcaactcctggaccttcggccagggcaccaaggtggaaatcaagagactcgaggacctgaagaacgtgttcccacctgaggtggccgtgttcgagcctagcgaggccgagatcagccacacccagaaagccaccctcgtgtgcctggctaccggcttctaccccgaccatgtggaactgtcttggtgggtcaacggcaaagaggtgcacagcggcgtgtgtaccgacccccagccactgaaagaacagcccgccctgaacgacagccggtactgcctgagcagcagactgagagtgtccgccaccttctggcagaacccccggaaccacttcagatgccaggtgcagttctacggcctgagcgagaacgacgagtggacccaggacagagccaagcccgtgacccagatcgtgtctgccgaagcctggggcagagccgatgatgtgattaagatccactggcaggaaaagaagtccaacaccatcctgggcagccaggaaggcaacaccatgaagaccaacgacacctacatgaagttcagctggctgaccgtgcccgagaagtccctggacaaagaacacagatgcatcgtgcggcacgaaaacaacaagaacggcgtggaccaggaaatcatcttcccacccatcaagaccgatgtgattacaatggaccccaaggacaactgctccaaggacgccaacgataccctgctgctccagctgaccaacaccagcgcctactacatgtacttgttgctgctgctgaagtccgtggtgtacttcgccatcatcacatgctgcctgctgcggagaaccgccttctgctgcaacggcgagaagtctagggccaagcgatctggatctggagcaacaaacttctcactactcaaacaagcaggtgacgtggaggagaatcccgggcctactagtatggactggatttggcgcatccttttccttgtcggcgctgctaccggcgcgcattccttcgaacaggtgcaactggtggaatctggcgggggagtggtgcagcctggcagaagcctgagactgtcttgtgccgccagcggcttcaccttcagcagctacgacatgcactgggtgcgccaggcccctggcaaaggactggaatgggtggccgtgatctcctacgacggcaccaacgagtattacgccgacagcgtgaagggccggttcaccatctccagagacaccagcaagaacaccctgtacctccagatgaacagcctgcgggccgaggacacagccgtgtattattgcgccagagagcggtacttcgactggtccttcgactactggggccagggaaccctggtgtccgtgtctagtacgcgtatccagaaccctgatcctgccgtgtaccagctgcgggatagcaagagcagcgacaagagcgtgtgtctgttcaccgacttcgacagccagaccaacgtgtcccagagcaaggactccgacgtgtacatcaccgataagtgcgtgctggacatgcggagcatggacttcaagagcaactccgccgtggcctggtccaacaagtccgatttcgcctgcgccaacgccttcaacaacagcattatccccgaggacacattcttcccaagccccgagagcagcgactccaccgaccacgtgaagcccaaagagacagagaacaccaagcagcccagcaagagctgccacaagcccaaggccatcgtgcacaccgagaaagtgaacatgatgagcctgaccgtgctgggcctgcggatgctgttcgccaaaaccgtggccgtgaacttcctgctgaccgccaagctgttcttcctc

SEQ ID NO: 7470 - DNA, 2568 bp, synthetic construct
  source 1..2568: mol_type = other DNA
atggccttaccagtgaccgccttgctcctgccgctggccttgctgctccacgccgccaggccggaagtgcagctggttgaatctggcggaggactggttcagcctggcggatctctgagactgtcttgtgccgccagcggcttcagcttcagcgacttttggatgagctgggtccgacaggcccctggcaaaggacttgaatgggtcgccacaatcagccaggccggcagcgagaaggactacgtggactctgtgaagggcagattcaccatcagccgggacaacgccaagaagtccctgtacctccagatgaacagcctgagagccgaggacaccgccgtgtactattgtgcctctggcgtgtacagcttcgactacagaggccagggcaccctggtcacagtctcttctggtaccggcggaggcggatctggcggcggaggtagcggtggcggaggatctgaattcgagctgacacaggaccctgctgtgtctgttgccctgggccagacagtgcggattacctgtcaaggcgacagcctgagaagcaactacgccaactggtatcagcagaagcccggacaggctcccgtgctggttatctacggccagaacaacagacccagcggcatccccgatagattcagcggctctagctctggcaataccgccagcctgacaatcactggcgctcaggctgccgatgaggccgactactactgcgatagcagagtgtccaccggcaatcacgtggtgtttggcggcggaacaaagctgacagtgctcggacaactcgaggacctgaagaacgtgttcccacctgaggtggccgtgttcgagcctagcgaggccgagatcagccacacccagaaagccaccctcgtgtgcctggctaccggcttctaccccgaccatgtggaactgtcttggtgggtcaacggcaaagaggtgcacagcggcgtgtgtaccgacccccagccactgaaagaacagcccgccctgaacgacagccggtactgcctgagcagcagactgagagtgtccgccaccttctggcagaacccccggaaccacttcagatgccaggtgcagttctacggcctgagcgagaacgacgagtggacccaggacagagccaagcccgtgacccagatcgtgtctgccgaagcctggggcagagccgatgatgtgattaagatccactggcaggaaaagaagtccaacaccatcctgggcagccaggaaggcaacaccatgaagaccaacgacacctacatgaagttcagctggctgaccgtgcccgagaagtccctggacaaagaacacagatgcatcgtgcggcacgaaaacaacaagaacggcgtggaccaggaaatcatcttcccacccatcaagaccgatgtgattacaatggaccccaaggacaactgctccaaggacgccaacgataccctgctgctccagctgaccaacaccagcgcctactacatgtacttgttgctgctgctgaagtccgtggtgtacttcgccatcatcacatgctgcctgctgcggagaaccgccttctgctgcaacggcgagaagtctagggccaagcgatctggatctggagcaacaaacttctcactactcaaacaagcaggtgacgtggaggagaatcccgggcctactagtatggactggatttggcgcatccttttccttgtcggcgctgctaccggcgcgcattccttcgaagaagttcagctggtgcagagcggagccgaagtgaagaaacctggggcctctgtgaaggtgtcctgcaaggcttccggctacacctttaccagctacgccatgcactgggtccgacaggcacctggacaacggcttgaatggatgggctggatcaacgccggcaacggcaacaccaagtacagccagaaattccagggccgcgtgaccatcaccagagatacaagcgccagcaccgcctacatggaactgtctagcctgagatccgaggacaccgccgtgtactactgtgccagagacatcagctacggcagcttcgactattggggccagggcacactggtcaccgttagctctacgcgtatccagaaccctgatcctgccgtgtaccagctgcgggatagcaagagcagcgacaagagcgtgtgtctgttcaccgacttcgacagccagaccaacgtgtcccagagcaaggactccgacgtgtacatcaccgataagtgcgtgctggacatgcggagcatggacttcaagagcaactccgccgtggcctggtccaacaagtccgatttcgcctgcgccaacgccttcaacaacagcattatccccgaggacacattcttcccaagccccgagagcagcgactccaccgaccacgtgaagcccaaagagacagagaacaccaagcagcccagcaagagctgccacaagcccaaggccatcgtgcacaccgagaaagtgaacatgatgagcctgaccgtgctgggcctgcggatgctgttcgccaaaaccgtggccgtgaacttcctgctgaccgccaagctgttcttcctc

SEQ ID NO: 7471 - DNA, 2574 bp, synthetic construct
  source 1..2574: mol_type = other DNA
atggccttaccagtgaccgccttgctcctgccgctggccttgctgctccacgccgccaggccggaagtgcagctggttgaatctggcggaggactggttcagcctggcggatctctgagactgtcttgtgccgccagcggcttcagcttcagcgacttttggatgagctgggtccgacaggcccctggcaaaggacttgaatgggtcgccacaatcagccaggccggcagcgagaaggactacgtggactctgtgaagggcagattcaccatcagccgggacaacgccaagaagtccctgtacctccagatgaacagcctgagagccgaggacaccgccgtgtactattgtgcctctggcgtgtacagcttcgactacagaggccagggcaccctggtcacagtctcttctggtaccggcggaggcggatctggcggcggaggtagcggtggcggaggatctgaattcgacatcgtgctgacacagacaccagccacactgagcgtgacacctggcgattctgtgtccctgagctgtagagccagccagagcatcagcaacaacctgcactggtatcagcagaagtcccacgagagccccagactgctgattaagaacgccagccagtctatcagcggcatccccagcaagtttagcggctctggcagcggcaccgacttcaccctgagaatcaacagcgtggaaaccgaggacttcgggatgtacttctgccagcagagcaatagctggccctacacatttggctccggcaccaagctggaaatcaaactcgaggacctgaagaacgtgttcccacctgaggtggccgtgttcgagcctagcgaggccgagatcagccacacccagaaagccaccctcgtgtgcctggctaccggcttctaccccgaccatgtggaactgtcttggtgggtcaacggcaaagaggtgcacagcggcgtgtgtaccgacccccagccactgaaagaacagcccgccctgaacgacagccggtactgcctgagcagcagactgagagtgtccgccaccttctggcagaacccccggaaccacttcagatgccaggtgcagttctacggcctgagcgagaacgacgagtggacccaggacagagccaagcccgtgacccagatcgtgtctgccgaagcctggggcagagccgatgatgtgattaagatccactggcaggaaaagaagtccaacaccatcctgggcagccaggaaggcaacaccatgaagaccaacgacacctacatgaagttcagctggctgaccgtgcccgagaagtccctggacaaagaacacagatgcatcgtgcggcacgaaaacaacaagaacggcgtggaccaggaaatcatcttcccacccatcaagaccgatgtgattacaatggaccccaaggacaactgctccaaggacgccaacgataccctgctgctccagctgaccaacaccagcgcctactacatgtacttgttgctgctgctgaagtccgtggtgtacttcgccatcatcacatgctgcctgctgcggagaaccgccttctgctgcaacggcgagaagtctagggccaagcgatctggatctggagcaacaaacttctcactactcaaacaagcaggtgacgtggaggagaatcccgggcctactagtatggactggatttggcgcatccttttccttgtcggcgctgctaccggcgcgcattccttcgaacaagtgaagctgcaacagagcggacccgagctggttaagccaggcgcttccgtgaagattagctgcaaggccagcggctacagcttcaccggctactacatgcactgggtcaagcagagccacggcaacatcctggactggatcggctacatctacccctacaacggcgtgtccagctacaaccagaagttcaagggcaaagccactctgaccgtggacaagagcagcagcaccgcctacatggaactgagaagcctgaccagcgaggacagcgccgtgtactattgtgccagagagcggggcctgtaccagctcagagcaatggattattggggccagggcaccagcgtgaccgtttcttctacgcgtatccagaaccctgatcctgccgtgtaccagctgcgggatagcaagagcagcgacaagagcgtgtgtctgttcaccgacttcgacagccagaccaacgtgtcccagagcaaggactccgacgtgtacatcaccgataagtgcgtgctggacatgcggagcatggacttcaagagcaactccgccgtggcctggtccaacaagtccgatttcgcctgcgccaacgccttcaacaacagcattatccccgaggacacattcttcccaagccccgagagcagcgactccaccgaccacgtgaagcccaaagagacagagaacaccaagcagcccagcaagagctgccacaagcccaaggccatcgtgcacaccgagaaagtgaacatgatgagcctgaccgtgctgggcctgcggatgctgttcgccaaaaccgtggccgtgaacttcctgctgaccgccaagctgttcttcctc

SEQ ID NO: 7472 - DNA, 2547 bp, synthetic construct
  source 1..2547: mol_type = other DNA
atggccttaccagtgaccgccttgctcctgccgctggccttgctgctccacgccgccaggccggaagtgcagctggttgaatctggcggaggactggttcagcctggcggatctctgagactgtcttgtgccgccagcggcttcagcttcagcgacttttggatgagctgggtccgacaggcccctggcaaaggacttgaatgggtcgccacaatcagccaggccggcagcgagaaggactacgtggactctgtgaagggcagattcaccatcagccgggacaacgccaagaagtccctgtacctccagatgaacagcctgagagccgaggacaccgccgtgtactattgtgcctctggcgtgtacagcttcgactacagaggccagggcaccctggtcacagtctcttctggtaccggcggaggcggatctggcggcggaggtagcggtggcggaggatctgaattcgacatcgtgatgacacagacccctgccatcatgagcgcctctccaggccagaaagtgaccatcacatgtagcgccagcagcagcgtgaactacatgcactggtatcagcagaagctgggcagcagccccaagctgtggatctacgataccagcaaactggcccctggcgtgccagccagattttctggttctggcagcggcaccagctacagcctgacaatcagcagcatggaagccgaggatgccgccagctacttctgccatcagtggtctagctacccctacacctttggctccggcaccaagctggaaatcaaactcgaggacctgaagaacgtgttcccacctgaggtggccgtgttcgagcctagcgaggccgagatcagccacacccagaaagccaccctcgtgtgcctggctaccggcttctaccccgaccatgtggaactgtcttggtgggtcaacggcaaagaggtgcacagcggcgtgtgtaccgacccccagccactgaaagaacagcccgccctgaacgacagccggtactgcctgagcagcagactgagagtgtccgccaccttctggcagaacccccggaaccacttcagatgccaggtgcagttctacggcctgagcgagaacgacgagtggacccaggacagagccaagcccgtgacccagatcgtgtctgccgaagcctggggcagagccgatgatgtgattaagatccactggcaggaaaagaagtccaacaccatcctgggcagccaggaaggcaacaccatgaagaccaacgacacctacatgaagttcagctggctgaccgtgcccgagaagtccctggacaaagaacacagatgcatcgtgcggcacgaaaacaacaagaacggcgtggaccaggaaatcatcttcccacccatcaagaccgatgtgattacaatggaccccaaggacaactgctccaaggacgccaacgataccctgctgctccagctgaccaacaccagcgcctactacatgtacttgttgctgctgctgaagtccgtggtgtacttcgccatcatcacatgctgcctgctgcggagaaccgccttctgctgcaacggcgagaagtctagggccaagcgatctggatctggagcaacaaacttctcactactcaaacaagcaggtgacgtggaggagaatcccgggcctactagtatggactggatttggcgcatccttttccttgtcggcgctgctaccggcgcgcattccttcgaagaagttcagctccaagagtctggccccgacctggtcaagcctagccaaagcctgagcctgacctgtaccgtgaccggctacagcatcacaagcggctatggatggcactggatcagacagttccccggcaacaaactggaatggatgggctacatccactacagcggcagcaccacctacaatcccagcctgaagtcccggatcagcatcagcagagacaccagcaagaaccagttcttcctgcaactgaacagcgtgaccaccgaggacaccgccacctactattgtgctcggagcctgagatattggggccagggcacaaccctgaccgtgtcatctacgcgtatccagaaccctgatcctgccgtgtaccagctgcgggatagcaagagcagcgacaagagcgtgtgtctgttcaccgacttcgacagccagaccaacgtgtcccagagcaaggactccgacgtgtacatcaccgataagtgcgtgctggacatgcggagcatggacttcaagagcaactccgccgtggcctggtccaacaagtccgatttcgcctgcgccaacgccttcaacaacagcattatccccgaggacacattcttcccaagccccgagagcagcgactccaccgaccacgtgaagcccaaagagacagagaacaccaagcagcccagcaagagctgccacaagcccaaggccatcgtgcacaccgagaaagtgaacatgatgagcctgaccgtgctgggcctgcggatgctgttcgccaaaaccgtggccgtgaacttcctgctgaccgccaagctgttcttcctc

SEQ ID NO: 7473 - DNA, 2556 bp, synthetic construct
  source 1..2556: mol_type = other DNA
atggccttaccagtgaccgccttgctcctgccgctggccttgctgctccacgccgccaggccggaagtgcagctggttgaatctggcggaggactggttcagcctggcggatctctgagactgtcttgtgccgccagcggcttcagcttcagcgacttttggatgagctgggtccgacaggcccctggcaaaggacttgaatgggtcgccacaatcagccaggccggcagcgagaaggactacgtggactctgtgaagggcagattcaccatcagccgggacaacgccaagaagtccctgtacctccagatgaacagcctgagagccgaggacaccgccgtgtactattgtgcctctggcgtgtacagcttcgactacagaggccagggcaccctggtcacagtctcttctggtaccggcggaggcggatctggcggcggaggtagcggtggcggaggatctgaattcgacatccagatgacacagagccctagcagcctgtctgccagcgtgggagacagagtgaccatcacctgtagcgccaccagcagcatcagctacatgcactggtatcagcagaagcccggcaaggcccctaaaggctggatctacgataccagcaaactggcccacggcgtgcccagcagattttctggttctggcagcggcaccgacttcaccctgacaatatctagcctccagcctgaggacttcgccacctactactgccaccagagaagaagctaccccttcaccttcggccagggcaccaaggtggaaatcaaactcgaggacctgaagaacgtgttcccacctgaggtggccgtgttcgagcctagcgaggccgagatcagccacacccagaaagccaccctcgtgtgcctggctaccggcttctaccccgaccatgtggaactgtcttggtgggtcaacggcaaagaggtgcacagcggcgtgtgtaccgacccccagccactgaaagaacagcccgccctgaacgacagccggtactgcctgagcagcagactgagagtgtccgccaccttctggcagaacccccggaaccacttcagatgccaggtgcagttctacggcctgagcgagaacgacgagtggacccaggacagagccaagcccgtgacccagatcgtgtctgccgaagcctggggcagagccgatgatgtgattaagatccactggcaggaaaagaagtccaacaccatcctgggcagccaggaaggcaacaccatgaagaccaacgacacctacatgaagttcagctggctgaccgtgcccgagaagtccctggacaaagaacacagatgcatcgtgcggcacgaaaacaacaagaacggcgtggaccaggaaatcatcttcccacccatcaagaccgatgtgattacaatggaccccaaggacaactgctccaaggacgccaacgataccctgctgctccagctgaccaacaccagcgcctactacatgtacttgttgctgctgctgaagtccgtggtgtacttcgccatcatcacatgctgcctgctgcggagaaccgccttctgctgcaacggcgagaagtctagggccaagcgatctggatctggagcaacaaacttctcactactcaaacaagcaggtgacgtggaggagaatcccgggcctactagtatggactggatttggcgcatccttttccttgtcggcgctgctaccggcgcgcattccttcgaagaagtgcaactggttcagagcggagccgaagtgaagaaacctggggcctctgtgaaggtgtcctgcaaggcttccggctacacctttaccaatttctggattcactgggtccgacaggctccaggccaaggactggaatggatcggagagatcgaccccagcgacagctacaccaactacaaccagaaattcaaaggccgggtcaccatcaccagagacaccagcacaagcaccgcctacctggaactgagcagcctgagaagcgaggacaccgccgtgtactactgcgccagggaaatcaccaccgtggattattggggccagggaaccctggtcaccgtgtcatctacgcgtatccagaaccctgatcctgccgtgtaccagctgcgggatagcaagagcagcgacaagagcgtgtgtctgttcaccgacttcgacagccagaccaacgtgtcccagagcaaggactccgacgtgtacatcaccgataagtgcgtgctggacatgcggagcatggacttcaagagcaactccgccgtggcctggtccaacaagtccgatttcgcctgcgccaacgccttcaacaacagcattatccccgaggacacattcttcccaagccccgagagcagcgactccaccgaccacgtgaagcccaaagagacagagaacaccaagcagcccagcaagagctgccacaagcccaaggccatcgtgcacaccgagaaagtgaacatgatgagcctgaccgtgctgggcctgcggatgctgttcgccaaaaccgtggccgtgaacttcctgctgaccgccaagctgttcttcctc

SEQ ID NO: 7474 - DNA, 2577 bp, synthetic construct
  source 1..2577: mol_type = other DNA
atggccttaccagtgaccgccttgctcctgccgctggccttgctgctccacgccgccaggccggaagtgcagctggttgaatctggcggaggactggttcagcctggcggatctctgagactgtcttgtgccgccagcggcttcagcttcagcgacttttggatgagctgggtccgacaggcccctggcaaaggacttgaatgggtcgccacaatcagccaggccggcagcgagaaggactacgtggactctgtgaagggcagattcaccatcagccgggacaacgccaagaagtccctgtacctccagatgaacagcctgagagccgaggacaccgccgtgtactattgtgcctctggcgtgtacagcttcgactacagaggccagggcaccctggtcacagtctcttctggtaccggcggaggcggatctggcggcggaggtagcggtggcggaggatctgaattcgacatccagatgacacagagccctagcagcctgtctgccagcgtgggagacagagtgaccatcacatgcaaggccagccagggcttcaacaaatacgtggcctggtatcagcagaagcccggcaaggctcctaagctgctgatctactacaccagcacactccagcctggcgtgcccagcagattttctggctctggcagcggcagagactacaccctgacaatatccagcctccagccagaggacttcgccacctactactgtctccagtacggcaacctgctgtacgcctttggacagggcaccaaggtggaaatcaagagactcgaggacctgaagaacgtgttcccacctgaggtggccgtgttcgagcctagcgaggccgagatcagccacacccagaaagccaccctcgtgtgcctggctaccggcttctaccccgaccatgtggaactgtcttggtgggtcaacggcaaagaggtgcacagcggcgtgtgtaccgacccccagccactgaaagaacagcccgccctgaacgacagccggtactgcctgagcagcagactgagagtgtccgccaccttctggcagaacccccggaaccacttcagatgccaggtgcagttctacggcctgagcgagaacgacgagtggacccaggacagagccaagcccgtgacccagatcgtgtctgccgaagcctggggcagagccgatgatgtgattaagatccactggcaggaaaagaagtccaacaccatcctgggcagccaggaaggcaacaccatgaagaccaacgacacctacatgaagttcagctggctgaccgtgcccgagaagtccctggacaaagaacacagatgcatcgtgcggcacgaaaacaacaagaacggcgtggaccaggaaatcatcttcccacccatcaagaccgatgtgattacaatggaccccaaggacaactgctccaaggacgccaacgataccctgctgctccagctgaccaacaccagcgcctactacatgtacttgttgctgctgctgaagtccgtggtgtacttcgccatcatcacatgctgcctgctgcggagaaccgccttctgctgcaacggcgagaagtctagggccaagcgatctggatctggagcaacaaacttctcactactcaaacaagcaggtgacgtggaggagaatcccgggcctactagtatggactggatttggcgcatccttttccttgtcggcgctgctaccggcgcgcattccttcgaagaagttcagcttgtgcagagcggagccgaagtgaagaaacctggggcctctgtgaaggtgtcctgcaaagccagcggctacacctttaccagctactggatcggctgggtccgacaggctcctggacaaggactggaatggatcggcgacatctatcccggcggaggctacaccaactacaacgagaagttcaagggccgcgtgacaatcaccagagacacctctacaagcaccgcctacctggaactgagcagcctgagaagcgaggacaccgccgtgtactactgcgccagactggatggcagcagctacagaggcgctatggattcttggggccagggcacactggtcaccgtttcttctacgcgtatccagaaccctgatcctgccgtgtaccagctgcgggatagcaagagcagcgacaagagcgtgtgtctgttcaccgacttcgacagccagaccaacgtgtcccagagcaaggactccgacgtgtacatcaccgataagtgcgtgctggacatgcggagcatggacttcaagagcaactccgccgtggcctggtccaacaagtccgatttcgcctgcgccaacgccttcaacaacagcattatccccgaggacacattcttcccaagccccgagagcagcgactccaccgaccacgtgaagcccaaagagacagagaacaccaagcagcccagcaagagctgccacaagcccaaggccatcgtgcacaccgagaaagtgaacatgatgagcctgaccgtgctgggcctgcggatgctgttcgccaaaaccgtggccgtgaacttcctgctgaccgccaagctgttcttcctc

SEQ ID NO: 7475 - DNA, 2565 bp, synthetic construct
  source 1..2565: mol_type = other DNA
atggccttaccagtgaccgccttgctcctgccgctggccttgctgctccacgccgccaggccggaagtgcagctggttgaatctggcggaggactggttcagcctggcggatctctgagactgtcttgtgccgccagcggcttcagcttcagcgacttttggatgagctgggtccgacaggcccctggcaaaggacttgaatgggtcgccacaatcagccaggccggcagcgagaaggactacgtggactctgtgaagggcagattcaccatcagccgggacaacgccaagaagtccctgtacctccagatgaacagcctgagagccgaggacaccgccgtgtactattgtgcctctggcgtgtacagcttcgactacagaggccagggcaccctggtcacagtctcttctggtaccggcggaggcggatctggcggcggaggtagcggtggcggaggatctgaattcgacatccagatgacacagagccctagcagcctgtctgccagcgtgggagacagagtgaccatcacctgtagagccagccaggacatccggtactacctgaactggtatcagcagaagcccggcaaggcccctaagctgctgatctatgtggcctccagcctccagagcggagtgccttctagattttctggcagcggctccggcaccgagtttaccctgacagtgtctagcttgcagcccgaggacttcgccacctactactgcctgcaagtgtacagcacccctcggacctttggacagggcaccaaggtggaaatcaaactcgaggacctgaagaacgtgttcccacctgaggtggccgtgttcgagcctagcgaggccgagatcagccacacccagaaagccaccctcgtgtgcctggctaccggcttctaccccgaccatgtggaactgtcttggtgggtcaacggcaaagaggtgcacagcggcgtgtgtaccgacccccagccactgaaagaacagcccgccctgaacgacagccggtactgcctgagcagcagactgagagtgtccgccaccttctggcagaacccccggaaccacttcagatgccaggtgcagttctacggcctgagcgagaacgacgagtggacccaggacagagccaagcccgtgacccagatcgtgtctgccgaagcctggggcagagccgatgatgtgattaagatccactggcaggaaaagaagtccaacaccatcctgggcagccaggaaggcaacaccatgaagaccaacgacacctacatgaagttcagctggctgaccgtgcccgagaagtccctggacaaagaacacagatgcatcgtgcggcacgaaaacaacaagaacggcgtggaccaggaaatcatcttcccacccatcaagaccgatgtgattacaatggaccccaaggacaactgctccaaggacgccaacgataccctgctgctccagctgaccaacaccagcgcctactacatgtacttgttgctgctgctgaagtccgtggtgtacttcgccatcatcacatgctgcctgctgcggagaaccgccttctgctgcaacggcgagaagtctagggccaagcgatctggatctggagcaacaaacttctcactactcaaacaagcaggtgacgtggaggagaatcccgggcctactagtatggactggatttggcgcatccttttccttgtcggcgctgctaccggcgcgcattccttcgaagaagtgcagcttgttgaatctggcggcggactggctaagcctggcggatctctgagactgtcttgtgccgccagcggcttccggttcaccttcaacaactactacatggactgggtccgacaggcccctggacaaggacttgaatgggtgtccagaatcagcagcagcggcgaccctacttggtacgccgattctgtgaagggcagattcaccatcagcagagagaacgccaagaacaccctgttcctccagatgaactccctgagagccgaggacaccgccgtgtactattgtgcctctctgaccaccggcagcgattcttggggacagggcgtgctggttaccgtgtcatctacgcgtatccagaaccctgatcctgccgtgtaccagctgcgggatagcaagagcagcgacaagagcgtgtgtctgttcaccgacttcgacagccagaccaacgtgtcccagagcaaggactccgacgtgtacatcaccgataagtgcgtgctggacatgcggagcatggacttcaagagcaactccgccgtggcctggtccaacaagtccgatttcgcctgcgccaacgccttcaacaacagcattatccccgaggacacattcttcccaagccccgagagcagcgactccaccgaccacgtgaagcccaaagagacagagaacaccaagcagcccagcaagagctgccacaagcccaaggccatcgtgcacaccgagaaagtgaacatgatgagcctgaccgtgctgggcctgcggatgctgttcgccaaaaccgtggccgtgaacttcctgctgaccgccaagctgttcttcctc

SEQ ID NO: 7476 - DNA, 2568 bp, synthetic construct
  source 1..2568: mol_type = other DNA
atggccttaccagtgaccgccttgctcctgccgctggccttgctgctccacgccgccaggccggaagtgcagctggttgaatctggcggaggactggttcagcctggcggatctctgagactgtcttgtgccgccagcggcttcagcttcagcgacttttggatgagctgggtccgacaggcccctggcaaaggacttgaatgggtcgccacaatcagccaggccggcagcgagaaggactacgtggactctgtgaagggcagattcaccatcagccgggacaacgccaagaagtccctgtacctccagatgaacagcctgagagccgaggacaccgccgtgtactattgtgcctctggcgtgtacagcttcgactacagaggccagggcaccctggtcacagtctcttctggtaccggcggaggcggatctggcggcggaggtagcggtggcggaggatctgaattcgagatcgtgatgacacagagccccgccacactgagtgtgtctccaggcgaaagagccacactgtcctgtagagccagccagagcgtgtccagaaacctggcctggtatcagcagaagcctggacaggctccccggctgttgatctacggcgcttctacaagagccaccggcattcccgccagattttctggctctggcagcggcaccgagttcaccctgacaatcggaagcctccagagcgaggacttcgccgtgtactactgccagcagtacaagacctggcctcggacctttggacagggcaccaacgtggaaatcaaactcgaggacctgaagaacgtgttcccacctgaggtggccgtgttcgagcctagcgaggccgagatcagccacacccagaaagccaccctcgtgtgcctggctaccggcttctaccccgaccatgtggaactgtcttggtgggtcaacggcaaagaggtgcacagcggcgtgtgtaccgacccccagccactgaaagaacagcccgccctgaacgacagccggtactgcctgagcagcagactgagagtgtccgccaccttctggcagaacccccggaaccacttcagatgccaggtgcagttctacggcctgagcgagaacgacgagtggacccaggacagagccaagcccgtgacccagatcgtgtctgccgaagcctggggcagagccgatgatgtgattaagatccactggcaggaaaagaagtccaacaccatcctgggcagccaggaaggcaacaccatgaagaccaacgacacctacatgaagttcagctggctgaccgtgcccgagaagtccctggacaaagaacacagatgcatcgtgcggcacgaaaacaacaagaacggcgtggaccaggaaatcatcttcccacccatcaagaccgatgtgattacaatggaccccaaggacaactgctccaaggacgccaacgataccctgctgctccagctgaccaacaccagcgcctactacatgtacttgttgctgctgctgaagtccgtggtgtacttcgccatcatcacatgctgcctgctgcggagaaccgccttctgctgcaacggcgagaagtctagggccaagcgatctggatctggagcaacaaacttctcactactcaaacaagcaggtgacgtggaggagaatcccgggcctactagtatggactggatttggcgcatccttttccttgtcggcgctgctaccggcgcgcattccttcgaacaagttcagctgcaacaatggggagccggcctgctgaagcctagcgaaacactgtctctgacctgcgccgtgttcggcggctctttcagcggctactactggtcctggatcagacagcctcctggcaaaggactggaatggatcggcgagatcaaccaccggggcaacaccaacgacaaccccagcctgaaaagcagagtgaccatcagcgtggacaccagcaagaaccagttcgccctgaagctgagcagcgtgacagccgctgataccgccgtgtattattgcgccagagagcggggctacacctacggcaatttcgatcactggggccagggcaccctggtcacagtttcttctacgcgtatccagaaccctgatcctgccgtgtaccagctgcgggatagcaagagcagcgacaagagcgtgtgtctgttcaccgacttcgacagccagaccaacgtgtcccagagcaaggactccgacgtgtacatcaccgataagtgcgtgctggacatgcggagcatggacttcaagagcaactccgccgtggcctggtccaacaagtccgatttcgcctgcgccaacgccttcaacaacagcattatccccgaggacacattcttcccaagccccgagagcagcgactccaccgaccacgtgaagcccaaagagacagagaacaccaagcagcccagcaagagctgccacaagcccaaggccatcgtgcacaccgagaaagtgaacatgatgagcctgaccgtgctgggcctgcggatgctgttcgccaaaaccgtggccgtgaacttcctgctgaccgccaagctgttcttcctc

SEQ ID NO: 7477 - DNA, 2571 bp, synthetic construct
  source 1..2571: mol_type = other DNA
atggccttaccagtgaccgccttgctcctgccgctggccttgctgctccacgccgccaggccggaagtgcagctggttgaatctggcggaggactggttcagcctggcggatctctgagactgtcttgtgccgccagcggcttcagcttcagcgacttttggatgagctgggtccgacaggcccctggcaaaggacttgaatgggtcgccacaatcagccaggccggcagcgagaaggactacgtggactctgtgaagggcagattcaccatcagccgggacaacgccaagaagtccctgtacctccagatgaacagcctgagagccgaggacaccgccgtgtactattgtgcctctggcgtgtacagcttcgactacagaggccagggcaccctggtcacagtctcttctggtaccggcggaggcggatctggcggcggaggtagcggtggcggaggatctgaattcgagatcgtgatgacccctagcagcgccacactgagtgtgtctccaggcgaaagagccacactgtcctgtagagccagccagagcgtgtccagaaacctggcctggtatcagcagaagcctggacaggctccccggctgttgatctacggcgcttctacaagagccaccggcattcccgccagattttctggctctggcagcggcaccgagttcaccctgacaatctctagcctccagagcgaggacttcgccgtgtactactgccaccagtacagcaactggatgtgcagcttcggccagggcaccaagctggaaatcaaactcgaggacctgaagaacgtgttcccacctgaggtggccgtgttcgagcctagcgaggccgagatcagccacacccagaaagccaccctcgtgtgcctggctaccggcttctaccccgaccatgtggaactgtcttggtgggtcaacggcaaagaggtgcacagcggcgtgtgtaccgacccccagccactgaaagaacagcccgccctgaacgacagccggtactgcctgagcagcagactgagagtgtccgccaccttctggcagaacccccggaaccacttcagatgccaggtgcagttctacggcctgagcgagaacgacgagtggacccaggacagagccaagcccgtgacccagatcgtgtctgccgaagcctggggcagagccgatgatgtgattaagatccactggcaggaaaagaagtccaacaccatcctgggcagccaggaaggcaacaccatgaagaccaacgacacctacatgaagttcagctggctgaccgtgcccgagaagtccctggacaaagaacacagatgcatcgtgcggcacgaaaacaacaagaacggcgtggaccaggaaatcatcttcccacccatcaagaccgatgtgattacaatggaccccaaggacaactgctccaaggacgccaacgataccctgctgctccagctgaccaacaccagcgcctactacatgtacttgttgctgctgctgaagtccgtggtgtacttcgccatcatcacatgctgcctgctgcggagaaccgccttctgctgcaacggcgagaagtctagggccaagcgatctggatctggagcaacaaacttctcactactcaaacaagcaggtgacgtggaggagaatcccgggcctactagtatggactggatttggcgcatccttttccttgtcggcgctgctaccggcgcgcattccttcgaagaagttcagctccttgagtcaggtggcggcctggttcaacctggcggatctctgagactgagctgtgccgccagcggcttcacctttagcagatacgccatgaactgggtccgacaggcccctggcaaaggactggaatgggtgtccggcatctctggaagcggcggcagaacctactacgccgattctgtgaagggcagattcaccatcagccgggacaacagcaagaacaccctgtacctccagatgaacagcctgagagccgaggacacagccgtgtattattgcgccaaggaccgggacttttggagcggcccttttgactattggggccagggaaccctggtcaccgttagctctacgcgtatccagaaccctgatcctgccgtgtaccagctgcgggatagcaagagcagcgacaagagcgtgtgtctgttcaccgacttcgacagccagaccaacgtgtcccagagcaaggactccgacgtgtacatcaccgataagtgcgtgctggacatgcggagcatggacttcaagagcaactccgccgtggcctggtccaacaagtccgatttcgcctgcgccaacgccttcaacaacagcattatccccgaggacacattcttcccaagccccgagagcagcgactccaccgaccacgtgaagcccaaagagacagagaacaccaagcagcccagcaagagctgccacaagcccaaggccatcgtgcacaccgagaaagtgaacatgatgagcctgaccgtgctgggcctgcggatgctgttcgccaaaaccgtggccgtgaacttcctgctgaccgccaagctgttcttcctc

SEQ ID NO: 7478 - DNA, 2586 bp, synthetic construct
  source 1..2586: mol_type = other DNA
atggccttaccagtgaccgccttgctcctgccgctggccttgctgctccacgccgccaggccggaagtgcagctggttgaatctggcggaggactggttcagcctggcggatctctgagactgtcttgtgccgccagcggcttcagcttcagcgacttttggatgagctgggtccgacaggcccctggcaaaggacttgaatgggtcgccacaatcagccaggccggcagcgagaaggactacgtggactctgtgaagggcagattcaccatcagccgggacaacgccaagaagtccctgtacctccagatgaacagcctgagagccgaggacaccgccgtgtactattgtgcctctggcgtgtacagcttcgactacagaggccagggcaccctggtcacagtctcttctggtaccggcggaggcggatctggcggcggaggtagcggtggcggaggatctgaattcgacatccagatgacccagagccccagcagcctgtctgccagcgtgggcgacagagtgaccatcacatgcaaggccagcaagaacatcagaagctacctggcctggtatcagcagaagcccggcaaggcccccaagctgctgatctacagcggcagcacactgcacagcggcgtgcccagcagattttccggctctggcagcggcaccgacttcaccctgaccatctctagcctccagcccgaggacttcgccacctactactgccagcagcaccacgagtaccccctgacattcggccagggcaccaaggtggaaatcaagagactcgaggacctgaagaacgtgttcccacctgaggtggccgtgttcgagcctagcgaggccgagatcagccacacccagaaagccaccctcgtgtgcctggctaccggcttctaccccgaccatgtggaactgtcttggtgggtcaacggcaaagaggtgcacagcggcgtgtgtaccgacccccagccactgaaagaacagcccgccctgaacgacagccggtactgcctgagcagcagactgagagtgtccgccaccttctggcagaacccccggaaccacttcagatgccaggtgcagttctacggcctgagcgagaacgacgagtggacccaggacagagccaagcccgtgacccagatcgtgtctgccgaagcctggggcagagccgatgatgtgattaagatccactggcaggaaaagaagtccaacaccatcctgggcagccaggaaggcaacaccatgaagaccaacgacacctacatgaagttcagctggctgaccgtgcccgagaagtccctggacaaagaacacagatgcatcgtgcggcacgaaaacaacaagaacggcgtggaccaggaaatcatcttcccacccatcaagaccgatgtgattacaatggaccccaaggacaactgctccaaggacgccaacgataccctgctgctccagctgaccaacaccagcgcctactacatgtacttgttgctgctgctgaagtccgtggtgtacttcgccatcatcacatgctgcctgctgcggagaaccgccttctgctgcaacggcgagaagtctagggccaagcgatctggatctggagcaacaaacttctcactactcaaacaagcaggtgacgtggaggagaatcccgggcctactagtatggactggatttggcgcatccttttccttgtcggcgctgctaccggcgcgcattccttcgaacaggtgcaactccaggaatctggccccggactcgtgaagcccagcgagacactgagcctgacctgtaccgtgtccggctacaccatcaccagcggctacgactggtcctggatcagacagcctcctggcaagggcctggaatggatcggctacatcaactacggcggctccaccaactacaagcccagcctgggaagccgcgtgacaatcagcgtggacacctccaagaaccagttcagcctgaagctgagcagcgtgacagccgccgataccgccgtgtactactgcgcccggtacaacgagtacaagagctacatctacgattggtacttcgacttctggggccagggaaccctcgtgaccgtgtctagtacgcgtatccagaaccctgatcctgccgtgtaccagctgcgggatagcaagagcagcgacaagagcgtgtgtctgttcaccgacttcgacagccagaccaacgtgtcccagagcaaggactccgacgtgtacatcaccgataagtgcgtgctggacatgcggagcatggacttcaagagcaactccgccgtggcctggtccaacaagtccgatttcgcctgcgccaacgccttcaacaacagcattatccccgaggacacattcttcccaagccccgagagcagcgactccaccgaccacgtgaagcccaaagagacagagaacaccaagcagcccagcaagagctgccacaagcccaaggccatcgtgcacaccgagaaagtgaacatgatgagcctgaccgtgctgggcctgcggatgctgttcgccaaaaccgtggccgtgaacttcctgctgaccgccaagctgttcttcctc

SEQ ID NO: 7479 - DNA, 2592 bp, synthetic construct
  source 1..2592: mol_type = other DNA
atggccttaccagtgaccgccttgctcctgccgctggccttgctgctccacgccgccaggccggaagtgcagctggttgaatctggcggaggactggttcagcctggcggatctctgagactgtcttgtgccgccagcggcttcagcttcagcgacttttggatgagctgggtccgacaggcccctggcaaaggacttgaatgggtcgccacaatcagccaggccggcagcgagaaggactacgtggactctgtgaagggcagattcaccatcagccgggacaacgccaagaagtccctgtacctccagatgaacagcctgagagccgaggacaccgccgtgtactattgtgcctctggcgtgtacagcttcgactacagaggccagggcaccctggtcacagtctcttctggtaccggcggaggcggatctggcggcggaggtagcggtggcggaggatctgaattccagtctgtggtcacacagcctccatccgtgtctgctgcccctggacagaaagtgaccatctcctgtagcggcagcagcagcaacatcggcaacaactacgtgtcctggtatcagcagctccccggcacagctcccaaactgctgatctacgacaacaacaagcggcccagcggcatccccgatagattttctggcagcaagagcggcaccagcgccacactgggaattaccggacttcagacaggcgacgaggccgactactactgtggcacatgggatggcagcctgtacaccatgcttttcggcggaggcaccaagctgacagtgcttctcgaggacctgaagaacgtgttcccacctgaggtggccgtgttcgagcctagcgaggccgagatcagccacacccagaaagccaccctcgtgtgcctggctaccggcttctaccccgaccatgtggaactgtcttggtgggtcaacggcaaagaggtgcacagcggcgtgtgtaccgacccccagccactgaaagaacagcccgccctgaacgacagccggtactgcctgagcagcagactgagagtgtccgccaccttctggcagaacccccggaaccacttcagatgccaggtgcagttctacggcctgagcgagaacgacgagtggacccaggacagagccaagcccgtgacccagatcgtgtctgccgaagcctggggcagagccgatgatgtgattaagatccactggcaggaaaagaagtccaacaccatcctgggcagccaggaaggcaacaccatgaagaccaacgacacctacatgaagttcagctggctgaccgtgcccgagaagtccctggacaaagaacacagatgcatcgtgcggcacgaaaacaacaagaacggcgtggaccaggaaatcatcttcccacccatcaagaccgatgtgattacaatggaccccaaggacaactgctccaaggacgccaacgataccctgctgctccagctgaccaacaccagcgcctactacatgtacttgttgctgctgctgaagtccgtggtgtacttcgccatcatcacatgctgcctgctgcggagaaccgccttctgctgcaacggcgagaagtctagggccaagcgatctggatctggagcaacaaacttctcactactcaaacaagcaggtgacgtggaggagaatcccgggcctactagtatggactggatttggcgcatccttttccttgtcggcgctgctaccggcgcgcattccttcgaagaagtgcaactggtggaatctggcggcggactggttaagcctggcggatctctgagactgtcttgtgccgccagcggcttcaccttcagcaatgcctggatgagctgggttcgacaggcccctggaaaaggactggaatgggtcggattcatccggtccaaagcctacggcggcaccacagaatatgccgcctctgtgaagggcagattcaccatcagccgggacgacagcaagtctatcgcctacctccagatgaacaacctgaaaaccgaggacaccgccgtgtactactgcgccagagatggcctgtacagcagctcttggtacgacagcgattactggggccagggcacactggtcacagtgtcatctacgcgtatccagaaccctgatcctgccgtgtaccagctgcgggatagcaagagcagcgacaagagcgtgtgtctgttcaccgacttcgacagccagaccaacgtgtcccagagcaaggactccgacgtgtacatcaccgataagtgcgtgctggacatgcggagcatggacttcaagagcaactccgccgtggcctggtccaacaagtccgatttcgcctgcgccaacgccttcaacaacagcattatccccgaggacacattcttcccaagccccgagagcagcgactccaccgaccacgtgaagcccaaagagacagagaacaccaagcagcccagcaagagctgccacaagcccaaggccatcgtgcacaccgagaaagtgaacatgatgagcctgaccgtgctgggcctgcggatgctgttcgccaaaaccgtggccgtgaacttcctgctgaccgccaagctgttcttcctc

SEQ ID NO: 7480 - DNA, 2607 bp, synthetic construct
  source 1..2607: mol_type = other DNA
atggccttaccagtgaccgccttgctcctgccgctggccttgctgctccacgccgccaggccggaagtgcagctggttgaatctggcggaggactggttcagcctggcggatctctgagactgtcttgtgccgccagcggcttcagcttcagcgacttttggatgagctgggtccgacaggcccctggcaaaggacttgaatgggtcgccacaatcagccaggccggcagcgagaaggactacgtggactctgtgaagggcagattcaccatcagccgggacaacgccaagaagtccctgtacctccagatgaacagcctgagagccgaggacaccgccgtgtactattgtgcctctggcgtgtacagcttcgactacagaggccagggcaccctggtcacagtctcttctggtaccggcggaggcggatctggcggcggaggtagcggtggcggaggatctgaattccagtctgtgctgacacagcctcctagtgtgtctggcgctcctggacagagagtgaccatctcttgtaccggcagcagcagcaatatcggagccggctatgacgtgcactggtatcagcagctccctggcacagcccctaaactgctgatcttcggcaacagcaacagacccagcggcgtgcccgatagattcagcggctttaagagcggcacaagcgccagcctggctatcactggactgcaagccgaggacgaggccgactacttctgccagagctacgatagcagcctgagcggcagcggagtgtttggcacaggcaccaaagtgacagtgcttggcctcgaggacctgaagaacgtgttcccacctgaggtggccgtgttcgagcctagcgaggccgagatcagccacacccagaaagccaccctcgtgtgcctggctaccggcttctaccccgaccatgtggaactgtcttggtgggtcaacggcaaagaggtgcacagcggcgtgtgtaccgacccccagccactgaaagaacagcccgccctgaacgacagccggtactgcctgagcagcagactgagagtgtccgccaccttctggcagaacccccggaaccacttcagatgccaggtgcagttctacggcctgagcgagaacgacgagtggacccaggacagagccaagcccgtgacccagatcgtgtctgccgaagcctggggcagagccgatgatgtgattaagatccactggcaggaaaagaagtccaacaccatcctgggcagccaggaaggcaacaccatgaagaccaacgacacctacatgaagttcagctggctgaccgtgcccgagaagtccctggacaaagaacacagatgcatcgtgcggcacgaaaacaacaagaacggcgtggaccaggaaatcatcttcccacccatcaagaccgatgtgattacaatggaccccaaggacaactgctccaaggacgccaacgataccctgctgctccagctgaccaacaccagcgcctactacatgtacttgttgctgctgctgaagtccgtggtgtacttcgccatcatcacatgctgcctgctgcggagaaccgccttctgctgcaacggcgagaagtctagggccaagcgatctggatctggagcaacaaacttctcactactcaaacaagcaggtgacgtggaggagaatcccgggcctactagtatggactggatttggcgcatccttttccttgtcggcgctgctaccggcgcgcattccttcgaacaaatgcaactggttcaaagcggcggtggcctggtgcaacctggaagaagtctgagactgagctgtgccgccagcggcttcaccttcgatgattacgccatgcactgggtccgacaggcccctggaaaaggactggaatgggtgtccggcatctcctggaatagcggctctatcggctacgccgacagcgtgaagggcagattcaccatcagccgggacaacgccaagaacagcctgtacctccagatgaactccctgagagccgaggatacagccctgtactactgcgccaaggacatccacagcggcagctactacggcctgctgtactacgctatggacgtgtggggccagggcacaaccgtgacagtttcttctacgcgtatccagaaccctgatcctgccgtgtaccagctgcgggatagcaagagcagcgacaagagcgtgtgtctgttcaccgacttcgacagccagaccaacgtgtcccagagcaaggactccgacgtgtacatcaccgataagtgcgtgctggacatgcggagcatggacttcaagagcaactccgccgtggcctggtccaacaagtccgatttcgcctgcgccaacgccttcaacaacagcattatccccgaggacacattcttcccaagccccgagagcagcgactccaccgaccacgtgaagcccaaagagacagagaacaccaagcagcccagcaagagctgccacaagcccaaggccatcgtgcacaccgagaaagtgaacatgatgagcctgaccgtgctgggcctgcggatgctgttcgccaaaaccgtggccgtgaacttcctgctgaccgccaagctgttcttcctc

SEQ ID NO: 7481 - DNA, 2607 bp, synthetic construct
  source 1..2607: mol_type = other DNA
atggccttaccagtgaccgccttgctcctgccgctggccttgctgctccacgccgccaggccggaagtgcagctggttgaatctggcggaggactggttcagcctggcggatctctgagactgtcttgtgccgccagcggcttcagcttcagcgacttttggatgagctgggtccgacaggcccctggcaaaggacttgaatgggtcgccacaatcagccaggccggcagcgagaaggactacgtggactctgtgaagggcagattcaccatcagccgggacaacgccaagaagtccctgtacctccagatgaacagcctgagagccgaggacaccgccgtgtactattgtgcctctggcgtgtacagcttcgactacagaggccagggcaccctggtcacagtctcttctggtaccggcggaggcggatctggcggcggaggtagcggtggcggaggatctgaattcctgcctgttctgacacagcctccatctgcctctggcacacctggacagagagtgaccatcagctgtagcggcagaagcagcaacatcggcagcaacagcgtgaactggtacagacagcttcctggcgctgcccctaagctgctgatctacagcaacaaccagcggcctcctggcgtgccagtcagattttctggcagcaagagcggcacaagcgccagcctggctatttctggactccagtctgaggacgaggccacctactactgtgccacctgggacgacaacctgaacgtgcactacgtgttcggcaccggcaccaaagtgacagtgcttggaagtagactcgaggacctgaagaacgtgttcccacctgaggtggccgtgttcgagcctagcgaggccgagatcagccacacccagaaagccaccctcgtgtgcctggctaccggcttctaccccgaccatgtggaactgtcttggtgggtcaacggcaaagaggtgcacagcggcgtgtgtaccgacccccagccactgaaagaacagcccgccctgaacgacagccggtactgcctgagcagcagactgagagtgtccgccaccttctggcagaacccccggaaccacttcagatgccaggtgcagttctacggcctgagcgagaacgacgagtggacccaggacagagccaagcccgtgacccagatcgtgtctgccgaagcctggggcagagccgatgatgtgattaagatccactggcaggaaaagaagtccaacaccatcctgggcagccaggaaggcaacaccatgaagaccaacgacacctacatgaagttcagctggctgaccgtgcccgagaagtccctggacaaagaacacagatgcatcgtgcggcacgaaaacaacaagaacggcgtggaccaggaaatcatcttcccacccatcaagaccgatgtgattacaatggaccccaaggacaactgctccaaggacgccaacgataccctgctgctccagctgaccaacaccagcgcctactacatgtacttgttgctgctgctgaagtccgtggtgtacttcgccatcatcacatgctgcctgctgcggagaaccgccttctgctgcaacggcgagaagtctagggccaagcgatctggatctggagcaacaaacttctcactactcaaacaagcaggtgacgtggaggagaatcccgggcctactagtatggactggatttggcgcatccttttccttgtcggcgctgctaccggcgcgcattccttcgaacttgaaatggctcaggtgcagctggtgcagagcggagccgaagtgaagaaacctggcagcagcgtgaaggtgtcctgcaaagcttctggcggcaccttcagcagctacgccatctcttgggttcgacaggcccctggacaaggactggaatggatgggcagaatcatccccatcctgggaatcgccaactacgcccagaaattccagggcagagtgacaatcaccgccgacaagagcaccagcaccgcctacatggaactgagcagcctgagaagcgaggacaccgccgtgtactattgtgcaagaggcggctactacagccacgacatgtggagcgaagattggggccagggcacactggtcacagtgtcatctacgcgtatccagaaccctgatcctgccgtgtaccagctgcgggatagcaagagcagcgacaagagcgtgtgtctgttcaccgacttcgacagccagaccaacgtgtcccagagcaaggactccgacgtgtacatcaccgataagtgcgtgctggacatgcggagcatggacttcaagagcaactccgccgtggcctggtccaacaagtccgatttcgcctgcgccaacgccttcaacaacagcattatccccgaggacacattcttcccaagccccgagagcagcgactccaccgaccacgtgaagcccaaagagacagagaacaccaagcagcccagcaagagctgccacaagcccaaggccatcgtgcacaccgagaaagtgaacatgatgagcctgaccgtgctgggcctgcggatgctgttcgccaaaaccgtggccgtgaacttcctgctgaccgccaagctgttcttcctc

SEQ ID NO: 7482 - DNA, 2589 bp, synthetic construct
  source 1..2589: mol_type = other DNA
atggccttaccagtgaccgccttgctcctgccgctggccttgctgctccacgccgccaggccggaagtgcagctggttgaatctggcggaggactggttcagcctggcggatctctgagactgtcttgtgccgccagcggcttcagcttcagcgacttttggatgagctgggtccgacaggcccctggcaaaggacttgaatgggtcgccacaatcagccaggccggcagcgagaaggactacgtggactctgtgaagggcagattcaccatcagccgggacaacgccaagaagtccctgtacctccagatgaacagcctgagagccgaggacaccgccgtgtactattgtgcctctggcgtgtacagcttcgactacagaggccagggcaccctggtcacagtctcttctggtaccggcggaggcggatctggcggcggaggtagcggtggcggaggatctgaattcgacttcgtgatgacacagagccctgatagcctggccgtgtctctcggcgagcgagtgaccatgagctgcaagtctagccagagcctgctgaacagcggcaaccagaagaactacctgacctggtatcagcagaagcccggccagcctcctaagctgctgatctactgggccagcaccagagaaagcggcgtgcccgatagattttctggctctggcagcggcaccgacttcaccctgacaatttctagcctgcaagccgaggacgtggccgtgtactactgccagaacgactacagctacccctacaccttcggccagggcaccaagctggaaatcaaactcgaggacctgaagaacgtgttcccacctgaggtggccgtgttcgagcctagcgaggccgagatcagccacacccagaaagccaccctcgtgtgcctggctaccggcttctaccccgaccatgtggaactgtcttggtgggtcaacggcaaagaggtgcacagcggcgtgtgtaccgacccccagccactgaaagaacagcccgccctgaacgacagccggtactgcctgagcagcagactgagagtgtccgccaccttctggcagaacccccggaaccacttcagatgccaggtgcagttctacggcctgagcgagaacgacgagtggacccaggacagagccaagcccgtgacccagatcgtgtctgccgaagcctggggcagagccgatgatgtgattaagatccactggcaggaaaagaagtccaacaccatcctgggcagccaggaaggcaacaccatgaagaccaacgacacctacatgaagttcagctggctgaccgtgcccgagaagtccctggacaaagaacacagatgcatcgtgcggcacgaaaacaacaagaacggcgtggaccaggaaatcatcttcccacccatcaagaccgatgtgattacaatggaccccaaggacaactgctccaaggacgccaacgataccctgctgctccagctgaccaacaccagcgcctactacatgtacttgttgctgctgctgaagtccgtggtgtacttcgccatcatcacatgctgcctgctgcggagaaccgccttctgctgcaacggcgagaagtctagggccaagcgatctggatctggagcaacaaacttctcactactcaaacaagcaggtgacgtggaggagaatcccgggcctactagtatggactggatttggcgcatccttttccttgtcggcgctgctaccggcgcgcattccttcgaagaagtgcaactggttcagagcggagccgagctgaagaaacctggggccagcgtgaaggtgtcctgtaaagccagcggctacacctttaccgactactacatgaaatgggtccgacaggccccaggccagggactcgaatggatcggcgatattatccccagcaacggggccaccttctacaaccagaaattcaagggccgcgtgaccatcaccgtggacaagagcacaagcaccgcctacatggaactgagcagcctgagaagcgaggacaccgccgtgtattattgcgccagaagccatctgctgcgggccagttggttcgcctattggggacagggaaccctggtcaccgttagctctacgcgtatccagaaccctgatcctgccgtgtaccagctgcgggatagcaagagcagcgacaagagcgtgtgtctgttcaccgacttcgacagccagaccaacgtgtcccagagcaaggactccgacgtgtacatcaccgataagtgcgtgctggacatgcggagcatggacttcaagagcaactccgccgtggcctggtccaacaagtccgatttcgcctgcgccaacgccttcaacaacagcattatccccgaggacacattcttcccaagccccgagagcagcgactccaccgaccacgtgaagcccaaagagacagagaacaccaagcagcccagcaagagctgccacaagcccaaggccatcgtgcacaccgagaaagtgaacatgatgagcctgaccgtgctgggcctgcggatgctgttcgccaaaaccgtggccgtgaacttcctgctgaccgccaagctgttcttcctc

SEQ ID NO: 7483 - DNA, 2589 bp, synthetic construct
  source 1..2589: mol_type = other DNA
atggccttaccagtgaccgccttgctcctgccgctggccttgctgctccacgccgccaggccggaagtgcagctggttgaatctggcggaggactggttcagcctggcggatctctgagactgtcttgtgccgccagcggcttcagcttcagcgacttttggatgagctgggtccgacaggcccctggcaaaggacttgaatgggtcgccacaatcagccaggccggcagcgagaaggactacgtggactctgtgaagggcagattcaccatcagccgggacaacgccaagaagtccctgtacctccagatgaacagcctgagagccgaggacaccgccgtgtactattgtgcctctggcgtgtacagcttcgactacagaggccagggcaccctggtcacagtctcttctggtaccggcggaggcggatctggcggcggaggtagcggtggcggaggatctgaattcgacttcgtgatgacacagagccctgatagcctggccgtgtctctcggcgagcgagtgaccatgagctgcaagtctagccagagcctgctgaacagcggcaaccagaagaactacctgacctggtatcagcagaagcccggccagcctcctaagctgctgatctactgggccagcaccagagaaagcggcgtgcccgatagattttctggctctggcagcggcaccgacttcaccctgacaatttctagcctgcaagccgaggacgtggccgtgtactactgccagaacgactacagctacccctacaccttcggccagggcaccaagctggaaatcaaactcgaggacctgaagaacgtgttcccacctgaggtggccgtgttcgagcctagcgaggccgagatcagccacacccagaaagccaccctcgtgtgcctggctaccggcttctaccccgaccatgtggaactgtcttggtgggtcaacggcaaagaggtgcacagcggcgtgtgtaccgacccccagccactgaaagaacagcccgccctgaacgacagccggtactgcctgagcagcagactgagagtgtccgccaccttctggcagaacccccggaaccacttcagatgccaggtgcagttctacggcctgagcgagaacgacgagtggacccaggacagagccaagcccgtgacccagatcgtgtctgccgaagcctggggcagagccgatgatgtgattaagatccactggcaggaaaagaagtccaacaccatcctgggcagccaggaaggcaacaccatgaagaccaacgacacctacatgaagttcagctggctgaccgtgcccgagaagtccctggacaaagaacacagatgcatcgtgcggcacgaaaacaacaagaacggcgtggaccaggaaatcatcttcccacccatcaagaccgatgtgattacaatggaccccaaggacaactgctccaaggacgccaacgataccctgctgctccagctgaccaacaccagcgcctactacatgtacttgttgctgctgctgaagtccgtggtgtacttcgccatcatcacatgctgcctgctgcggagaaccgccttctgctgcaacggcgagaagtctagggccaagcgatctggatctggagcaacaaacttctcactactcaaacaagcaggtgacgtggaggagaatcccgggcctactagtatggactggatttggcgcatccttttccttgtcggcgctgctaccggcgcgcattccttcgaacaagtgcaactggttcagagcggagccgagctgaagaaacctggggccagcgtgaaggtgtcctgtaaagccagcggctacacctttaccgactactacatgaaatgggtccgacaggccccaggccagggactcgaatggatcggcgatattatccccagcaacggggccaccttctacaaccagaaattcaagggccgcgtgaccatcaccgtggacaagagcacaagcaccgcctacatggaactgagcagcctgagaagcgaggacaccgccgtgtattattgcgccagaagccatctgctgcgggccagttggttcgcctattggggacagggaaccctggtcaccgttagctctacgcgtatccagaaccctgatcctgccgtgtaccagctgcgggatagcaagagcagcgacaagagcgtgtgtctgttcaccgacttcgacagccagaccaacgtgtcccagagcaaggactccgacgtgtacatcaccgataagtgcgtgctggacatgcggagcatggacttcaagagcaactccgccgtggcctggtccaacaagtccgatttcgcctgcgccaacgccttcaacaacagcattatccccgaggacacattcttcccaagccccgagagcagcgactccaccgaccacgtgaagcccaaagagacagagaacaccaagcagcccagcaagagctgccacaagcccaaggccatcgtgcacaccgagaaagtgaacatgatgagcctgaccgtgctgggcctgcggatgctgttcgccaaaaccgtggccgtgaacttcctgctgaccgccaagctgttcttcctc

SEQ ID NO: 7484 - DNA, 2559 bp, synthetic construct
  source 1..2559: mol_type = other DNA
atggccttaccagtgaccgccttgctcctgccgctggccttgctgctccacgccgccaggccggaagtgcagctggttgaatctggcggaggactggttcagcctggcggatctctgagactgtcttgtgccgccagcggcttcagcttcagcgacttttggatgagctgggtccgacaggcccctggcaaaggacttgaatgggtcgccacaatcagccaggccggcagcgagaaggactacgtggactctgtgaagggcagattcaccatcagccgggacaacgccaagaagtccctgtacctccagatgaacagcctgagagccgaggacaccgccgtgtactattgtgcctctggcgtgtacagcttcgactacagaggccagggcaccctggtcacagtctcttctggtaccggcggaggcggatctggcggcggaggtagcggtggcggaggatctgaattcgacgtgcagatcacacagagccctagctacctggctgcctctcctggcgagacaatcaccatcaactgtcgggccagcaagagcatcagcaaggacctggcctggtatcaagagaagcccggcaagaccaacaagctgctgatctacagcggcagcacactccagtctggcatccccagcagattttccggctctggcagcggcaccgatttcaccctgaccataagcagcctggaacctgaggacttcgccatgtactactgccagcagcacaacaagtacccctacacctttggcggaggcaccaagctggaaatcaagagactcgaggacctgaagaacgtgttcccacctgaggtggccgtgttcgagcctagcgaggccgagatcagccacacccagaaagccaccctcgtgtgcctggctaccggcttctaccccgaccatgtggaactgtcttggtgggtcaacggcaaagaggtgcacagcggcgtgtgtaccgacccccagccactgaaagaacagcccgccctgaacgacagccggtactgcctgagcagcagactgagagtgtccgccaccttctggcagaacccccggaaccacttcagatgccaggtgcagttctacggcctgagcgagaacgacgagtggacccaggacagagccaagcccgtgacccagatcgtgtctgccgaagcctggggcagagccgatgatgtgattaagatccactggcaggaaaagaagtccaacaccatcctgggcagccaggaaggcaacaccatgaagaccaacgacacctacatgaagttcagctggctgaccgtgcccgagaagtccctggacaaagaacacagatgcatcgtgcggcacgaaaacaacaagaacggcgtggaccaggaaatcatcttcccacccatcaagaccgatgtgattacaatggaccccaaggacaactgctccaaggacgccaacgataccctgctgctccagctgaccaacaccagcgcctactacatgtacttgttgctgctgctgaagtccgtggtgtacttcgccatcatcacatgctgcctgctgcggagaaccgccttctgctgcaacggcgagaagtctagggccaagcgatctggatctggagcaacaaacttctcactactcaaacaagcaggtgacgtggaggagaatcccgggcctactagtatggactggatttggcgcatccttttccttgtcggcgctgctaccggcgcgcattccttcgaacaagttcaactgcaacagcctggggccgagcttgttagacctggcgcttctgtgaagctgagctgcaaggccagcggctacaccttcaccagctactggatgaactgggtcaagcagcggcctgaccagggcctcgaatggatcggcagaatcgacccctacgacagcgagacacactacaaccagaagttcaaggacaaggccatcctgaccgtggacaagagcagctccaccgcctacatgcaactgagcagcctgacctctgaggatagcgccgtgtactattgcgccagaggcaactgggacgactattggggccagggcacaaccctgacagtgtctagtacgcgtatccagaaccctgatcctgccgtgtaccagctgcgggatagcaagagcagcgacaagagcgtgtgtctgttcaccgacttcgacagccagaccaacgtgtcccagagcaaggactccgacgtgtacatcaccgataagtgcgtgctggacatgcggagcatggacttcaagagcaactccgccgtggcctggtccaacaagtccgatttcgcctgcgccaacgccttcaacaacagcattatccccgaggacacattcttcccaagccccgagagcagcgactccaccgaccacgtgaagcccaaagagacagagaacaccaagcagcccagcaagagctgccacaagcccaaggccatcgtgcacaccgagaaagtgaacatgatgagcctgaccgtgctgggcctgcggatgctgttcgccaaaaccgtggccgtgaacttcctgctgaccgccaagctgttcttcctc

SEQ ID NO: 7485 - DNA, 2565 bp, synthetic construct
  source 1..2565: mol_type = other DNA
atggccttaccagtgaccgccttgctcctgccgctggccttgctgctccacgccgccaggccggaagtgcagctggttgaatctggcggaggactggttcagcctggcggatctctgagactgtcttgtgccgccagcggcttcagcttcagcgacttttggatgagctgggtccgacaggcccctggcaaaggacttgaatgggtcgccacaatcagccaggccggcagcgagaaggactacgtggactctgtgaagggcagattcaccatcagccgggacaacgccaagaagtccctgtacctccagatgaacagcctgagagccgaggacaccgccgtgtactattgtgcctctggcgtgtacagcttcgactacagaggccagggcaccctggtcacagtctcttctggtaccggcggaggcggatctggcggcggaggtagcggtggcggaggatctgaattcgagatcgtgctgacacagagccctaccagcatgacagcctctccaggcgagcaagtgaccatcacctgtagagccagcagcagcatcaactacatgcactggtatcagcagaagcctggcgcaagccccagaccttggatctacgagacaagcaagctggcctccggcgtgcccgatagattttctggatctgccagcggcaccagctacagcctgaccatcaacaacatggaagccgaggacgccgccacctactactgccagcagtggaattacccctcctggacctttggcggaggcaccaagctggaacttaaactcgaggacctgaagaacgtgttcccacctgaggtggccgtgttcgagcctagcgaggccgagatcagccacacccagaaagccaccctcgtgtgcctggctaccggcttctaccccgaccatgtggaactgtcttggtgggtcaacggcaaagaggtgcacagcggcgtgtgtaccgacccccagccactgaaagaacagcccgccctgaacgacagccggtactgcctgagcagcagactgagagtgtccgccaccttctggcagaacccccggaaccacttcagatgccaggtgcagttctacggcctgagcgagaacgacgagtggacccaggacagagccaagcccgtgacccagatcgtgtctgccgaagcctggggcagagccgatgatgtgattaagatccactggcaggaaaagaagtccaacaccatcctgggcagccaggaaggcaacaccatgaagaccaacgacacctacatgaagttcagctggctgaccgtgcccgagaagtccctggacaaagaacacagatgcatcgtgcggcacgaaaacaacaagaacggcgtggaccaggaaatcatcttcccacccatcaagaccgatgtgattacaatggaccccaaggacaactgctccaaggacgccaacgataccctgctgctccagctgaccaacaccagcgcctactacatgtacttgttgctgctgctgaagtccgtggtgtacttcgccatcatcacatgctgcctgctgcggagaaccgccttctgctgcaacggcgagaagtctagggccaagcgatctggatctggagcaacaaacttctcactactcaaacaagcaggtgacgtggaggagaatcccgggcctactagtatggactggatttggcgcatccttttccttgtcggcgctgctaccggcgcgcattccttcgaagaagtgcagctcgttgagtctggtggcggactggttcagcctggaagaagcctgaagctgagctgtgccgccagcggcttcaccttcagcgactacaatatggcctgggtccgacaggcccctaagaaaggactggaatgggtcgccaccatcctgtacgatggcggcagaacctactaccggggcagcgtgaagggcagattcaccatcagcagagacaacgccaagagcaccctgtacctgcggatggactctctgagaagcgaggataccgccacatattactgtgccacacacagccggggcaccgactactttgattattggggccagggcgtgatggttaccgtgtctagtacgcgtatccagaaccctgatcctgccgtgtaccagctgcgggatagcaagagcagcgacaagagcgtgtgtctgttcaccgacttcgacagccagaccaacgtgtcccagagcaaggactccgacgtgtacatcaccgataagtgcgtgctggacatgcggagcatggacttcaagagcaactccgccgtggcctggtccaacaagtccgatttcgcctgcgccaacgccttcaacaacagcattatccccgaggacacattcttcccaagccccgagagcagcgactccaccgaccacgtgaagcccaaagagacagagaacaccaagcagcccagcaagagctgccacaagcccaaggccatcgtgcacaccgagaaagtgaacatgatgagcctgaccgtgctgggcctgcggatgctgttcgccaaaaccgtggccgtgaacttcctgctgaccgccaagctgttcttcctc

SEQ ID NO: 7486 - DNA, 2592 bp, synthetic construct
  source 1..2592: mol_type = other DNA
atggccttaccagtgaccgccttgctcctgccgctggccttgctgctccacgccgccaggccggaagtgcagctggttgaatctggcggaggactggttcagcctggcggatctctgagactgtcttgtgccgccagcggcttcagcttcagcgacttttggatgagctgggtccgacaggcccctggcaaaggacttgaatgggtcgccacaatcagccaggccggcagcgagaaggactacgtggactctgtgaagggcagattcaccatcagccgggacaacgccaagaagtccctgtacctccagatgaacagcctgagagccgaggacaccgccgtgtactattgtgcctctggcgtgtacagcttcgactacagaggccagggcaccctggtcacagtctcttctggtaccggcggaggcggatctggcggcggaggtagcggtggcggaggatctgaattcgacatcgtgatgacacagagcccttctagcctggccgtgtctgagggcgagacagtgaccatcaactgcaagagcagccagagcttcctgtctagcggcgacggcaagaattacgtggcctggtatcagtacaagcccggacagagccccaagctgctgatctactgggccagcacaagacagagcggcgtgcccgatagattcatcggctctggcagcggcaccgacttcaccctgacaatctctacagtgcaggccgaggacctggctatctactactgccagcagtattacgacacccctctgacctttggctccggcaccaagctggaaatcaaactcgaggacctgaagaacgtgttcccacctgaggtggccgtgttcgagcctagcgaggccgagatcagccacacccagaaagccaccctcgtgtgcctggctaccggcttctaccccgaccatgtggaactgtcttggtgggtcaacggcaaagaggtgcacagcggcgtgtgtaccgacccccagccactgaaagaacagcccgccctgaacgacagccggtactgcctgagcagcagactgagagtgtccgccaccttctggcagaacccccggaaccacttcagatgccaggtgcagttctacggcctgagcgagaacgacgagtggacccaggacagagccaagcccgtgacccagatcgtgtctgccgaagcctggggcagagccgatgatgtgattaagatccactggcaggaaaagaagtccaacaccatcctgggcagccaggaaggcaacaccatgaagaccaacgacacctacatgaagttcagctggctgaccgtgcccgagaagtccctggacaaagaacacagatgcatcgtgcggcacgaaaacaacaagaacggcgtggaccaggaaatcatcttcccacccatcaagaccgatgtgattacaatggaccccaaggacaactgctccaaggacgccaacgataccctgctgctccagctgaccaacaccagcgcctactacatgtacttgttgctgctgctgaagtccgtggtgtacttcgccatcatcacatgctgcctgctgcggagaaccgccttctgctgcaacggcgagaagtctagggccaagcgatctggatctggagcaacaaacttctcactactcaaacaagcaggtgacgtggaggagaatcccgggcctactagtatggactggatttggcgcatccttttccttgtcggcgctgctaccggcgcgcattccttcgaagaagtgaagctgcaagagtctggccccagcctggtgcagagtagccaaacactgagcctgacctgtaccgtgtccggctttagcctgaccagctaccacatccactgggtccgacagacccctggcaaaggactggaatggatgggcgtgatgtggagcgacggcgacaccagctataacagcgccctgaagtcccggctgagcatcagcagagatacaagccagagccaggtgttcctgaagatgaacagcctccagaccgaggacaccgccacctactattgtgccagaggctactacagcagctacctgtacctttggttcgcctattggggccagggcaccctggttacagtcagctctacgcgtatccagaaccctgatcctgccgtgtaccagctgcgggatagcaagagcagcgacaagagcgtgtgtctgttcaccgacttcgacagccagaccaacgtgtcccagagcaaggactccgacgtgtacatcaccgataagtgcgtgctggacatgcggagcatggacttcaagagcaactccgccgtggcctggtccaacaagtccgatttcgcctgcgccaacgccttcaacaacagcattatccccgaggacacattcttcccaagccccgagagcagcgactccaccgaccacgtgaagcccaaagagacagagaacaccaagcagcccagcaagagctgccacaagcccaaggccatcgtgcacaccgagaaagtgaacatgatgagcctgaccgtgctgggcctgcggatgctgttcgccaaaaccgtggccgtgaacttcctgctgaccgccaagctgttcttcctc

SEQ ID NO: 7487 - DNA, 2604 bp, synthetic construct
  source 1..2604: mol_type = other DNA
atggccttaccagtgaccgccttgctcctgccgctggccttgctgctccacgccgccaggccggaagtgcagctggttgaatctggcggaggactggttcagcctggcggatctctgagactgtcttgtgccgccagcggcttcagcttcagcgacttttggatgagctgggtccgacaggcccctggcaaaggacttgaatgggtcgccacaatcagccaggccggcagcgagaaggactacgtggactctgtgaagggcagattcaccatcagccgggacaacgccaagaagtccctgtacctccagatgaacagcctgagagccgaggacaccgccgtgtactattgtgcctctggcgtgtacagcttcgactacagaggccagggcaccctggtcacagtctcttctggtaccggcggaggcggatctggcggcggaggtagcggtggcggaggatctgaattcgacgtgctgatgacccagacacctgtgtctctgccagtgtctctcggaggccaggtgtccatctcctgtagaagcagccagagcctggtgcactccgacggcgatacctacctgcactggtatctccagaagcctggacagagccctcagctcctgatctaccgggtgtccaacagattcagcggcgtgcccgatagattttccggcagcggctctggcaccgacttcaccctgaagatcagcagagtggaacccgaggacctgggcctgtactactgtctccagaccacacacttcccaccttggacctttggcggaggcaccaagctggaaatgaaactcgaggacctgaagaacgtgttcccacctgaggtggccgtgttcgagcctagcgaggccgagatcagccacacccagaaagccaccctcgtgtgcctggctaccggcttctaccccgaccatgtggaactgtcttggtgggtcaacggcaaagaggtgcacagcggcgtgtgtaccgacccccagccactgaaagaacagcccgccctgaacgacagccggtactgcctgagcagcagactgagagtgtccgccaccttctggcagaacccccggaaccacttcagatgccaggtgcagttctacggcctgagcgagaacgacgagtggacccaggacagagccaagcccgtgacccagatcgtgtctgccgaagcctggggcagagccgatgatgtgattaagatccactggcaggaaaagaagtccaacaccatcctgggcagccaggaaggcaacaccatgaagaccaacgacacctacatgaagttcagctggctgaccgtgcccgagaagtccctggacaaagaacacagatgcatcgtgcggcacgaaaacaacaagaacggcgtggaccaggaaatcatcttcccacccatcaagaccgatgtgattacaatggaccccaaggacaactgctccaaggacgccaacgataccctgctgctccagctgaccaacaccagcgcctactacatgtacttgttgctgctgctgaagtccgtggtgtacttcgccatcatcacatgctgcctgctgcggagaaccgccttctgctgcaacggcgagaagtctagggccaagcgatctggatctggagcaacaaacttctcactactcaaacaagcaggtgacgtggaggagaatcccgggcctactagtatggactggatttggcgcatccttttccttgtcggcgctgctaccggcgcgcattccttcgaacaggttcagctccagcagtctggacccgagcttagaaggccaggatctagcgtcagactgagctgcaaggccagcggctaccggatcaaggacttcctgatccactggattaagaacagacccgagcacggcctggaatggatcggatggattgaccctgaggacggcgagactaagtacgcccagaagttccagaccaaggccacactgaccgccgacacctctagcaacaccgcctacatgcaactgagcagcctgaccagcgaggacaccgccacctacttttgtgctagatggggcgacgtgtactacggcctgatgagaggccatgtgatggatgcctggggccagggaacaagcgtgacagtctcttctacgcgtatccagaaccctgatcctgccgtgtaccagctgcgggatagcaagagcagcgacaagagcgtgtgtctgttcaccgacttcgacagccagaccaacgtgtcccagagcaaggactccgacgtgtacatcaccgataagtgcgtgctggacatgcggagcatggacttcaagagcaactccgccgtggcctggtccaacaagtccgatttcgcctgcgccaacgccttcaacaacagcattatccccgaggacacattcttcccaagccccgagagcagcgactccaccgaccacgtgaagcccaaagagacagagaacaccaagcagcccagcaagagctgccacaagcccaaggccatcgtgcacaccgagaaagtgaacatgatgagcctgaccgtgctgggcctgcggatgctgttcgccaaaaccgtggccgtgaacttcctgctgaccgccaagctgttcttcctc

SEQ ID NO: 7488 - DNA, 2589 bp, synthetic construct
  source 1..2589: mol_type = other DNA
atggccttaccagtgaccgccttgctcctgccgctggccttgctgctccacgccgccaggccggaagtgcagctggttgaatctggcggaggactggttcagcctggcggatctctgagactgtcttgtgccgccagcggcttcagcttcagcgacttttggatgagctgggtccgacaggcccctggcaaaggacttgaatgggtcgccacaatcagccaggccggcagcgagaaggactacgtggactctgtgaagggcagattcaccatcagccgggacaacgccaagaagtccctgtacctccagatgaacagcctgagagccgaggacaccgccgtgtactattgtgcctctggcgtgtacagcttcgactacagaggccagggcaccctggtcacagtctcttctggtaccggcggaggcggatctggcggcggaggtagcggtggcggaggatctgaattcgacatcgtgatgacacagagccccgccacactgtcactgtctccaggcgaaagagccacactgagctgtcggagcagcaagagcctccagaacgtgaacggcaacacctacctgtactggttccagcagaagcccggccagtctcctcagctcctgatctacagaatgagcaacctgaacagcggcgtgcccgacagattttctggcagcggaagcggcaccgagttcaccctgaccataagcagcctggaacctgaggacttcgccgtgtactactgtatgcagcacctggaataccccatcaccttcggagccggcaccaagctggaaatcaaactcgaggacctgaagaacgtgttcccacctgaggtggccgtgttcgagcctagcgaggccgagatcagccacacccagaaagccaccctcgtgtgcctggctaccggcttctaccccgaccatgtggaactgtcttggtgggtcaacggcaaagaggtgcacagcggcgtgtgtaccgacccccagccactgaaagaacagcccgccctgaacgacagccggtactgcctgagcagcagactgagagtgtccgccaccttctggcagaacccccggaaccacttcagatgccaggtgcagttctacggcctgagcgagaacgacgagtggacccaggacagagccaagcccgtgacccagatcgtgtctgccgaagcctggggcagagccgatgatgtgattaagatccactggcaggaaaagaagtccaacaccatcctgggcagccaggaaggcaacaccatgaagaccaacgacacctacatgaagttcagctggctgaccgtgcccgagaagtccctggacaaagaacacagatgcatcgtgcggcacgaaaacaacaagaacggcgtggaccaggaaatcatcttcccacccatcaagaccgatgtgattacaatggaccccaaggacaactgctccaaggacgccaacgataccctgctgctccagctgaccaacaccagcgcctactacatgtacttgttgctgctgctgaagtccgtggtgtacttcgccatcatcacatgctgcctgctgcggagaaccgccttctgctgcaacggcgagaagtctagggccaagcgatctggatctggagcaacaaacttctcactactcaaacaagcaggtgacgtggaggagaatcccgggcctactagtatggactggatttggcgcatccttttccttgtcggcgctgctaccggcgcgcattccttcgaagaagtgcaactggttgaatctggcggcggactggttaagcctggcggatctctgaagctgagctgtgccgccagcggctacacctttaccagctacgtgatgcactgggtccgacaggcccctggcaaaggacttgagtggatcggctacatcaacccctacaacgatggcaccaagtacaacgagaagttccagggcagagtgaccatcagctccgacaagagcatcagcaccgcctacatggaactgagcagcctgagaagcgaggataccgccatgtactattgcgccagaggcacctactactacggcaccagagtgttcgactactggggccagggaaccctggtcacagtctcttctacgcgtatccagaaccctgatcctgccgtgtaccagctgcgggatagcaagagcagcgacaagagcgtgtgtctgttcaccgacttcgacagccagaccaacgtgtcccagagcaaggactccgacgtgtacatcaccgataagtgcgtgctggacatgcggagcatggacttcaagagcaactccgccgtggcctggtccaacaagtccgatttcgcctgcgccaacgccttcaacaacagcattatccccgaggacacattcttcccaagccccgagagcagcgactccaccgaccacgtgaagcccaaagagacagagaacaccaagcagcccagcaagagctgccacaagcccaaggccatcgtgcacaccgagaaagtgaacatgatgagcctgaccgtgctgggcctgcggatgctgttcgccaaaaccgtggccgtgaacttcctgctgaccgccaagctgttcttcctc

SEQ ID NO: 7489 - DNA, 2577 bp, synthetic construct
  source 1..2577: mol_type = other DNA
atggccttaccagtgaccgccttgctcctgccgctggccttgctgctccacgccgccaggccggaagtgcagctggttgaatctggcggaggactggttcagcctggcggatctctgagactgtcttgtgccgccagcggcttcagcttcagcgacttttggatgagctgggtccgacaggcccctggcaaaggacttgaatgggtcgccacaatcagccaggccggcagcgagaaggactacgtggactctgtgaagggcagattcaccatcagccgggacaacgccaagaagtccctgtacctccagatgaacagcctgagagccgaggacaccgccgtgtactattgtgcctctggcgtgtacagcttcgactacagaggccagggcaccctggtcacagtctcttctggtaccggcggaggcggatctggcggcggaggtagcggtggcggaggatctgaattcgacatccagatgacacagagccctagcagcctgtctgccagcgtgggagacagagtgaccatcacatgcaaggccagcgaccacatcaacaactggctggcctggtatcagcagaagcctggacaggcccctaagctgctgatctacggcgctaccacactggaaacaggcgtgcccagcagattttctggcagcggctctggcaccgactacaccctgacaatatccagcctccagcctgaggacttcgccacctactactgtcagcagagctggaacaccccttggacattcggccagggcaccaagctggaaatcaagagactcgaggacctgaagaacgtgttcccacctgaggtggccgtgttcgagcctagcgaggccgagatcagccacacccagaaagccaccctcgtgtgcctggctaccggcttctaccccgaccatgtggaactgtcttggtgggtcaacggcaaagaggtgcacagcggcgtgtgtaccgacccccagccactgaaagaacagcccgccctgaacgacagccggtactgcctgagcagcagactgagagtgtccgccaccttctggcagaacccccggaaccacttcagatgccaggtgcagttctacggcctgagcgagaacgacgagtggacccaggacagagccaagcccgtgacccagatcgtgtctgccgaagcctggggcagagccgatgatgtgattaagatccactggcaggaaaagaagtccaacaccatcctgggcagccaggaaggcaacaccatgaagaccaacgacacctacatgaagttcagctggctgaccgtgcccgagaagtccctggacaaagaacacagatgcatcgtgcggcacgaaaacaacaagaacggcgtggaccaggaaatcatcttcccacccatcaagaccgatgtgattacaatggaccccaaggacaactgctccaaggacgccaacgataccctgctgctccagctgaccaacaccagcgcctactacatgtacttgttgctgctgctgaagtccgtggtgtacttcgccatcatcacatgctgcctgctgcggagaaccgccttctgctgcaacggcgagaagtctagggccaagcgatctggatctggagcaacaaacttctcactactcaaacaagcaggtgacgtggaggagaatcccgggcctactagtatggactggatttggcgcatccttttccttgtcggcgctgctaccggcgcgcattccttcgaacaagttcagcttcaacagcctggcgctgagctggtcaaacctggcgcttctgtgaagatgagctgcaaagccagcggctacgccttcagcagctactggatcaactggatgaagcagaaacccggccagggactcgaatggatcggccaaatctatcccggcgacggcgacaccaactacaacggcaagttcaagggcagagccacactgaccgccgatacctctagcagcacagcctacatgcagctgagcagcctgaccagcgaagatagcgccgtgtacttctgtgcccggtccatcacaacagtcgtgggctgcgctatggactattggggccagggaacaagcgtgaccgtgtctagtacgcgtatccagaaccctgatcctgccgtgtaccagctgcgggatagcaagagcagcgacaagagcgtgtgtctgttcaccgacttcgacagccagaccaacgtgtcccagagcaaggactccgacgtgtacatcaccgataagtgcgtgctggacatgcggagcatggacttcaagagcaactccgccgtggcctggtccaacaagtccgatttcgcctgcgccaacgccttcaacaacagcattatccccgaggacacattcttcccaagccccgagagcagcgactccaccgaccacgtgaagcccaaagagacagagaacaccaagcagcccagcaagagctgccacaagcccaaggccatcgtgcacaccgagaaagtgaacatgatgagcctgaccgtgctgggcctgcggatgctgttcgccaaaaccgtggccgtgaacttcctgctgaccgccaagctgttcttcctc

SEQ ID NO: 7490 - DNA, 2583 bp, synthetic construct
  source 1..2583: mol_type = other DNA
atggccttaccagtgaccgccttgctcctgccgctggccttgctgctccacgccgccaggccggaagtgcagctggttgaatctggcggaggactggttcagcctggcggatctctgagactgtcttgtgccgccagcggcttcagcttcagcgacttttggatgagctgggtccgacaggcccctggcaaaggacttgaatgggtcgccacaatcagccaggccggcagcgagaaggactacgtggactctgtgaagggcagattcaccatcagccgggacaacgccaagaagtccctgtacctccagatgaacagcctgagagccgaggacaccgccgtgtactattgtgcctctggcgtgtacagcttcgactacagaggccagggcaccctggtcacagtctcttctggtaccggcggaggcggatctggcggcggaggtagcggtggcggaggatctgaattccagatcgtgctgtctcagtctcctgccatcctgagcgcttccccaggcgagaaagtgaccatgacctgtagagccagcagcagcgtgtcctacatgcactggtatcagcagaagcccggcagcagccctaagccttggatctacgccaccagcaatctggcctctggcgtgccagccagattttctggctctggcagcggcaccagctacagcttcacaatcagcagagtggaagccgaggacgccgccacctactattgtcagcagtggaccttcaatcctcctaccttcggcggaggcacccggctggaaatcaaaagaacagtggctgctctcgaggacctgaagaacgtgttcccacctgaggtggccgtgttcgagcctagcgaggccgagatcagccacacccagaaagccaccctcgtgtgcctggctaccggcttctaccccgaccatgtggaactgtcttggtgggtcaacggcaaagaggtgcacagcggcgtgtgtaccgacccccagccactgaaagaacagcccgccctgaacgacagccggtactgcctgagcagcagactgagagtgtccgccaccttctggcagaacccccggaaccacttcagatgccaggtgcagttctacggcctgagcgagaacgacgagtggacccaggacagagccaagcccgtgacccagatcgtgtctgccgaagcctggggcagagccgatgatgtgattaagatccactggcaggaaaagaagtccaacaccatcctgggcagccaggaaggcaacaccatgaagaccaacgacacctacatgaagttcagctggctgaccgtgcccgagaagtccctggacaaagaacacagatgcatcgtgcggcacgaaaacaacaagaacggcgtggaccaggaaatcatcttcccacccatcaagaccgatgtgattacaatggaccccaaggacaactgctccaaggacgccaacgataccctgctgctccagctgaccaacaccagcgcctactacatgtacttgttgctgctgctgaagtccgtggtgtacttcgccatcatcacatgctgcctgctgcggagaaccgccttctgctgcaacggcgagaagtctagggccaagcgatctggatctggagcaacaaacttctcactactcaaacaagcaggtgacgtggaggagaatcccgggcctactagtatggactggatttggcgcatccttttccttgtcggcgctgctaccggcgcgcattccttcgaacaggcttatctgcaacagagcggagccgaactcgtcagacctggcgcttctgtgaagatgagctgcaaggccagcggctacaccttcaccagctataatatgcactgggtcaagcagacccctcggcagggactcgaatggatcggcggaatctatcccggcaacggcgacacctcctacaaccagaagttcaagggcaaagccacactgaccgtgggcaagagcagcagcaccgcctatatgcagctcagcagcctgaccagcgaggacagcgccgtgtacttctgcgccagatacgactacaactacgctatggactactggggccagggcaccagcgtgacagttagctctgccagcacgcgtatccagaaccctgatcctgccgtgtaccagctgcgggatagcaagagcagcgacaagagcgtgtgtctgttcaccgacttcgacagccagaccaacgtgtcccagagcaaggactccgacgtgtacatcaccgataagtgcgtgctggacatgcggagcatggacttcaagagcaactccgccgtggcctggtccaacaagtccgatttcgcctgcgccaacgccttcaacaacagcattatccccgaggacacattcttcccaagccccgagagcagcgactccaccgaccacgtgaagcccaaagagacagagaacaccaagcagcccagcaagagctgccacaagcccaaggccatcgtgcacaccgagaaagtgaacatgatgagcctgaccgtgctgggcctgcggatgctgttcgccaaaaccgtggccgtgaacttcctgctgaccgccaagctgttcttcctc

SEQ ID NO: 7491 - DNA, 2577 bp, synthetic construct
  source 1..2577: mol_type = other DNA
atggccttaccagtgaccgccttgctcctgccgctggccttgctgctccacgccgccaggccggaagtgcagctggttgaatctggcggaggactggttcagcctggcggatctctgagactgtcttgtgccgccagcggcttcagcttcagcgacttttggatgagctgggtccgacaggcccctggcaaaggacttgaatgggtcgccacaatcagccaggccggcagcgagaaggactacgtggactctgtgaagggcagattcaccatcagccgggacaacgccaagaagtccctgtacctccagatgaacagcctgagagccgaggacaccgccgtgtactattgtgcctctggcgtgtacagcttcgactacagaggccagggcaccctggtcacagtctcttctggtaccggcggaggcggatctggcggcggaggtagcggtggcggaggatctgaattcgagatcgtgctgacacagagccctgccaccctgtctctgagccctggcgaaagagccaccctgagctgtagagccagccagagcgtgtccagctacctggcctggtatcagcagaagcccggccaggctccccggctgctgatctacgatgccagcaatagagccaccggcatccccgccagattttccggctctggcagcggcaccgacttcaccctgaccatcagctccctggaacccgaggacttcgccgtgtactactgccagcagcggagcaactggcccatcacattcggccagggcacccggctggaaatcaaactcgaggacctgaagaacgtgttcccacctgaggtggccgtgttcgagcctagcgaggccgagatcagccacacccagaaagccaccctcgtgtgcctggctaccggcttctaccccgaccatgtggaactgtcttggtgggtcaacggcaaagaggtgcacagcggcgtgtgtaccgacccccagccactgaaagaacagcccgccctgaacgacagccggtactgcctgagcagcagactgagagtgtccgccaccttctggcagaacccccggaaccacttcagatgccaggtgcagttctacggcctgagcgagaacgacgagtggacccaggacagagccaagcccgtgacccagatcgtgtctgccgaagcctggggcagagccgatgatgtgattaagatccactggcaggaaaagaagtccaacaccatcctgggcagccaggaaggcaacaccatgaagaccaacgacacctacatgaagttcagctggctgaccgtgcccgagaagtccctggacaaagaacacagatgcatcgtgcggcacgaaaacaacaagaacggcgtggaccaggaaatcatcttcccacccatcaagaccgatgtgattacaatggaccccaaggacaactgctccaaggacgccaacgataccctgctgctccagctgaccaacaccagcgcctactacatgtacttgttgctgctgctgaagtccgtggtgtacttcgccatcatcacatgctgcctgctgcggagaaccgccttctgctgcaacggcgagaagtctagggccaagcgatctggatctggagcaacaaacttctcactactcaaacaagcaggtgacgtggaggagaatcccgggcctactagtatggactggatttggcgcatccttttccttgtcggcgctgctaccggcgcgcattccttcgaagaggtgcagcttgttgagtctggcggaggactggtgcagcccgatagaagcctgagactgtcttgtgccgccagcggcttcaccttccacgattatgccatgcactgggtccgacaggcccctggcaaaggacttgaatgggtgtccaccatctcttggaacagcggcacaatcggctacgccgactctgtgaagggcagattcaccatcagccgggacaacgccaagaacagcctgtacctccagatgaactccctgagagccgaggacacagccctgtactactgcgccaaggacatccagtacggcaactactactacggcatggacgtgtggggccagggcacaacagtgacagtctcttctacgcgtatccagaaccctgatcctgccgtgtaccagctgcgggatagcaagagcagcgacaagagcgtgtgtctgttcaccgacttcgacagccagaccaacgtgtcccagagcaaggactccgacgtgtacatcaccgataagtgcgtgctggacatgcggagcatggacttcaagagcaactccgccgtggcctggtccaacaagtccgatttcgcctgcgccaacgccttcaacaacagcattatccccgaggacacattcttcccaagccccgagagcagcgactccaccgaccacgtgaagcccaaagagacagagaacaccaagcagcccagcaagagctgccacaagcccaaggccatcgtgcacaccgagaaagtgaacatgatgagcctgaccgtgctgggcctgcggatgctgttcgccaaaaccgtggccgtgaacttcctgctgaccgccaagctgttcttcctc

SEQ ID NO: 7492 - DNA, 2562 bp, synthetic construct
  source 1..2562: mol_type = other DNA
atggccttaccagtgaccgccttgctcctgccgctggccttgctgctccacgccgccaggccggaagtgcagctggttgaatctggcggaggactggttcagcctggcggatctctgagactgtcttgtgccgccagcggcttcagcttcagcgacttttggatgagctgggtccgacaggcccctggcaaaggacttgaatgggtcgccacaatcagccaggccggcagcgagaaggactacgtggactctgtgaagggcagattcaccatcagccgggacaacgccaagaagtccctgtacctccagatgaacagcctgagagccgaggacaccgccgtgtactattgtgcctctggcgtgtacagcttcgactacagaggccagggcaccctggtcacagtctcttctggtaccggcggaggcggatctggcggcggaggtagcggtggcggaggatctgaattcgacatccagatgacacagagccctagcagcctgtctgccagcgtgggagatagagtgaccatcaactgcaaggccagccaggacatcaacagctacctgagctggttccagcagaagcctggcaaggcccctaagacactgatctaccgggccaacagactggtggatggcgtgccaagcagattttctggcagcggcagcggccaggattacaccctgacaatatccagcctccagcctgaggacttcgccacctactactgcctccagtacgacgagttccctctgacctttggcggaggcaccaaggtggaaatcaaactcgaggacctgaagaacgtgttcccacctgaggtggccgtgttcgagcctagcgaggccgagatcagccacacccagaaagccaccctcgtgtgcctggctaccggcttctaccccgaccatgtggaactgtcttggtgggtcaacggcaaagaggtgcacagcggcgtgtgtaccgacccccagccactgaaagaacagcccgccctgaacgacagccggtactgcctgagcagcagactgagagtgtccgccaccttctggcagaacccccggaaccacttcagatgccaggtgcagttctacggcctgagcgagaacgacgagtggacccaggacagagccaagcccgtgacccagatcgtgtctgccgaagcctggggcagagccgatgatgtgattaagatccactggcaggaaaagaagtccaacaccatcctgggcagccaggaaggcaacaccatgaagaccaacgacacctacatgaagttcagctggctgaccgtgcccgagaagtccctggacaaagaacacagatgcatcgtgcggcacgaaaacaacaagaacggcgtggaccaggaaatcatcttcccacccatcaagaccgatgtgattacaatggaccccaaggacaactgctccaaggacgccaacgataccctgctgctccagctgaccaacaccagcgcctactacatgtacttgttgctgctgctgaagtccgtggtgtacttcgccatcatcacatgctgcctgctgcggagaaccgccttctgctgcaacggcgagaagtctagggccaagcgatctggatctggagcaacaaacttctcactactcaaacaagcaggtgacgtggaggagaatcccgggcctactagtatggactggatttggcgcatccttttccttgtcggcgctgctaccggcgcgcattccttcgaacaggtgcaactggtgcagtctggggccgaagtgaagaaacctggggcctctgtgaaggtgtcctgcaaagccagcggctacacctttaccaactacgacatcaactgggtccgacaggctccaggccaaggactggaatggatcggctggatctatcctggcgacggcagcaccaagtacaacgagaagttcaaggccaaggccacactgaccgccgataccagcacaagcaccgcctacatggaactgcggagcctgagaagcgacgacaccgccgtgtactattgtgcctccggctacgaggacgctatggactattggggccagggcaccaccgtgacagtgtctagtacgcgtatccagaaccctgatcctgccgtgtaccagctgcgggatagcaagagcagcgacaagagcgtgtgtctgttcaccgacttcgacagccagaccaacgtgtcccagagcaaggactccgacgtgtacatcaccgataagtgcgtgctggacatgcggagcatggacttcaagagcaactccgccgtggcctggtccaacaagtccgatttcgcctgcgccaacgccttcaacaacagcattatccccgaggacacattcttcccaagccccgagagcagcgactccaccgaccacgtgaagcccaaagagacagagaacaccaagcagcccagcaagagctgccacaagcccaaggccatcgtgcacaccgagaaagtgaacatgatgagcctgaccgtgctgggcctgcggatgctgttcgccaaaaccgtggccgtgaacttcctgctgaccgccaagctgttcttcctc

SEQ ID NO: 7493 - DNA, 2568 bp, synthetic construct
  source 1..2568: mol_type = other DNA
atggccttaccagtgaccgccttgctcctgccgctggccttgctgctccacgccgccaggccggaagtgcagctggttgaatctggcggaggactggttcagcctggcggatctctgagactgtcttgtgccgccagcggcttcagcttcagcgacttttggatgagctgggtccgacaggcccctggcaaaggacttgaatgggtcgccacaatcagccaggccggcagcgagaaggactacgtggactctgtgaagggcagattcaccatcagccgggacaacgccaagaagtccctgtacctccagatgaacagcctgagagccgaggacaccgccgtgtactattgtgcctctggcgtgtacagcttcgactacagaggccagggcaccctggtcacagtctcttctggtaccggcggaggcggatctggcggcggaggtagcggtggcggaggatctgaattcgacatcgtgatgacccagacacctctgagcctgagcgtgacacctggacagcctgccagcattagctgcaagagcagccagtctctgctggacggcgacggcaagacctacctgaattggctgctccagaagcctggacagagccctcagcggctgatctacctggtgtccaagctggatagcggcgtgcccgatagattttctggcagcggctctggcaccgacttcaccctgaagatcagcagagtggaagccgaggacgtgggcgtgtactactgttggcagggcacacacttccccagaacattcggccagggcacaaagctggaaatcaaactcgaggacctgaagaacgtgttcccacctgaggtggccgtgttcgagcctagcgaggccgagatcagccacacccagaaagccaccctcgtgtgcctggctaccggcttctaccccgaccatgtggaactgtcttggtgggtcaacggcaaagaggtgcacagcggcgtgtgtaccgacccccagccactgaaagaacagcccgccctgaacgacagccggtactgcctgagcagcagactgagagtgtccgccaccttctggcagaacccccggaaccacttcagatgccaggtgcagttctacggcctgagcgagaacgacgagtggacccaggacagagccaagcccgtgacccagatcgtgtctgccgaagcctggggcagagccgatgatgtgattaagatccactggcaggaaaagaagtccaacaccatcctgggcagccaggaaggcaacaccatgaagaccaacgacacctacatgaagttcagctggctgaccgtgcccgagaagtccctggacaaagaacacagatgcatcgtgcggcacgaaaacaacaagaacggcgtggaccaggaaatcatcttcccacccatcaagaccgatgtgattacaatggaccccaaggacaactgctccaaggacgccaacgataccctgctgctccagctgaccaacaccagcgcctactacatgtacttgttgctgctgctgaagtccgtggtgtacttcgccatcatcacatgctgcctgctgcggagaaccgccttctgctgcaacggcgagaagtctagggccaagcgatctggatctggagcaacaaacttctcactactcaaacaagcaggtgacgtggaggagaatcccgggcctactagtatggactggatttggcgcatccttttccttgtcggcgctgctaccggcgcgcattccttcgaacaagtgcaactggttcagagcggagccgaagtgaagaaacctggggcctctgtgaaggtgtcctgcaaggccagcggctacaccttcaaggacacctacatccactgggtccgacaggcccctggacaaggacttgagtggatgggcagaatcgaccccgccaacggcaacaccaaatacgaccccaagttccagggcagagtgaccatgaccagagacaccagcatcagcaccgcctacatggaactgagccggctgagatccgatgacaccgccgtgtactattgcgctagaagaggcggagtggattggggccagggaacactggttaccgtgtctagtacgcgtatccagaaccctgatcctgccgtgtaccagctgcgggatagcaagagcagcgacaagagcgtgtgtctgttcaccgacttcgacagccagaccaacgtgtcccagagcaaggactccgacgtgtacatcaccgataagtgcgtgctggacatgcggagcatggacttcaagagcaactccgccgtggcctggtccaacaagtccgatttcgcctgcgccaacgccttcaacaacagcattatccccgaggacacattcttcccaagccccgagagcagcgactccaccgaccacgtgaagcccaaagagacagagaacaccaagcagcccagcaagagctgccacaagcccaaggccatcgtgcacaccgagaaagtgaacatgatgagcctgaccgtgctgggcctgcggatgctgttcgccaaaaccgtggccgtgaacttcctgctgaccgccaagctgttcttcctc

SEQ ID NO: 7494 - DNA, 2571 bp, synthetic construct
  source 1..2571: mol_type = other DNA
atggccttaccagtgaccgccttgctcctgccgctggccttgctgctccacgccgccaggccggaagtgcagctggttgaatctggcggaggactggttcagcctggcggatctctgagactgtcttgtgccgccagcggcttcagcttcagcgacttttggatgagctgggtccgacaggcccctggcaaaggacttgaatgggtcgccacaatcagccaggccggcagcgagaaggactacgtggactctgtgaagggcagattcaccatcagccgggacaacgccaagaagtccctgtacctccagatgaacagcctgagagccgaggacaccgccgtgtactattgtgcctctggcgtgtacagcttcgactacagaggccagggcaccctggtcacagtctcttctggtaccggcggaggcggatctggcggcggaggtagcggtggcggaggatctgaattcgacatccagatgacacagagccctagcagcctgtctgccagcgtgggagacagagtgaccatcacatgcaaggccagccaggatgtgtctacagccgtggcctggttccagcagaagcctggaaaagcccctaagctgctgatctacagccccagctacagatacaccggcgtgcccagcagattttctggcagcggctctggcaccgacttcaccctgacaatatccagcctccagcctgaggacttcacctactactgccagcagctctacagcaccccttacacattcggccagggcaccaaggtggaaatcaaactcgaggacctgaagaacgtgttcccacctgaggtggccgtgttcgagcctagcgaggccgagatcagccacacccagaaagccaccctcgtgtgcctggctaccggcttctaccccgaccatgtggaactgtcttggtgggtcaacggcaaagaggtgcacagcggcgtgtgtaccgacccccagccactgaaagaacagcccgccctgaacgacagccggtactgcctgagcagcagactgagagtgtccgccaccttctggcagaacccccggaaccacttcagatgccaggtgcagttctacggcctgagcgagaacgacgagtggacccaggacagagccaagcccgtgacccagatcgtgtctgccgaagcctggggcagagccgatgatgtgattaagatccactggcaggaaaagaagtccaacaccatcctgggcagccaggaaggcaacaccatgaagaccaacgacacctacatgaagttcagctggctgaccgtgcccgagaagtccctggacaaagaacacagatgcatcgtgcggcacgaaaacaacaagaacggcgtggaccaggaaatcatcttcccacccatcaagaccgatgtgattacaatggaccccaaggacaactgctccaaggacgccaacgataccctgctgctccagctgaccaacaccagcgcctactacatgtacttgttgctgctgctgaagtccgtggtgtacttcgccatcatcacatgctgcctgctgcggagaaccgccttctgctgcaacggcgagaagtctagggccaagcgatctggatctggagcaacaaacttctcactactcaaacaagcaggtgacgtggaggagaatcccgggcctactagtatggactggatttggcgcatccttttccttgtcggcgctgctaccggcgcgcattccttcgaagaagtgcaactggttcagagcggagccgaagtgaagaaacctggggcctctgtgaaggtgtcctgcaaagccagcggctacacctttaccgactactacctggacgtggtcgtgcggcaagctcctggacaaggactggaatggatcggcagagtgaacccctacaacggcggcaccatctacaaccagaaattcaagggaagagtgaccctgaccagagacaccagcacctccacagcctacctggaactgagcagcctgagaagcgaagataccgccgtgtactactgcgccagggaccactacagatatgaccctctgctggactactggggccagggaaccctggttacagtgtctagtacgcgtatccagaaccctgatcctgccgtgtaccagctgcgggatagcaagagcagcgacaagagcgtgtgtctgttcaccgacttcgacagccagaccaacgtgtcccagagcaaggactccgacgtgtacatcaccgataagtgcgtgctggacatgcggagcatggacttcaagagcaactccgccgtggcctggtccaacaagtccgatttcgcctgcgccaacgccttcaacaacagcattatccccgaggacacattcttcccaagccccgagagcagcgactccaccgaccacgtgaagcccaaagagacagagaacaccaagcagcccagcaagagctgccacaagcccaaggccatcgtgcacaccgagaaagtgaacatgatgagcctgaccgtgctgggcctgcggatgctgttcgccaaaaccgtggccgtgaacttcctgctgaccgccaagctgttcttcctc

SEQ ID NO: 7495 - DNA, 2589 bp, synthetic construct
  source 1..2589: mol_type = other DNA
atggccttaccagtgaccgccttgctcctgccgctggccttgctgctccacgccgccaggccggaagtgcagctggttgaatctggcggaggactggttcagcctggcggatctctgagactgtcttgtgccgccagcggcttcagcttcagcgacttttggatgagctgggtccgacaggcccctggcaaaggacttgaatgggtcgccacaatcagccaggccggcagcgagaaggactacgtggactctgtgaagggcagattcaccatcagccgggacaacgccaagaagtccctgtacctccagatgaacagcctgagagccgaggacaccgccgtgtactattgtgcctctggcgtgtacagcttcgactacagaggccagggcaccctggtcacagtctcttctggtaccggcggaggcggatctggcggcggaggtagcggtggcggaggatctgaattcgacatccagatgacacagagccctagcagcctgtctgccagcgtgggagacagagtgaccatcacctgtagagccagccagagcgtgtccaccagcagctacaactacatgcactggtatcagcagaagcccggcaagcctcctaagctgctgattaagtacgccagcaacctggaaagcggcgtgcccagcagattttctggcagcggctctggcaccgacttcaccctgacaatatccagcctccagcctgaggacttcgccacctactactgtcagcactcctgggagatccctctgacattcggccagggcaccaaggtggaaatcaaactcgaggacctgaagaacgtgttcccacctgaggtggccgtgttcgagcctagcgaggccgagatcagccacacccagaaagccaccctcgtgtgcctggctaccggcttctaccccgaccatgtggaactgtcttggtgggtcaacggcaaagaggtgcacagcggcgtgtgtaccgacccccagccactgaaagaacagcccgccctgaacgacagccggtactgcctgagcagcagactgagagtgtccgccaccttctggcagaacccccggaaccacttcagatgccaggtgcagttctacggcctgagcgagaacgacgagtggacccaggacagagccaagcccgtgacccagatcgtgtctgccgaagcctggggcagagccgatgatgtgattaagatccactggcaggaaaagaagtccaacaccatcctgggcagccaggaaggcaacaccatgaagaccaacgacacctacatgaagttcagctggctgaccgtgcccgagaagtccctggacaaagaacacagatgcatcgtgcggcacgaaaacaacaagaacggcgtggaccaggaaatcatcttcccacccatcaagaccgatgtgattacaatggaccccaaggacaactgctccaaggacgccaacgataccctgctgctccagctgaccaacaccagcgcctactacatgtacttgttgctgctgctgaagtccgtggtgtacttcgccatcatcacatgctgcctgctgcggagaaccgccttctgctgcaacggcgagaagtctagggccaagcgatctggatctggagcaacaaacttctcactactcaaacaagcaggtgacgtggaggagaatcccgggcctactagtatggactggatttggcgcatccttttccttgtcggcgctgctaccggcgcgcattccttcgaagaagtgcaactggttcagagcggagccgaagtgaagaaacctggggcctctgtgaaggtgtcctgcaaggccagcggctacagcttcaccgactattatatgcactgggtccgacaggctccaggccagggacttgagtggatcggcagaatcaacccctacaacggcgctgccttctacagccagaacttcaaggatagagtgaccctgaccgtggacaccagcaccagcacagcctacctggaactgagcagcctgagaagcgaggacaccgccgtgtactactgcgccattgagagaggcgctgacctggaaggctacgctatggattattggggccagggaaccctggtcaccgtgtcatctacgcgtatccagaaccctgatcctgccgtgtaccagctgcgggatagcaagagcagcgacaagagcgtgtgtctgttcaccgacttcgacagccagaccaacgtgtcccagagcaaggactccgacgtgtacatcaccgataagtgcgtgctggacatgcggagcatggacttcaagagcaactccgccgtggcctggtccaacaagtccgatttcgcctgcgccaacgccttcaacaacagcattatccccgaggacacattcttcccaagccccgagagcagcgactccaccgaccacgtgaagcccaaagagacagagaacaccaagcagcccagcaagagctgccacaagcccaaggccatcgtgcacaccgagaaagtgaacatgatgagcctgaccgtgctgggcctgcggatgctgttcgccaaaaccgtggccgtgaacttcctgctgaccgccaagctgttcttcctc

SEQ ID NO: 7496 - DNA, 2583 bp, synthetic construct
  source 1..2583: mol_type = other DNA
atggccttaccagtgaccgccttgctcctgccgctggccttgctgctccacgccgccaggccggaagtgcagctggttgaatctggcggaggactggttcagcctggcggatctctgagactgtcttgtgccgccagcggcttcagcttcagcgacttttggatgagctgggtccgacaggcccctggcaaaggacttgaatgggtcgccacaatcagccaggccggcagcgagaaggactacgtggactctgtgaagggcagattcaccatcagccgggacaacgccaagaagtccctgtacctccagatgaacagcctgagagccgaggacaccgccgtgtactattgtgcctctggcgtgtacagcttcgactacagaggccagggcaccctggtcacagtctcttctggtaccggcggaggcggatctggcggcggaggtagcggtggcggaggatctgaattcgagatcgtgctgacacagtctccagccacactgagcgcttctccaggcgagagagtgaccctgacctgtagagccagcagcaacgtgatctccagctacgtgcactggtatcagcagaagcctggcagcagccccagactgtttctgtacagcaccagcaatctggcctccggcgtgccaagcagattttctggctctggcagcggcaccgacttcacctttaccatctctagcctggaagccgaggacgccgccacctactactgtcagcagtacagcggctaccctctgaccttcggccagggcacaagactggaaatcaaactcgaggacctgaagaacgtgttcccacctgaggtggccgtgttcgagcctagcgaggccgagatcagccacacccagaaagccaccctcgtgtgcctggctaccggcttctaccccgaccatgtggaactgtcttggtgggtcaacggcaaagaggtgcacagcggcgtgtgtaccgacccccagccactgaaagaacagcccgccctgaacgacagccggtactgcctgagcagcagactgagagtgtccgccaccttctggcagaacccccggaaccacttcagatgccaggtgcagttctacggcctgagcgagaacgacgagtggacccaggacagagccaagcccgtgacccagatcgtgtctgccgaagcctggggcagagccgatgatgtgattaagatccactggcaggaaaagaagtccaacaccatcctgggcagccaggaaggcaacaccatgaagaccaacgacacctacatgaagttcagctggctgaccgtgcccgagaagtccctggacaaagaacacagatgcatcgtgcggcacgaaaacaacaagaacggcgtggaccaggaaatcatcttcccacccatcaagaccgatgtgattacaatggaccccaaggacaactgctccaaggacgccaacgataccctgctgctccagctgaccaacaccagcgcctactacatgtacttgttgctgctgctgaagtccgtggtgtacttcgccatcatcacatgctgcctgctgcggagaaccgccttctgctgcaacggcgagaagtctagggccaagcgatctggatctggagcaacaaacttctcactactcaaacaagcaggtgacgtggaggagaatcccgggcctactagtatggactggatttggcgcatccttttccttgtcggcgctgctaccggcgcgcattccttcgaacaagttcagctgcaagagtctggccctggcctggtcaagcctagcgaaacactgagcctgacctgcgccgtgtctggctactctatcaccagcgcctactattggaactggatcagacagcctcctggcaaaggactggaatggatcggctacatcagctacgacggcagaaacaactacaaccccagcctgaagaaccggatcaccatcaatcccgacaccagcaagaaccagttcagcctccagctgaacagcgtgacccctgaggataccgccgtgtactactgtgccagagaaggcgactacgacgtgggcaactactacgctatggactactggggccagggaaccctggtcacagtctcttctacgcgtatccagaaccctgatcctgccgtgtaccagctgcgggatagcaagagcagcgacaagagcgtgtgtctgttcaccgacttcgacagccagaccaacgtgtcccagagcaaggactccgacgtgtacatcaccgataagtgcgtgctggacatgcggagcatggacttcaagagcaactccgccgtggcctggtccaacaagtccgatttcgcctgcgccaacgccttcaacaacagcattatccccgaggacacattcttcccaagccccgagagcagcgactccaccgaccacgtgaagcccaaagagacagagaacaccaagcagcccagcaagagctgccacaagcccaaggccatcgtgcacaccgagaaagtgaacatgatgagcctgaccgtgctgggcctgcggatgctgttcgccaaaaccgtggccgtgaacttcctgctgaccgccaagctgttcttcctc

SEQ ID NO: 7497 - DNA, 2583 bp, synthetic construct
  source 1..2583: mol_type = other DNA
atggccttaccagtgaccgccttgctcctgccgctggccttgctgctccacgccgccaggccggaagtgcagctggttgaatctggcggaggactggttcagcctggcggatctctgagactgtcttgtgccgccagcggcttcagcttcagcgacttttggatgagctgggtccgacaggcccctggcaaaggacttgaatgggtcgccacaatcagccaggccggcagcgagaaggactacgtggactctgtgaagggcagattcaccatcagccgggacaacgccaagaagtccctgtacctccagatgaacagcctgagagccgaggacaccgccgtgtactattgtgcctctggcgtgtacagcttcgactacagaggccagggcaccctggtcacagtctcttctggtaccggcggaggcggatctggcggcggaggtagcggtggcggaggatctgaattcgagatcgtgctgacacagtctcccgccacactgtcactgtctccaggcgaaagagccacactgagctgtagagccagcagcaacgtgatctccagctacgtgcactggtatcagcagaagcctggacaggcccctcggctgctgatctacagcacaagcaatctggcctctggcatccccgccagattttctggctctggaagcggcaccgacttcaccctgaccataagcagcctggaacctgaggacttcgccgtgtactactgccagcagtatagcggctaccctctgaccttcggccagggcacaagactggaaatcaaactcgaggacctgaagaacgtgttcccacctgaggtggccgtgttcgagcctagcgaggccgagatcagccacacccagaaagccaccctcgtgtgcctggctaccggcttctaccccgaccatgtggaactgtcttggtgggtcaacggcaaagaggtgcacagcggcgtgtgtaccgacccccagccactgaaagaacagcccgccctgaacgacagccggtactgcctgagcagcagactgagagtgtccgccaccttctggcagaacccccggaaccacttcagatgccaggtgcagttctacggcctgagcgagaacgacgagtggacccaggacagagccaagcccgtgacccagatcgtgtctgccgaagcctggggcagagccgatgatgtgattaagatccactggcaggaaaagaagtccaacaccatcctgggcagccaggaaggcaacaccatgaagaccaacgacacctacatgaagttcagctggctgaccgtgcccgagaagtccctggacaaagaacacagatgcatcgtgcggcacgaaaacaacaagaacggcgtggaccaggaaatcatcttcccacccatcaagaccgatgtgattacaatggaccccaaggacaactgctccaaggacgccaacgataccctgctgctccagctgaccaacaccagcgcctactacatgtacttgttgctgctgctgaagtccgtggtgtacttcgccatcatcacatgctgcctgctgcggagaaccgccttctgctgcaacggcgagaagtctagggccaagcgatctggatctggagcaacaaacttctcactactcaaacaagcaggtgacgtggaggagaatcccgggcctactagtatggactggatttggcgcatccttttccttgtcggcgctgctaccggcgcgcattccttcgaagaagtgcaactggtggaaagtggcggcggactggtgcaacctggaagaagcctgagactgtcctgtgccgccagcggctactctatcacaagcgcctactactggaactgggtccgacaggctcctggcaaaggactggaatgggtgtcctacatcagctacgacggcagaaacaactacaaccccagcctgaagaaccgcttcaccatcagccgggacaacgccaagaagtccctgtacctccagatgaacagcctgagagccgaggacacagccctgtactattgcgccaaagagggcgactacgacgtcggcaactactacgctatggactactggggccagggaaccaccgtgactgtctcttctacgcgtatccagaaccctgatcctgccgtgtaccagctgcgggatagcaagagcagcgacaagagcgtgtgtctgttcaccgacttcgacagccagaccaacgtgtcccagagcaaggactccgacgtgtacatcaccgataagtgcgtgctggacatgcggagcatggacttcaagagcaactccgccgtggcctggtccaacaagtccgatttcgcctgcgccaacgccttcaacaacagcattatccccgaggacacattcttcccaagccccgagagcagcgactccaccgaccacgtgaagcccaaagagacagagaacaccaagcagcccagcaagagctgccacaagcccaaggccatcgtgcacaccgagaaagtgaacatgatgagcctgaccgtgctgggcctgcggatgctgttcgccaaaaccgtggccgtgaacttcctgctgaccgccaagctgttcttcctc

SEQ ID NO: 7498 - DNA, 2580 bp, synthetic construct
  source 1..2580: mol_type = other DNA
atggccttaccagtgaccgccttgctcctgccgctggccttgctgctccacgccgccaggccggaagtgcagctggttgaatctggcggaggactggttcagcctggcggatctctgagactgtcttgtgccgccagcggcttcagcttcagcgacttttggatgagctgggtccgacaggcccctggcaaaggacttgaatgggtcgccacaatcagccaggccggcagcgagaaggactacgtggactctgtgaagggcagattcaccatcagccgggacaacgccaagaagtccctgtacctccagatgaacagcctgagagccgaggacaccgccgtgtactattgtgcctctggcgtgtacagcttcgactacagaggccagggcaccctggtcacagtctcttctggtaccggcggaggcggatctggcggcggaggtagcggtggcggaggatctgaattcgacgtggtcatgacacagaccccactgagcctgcctgtgtctctgggagatcaggccagcatctcctgtagaagcagccagagcctggtgcacagcaacggcaacacctacctgcggtggtatctccagaagcctggacagagccccaaggtgctgatctacaaggtgtccaacagagtgtccggcgtgcccgatagattttctggcagcggctctggcaccgacttcaccctgaagatcaatagagtggaagccgaggacctgggcgtgtacttctgtagccagagcacccatgtgccttggacctttggcggaggcaccaagctggaaatcaagctcgaggacctgaagaacgtgttcccacctgaggtggccgtgttcgagcctagcgaggccgagatcagccacacccagaaagccaccctcgtgtgcctggctaccggcttctaccccgaccatgtggaactgtcttggtgggtcaacggcaaagaggtgcacagcggcgtgtgtaccgacccccagccactgaaagaacagcccgccctgaacgacagccggtactgcctgagcagcagactgagagtgtccgccaccttctggcagaacccccggaaccacttcagatgccaggtgcagttctacggcctgagcgagaacgacgagtggacccaggacagagccaagcccgtgacccagatcgtgtctgccgaagcctggggcagagccgatgatgtgattaagatccactggcaggaaaagaagtccaacaccatcctgggcagccaggaaggcaacaccatgaagaccaacgacacctacatgaagttcagctggctgaccgtgcccgagaagtccctggacaaagaacacagatgcatcgtgcggcacgaaaacaacaagaacggcgtggaccaggaaatcatcttcccacccatcaagaccgatgtgattacaatggaccccaaggacaactgctccaaggacgccaacgataccctgctgctccagctgaccaacaccagcgcctactacatgtacttgttgctgctgctgaagtccgtggtgtacttcgccatcatcacatgctgcctgctgcggagaaccgccttctgctgcaacggcgagaagtctagggccaagcgatctggatctggagcaacaaacttctcactactcaaacaagcaggtgacgtggaggagaatcccgggcctactagtatggactggatttggcgcatccttttccttgtcggcgctgctaccggcgcgcattccttcgaaggcgtgaagctggacgagacaggcggaggacttgttcaacctggcggagccatgaagctgagctgtgtgaccagcggctttaccttcggccactactggatgaactgggtccgacagtcccctgagaaaggactggaatgggtcgcccagttcagaaacaagccctacaactacgaaacctactacagcgacagcgtgaagggcagattcaccatcagccgggacgacagcaagtccagcgtgtacctccagatgaacaacctgcgcgtggaagataccggcatctactactgtaccggggccagctacggcatggaatatctcggccagggcaccagcgtgaccgtgtctacaacgcgtatccagaaccctgatcctgccgtgtaccagctgcgggatagcaagagcagcgacaagagcgtgtgtctgttcaccgacttcgacagccagaccaacgtgtcccagagcaaggactccgacgtgtacatcaccgataagtgcgtgctggacatgcggagcatggacttcaagagcaactccgccgtggcctggtccaacaagtccgatttcgcctgcgccaacgccttcaacaacagcattatccccgaggacacattcttcccaagccccgagagcagcgactccaccgaccacgtgaagcccaaagagacagagaacaccaagcagcccagcaagagctgccacaagcccaaggccatcgtgcacaccgagaaagtgaacatgatgagcctgaccgtgctgggcctgcggatgctgttcgccaaaaccgtggccgtgaacttcctgctgaccgccaagctgttcttcctc

SEQ ID NO: 7499 - DNA, 2598 bp, synthetic construct
  source 1..2598: mol_type = other DNA
atggccttaccagtgaccgccttgctcctgccgctggccttgctgctccacgccgccaggccggaagtgcagctggttgaatctggcggaggactggttcagcctggcggatctctgagactgtcttgtgccgccagcggcttcagcttcagcgacttttggatgagctgggtccgacaggcccctggcaaaggacttgaatgggtcgccacaatcagccaggccggcagcgagaaggactacgtggactctgtgaagggcagattcaccatcagccgggacaacgccaagaagtccctgtacctccagatgaacagcctgagagccgaggacaccgccgtgtactattgtgcctctggcgtgtacagcttcgactacagaggccagggcaccctggtcacagtctcttctggtaccggcggaggcggatctggcggcggaggtagcggtggcggaggatctgaattccaggtgcaactggtggaatctggcggcaatctggttcagcctggcggctctctgagactgtcttgtgccgccagcggcttcaccttcggcagcttttctatgagctgggtccgacaagctcctggcggaggacttgaatgggtggcaggactgtctgccagaagcagcctgacacactacgccgactctgtgaagggcagattcaccatcagccgggacaacgccaagaacagcgtgtacctccagatgaacagcctgagagtggaagataccgccgtgtactactgcgccagaagaagctacgacagcagcggctactggggccacttctacagctacatggatgtgtggggccagggcaccctggttacagtttctctcgaggacctgaagaacgtgttcccacctgaggtggccgtgttcgagcctagcgaggccgagatcagccacacccagaaagccaccctcgtgtgcctggctaccggcttctaccccgaccatgtggaactgtcttggtgggtcaacggcaaagaggtgcacagcggcgtgtgtaccgacccccagccactgaaagaacagcccgccctgaacgacagccggtactgcctgagcagcagactgagagtgtccgccaccttctggcagaacccccggaaccacttcagatgccaggtgcagttctacggcctgagcgagaacgacgagtggacccaggacagagccaagcccgtgacccagatcgtgtctgccgaagcctggggcagagccgatgatgtgattaagatccactggcaggaaaagaagtccaacaccatcctgggcagccaggaaggcaacaccatgaagaccaacgacacctacatgaagttcagctggctgaccgtgcccgagaagtccctggacaaagaacacagatgcatcgtgcggcacgaaaacaacaagaacggcgtggaccaggaaatcatcttcccacccatcaagaccgatgtgattacaatggaccccaaggacaactgctccaaggacgccaacgataccctgctgctccagctgaccaacaccagcgcctactacatgtacttgttgctgctgctgaagtccgtggtgtacttcgccatcatcacatgctgcctgctgcggagaaccgccttctgctgcaacggcgagaagtctagggccaagcgatctggatctggagcaacaaacttctcactactcaaacaagcaggtgacgtggaggagaatcccgggcctactagtatggactggatttggcgcatccttttccttgtcggcgctgctaccggcgcgcattccttcgaatctgtgctgacccagcctagctccgtgtctgctgctcctggacagaaagtgaccatctcctgtagcggcagcaccagcaacatcggcaacaactacgtgtcctggtatcagcagcaccccggcaaggcccctaagctgatgatctacgacgtgtccaagaggcccagcggcgtgccagatagattttccggcagcaagagcggcaacagcgccagcctggatattagcggactccagtctgaggacgaggccgactactattgcgccgcctgggatgatagcctgagcgagtttctgtttggcaccggcaccaagctgacagtgcttggaacgcgtatccagaaccctgatcctgccgtgtaccagctgcgggatagcaagagcagcgacaagagcgtgtgtctgttcaccgacttcgacagccagaccaacgtgtcccagagcaaggactccgacgtgtacatcaccgataagtgcgtgctggacatgcggagcatggacttcaagagcaactccgccgtggcctggtccaacaagtccgatttcgcctgcgccaacgccttcaacaacagcattatccccgaggacacattcttcccaagccccgagagcagcgactccaccgaccacgtgaagcccaaagagacagagaacaccaagcagcccagcaagagctgccacaagcccaaggccatcgtgcacaccgagaaagtgaacatgatgagcctgaccgtgctgggcctgcggatgctgttcgccaaaaccgtggccgtgaacttcctgctgaccgccaagctgttcttcctc

SEQ ID NO: 7500 - DNA, 2583 bp, synthetic construct
  source 1..2583: mol_type = other DNA
atggccttaccagtgaccgccttgctcctgccgctggccttgctgctccacgccgccaggccggaagtgcagctggttgaatctggcggaggactggttcagcctggcggatctctgagactgtcttgtgccgccagcggcttcagcttcagcgacttttggatgagctgggtccgacaggcccctggcaaaggacttgaatgggtcgccacaatcagccaggccggcagcgagaaggactacgtggactctgtgaagggcagattcaccatcagccgggacaacgccaagaagtccctgtacctccagatgaacagcctgagagccgaggacaccgccgtgtactattgtgcctctggcgtgtacagcttcgactacagaggccagggcaccctggtcacagtctcttctggtaccggcggaggcggatctggcggcggaggtagcggtggcggaggatctgaattcgacgtggtcatgacacagagcccttctagcctgtctgccagcgtgggcgacagagtgacaatcacctgtcagagcagcctggacatcagccactacctgaactggtatcagcagaagcccggcaaggcccctaagctgctgatctacgacgccagcaatctggaaaccggcgtgcccagcagattttctggcagcggaagcggcacccacttcaccttcacaatatccagcctccagcctgaggacttcgccacctactactgccagcagtacgacaacctgcctctgacctttggcggaggcaccaagctggaaatcaagagactcgaggacctgaagaacgtgttcccacctgaggtggccgtgttcgagcctagcgaggccgagatcagccacacccagaaagccaccctcgtgtgcctggctaccggcttctaccccgaccatgtggaactgtcttggtgggtcaacggcaaagaggtgcacagcggcgtgtgtaccgacccccagccactgaaagaacagcccgccctgaacgacagccggtactgcctgagcagcagactgagagtgtccgccaccttctggcagaacccccggaaccacttcagatgccaggtgcagttctacggcctgagcgagaacgacgagtggacccaggacagagccaagcccgtgacccagatcgtgtctgccgaagcctggggcagagccgatgatgtgattaagatccactggcaggaaaagaagtccaacaccatcctgggcagccaggaaggcaacaccatgaagaccaacgacacctacatgaagttcagctggctgaccgtgcccgagaagtccctggacaaagaacacagatgcatcgtgcggcacgaaaacaacaagaacggcgtggaccaggaaatcatcttcccacccatcaagaccgatgtgattacaatggaccccaaggacaactgctccaaggacgccaacgataccctgctgctccagctgaccaacaccagcgcctactacatgtacttgttgctgctgctgaagtccgtggtgtacttcgccatcatcacatgctgcctgctgcggagaaccgccttctgctgcaacggcgagaagtctagggccaagcgatctggatctggagcaacaaacttctcactactcaaacaagcaggtgacgtggaggagaatcccgggcctactagtatggactggatttggcgcatccttttccttgtcggcgctgctaccggcgcgcattccttcgaacaagttcaactggttcaatcaggcggaggcgtggtgcaacctggtggctctctgagagtgtcttgtgctgcctctggcgtgaccctgagcgactatggaatgcactgggtccgacaggcccctggcaaaggacttgagtgggtcgccttcatcagaaacgacggcagcgacaagtattacgccgacagcgtgaagggcagattcaccatcagccgggacaacagcgagaaaaccgtgtctctccagatgtctagcctgagagccgaggacaccgccgtgtactactgtgccaagaatggcgagagcggccctctggactactggtatctggatctgtggggcagaggcaccctggtcacagtctcttctacgcgtatccagaaccctgatcctgccgtgtaccagctgcgggatagcaagagcagcgacaagagcgtgtgtctgttcaccgacttcgacagccagaccaacgtgtcccagagcaaggactccgacgtgtacatcaccgataagtgcgtgctggacatgcggagcatggacttcaagagcaactccgccgtggcctggtccaacaagtccgatttcgcctgcgccaacgccttcaacaacagcattatccccgaggacacattcttcccaagccccgagagcagcgactccaccgaccacgtgaagcccaaagagacagagaacaccaagcagcccagcaagagctgccacaagcccaaggccatcgtgcacaccgagaaagtgaacatgatgagcctgaccgtgctgggcctgcggatgctgttcgccaaaaccgtggccgtgaacttcctgctgaccgccaagctgttcttcctc

SEQ ID NO: 7501 - DNA, 2595 bp, synthetic construct
  source 1..2595: mol_type = other DNA
atggccttaccagtgaccgccttgctcctgccgctggccttgctgctccacgccgccaggccggaagtgcagctggttgaatctggcggaggactggttcagcctggcggatctctgagactgtcttgtgccgccagcggcttcagcttcagcgacttttggatgagctgggtccgacaggcccctggcaaaggacttgaatgggtcgccacaatcagccaggccggcagcgagaaggactacgtggactctgtgaagggcagattcaccatcagccgggacaacgccaagaagtccctgtacctccagatgaacagcctgagagccgaggacaccgccgtgtactattgtgcctctggcgtgtacagcttcgactacagaggccagggcaccctggtcacagtctcttctggtaccggcggaggcggatctggcggcggaggtagcggtggcggaggatctgaattcagctacgagctgacacagcctccatccgtgtctggcacacctggacagagagtggctatctcctgtagcggcagcagcagcaacatcggcaccagaatggtcacctggtatcagcacgtgccaggcacagcccctaagctgctgatcttcaacaacaaccagcggcctagcggcgtgcccgatagattttctgccagcaagagcggcacaagcgccagcctggctatcatcggactccagtctgacgacgaggccgactactactgtgccacctgggacgacaacgtgaagtcctacgtgttcggcaccggcaccaaagtgacagtgcttggaagtagactcgaggacctgaagaacgtgttcccacctgaggtggccgtgttcgagcctagcgaggccgagatcagccacacccagaaagccaccctcgtgtgcctggctaccggcttctaccccgaccatgtggaactgtcttggtgggtcaacggcaaagaggtgcacagcggcgtgtgtaccgacccccagccactgaaagaacagcccgccctgaacgacagccggtactgcctgagcagcagactgagagtgtccgccaccttctggcagaacccccggaaccacttcagatgccaggtgcagttctacggcctgagcgagaacgacgagtggacccaggacagagccaagcccgtgacccagatcgtgtctgccgaagcctggggcagagccgatgatgtgattaagatccactggcaggaaaagaagtccaacaccatcctgggcagccaggaaggcaacaccatgaagaccaacgacacctacatgaagttcagctggctgaccgtgcccgagaagtccctggacaaagaacacagatgcatcgtgcggcacgaaaacaacaagaacggcgtggaccaggaaatcatcttcccacccatcaagaccgatgtgattacaatggaccccaaggacaactgctccaaggacgccaacgataccctgctgctccagctgaccaacaccagcgcctactacatgtacttgttgctgctgctgaagtccgtggtgtacttcgccatcatcacatgctgcctgctgcggagaaccgccttctgctgcaacggcgagaagtctagggccaagcgatctggatctggagcaacaaacttctcactactcaaacaagcaggtgacgtggaggagaatcccgggcctactagtatggactggatttggcgcatccttttccttgtcggcgctgctaccggcgcgcattccttcgaacttgaaatggcccaggttcagctccagcagtggggagctggactgctgaagcctagcgagacactgagcctgacctgtgctgtgtacggcggcagcttcagcggctactactggtcctggatcagacagcctcctggcaaaggactggaatggatcggcgagatcaaccacagcggctccaccaactacaaccccagcctgaagtccagagtgaccatcagcgtggacaccagcaagaaccagttctccctgaagctgagcagcgtgacagccgctgataccgccgtgtactattgcgctagagcccctcagtcttggtacgtgggagatgtgtggggccagggcacactggttacagtgtcatctacgcgtatccagaaccctgatcctgccgtgtaccagctgcgggatagcaagagcagcgacaagagcgtgtgtctgttcaccgacttcgacagccagaccaacgtgtcccagagcaaggactccgacgtgtacatcaccgataagtgcgtgctggacatgcggagcatggacttcaagagcaactccgccgtggcctggtccaacaagtccgatttcgcctgcgccaacgccttcaacaacagcattatccccgaggacacattcttcccaagccccgagagcagcgactccaccgaccacgtgaagcccaaagagacagagaacaccaagcagcccagcaagagctgccacaagcccaaggccatcgtgcacaccgagaaagtgaacatgatgagcctgaccgtgctgggcctgcggatgctgttcgccaaaaccgtggccgtgaacttcctgctgaccgccaagctgttcttcctc

SEQ ID NO: 7502 - DNA, 2586 bp, synthetic construct
  source 1..2586: mol_type = other DNA
atggccttaccagtgaccgccttgctcctgccgctggccttgctgctccacgccgccaggccggaagtgcagctggttgaatctggcggaggactggttcagcctggcggatctctgagactgtcttgtgccgccagcggcttcagcttcagcgacttttggatgagctgggtccgacaggcccctggcaaaggacttgaatgggtcgccacaatcagccaggccggcagcgagaaggactacgtggactctgtgaagggcagattcaccatcagccgggacaacgccaagaagtccctgtacctccagatgaacagcctgagagccgaggacaccgccgtgtactattgtgcctctggcgtgtacagcttcgactacagaggccagggcaccctggtcacagtctcttctggtaccggcggaggcggatctggcggcggaggtagcggtggcggaggatctgaattccagtctgtgctgacacagcctcctagcctgtctgtggcccctggaaagacagccagcatcacatgcggcggcaacaacatcggcatgaagtccgtgcactggtatcagcagaggccaggacaggctcctgtgctggtcatctactacgacagcgacagaccctctggcatccccggcagattttccggcagcaactctggcaataccgccacactgaccatctccagagtggaagctggcgacgaggccgactactactgccaagtgtgggataccaccggcgatcaccctggctatgtgtttggcaccggcaccaaagtgacagtgcttctcgaggacctgaagaacgtgttcccacctgaggtggccgtgttcgagcctagcgaggccgagatcagccacacccagaaagccaccctcgtgtgcctggctaccggcttctaccccgaccatgtggaactgtcttggtgggtcaacggcaaagaggtgcacagcggcgtgtgtaccgacccccagccactgaaagaacagcccgccctgaacgacagccggtactgcctgagcagcagactgagagtgtccgccaccttctggcagaacccccggaaccacttcagatgccaggtgcagttctacggcctgagcgagaacgacgagtggacccaggacagagccaagcccgtgacccagatcgtgtctgccgaagcctggggcagagccgatgatgtgattaagatccactggcaggaaaagaagtccaacaccatcctgggcagccaggaaggcaacaccatgaagaccaacgacacctacatgaagttcagctggctgaccgtgcccgagaagtccctggacaaagaacacagatgcatcgtgcggcacgaaaacaacaagaacggcgtggaccaggaaatcatcttcccacccatcaagaccgatgtgattacaatggaccccaaggacaactgctccaaggacgccaacgataccctgctgctccagctgaccaacaccagcgcctactacatgtacttgttgctgctgctgaagtccgtggtgtacttcgccatcatcacatgctgcctgctgcggagaaccgccttctgctgcaacggcgagaagtctagggccaagcgatctggatctggagcaacaaacttctcactactcaaacaagcaggtgacgtggaggagaatcccgggcctactagtatggactggatttggcgcatccttttccttgtcggcgctgctaccggcgcgcattccttcgaacaagttcaactggttcagagcggagccgaagtgaagaaacctggcagcagcgtgaaggtgtcctgcaaagcaagcggcggcacctttagcagctacgccatctcttgggtccgacaggcacctggacaaggactggaatggatgggcggcatcatccccatcttcggcacagccaattacgcccagaaattccagggcagagtgaccatcaccgccgacgagtctacaagcaccgcctacatggaactgagcagcctgagaagcgaggacaccgccgtgtactattgtgccagaggcgtgtacggctacagcggctctgccccttatgatgagtggggccagggaaccctggtcaccgtttcttctacgcgtatccagaaccctgatcctgccgtgtaccagctgcgggatagcaagagcagcgacaagagcgtgtgtctgttcaccgacttcgacagccagaccaacgtgtcccagagcaaggactccgacgtgtacatcaccgataagtgcgtgctggacatgcggagcatggacttcaagagcaactccgccgtggcctggtccaacaagtccgatttcgcctgcgccaacgccttcaacaacagcattatccccgaggacacattcttcccaagccccgagagcagcgactccaccgaccacgtgaagcccaaagagacagagaacaccaagcagcccagcaagagctgccacaagcccaaggccatcgtgcacaccgagaaagtgaacatgatgagcctgaccgtgctgggcctgcggatgctgttcgccaaaaccgtggccgtgaacttcctgctgaccgccaagctgttcttcctc

SEQ ID NO: 7503 - DNA, 2580 bp, synthetic construct
  source 1..2580: mol_type = other DNA
atggccttaccagtgaccgccttgctcctgccgctggccttgctgctccacgccgccaggccggaagtgcagctggttgaatctggcggaggactggttcagcctggcggatctctgagactgtcttgtgccgccagcggcttcagcttcagcgacttttggatgagctgggtccgacaggcccctggcaaaggacttgaatgggtcgccacaatcagccaggccggcagcgagaaggactacgtggactctgtgaagggcagattcaccatcagccgggacaacgccaagaagtccctgtacctccagatgaacagcctgagagccgaggacaccgccgtgtactattgtgcctctggcgtgtacagcttcgactacagaggccagggcaccctggtcacagtctcttctggtaccggcggaggcggatctggcggcggaggtagcggtggcggaggatctgaattcgaggtgcaactggttgagtctggcggaggactggtgcagcctggaagaagcctgagactgtcttgtgccgccagcggcttcaccttcgacgattatgccatgcactgggtccgacaggcccctggcaaaggacttgaatgggtgtccggcatctcctggaacagcggctctatcggctacgccgattccgtgaagggcagattcaccatcagccgggacaacgccaagaacagcctgtacctccagatgaactccctgagagccgaggacacagccctgtactactgcgccaaagacaaaggcggaggctactacgacttttggagcggcagcgattattggggccagggcacactggtcacagtgtctagcctcgaggacctgaagaacgtgttcccacctgaggtggccgtgttcgagcctagcgaggccgagatcagccacacccagaaagccaccctcgtgtgcctggctaccggcttctaccccgaccatgtggaactgtcttggtgggtcaacggcaaagaggtgcacagcggcgtgtgtaccgacccccagccactgaaagaacagcccgccctgaacgacagccggtactgcctgagcagcagactgagagtgtccgccaccttctggcagaacccccggaaccacttcagatgccaggtgcagttctacggcctgagcgagaacgacgagtggacccaggacagagccaagcccgtgacccagatcgtgtctgccgaagcctggggcagagccgatgatgtgattaagatccactggcaggaaaagaagtccaacaccatcctgggcagccaggaaggcaacaccatgaagaccaacgacacctacatgaagttcagctggctgaccgtgcccgagaagtccctggacaaagaacacagatgcatcgtgcggcacgaaaacaacaagaacggcgtggaccaggaaatcatcttcccacccatcaagaccgatgtgattacaatggaccccaaggacaactgctccaaggacgccaacgataccctgctgctccagctgaccaacaccagcgcctactacatgtacttgttgctgctgctgaagtccgtggtgtacttcgccatcatcacatgctgcctgctgcggagaaccgccttctgctgcaacggcgagaagtctagggccaagcgatctggatctggagcaacaaacttctcactactcaaacaagcaggtgacgtggaggagaatcccgggcctactagtatggactggatttggcgcatccttttccttgtcggcgctgctaccggcgcgcattccttcgaatcttctgagctgacacaggaccctgccgtgtctgttgctctgggccagacagtgcggattacctgtcagggcgatagcctgagaagctactacgcctcctggtatcagcagaagccaggccaggctcctgtgctggtcatctacggcaagaacaacagacccagcggcatccccgatagattcagcggaagcagctctggcaataccgccagcctgacaattactggcgctcaggccgaggacgaggccgactactactgcaacagcagagatagcagcggctgggttttcggcggaggcacaaaactgacagtgctgacgcgtatccagaaccctgatcctgccgtgtaccagctgcgggatagcaagagcagcgacaagagcgtgtgtctgttcaccgacttcgacagccagaccaacgtgtcccagagcaaggactccgacgtgtacatcaccgataagtgcgtgctggacatgcggagcatggacttcaagagcaactccgccgtggcctggtccaacaagtccgatttcgcctgcgccaacgccttcaacaacagcattatccccgaggacacattcttcccaagccccgagagcagcgactccaccgaccacgtgaagcccaaagagacagagaacaccaagcagcccagcaagagctgccacaagcccaaggccatcgtgcacaccgagaaagtgaacatgatgagcctgaccgtgctgggcctgcggatgctgttcgccaaaaccgtggccgtgaacttcctgctgaccgccaagctgttcttcctc

SEQ ID NO: 7504 - DNA, 2607 bp, synthetic construct
  source 1..2607: mol_type = other DNA
atggccttaccagtgaccgccttgctcctgccgctggccttgctgctccacgccgccaggccggaagtgcagctggttgaatctggcggaggactggttcagcctggcggatctctgagactgtcttgtgccgccagcggcttcagcttcagcgacttttggatgagctgggtccgacaggcccctggcaaaggacttgaatgggtcgccacaatcagccaggccggcagcgagaaggactacgtggactctgtgaagggcagattcaccatcagccgggacaacgccaagaagtccctgtacctccagatgaacagcctgagagccgaggacaccgccgtgtactattgtgcctctggcgtgtacagcttcgactacagaggccagggcaccctggtcacagtctcttctggtaccggcggaggcggatctggcggcggaggtagcggtggcggaggatctgaattcgaagtgcagctccagcagtctggacctggcctggttaagcctagccagacactgagcctgacctgtgccatcagcggcgatagcgtgctgagcaacagcgacacctggaactggatcagacagagccctagcagaggactggaatggctgggcagaacctaccacagaagcacttggtacgacgactacgccagctctgtgcggggcagagtgtccatcaatgtggacaccagcaagaaccagtacagcctgcaactgaacgccgtgacacctgaggataccggcgtgtactactgcgccagagacagactccaggacggcaactcttggagcgacgcctttgatgtgtggggccagggcacaatggtcaccgtttctagcctcgaggacctgaagaacgtgttcccacctgaggtggccgtgttcgagcctagcgaggccgagatcagccacacccagaaagccaccctcgtgtgcctggctaccggcttctaccccgaccatgtggaactgtcttggtgggtcaacggcaaagaggtgcacagcggcgtgtgtaccgacccccagccactgaaagaacagcccgccctgaacgacagccggtactgcctgagcagcagactgagagtgtccgccaccttctggcagaacccccggaaccacttcagatgccaggtgcagttctacggcctgagcgagaacgacgagtggacccaggacagagccaagcccgtgacccagatcgtgtctgccgaagcctggggcagagccgatgatgtgattaagatccactggcaggaaaagaagtccaacaccatcctgggcagccaggaaggcaacaccatgaagaccaacgacacctacatgaagttcagctggctgaccgtgcccgagaagtccctggacaaagaacacagatgcatcgtgcggcacgaaaacaacaagaacggcgtggaccaggaaatcatcttcccacccatcaagaccgatgtgattacaatggaccccaaggacaactgctccaaggacgccaacgataccctgctgctccagctgaccaacaccagcgcctactacatgtacttgttgctgctgctgaagtccgtggtgtacttcgccatcatcacatgctgcctgctgcggagaaccgccttctgctgcaacggcgagaagtctagggccaagcgatctggatctggagcaacaaacttctcactactcaaacaagcaggtgacgtggaggagaatcccgggcctactagtatggactggatttggcgcatccttttccttgtcggcgctgctaccggcgcgcattccttcgaacaatctgctctgacacagcctgccagcgtgtcaggatctcctggacagagcatcaccatctcttgcaccggcaccagctctgatgtcggcggctacaattacgtgtcctggtatcagcagcaccccggcaaggcccctaagctgatgatctacgacgtgtccaacagacccagcggcgtgtccaatagattctccggcagcaagagcggcaacaccgccagcctgacaatttctggactgcaagccgaggacgaggccgactactactgtagcagctacaccagcagcagcacactggtgtacgtgttcggcacaggcaccaaagtgaccgtgcttacgcgtatccagaaccctgatcctgccgtgtaccagctgcgggatagcaagagcagcgacaagagcgtgtgtctgttcaccgacttcgacagccagaccaacgtgtcccagagcaaggactccgacgtgtacatcaccgataagtgcgtgctggacatgcggagcatggacttcaagagcaactccgccgtggcctggtccaacaagtccgatttcgcctgcgccaacgccttcaacaacagcattatccccgaggacacattcttcccaagccccgagagcagcgactccaccgaccacgtgaagcccaaagagacagagaacaccaagcagcccagcaagagctgccacaagcccaaggccatcgtgcacaccgagaaagtgaacatgatgagcctgaccgtgctgggcctgcggatgctgttcgccaaaaccgtggccgtgaacttcctgctgaccgccaagctgttcttcctc

SEQ ID NO: 7505 - DNA, 2541 bp, synthetic construct
  source 1..2541: mol_type = other DNA
atggccttaccagtgaccgccttgctcctgccgctggccttgctgctccacgccgccaggccggaagtgcagctggttgaatctggcggaggactggttcagcctggcggatctctgagactgtcttgtgccgccagcggcttcagcttcagcgacttttggatgagctgggtccgacaggcccctggcaaaggacttgaatgggtcgccacaatcagccaggccggcagcgagaaggactacgtggactctgtgaagggcagattcaccatcagccgggacaacgccaagaagtccctgtacctccagatgaacagcctgagagccgaggacaccgccgtgtactattgtgcctctggcgtgtacagcttcgactacagaggccagggcaccctggtcacagtctcttctggtaccggcggaggcggatctggcggcggaggtagcggtggcggaggatctgaattccaggtgcaactggttcagtctggggccgaagtgaagaaacctggggcctctgtgaaggtgtcctgcaaggcttccggctacacctttaccagctacgacatcaactgggtccgacaggccacaggccaaggactggaatggatgggctggatgaaccccaacagcggcaataccggctacgcccagaaattccagggcagagtgaccatgaccagaaacaccagcatcagcaccgcctacatggaactgagcagcctgagaagcgaggacaccgccgtgtactattgcgccagaggcgacagcaccaaggtggaaatcaaactcgaggacctgaagaacgtgttcccacctgaggtggccgtgttcgagcctagcgaggccgagatcagccacacccagaaagccaccctcgtgtgcctggctaccggcttctaccccgaccatgtggaactgtcttggtgggtcaacggcaaagaggtgcacagcggcgtgtgtaccgacccccagccactgaaagaacagcccgccctgaacgacagccggtactgcctgagcagcagactgagagtgtccgccaccttctggcagaacccccggaaccacttcagatgccaggtgcagttctacggcctgagcgagaacgacgagtggacccaggacagagccaagcccgtgacccagatcgtgtctgccgaagcctggggcagagccgatgatgtgattaagatccactggcaggaaaagaagtccaacaccatcctgggcagccaggaaggcaacaccatgaagaccaacgacacctacatgaagttcagctggctgaccgtgcccgagaagtccctggacaaagaacacagatgcatcgtgcggcacgaaaacaacaagaacggcgtggaccaggaaatcatcttcccacccatcaagaccgatgtgattacaatggaccccaaggacaactgctccaaggacgccaacgataccctgctgctccagctgaccaacaccagcgcctactacatgtacttgttgctgctgctgaagtccgtggtgtacttcgccatcatcacatgctgcctgctgcggagaaccgccttctgctgcaacggcgagaagtctagggccaagcgatctggatctggagcaacaaacttctcactactcaaacaagcaggtgacgtggaggagaatcccgggcctactagtatggactggatttggcgcatccttttccttgtcggcgctgctaccggcgcgcattccttcgaacaatctgtgctgacccagcctagatccgtgtctggctctcctggacagagcgtgaccatctcttgtaccggcaccagctctgatgtcggcggctacaattacgtgtcctggtatcagcagcaccccggcgaagcccctaagctgattatctacgacgccgacaagcggcccagcggcatcagcaatagattcagctctggcaagagcggcaacaccgccagcctgacaatcagcggactccaggtggaagatgaggccgactactactgctgctcctatgccggcggaagcacctgggttttcggaggcggtacaaaagtgaccgtgctgacgcgtatccagaaccctgatcctgccgtgtaccagctgcgggatagcaagagcagcgacaagagcgtgtgtctgttcaccgacttcgacagccagaccaacgtgtcccagagcaaggactccgacgtgtacatcaccgataagtgcgtgctggacatgcggagcatggacttcaagagcaactccgccgtggcctggtccaacaagtccgatttcgcctgcgccaacgccttcaacaacagcattatccccgaggacacattcttcccaagccccgagagcagcgactccaccgaccacgtgaagcccaaagagacagagaacaccaagcagcccagcaagagctgccacaagcccaaggccatcgtgcacaccgagaaagtgaacatgatgagcctgaccgtgctgggcctgcggatgctgttcgccaaaaccgtggccgtgaacttcctgctgaccgccaagctgttcttcctc

SEQ ID NO: 7506 - DNA, 2607 bp, synthetic construct
  source 1..2607: mol_type = other DNA
atggccttaccagtgaccgccttgctcctgccgctggccttgctgctccacgccgccaggccggaagtgcagctggttgaatctggcggaggactggttcagcctggcggatctctgagactgtcttgtgccgccagcggcttcagcttcagcgacttttggatgagctgggtccgacaggcccctggcaaaggacttgaatgggtcgccacaatcagccaggccggcagcgagaaggactacgtggactctgtgaagggcagattcaccatcagccgggacaacgccaagaagtccctgtacctccagatgaacagcctgagagccgaggacaccgccgtgtactattgtgcctctggcgtgtacagcttcgactacagaggccagggcaccctggtcacagtctcttctggtaccggcggaggcggatctggcggcggaggtagcggtggcggaggatctgaattcgaagtgcagctccagcagtctggacctggcctggttaagcctagccagacactgagcctgacctgtgccatcagcggcgatagcgtgtcctctaatagcgccgcctggaactggatcagacagagccctagcagaggactggaatggctgggcagaacctactaccgcagcaagtggtacagcgactacgccgtgtccgtgaagtcccggatcaccatcaatcccgacaccagcaagaaccagttcagcctgcaactgaacagcgtgacccctgaggataccgccgtgtactactgcgccagagatccctacgacttttggagcggctaccccgacgcctttgacatctggggacagggcacaatggtcaccgtttctagcctcgaggacctgaagaacgtgttcccacctgaggtggccgtgttcgagcctagcgaggccgagatcagccacacccagaaagccaccctcgtgtgcctggctaccggcttctaccccgaccatgtggaactgtcttggtgggtcaacggcaaagaggtgcacagcggcgtgtgtaccgacccccagccactgaaagaacagcccgccctgaacgacagccggtactgcctgagcagcagactgagagtgtccgccaccttctggcagaacccccggaaccacttcagatgccaggtgcagttctacggcctgagcgagaacgacgagtggacccaggacagagccaagcccgtgacccagatcgtgtctgccgaagcctggggcagagccgatgatgtgattaagatccactggcaggaaaagaagtccaacaccatcctgggcagccaggaaggcaacaccatgaagaccaacgacacctacatgaagttcagctggctgaccgtgcccgagaagtccctggacaaagaacacagatgcatcgtgcggcacgaaaacaacaagaacggcgtggaccaggaaatcatcttcccacccatcaagaccgatgtgattacaatggaccccaaggacaactgctccaaggacgccaacgataccctgctgctccagctgaccaacaccagcgcctactacatgtacttgttgctgctgctgaagtccgtggtgtacttcgccatcatcacatgctgcctgctgcggagaaccgccttctgctgcaacggcgagaagtctagggccaagcgatctggatctggagcaacaaacttctcactactcaaacaagcaggtgacgtggaggagaatcccgggcctactagtatggactggatttggcgcatccttttccttgtcggcgctgctaccggcgcgcattccttcgaacaatctgctctgacacagcctgccagcgtgtcaggatctcctggacagagcatcaccatctcttgcaccggcaccagctctgatgtcggcggctacaattacgtgtcctggtatcagcagcaccccggcaaggcccctaaagtgattatcagcgaagtgaacaacagacccagcggcgtgtcccacagattcagcggctctaagtctggcaacaccgccagcctgacaatctctggactgcaagccgaggacgaggccgactacttctgtagcagctacaccagcggcagaaccctgtacgtgttcggcacaggcagcaaagtgacagtgctgggaacgcgtatccagaaccctgatcctgccgtgtaccagctgcgggatagcaagagcagcgacaagagcgtgtgtctgttcaccgacttcgacagccagaccaacgtgtcccagagcaaggactccgacgtgtacatcaccgataagtgcgtgctggacatgcggagcatggacttcaagagcaactccgccgtggcctggtccaacaagtccgatttcgcctgcgccaacgccttcaacaacagcattatccccgaggacacattcttcccaagccccgagagcagcgactccaccgaccacgtgaagcccaaagagacagagaacaccaagcagcccagcaagagctgccacaagcccaaggccatcgtgcacaccgagaaagtgaacatgatgagcctgaccgtgctgggcctgcggatgctgttcgccaaaaccgtggccgtgaacttcctgctgaccgccaagctgttcttcctc

SEQ ID NO: 7507 - DNA, 2604 bp, synthetic construct
  source 1..2604: mol_type = other DNA
atggccttaccagtgaccgccttgctcctgccgctggccttgctgctccacgccgccaggccggaagtgcagctggttgaatctggcggaggactggttcagcctggcggatctctgagactgtcttgtgccgccagcggcttcagcttcagcgacttttggatgagctgggtccgacaggcccctggcaaaggacttgaatgggtcgccacaatcagccaggccggcagcgagaaggactacgtggactctgtgaagggcagattcaccatcagccgggacaacgccaagaagtccctgtacctccagatgaacagcctgagagccgaggacaccgccgtgtactattgtgcctctggcgtgtacagcttcgactacagaggccagggcaccctggtcacagtctcttctggtaccggcggaggcggatctggcggcggaggtagcggtggcggaggatctgaattccaatctgctctgacacagcctgccagcgcctctggatctcctggacagagcgtgaccatctcctgtaccggcacctcttctgatgtcggcggctacaactacgtgtcctggtatcagcagcaccccggcaaggcccctaagctgatgatctacgacgtgtccaacagacccagcggcgtgtccaatagattctccggcagcaagagcggcaacaccgccagcctgacaatttctggactgcaagccgaggacgaggccgactactactgtagcagctacaccagcagcagcacactgtacgtgttcggcacaggcacccagctcacagttcttctcgaggacctgaagaacgtgttcccacctgaggtggccgtgttcgagcctagcgaggccgagatcagccacacccagaaagccaccctcgtgtgcctggctaccggcttctaccccgaccatgtggaactgtcttggtgggtcaacggcaaagaggtgcacagcggcgtgtgtaccgacccccagccactgaaagaacagcccgccctgaacgacagccggtactgcctgagcagcagactgagagtgtccgccaccttctggcagaacccccggaaccacttcagatgccaggtgcagttctacggcctgagcgagaacgacgagtggacccaggacagagccaagcccgtgacccagatcgtgtctgccgaagcctggggcagagccgatgatgtgattaagatccactggcaggaaaagaagtccaacaccatcctgggcagccaggaaggcaacaccatgaagaccaacgacacctacatgaagttcagctggctgaccgtgcccgagaagtccctggacaaagaacacagatgcatcgtgcggcacgaaaacaacaagaacggcgtggaccaggaaatcatcttcccacccatcaagaccgatgtgattacaatggaccccaaggacaactgctccaaggacgccaacgataccctgctgctccagctgaccaacaccagcgcctactacatgtacttgttgctgctgctgaagtccgtggtgtacttcgccatcatcacatgctgcctgctgcggagaaccgccttctgctgcaacggcgagaagtctagggccaagcgatctggatctggagcaacaaacttctcactactcaaacaagcaggtgacgtggaggagaatcccgggcctactagtatggactggatttggcgcatccttttccttgtcggcgctgctaccggcgcgcattccttcgaagaagtgcagctccagcagtctggacctggcctggttaagcctagccagacactgagcctgacctgtgccatcagcggcgattccatgctgagcaacagcgacacctggaactggatcagacagagccccagcagaggcctggaatggctgggcagaacataccacagaagcacttggtacgacgactacgccagctctgtgcggggcagagtgtccatcaatgtggacaccagcaagaaccagtacagcctgcaactgaacgccgtgacacctgaggataccggcgtgtactactgtgccagagtgcggctccaggacggcaattcttggagcgacgcctttgatgtgtggggccagggcacaatggtcaccgtttctagcacgcgtatccagaaccctgatcctgccgtgtaccagctgcgggatagcaagagcagcgacaagagcgtgtgtctgttcaccgacttcgacagccagaccaacgtgtcccagagcaaggactccgacgtgtacatcaccgataagtgcgtgctggacatgcggagcatggacttcaagagcaactccgccgtggcctggtccaacaagtccgatttcgcctgcgccaacgccttcaacaacagcattatccccgaggacacattcttcccaagccccgagagcagcgactccaccgaccacgtgaagcccaaagagacagagaacaccaagcagcccagcaagagctgccacaagcccaaggccatcgtgcacaccgagaaagtgaacatgatgagcctgaccgtgctgggcctgcggatgctgttcgccaaaaccgtggccgtgaacttcctgctgaccgccaagctgttcttcctc

SEQ ID NO: 7508 - DNA, 2604 bp, synthetic construct
  source 1..2604: mol_type = other DNA
atggccttaccagtgaccgccttgctcctgccgctggccttgctgctccacgccgccaggccggaagtgcagctggttgaatctggcggaggactggttcagcctggcggatctctgagactgtcttgtgccgccagcggcttcagcttcagcgacttttggatgagctgggtccgacaggcccctggcaaaggacttgaatgggtcgccacaatcagccaggccggcagcgagaaggactacgtggactctgtgaagggcagattcaccatcagccgggacaacgccaagaagtccctgtacctccagatgaacagcctgagagccgaggacaccgccgtgtactattgtgcctctggcgtgtacagcttcgactacagaggccagggcaccctggtcacagtctcttctggtaccggcggaggcggatctggcggcggaggtagcggtggcggaggatctgaattcgacgtgatgctgacccagacaccactgagcctgcctgtgtctctgggcgatcaggccagcatctcctgtagaagcagccagagcatcctgcacagcaccggcgatacctacctggaatggtatctccagaagcctggacagagccccaagctgctgattaacaaggtgtccaaccggctgagcggcgtgcccgatagattttctggcagcggctctggcaccgacttcaccctgaagatcagcagagtggaagccgaggacctgggcgtgtactactgcttccaaggcagccatgttccttggacctttggcggaggcaccaagctggaaatcaagagagctgacgccgctcctaccgtgtccatctttcctctcgaggacctgaagaacgtgttcccacctgaggtggccgtgttcgagcctagcgaggccgagatcagccacacccagaaagccaccctcgtgtgcctggctaccggcttctaccccgaccatgtggaactgtcttggtgggtcaacggcaaagaggtgcacagcggcgtgtgtaccgacccccagccactgaaagaacagcccgccctgaacgacagccggtactgcctgagcagcagactgagagtgtccgccaccttctggcagaacccccggaaccacttcagatgccaggtgcagttctacggcctgagcgagaacgacgagtggacccaggacagagccaagcccgtgacccagatcgtgtctgccgaagcctggggcagagccgatgatgtgattaagatccactggcaggaaaagaagtccaacaccatcctgggcagccaggaaggcaacaccatgaagaccaacgacacctacatgaagttcagctggctgaccgtgcccgagaagtccctggacaaagaacacagatgcatcgtgcggcacgaaaacaacaagaacggcgtggaccaggaaatcatcttcccacccatcaagaccgatgtgattacaatggaccccaaggacaactgctccaaggacgccaacgataccctgctgctccagctgaccaacaccagcgcctactacatgtacttgttgctgctgctgaagtccgtggtgtacttcgccatcatcacatgctgcctgctgcggagaaccgccttctgctgcaacggcgagaagtctagggccaagcgatctggatctggagcaacaaacttctcactactcaaacaagcaggtgacgtggaggagaatcccgggcctactagtatggactggatttggcgcatccttttccttgtcggcgctgctaccggcgcgcattccttcgaacaagtgaagctccagcagagcggccctagccttgtgaaacctggcgcttccgtgaagatgagctgcaaggccagcggctacaccttcaccgatttctacatgaaatgggtcaagcagagccacggcaagtctctggaatggatcggcgacatcaaccccaacatcggagacaccttctacaaccagaagttcaagggcaaagccacactgaccgtggacaagagcagcagcaccgcctacatgcagctcaacagcctgaccagcgaggacagcgccgtgtacttttgttccgtgggctacttcgacgtgtggggagccggaacaaccgtgacagtctcttctacgcgtatccagaaccctgatcctgccgtgtaccagctgcgggatagcaagagcagcgacaagagcgtgtgtctgttcaccgacttcgacagccagaccaacgtgtcccagagcaaggactccgacgtgtacatcaccgataagtgcgtgctggacatgcggagcatggacttcaagagcaactccgccgtggcctggtccaacaagtccgatttcgcctgcgccaacgccttcaacaacagcattatccccgaggacacattcttcccaagccccgagagcagcgactccaccgaccacgtgaagcccaaagagacagagaacaccaagcagcccagcaagagctgccacaagcccaaggccatcgtgcacaccgagaaagtgaacatgatgagcctgaccgtgctgggcctgcggatgctgttcgccaaaaccgtggccgtgaacttcctgctgaccgccaagctgttcttcctc

SEQ ID NO: 7509 - DNA, 2592 bp, synthetic construct
  source 1..2592: mol_type = other DNA
atggccttaccagtgaccgccttgctcctgccgctggccttgctgctccacgccgccaggccggaagtgcagctggttgaatctggcggaggactggttcagcctggcggatctctgagactgtcttgtgccgccagcggcttcagcttcagcgacttttggatgagctgggtccgacaggcccctggcaaaggacttgaatgggtcgccacaatcagccaggccggcagcgagaaggactacgtggactctgtgaagggcagattcaccatcagccgggacaacgccaagaagtccctgtacctccagatgaacagcctgagagccgaggacaccgccgtgtactattgtgcctctggcgtgtacagcttcgactacagaggccagggcaccctggtcacagtctcttctggtaccggcggaggcggatctggcggcggaggtagcggtggcggaggatctgaattcgagatcgtgctgacacagtctcccgccacactgtcactgtctccaggcgaaagagccacactgagctgtagagccagccagagcgtgtccatctacctggcctggtatcagcagaagcctggacaggctccccggctgctgatctacgatgccagcaatagagccacaggcatccccgccagattttctggctctggcagcggcaccgatttcaccctgaccataagcagcctggaacctgaggacttcgccgtgtactactgccagcagagaagcaactggcctcctttcacattcggccctggcaccaaggtggacatcaaactcgaggacctgaagaacgtgttcccacctgaggtggccgtgttcgagcctagcgaggccgagatcagccacacccagaaagccaccctcgtgtgcctggctaccggcttctaccccgaccatgtggaactgtcttggtgggtcaacggcaaagaggtgcacagcggcgtgtgtaccgacccccagccactgaaagaacagcccgccctgaacgacagccggtactgcctgagcagcagactgagagtgtccgccaccttctggcagaacccccggaaccacttcagatgccaggtgcagttctacggcctgagcgagaacgacgagtggacccaggacagagccaagcccgtgacccagatcgtgtctgccgaagcctggggcagagccgatgatgtgattaagatccactggcaggaaaagaagtccaacaccatcctgggcagccaggaaggcaacaccatgaagaccaacgacacctacatgaagttcagctggctgaccgtgcccgagaagtccctggacaaagaacacagatgcatcgtgcggcacgaaaacaacaagaacggcgtggaccaggaaatcatcttcccacccatcaagaccgatgtgattacaatggaccccaaggacaactgctccaaggacgccaacgataccctgctgctccagctgaccaacaccagcgcctactacatgtacttgttgctgctgctgaagtccgtggtgtacttcgccatcatcacatgctgcctgctgcggagaaccgccttctgctgcaacggcgagaagtctagggccaagcgatctggatctggagcaacaaacttctcactactcaaacaagcaggtgacgtggaggagaatcccgggcctactagtatggactggatttggcgcatccttttccttgtcggcgctgctaccggcgcgcattccttcgaacaggtgcagcttgttgaaagcggaggcggagttgtgcagcctggcagaagtctgagactgtcttgtgccgccagcggcttcaccttcagcagctatggaatgcactgggtccgacaggcccctggcaaaggacttgaatgggttgccgtgatctgggacgacggcagcaacaagtattacgtggacagcgtgaagggcagattcaccatcagccgggacaacagcaagaacaccctgtacctccagatgaacagcctgagagccgaggacacagccgtgtattattgcgccagagatgactactacggcagcggctccttcaacagctactatggcacagacgtgtggggccagggcacaacagttaccgttagctctacgcgtatccagaaccctgatcctgccgtgtaccagctgcgggatagcaagagcagcgacaagagcgtgtgtctgttcaccgacttcgacagccagaccaacgtgtcccagagcaaggactccgacgtgtacatcaccgataagtgcgtgctggacatgcggagcatggacttcaagagcaactccgccgtggcctggtccaacaagtccgatttcgcctgcgccaacgccttcaacaacagcattatccccgaggacacattcttcccaagccccgagagcagcgactccaccgaccacgtgaagcccaaagagacagagaacaccaagcagcccagcaagagctgccacaagcccaaggccatcgtgcacaccgagaaagtgaacatgatgagcctgaccgtgctgggcctgcggatgctgttcgccaaaaccgtggccgtgaacttcctgctgaccgccaagctgttcttcctc

SEQ ID NO: 7510 - DNA, 2547 bp, synthetic construct
  source 1..2547: mol_type = other DNA
atggccttaccagtgaccgccttgctcctgccgctggccttgctgctccacgccgccaggccggaagtgcagctggttgaatctggcggaggactggttcagcctggcggatctctgagactgtcttgtgccgccagcggcttcagcttcagcgacttttggatgagctgggtccgacaggcccctggcaaaggacttgaatgggtcgccacaatcagccaggccggcagcgagaaggactacgtggactctgtgaagggcagattcaccatcagccgggacaacgccaagaagtccctgtacctccagatgaacagcctgagagccgaggacaccgccgtgtactattgtgcctctggcgtgtacagcttcgactacagaggccagggcaccctggtcacagtctcttctggtaccggcggaggcggatctggcggcggaggtagcggtggcggaggatctgaattcgacatccagatgacacagagccctagcagcctgtctgccagcgtgggagacagagtgaccatcacctgtagagccagccagggcatctcttcttggctggcctggtatcagcagaagcccgagaaggcccctaagagcctgatctatgccgccagctctctccagagcggagtgcctagcagattttctggcagcggctccggcaccgatttcaccctgacaatatccagcctccagcctgaggacttcgccacctactactgccagcagtacaacagctacccctacaccttcggccagggcaccaagctggaaatcaaactcgaggacctgaagaacgtgttcccacctgaggtggccgtgttcgagcctagcgaggccgagatcagccacacccagaaagccaccctcgtgtgcctggctaccggcttctaccccgaccatgtggaactgtcttggtgggtcaacggcaaagaggtgcacagcggcgtgtgtaccgacccccagccactgaaagaacagcccgccctgaacgacagccggtactgcctgagcagcagactgagagtgtccgccaccttctggcagaacccccggaaccacttcagatgccaggtgcagttctacggcctgagcgagaacgacgagtggacccaggacagagccaagcccgtgacccagatcgtgtctgccgaagcctggggcagagccgatgatgtgattaagatccactggcaggaaaagaagtccaacaccatcctgggcagccaggaaggcaacaccatgaagaccaacgacacctacatgaagttcagctggctgaccgtgcccgagaagtccctggacaaagaacacagatgcatcgtgcggcacgaaaacaacaagaacggcgtggaccaggaaatcatcttcccacccatcaagaccgatgtgattacaatggaccccaaggacaactgctccaaggacgccaacgataccctgctgctccagctgaccaacaccagcgcctactacatgtacttgttgctgctgctgaagtccgtggtgtacttcgccatcatcacatgctgcctgctgcggagaaccgccttctgctgcaacggcgagaagtctagggccaagcgatctggatctggagcaacaaacttctcactactcaaacaagcaggtgacgtggaggagaatcccgggcctactagtatggactggatttggcgcatccttttccttgtcggcgctgctaccggcgcgcattccttcgaagaagtgcaactggttcaatctggcggcggactggttcatccaggcggttctctgagactgagctgtgccggctctggcttcaccttcagcacctacctgatgtactgggtccgacaggcccctggcaagacactggaatgggtgtccgctattggcagcggaggcgatacctactacgccgactctgtgaagggcagattcaccatcagccgggacaacgccaagaacagcctgtacctccagatgaactccctgagagccgaggacatggccgtgtactactgtgccagaggactcggctattggggccagggaacactggtcacagtgtcctctacgcgtatccagaaccctgatcctgccgtgtaccagctgcgggatagcaagagcagcgacaagagcgtgtgtctgttcaccgacttcgacagccagaccaacgtgtcccagagcaaggactccgacgtgtacatcaccgataagtgcgtgctggacatgcggagcatggacttcaagagcaactccgccgtggcctggtccaacaagtccgatttcgcctgcgccaacgccttcaacaacagcattatccccgaggacacattcttcccaagccccgagagcagcgactccaccgaccacgtgaagcccaaagagacagagaacaccaagcagcccagcaagagctgccacaagcccaaggccatcgtgcacaccgagaaagtgaacatgatgagcctgaccgtgctgggcctgcggatgctgttcgccaaaaccgtggccgtgaacttcctgctgaccgccaagctgttcttcctc

SEQ ID NO: 7511 - DNA, 2604 bp, synthetic construct
  source 1..2604: mol_type = other DNA
atggccttaccagtgaccgccttgctcctgccgctggccttgctgctccacgccgccaggccggaagtgcagctggttgaatctggcggaggactggttcagcctggcggatctctgagactgtcttgtgccgccagcggcttcagcttcagcgacttttggatgagctgggtccgacaggcccctggcaaaggacttgaatgggtcgccacaatcagccaggccggcagcgagaaggactacgtggactctgtgaagggcagattcaccatcagccgggacaacgccaagaagtccctgtacctccagatgaacagcctgagagccgaggacaccgccgtgtactattgtgcctctggcgtgtacagcttcgactacagaggccagggcaccctggtcacagtctcttctggtaccggcggaggcggatctggcggcggaggtagcggtggcggaggatctgaattcctgcctgttctgacacagcctccatccgtgtctgtggcccctggaaagaccgccagaatcacatgcggcggcaacaacatcggcagcaagagcgtgcactggtatcagcagaagcctggacaggctcctgtgctggtggtgtacgacgacagcgatagacctagcggcatccccgagagattcagcggcagcaattccggcaataccgccacactgaccatcagcagagtggaagctggcgacgaggccgactactactgccaagtgtgggacagcagcagcgactacgtggtgtttggcggcggaacaaagctgacagtgcttctcgaggacctgaagaacgtgttcccacctgaggtggccgtgttcgagcctagcgaggccgagatcagccacacccagaaagccaccctcgtgtgcctggctaccggcttctaccccgaccatgtggaactgtcttggtgggtcaacggcaaagaggtgcacagcggcgtgtgtaccgacccccagccactgaaagaacagcccgccctgaacgacagccggtactgcctgagcagcagactgagagtgtccgccaccttctggcagaacccccggaaccacttcagatgccaggtgcagttctacggcctgagcgagaacgacgagtggacccaggacagagccaagcccgtgacccagatcgtgtctgccgaagcctggggcagagccgatgatgtgattaagatccactggcaggaaaagaagtccaacaccatcctgggcagccaggaaggcaacaccatgaagaccaacgacacctacatgaagttcagctggctgaccgtgcccgagaagtccctggacaaagaacacagatgcatcgtgcggcacgaaaacaacaagaacggcgtggaccaggaaatcatcttcccacccatcaagaccgatgtgattacaatggaccccaaggacaactgctccaaggacgccaacgataccctgctgctccagctgaccaacaccagcgcctactacatgtacttgttgctgctgctgaagtccgtggtgtacttcgccatcatcacatgctgcctgctgcggagaaccgccttctgctgcaacggcgagaagtctagggccaagcgatctggatctggagcaacaaacttctcactactcaaacaagcaggtgacgtggaggagaatcccgggcctactagtatggactggatttggcgcatccttttccttgtcggcgctgctaccggcgcgcattccttcgaagaagttcaactggtgcagagcggagccgaagtgaagaagccaggcgagagcctgaagattagctgcaaaggcagcggctacagcttcaccagctactggatcggctgggtccgacagatgcctggcaaaggactggaatggatgggcatcatctaccccggcgacagcgacaccagatacagccctagctttcagggccaagtgaccatctccgccgacaagagcatcagcacagcctacctccagtggtcctctctgaaggccagcgataccgccatgtactactgcgccagacaagtctggggatggcaaggcggcatgtaccccaggtctaactggtggtacaacctggactcttggggccagggcacactggtcacagtctcttctacgcgtatccagaaccctgatcctgccgtgtaccagctgcgggatagcaagagcagcgacaagagcgtgtgtctgttcaccgacttcgacagccagaccaacgtgtcccagagcaaggactccgacgtgtacatcaccgataagtgcgtgctggacatgcggagcatggacttcaagagcaactccgccgtggcctggtccaacaagtccgatttcgcctgcgccaacgccttcaacaacagcattatccccgaggacacattcttcccaagccccgagagcagcgactccaccgaccacgtgaagcccaaagagacagagaacaccaagcagcccagcaagagctgccacaagcccaaggccatcgtgcacaccgagaaagtgaacatgatgagcctgaccgtgctgggcctgcggatgctgttcgccaaaaccgtggccgtgaacttcctgctgaccgccaagctgttcttcctc

SEQ ID NO: 7512 - DNA, 2583 bp, synthetic construct
  source 1..2583: mol_type = other DNA
atggccttaccagtgaccgccttgctcctgccgctggccttgctgctccacgccgccaggccggaagtgcagctggttgaatctggcggaggactggttcagcctggcggatctctgagactgtcttgtgccgccagcggcttcagcttcagcgacttttggatgagctgggtccgacaggcccctggcaaaggacttgaatgggtcgccacaatcagccaggccggcagcgagaaggactacgtggactctgtgaagggcagattcaccatcagccgggacaacgccaagaagtccctgtacctccagatgaacagcctgagagccgaggacaccgccgtgtactattgtgcctctggcgtgtacagcttcgactacagaggccagggcaccctggtcacagtctcttctggtaccggcggaggcggatctggcggcggaggtagcggtggcggaggatctgaattcgagctggtcatgacacagagccctgcttctctggccgtgtcactgggacagagagccaccatctcttgcagagccagcgagagcgtggacagctacggcaagagcttcatgcactggtatcagctcaagcccggccagcctcctaagctgctgatctacagagcctccaacctggaaagcggcgtgccagccagattttctggcagcggcagcagaaccgacttcaccctgaccattgatcccgtggaagccgatgatgccgccacctactactgccagcagaacaacgaggacccctggacatttggcggaggcaccaagctggaaatcaaactcgaggacctgaagaacgtgttcccacctgaggtggccgtgttcgagcctagcgaggccgagatcagccacacccagaaagccaccctcgtgtgcctggctaccggcttctaccccgaccatgtggaactgtcttggtgggtcaacggcaaagaggtgcacagcggcgtgtgtaccgacccccagccactgaaagaacagcccgccctgaacgacagccggtactgcctgagcagcagactgagagtgtccgccaccttctggcagaacccccggaaccacttcagatgccaggtgcagttctacggcctgagcgagaacgacgagtggacccaggacagagccaagcccgtgacccagatcgtgtctgccgaagcctggggcagagccgatgatgtgattaagatccactggcaggaaaagaagtccaacaccatcctgggcagccaggaaggcaacaccatgaagaccaacgacacctacatgaagttcagctggctgaccgtgcccgagaagtccctggacaaagaacacagatgcatcgtgcggcacgaaaacaacaagaacggcgtggaccaggaaatcatcttcccacccatcaagaccgatgtgattacaatggaccccaaggacaactgctccaaggacgccaacgataccctgctgctccagctgaccaacaccagcgcctactacatgtacttgttgctgctgctgaagtccgtggtgtacttcgccatcatcacatgctgcctgctgcggagaaccgccttctgctgcaacggcgagaagtctagggccaagcgatctggatctggagcaacaaacttctcactactcaaacaagcaggtgacgtggaggagaatcccgggcctactagtatggactggatttggcgcatccttttccttgtcggcgctgctaccggcgcgcattccttcgaagaagtgcagctcgaacagtctggccccgagcttgtgaaacctggcgcttccgtgaagatgagctgcaaggccagcggctacaccttcaccaactactacatgaaatgggtcaagcagagccacggcaagtccctggaatggatcggcgatctgaaccccaacaacggcgacaccttctacaaccagaagttcaagggcaaagccacactgaccgtggacaagagcagcaacaccgcctacatgcagctcaactccctgaccagcgaggacagcgccgtgtactactgtgccagaaccggcagatacgaagagaacgctatggactactggggccagggcacaagcgtgacagtctcttctacgcgtatccagaaccctgatcctgccgtgtaccagctgcgggatagcaagagcagcgacaagagcgtgtgtctgttcaccgacttcgacagccagaccaacgtgtcccagagcaaggactccgacgtgtacatcaccgataagtgcgtgctggacatgcggagcatggacttcaagagcaactccgccgtggcctggtccaacaagtccgatttcgcctgcgccaacgccttcaacaacagcattatccccgaggacacattcttcccaagccccgagagcagcgactccaccgaccacgtgaagcccaaagagacagagaacaccaagcagcccagcaagagctgccacaagcccaaggccatcgtgcacaccgagaaagtgaacatgatgagcctgaccgtgctgggcctgcggatgctgttcgccaaaaccgtggccgtgaacttcctgctgaccgccaagctgttcttcctc

SEQ ID NO: 7513 - DNA, 2565 bp, synthetic construct
  source 1..2565: mol_type = other DNA
atggccttaccagtgaccgccttgctcctgccgctggccttgctgctccacgccgccaggccggaagtgcagctggttgaatctggcggaggactggttcagcctggcggatctctgagactgtcttgtgccgccagcggcttcagcttcagcgacttttggatgagctgggtccgacaggcccctggcaaaggacttgaatgggtcgccacaatcagccaggccggcagcgagaaggactacgtggactctgtgaagggcagattcaccatcagccgggacaacgccaagaagtccctgtacctccagatgaacagcctgagagccgaggacaccgccgtgtactattgtgcctctggcgtgtacagcttcgactacagaggccagggcaccctggtcacagtctcttctggtaccggcggaggcggatctggcggcggaggtagcggtggcggaggatctgaattcgacgtggtcatgacacagagcccttctagcctgtctgccagcgtgggcgacagagtgaccatcacctgtatggcctccgaggacatctacatccggctggcctggtatcagcagaagcctggaaacgcccctaagctgctgatctacgccgccacctctctggaaacaggcgtgccaagcagattttccggcagcggctctggcaccgatttcaccctgacaatatccagcctccagcctgaggacttcgccacctactactgccagcagtattggagcagcccctggacatttggcggaggcaccaaggtggaaatcaaactcgaggacctgaagaacgtgttcccacctgaggtggccgtgttcgagcctagcgaggccgagatcagccacacccagaaagccaccctcgtgtgcctggctaccggcttctaccccgaccatgtggaactgtcttggtgggtcaacggcaaagaggtgcacagcggcgtgtgtaccgacccccagccactgaaagaacagcccgccctgaacgacagccggtactgcctgagcagcagactgagagtgtccgccaccttctggcagaacccccggaaccacttcagatgccaggtgcagttctacggcctgagcgagaacgacgagtggacccaggacagagccaagcccgtgacccagatcgtgtctgccgaagcctggggcagagccgatgatgtgattaagatccactggcaggaaaagaagtccaacaccatcctgggcagccaggaaggcaacaccatgaagaccaacgacacctacatgaagttcagctggctgaccgtgcccgagaagtccctggacaaagaacacagatgcatcgtgcggcacgaaaacaacaagaacggcgtggaccaggaaatcatcttcccacccatcaagaccgatgtgattacaatggaccccaaggacaactgctccaaggacgccaacgataccctgctgctccagctgaccaacaccagcgcctactacatgtacttgttgctgctgctgaagtccgtggtgtacttcgccatcatcacatgctgcctgctgcggagaaccgccttctgctgcaacggcgagaagtctagggccaagcgatctggatctggagcaacaaacttctcactactcaaacaagcaggtgacgtggaggagaatcccgggcctactagtatggactggatttggcgcatccttttccttgtcggcgctgctaccggcgcgcattccttcgaacaggttcagctgcaagagtctggccccggactggtcaagcctagccaaacactgagcctgacctgtaccgtgtccggctacagcatcaccagcgactacacctggaactggatcagacagcctcctggcaacggactggaatggatcggctacatcacctacagcggcagcaccagctacaaccccagcctgaaaagccgggtgctgatctccgtggacaccagcaagaatcaggtgtccctgaagctgagcagcgtgacagccgctgataccgccgtgtactactgtgccagactggggagaagatacacaatggactactggggccagggcaccaccgtgacagtttcttctacgcgtatccagaaccctgatcctgccgtgtaccagctgcgggatagcaagagcagcgacaagagcgtgtgtctgttcaccgacttcgacagccagaccaacgtgtcccagagcaaggactccgacgtgtacatcaccgataagtgcgtgctggacatgcggagcatggacttcaagagcaactccgccgtggcctggtccaacaagtccgatttcgcctgcgccaacgccttcaacaacagcattatccccgaggacacattcttcccaagccccgagagcagcgactccaccgaccacgtgaagcccaaagagacagagaacaccaagcagcccagcaagagctgccacaagcccaaggccatcgtgcacaccgagaaagtgaacatgatgagcctgaccgtgctgggcctgcggatgctgttcgccaaaaccgtggccgtgaacttcctgctgaccgccaagctgttcttcctc

SEQ ID NO: 7514 - DNA, 2577 bp, synthetic construct
  source 1..2577: mol_type = other DNA
atggccttaccagtgaccgccttgctcctgccgctggccttgctgctccacgccgccaggccggaagtgcagctggttgaatctggcggaggactggttcagcctggcggatctctgagactgtcttgtgccgccagcggcttcagcttcagcgacttttggatgagctgggtccgacaggcccctggcaaaggacttgaatgggtcgccacaatcagccaggccggcagcgagaaggactacgtggactctgtgaagggcagattcaccatcagccgggacaacgccaagaagtccctgtacctccagatgaacagcctgagagccgaggacaccgccgtgtactattgtgcctctggcgtgtacagcttcgactacagaggccagggcaccctggtcacagtctcttctggtaccggcggaggcggatctggcggcggaggtagcggtggcggaggatctgaattcgatattgtgctgactcagagccctgccactctgagccttagtccaggcgacagagctaccatctcctgtagggcctctgaatccgtgaccattctgggctctcatctcatatattggtatcaacaaaagccgggccagcctccacggctgctcattcaactggcctctaacgtgcagaccggcgtgccagctagattttctggctctggctcccggaccgactttacactgacaatcagctccgtggaacccgaagattttgccgtctattattgcctccagtccaggaccattcctcggacattcggccagggaacaaaactcgaaatcaagcggctcgaggacctgaagaacgtgttcccacctgaggtggccgtgttcgagcctagcgaggccgagatcagccacacccagaaagccaccctcgtgtgcctggctaccggcttctaccccgaccatgtggaactgtcttggtgggtcaacggcaaagaggtgcacagcggcgtgtgtaccgacccccagccactgaaagaacagcccgccctgaacgacagccggtactgcctgagcagcagactgagagtgtccgccaccttctggcagaacccccggaaccacttcagatgccaggtgcagttctacggcctgagcgagaacgacgagtggacccaggacagagccaagcccgtgacccagatcgtgtctgccgaagcctggggcagagccgatgatgtgattaagatccactggcaggaaaagaagtccaacaccatcctgggcagccaggaaggcaacaccatgaagaccaacgacacctacatgaagttcagctggctgaccgtgcccgagaagtccctggacaaagaacacagatgcatcgtgcggcacgaaaacaacaagaacggcgtggaccaggaaatcatcttcccacccatcaagaccgatgtgattacaatggaccccaaggacaactgctccaaggacgccaacgataccctgctgctccagctgaccaacaccagcgcctactacatgtacttgttgctgctgctgaagtccgtggtgtacttcgccatcatcacatgctgcctgctgcggagaaccgccttctgctgcaacggcgagaagtctagggccaagcgatctggatctggagcaacaaacttctcactactcaaacaagcaggtgacgtggaggagaatcccgggcctactagtatggactggatttggcgcatccttttccttgtcggcgctgctaccggcgcgcattccttcgaacaggtgcagctcgttcagagtggccccgaagtgaaaaagccaggcgagtccgtgaagatttcctgcaaagcctccggctacacattccggcactactctatgaattgggtcaagcaggccccaggccagggccttaagtggatgggacgcatcaataccgagtccggcgtgccaatctacgccgatgacttcaaaggccggttcagcttcaccgtggatacctctgcctccaccgcctacctggaaatcagcagcctgaccagcgaggatacagctgtgtacttctgtagcaacgattacctctacagcctggatttctggggacagggaaccacactgaccgtgtctagcacgcgtatccagaaccctgatcctgccgtgtaccagctgcgggatagcaagagcagcgacaagagcgtgtgtctgttcaccgacttcgacagccagaccaacgtgtcccagagcaaggactccgacgtgtacatcaccgataagtgcgtgctggacatgcggagcatggacttcaagagcaactccgccgtggcctggtccaacaagtccgatttcgcctgcgccaacgccttcaacaacagcattatccccgaggacacattcttcccaagccccgagagcagcgactccaccgaccacgtgaagcccaaagagacagagaacaccaagcagcccagcaagagctgccacaagcccaaggccatcgtgcacaccgagaaagtgaacatgatgagcctgaccgtgctgggcctgcggatgctgttcgccaaaaccgtggccgtgaacttcctgctgaccgccaagctgttcttcctc

SEQ ID NO: 7515 - DNA, 2577 bp, synthetic construct
  source 1..2577: mol_type = other DNA
atggccttaccagtgaccgccttgctcctgccgctggccttgctgctccacgccgccaggccggaagtgcagctggttgaatctggcggaggactggttcagcctggcggatctctgagactgtcttgtgccgccagcggcttcagcttcagcgacttttggatgagctgggtccgacaggcccctggcaaaggacttgaatgggtcgccacaatcagccaggccggcagcgagaaggactacgtggactctgtgaagggcagattcaccatcagccgggacaacgccaagaagtccctgtacctccagatgaacagcctgagagccgaggacaccgccgtgtactattgtgcctctggcgtgtacagcttcgactacagaggccagggcaccctggtcacagtctcttctggtaccggcggaggcggatctggcggcggaggtagcggtggcggaggatctgaattcgacatcgtgctgacacagtctcccgccacactgtcactgagccctggcgatagagccacactgagctgtagagccagcgagagcgtgacaatcctgggcagccacctgatctactggtatcagcagaagcccggacaggcccctagactgctgattcagctcgccagcaatgtgcagacaggcatccctgccagattttccggcagcggcagcagaaccgatttcaccctgaccataagcagcctggaacctgaggacttcgccgtgtactactgcctccagagccggacaatccccagaacctttggacagggcaccaagctggaaatcaagagactcgaggacctgaagaacgtgttcccacctgaggtggccgtgttcgagcctagcgaggccgagatcagccacacccagaaagccaccctcgtgtgcctggctaccggcttctaccccgaccatgtggaactgtcttggtgggtcaacggcaaagaggtgcacagcggcgtgtgtaccgacccccagccactgaaagaacagcccgccctgaacgacagccggtactgcctgagcagcagactgagagtgtccgccaccttctggcagaacccccggaaccacttcagatgccaggtgcagttctacggcctgagcgagaacgacgagtggacccaggacagagccaagcccgtgacccagatcgtgtctgccgaagcctggggcagagccgatgatgtgattaagatccactggcaggaaaagaagtccaacaccatcctgggcagccaggaaggcaacaccatgaagaccaacgacacctacatgaagttcagctggctgaccgtgcccgagaagtccctggacaaagaacacagatgcatcgtgcggcacgaaaacaacaagaacggcgtggaccaggaaatcatcttcccacccatcaagaccgatgtgattacaatggaccccaaggacaactgctccaaggacgccaacgataccctgctgctccagctgaccaacaccagcgcctactacatgtacttgttgctgctgctgaagtccgtggtgtacttcgccatcatcacatgctgcctgctgcggagaaccgccttctgctgcaacggcgagaagtctagggccaagcgatctggatctggagcaacaaacttctcactactcaaacaagcaggtgacgtggaggagaatcccgggcctactagtatggactggatttggcgcatccttttccttgtcggcgctgctaccggcgcgcattccttcgaacaggttcagctggtgcagtctggcagcgagctgaagaaacctggcgagagcgtgaagatcagctgcaaggccagcggctacaccttcacacactacagcatgaactgggtccgacaggcccctggacaaggactggaatggatgggcagaatcaacaccgagacaggcgagcccctgtacgccgacgatttcaagggcagattcgtgttcagcctggacaccagcgccagcacagcctatctccagatcagctctctgaaggccgaggacaccgccgtgtactactgctccaacgactacctgtactccctggactattggggccagggcacactggtcacagtgtctagtacgcgtatccagaaccctgatcctgccgtgtaccagctgcgggatagcaagagcagcgacaagagcgtgtgtctgttcaccgacttcgacagccagaccaacgtgtcccagagcaaggactccgacgtgtacatcaccgataagtgcgtgctggacatgcggagcatggacttcaagagcaactccgccgtggcctggtccaacaagtccgatttcgcctgcgccaacgccttcaacaacagcattatccccgaggacacattcttcccaagccccgagagcagcgactccaccgaccacgtgaagcccaaagagacagagaacaccaagcagcccagcaagagctgccacaagcccaaggccatcgtgcacaccgagaaagtgaacatgatgagcctgaccgtgctgggcctgcggatgctgttcgccaaaaccgtggccgtgaacttcctgctgaccgccaagctgttcttcctc

SEQ ID NO: 7516 - DNA, 2580 bp, synthetic construct
  source 1..2580: mol_type = other DNA
atggccttaccagtgaccgccttgctcctgccgctggccttgctgctccacgccgccaggccggaagtgcagctggttgaatctggcggaggactggttcagcctggcggatctctgagactgtcttgtgccgccagcggcttcagcttcagcgacttttggatgagctgggtccgacaggcccctggcaaaggacttgaatgggtcgccacaatcagccaggccggcagcgagaaggactacgtggactctgtgaagggcagattcaccatcagccgggacaacgccaagaagtccctgtacctccagatgaacagcctgagagccgaggacaccgccgtgtactattgtgcctctggcgtgtacagcttcgactacagaggccagggcaccctggtcacagtctcttctggtaccggcggaggcggatctggcggcggaggtagcggtggcggaggatctgaattcgacatccagctgactcagagccctagctttctgagcgccagcgtgggcgacagagtgaccattacatgtagagccagccagggcatcagcaccgacctgaactggtatcagcagaagcctggcaaggcccctaagctgctgatctacgccgccagcaatctggaaagcggcgtgccaagcagattttccggctctggcagcggcaccgagttcaccctgacaatatctagcctccagcctgaggacttcgccacctactactgccagcagagctacaactggccctacacctttggcggaggcaccaaggtggaaatcaagagactcgaggacctgaagaacgtgttcccacctgaggtggccgtgttcgagcctagcgaggccgagatcagccacacccagaaagccaccctcgtgtgcctggctaccggcttctaccccgaccatgtggaactgtcttggtgggtcaacggcaaagaggtgcacagcggcgtgtgtaccgacccccagccactgaaagaacagcccgccctgaacgacagccggtactgcctgagcagcagactgagagtgtccgccaccttctggcagaacccccggaaccacttcagatgccaggtgcagttctacggcctgagcgagaacgacgagtggacccaggacagagccaagcccgtgacccagatcgtgtctgccgaagcctggggcagagccgatgatgtgattaagatccactggcaggaaaagaagtccaacaccatcctgggcagccaggaaggcaacaccatgaagaccaacgacacctacatgaagttcagctggctgaccgtgcccgagaagtccctggacaaagaacacagatgcatcgtgcggcacgaaaacaacaagaacggcgtggaccaggaaatcatcttcccacccatcaagaccgatgtgattacaatggaccccaaggacaactgctccaaggacgccaacgataccctgctgctccagctgaccaacaccagcgcctactacatgtacttgttgctgctgctgaagtccgtggtgtacttcgccatcatcacatgctgcctgctgcggagaaccgccttctgctgcaacggcgagaagtctagggccaagcgatctggatctggagcaacaaacttctcactactcaaacaagcaggtgacgtggaggagaatcccgggcctactagtatggactggatttggcgcatccttttccttgtcggcgctgctaccggcgcgcattccttcgaagaagttcagctggttgaatcaggcggaggactcgtgaaacctggcggctctctgagactgtcttgtgccgccagcggcttcaccttcagcaacttcgagatgaactgggtccgacaggccccaggcaaaggactggaatgggtgtccggcatcagctccaatggccggtacatcaactacgccgacagcgtgaagggcagattcaccatcagccgggacaacgccaagaacagcctgtacctccagatgaactccctgagagccgaggacaccgccgtgtactattgtgccagagtggtggacttcgaccaggactacaacggcttcgactattggggccagggcaccctggttaccgttagctctacgcgtatccagaaccctgatcctgccgtgtaccagctgcgggatagcaagagcagcgacaagagcgtgtgtctgttcaccgacttcgacagccagaccaacgtgtcccagagcaaggactccgacgtgtacatcaccgataagtgcgtgctggacatgcggagcatggacttcaagagcaactccgccgtggcctggtccaacaagtccgatttcgcctgcgccaacgccttcaacaacagcattatccccgaggacacattcttcccaagccccgagagcagcgactccaccgaccacgtgaagcccaaagagacagagaacaccaagcagcccagcaagagctgccacaagcccaaggccatcgtgcacaccgagaaagtgaacatgatgagcctgaccgtgctgggcctgcggatgctgttcgccaaaaccgtggccgtgaacttcctgctgaccgccaagctgttcttcctc

SEQ ID NO: 7517 - DNA, 2574 bp, synthetic construct
  source 1..2574: mol_type = other DNA
atggccttaccagtgaccgccttgctcctgccgctggccttgctgctccacgccgccaggccggaagtgcagctggttgaatctggcggaggactggttcagcctggcggatctctgagactgtcttgtgccgccagcggcttcagcttcagcgacttttggatgagctgggtccgacaggcccctggcaaaggacttgaatgggtcgccacaatcagccaggccggcagcgagaaggactacgtggactctgtgaagggcagattcaccatcagccgggacaacgccaagaagtccctgtacctccagatgaacagcctgagagccgaggacaccgccgtgtactattgtgcctctggcgtgtacagcttcgactacagaggccagggcaccctggtcacagtctcttctggtaccggcggaggcggatctggcggcggaggtagcggtggcggaggatctgaattcgacatccaactgactcagagccccagctttctgagcgcctctgtgggcgacagagtgaccatcacatgtagtctcagcctgggcatcagcacatggcgggattggtttccgccgaggcttggcaggggccttgagccgctgacctacgccgccagcacactgcaaagcggagtgcctagcagattttccggcagcggctctggcaccgagttcaccctgacaatatccagcctccagcctgaggacttcgccacctactactgccagcagctcaacagctaccctctgacctttggcggaggcaccaaggtggaaatcaagagactcgaggacctgaagaacgtgttcccacctgaggtggccgtgttcgagcctagcgaggccgagatcagccacacccagaaagccaccctcgtgtgcctggctaccggcttctaccccgaccatgtggaactgtcttggtgggtcaacggcaaagaggtgcacagcggcgtgtgtaccgacccccagccactgaaagaacagcccgccctgaacgacagccggtactgcctgagcagcagactgagagtgtccgccaccttctggcagaacccccggaaccacttcagatgccaggtgcagttctacggcctgagcgagaacgacgagtggacccaggacagagccaagcccgtgacccagatcgtgtctgccgaagcctggggcagagccgatgatgtgattaagatccactggcaggaaaagaagtccaacaccatcctgggcagccaggaaggcaacaccatgaagaccaacgacacctacatgaagttcagctggctgaccgtgcccgagaagtccctggacaaagaacacagatgcatcgtgcggcacgaaaacaacaagaacggcgtggaccaggaaatcatcttcccacccatcaagaccgatgtgattacaatggaccccaaggacaactgctccaaggacgccaacgataccctgctgctccagctgaccaacaccagcgcctactacatgtacttgttgctgctgctgaagtccgtggtgtacttcgccatcatcacatgctgcctgctgcggagaaccgccttctgctgcaacggcgagaagtctagggccaagcgatctggatctggagcaacaaacttctcactactcaaacaagcaggtgacgtggaggagaatcccgggcctactagtatggactggatttggcgcatccttttccttgtcggcgctgctaccggcgcgcattccttcgaagaagttcaactggttgagtctggtggcggcctggttaagcctggcggatctctgagactgagctgtgccgccagcggcttcacctttagcacatacggcatgagctgggtccgacaggcccctggaaaaggacttgagtgggtcgcctacatcaacaacggctccggctacatctactacgccgacagcgtgaagggcagattcaccatcagccgggacaacgccaagaacagcctgtacctccagatgaactccctgagagccgaggacaccgccgtgtactattgtgccagaggacagtggtggagcggcggagactttgattattggggccagggcaccctggtcaccgtttcttctacgcgtatccagaaccctgatcctgccgtgtaccagctgcgggatagcaagagcagcgacaagagcgtgtgtctgttcaccgacttcgacagccagaccaacgtgtcccagagcaaggactccgacgtgtacatcaccgataagtgcgtgctggacatgcggagcatggacttcaagagcaactccgccgtggcctggtccaacaagtccgatttcgcctgcgccaacgccttcaacaacagcattatccccgaggacacattcttcccaagccccgagagcagcgactccaccgaccacgtgaagcccaaagagacagagaacaccaagcagcccagcaagagctgccacaagcccaaggccatcgtgcacaccgagaaagtgaacatgatgagcctgaccgtgctgggcctgcggatgctgttcgccaaaaccgtggccgtgaacttcctgctgaccgccaagctgttcttcctc

SEQ ID NO: 7518 - DNA, 2577 bp, synthetic construct
  source 1..2577: mol_type = other DNA
atggccttaccagtgaccgccttgctcctgccgctggccttgctgctccacgccgccaggccggaagtgcagctggttgaatctggcggaggactggttcagcctggcggatctctgagactgtcttgtgccgccagcggcttcagcttcagcgacttttggatgagctgggtccgacaggcccctggcaaaggacttgaatgggtcgccacaatcagccaggccggcagcgagaaggactacgtggactctgtgaagggcagattcaccatcagccgggacaacgccaagaagtccctgtacctccagatgaacagcctgagagccgaggacaccgccgtgtactattgtgcctctggcgtgtacagcttcgactacagaggccagggcaccctggtcacagtctcttctggtaccggcggaggcggatctggcggcggaggtagcggtggcggaggatctgaattcgagatcgtgctgacacagtctcccgccacactgtcactgtctccaggcgaaagagccacactgagctgtagcgccagcagcagcgtgtcctacatgtactggtatcagcagaagcccggacaggcccctagactgctgatctacagaaccagcaacctggcctctggcatccccgccagattttctggctctggcagcggcaccgatttcaccctgaccataagcagcctggaacctgaggacttcgccgtgtactactgccagcagtaccacagctaccccaccacctttggacagggcaccaaggtggaaatcaagcggacagttctcgaggacctgaagaacgtgttcccacctgaggtggccgtgttcgagcctagcgaggccgagatcagccacacccagaaagccaccctcgtgtgcctggctaccggcttctaccccgaccatgtggaactgtcttggtgggtcaacggcaaagaggtgcacagcggcgtgtgtaccgacccccagccactgaaagaacagcccgccctgaacgacagccggtactgcctgagcagcagactgagagtgtccgccaccttctggcagaacccccggaaccacttcagatgccaggtgcagttctacggcctgagcgagaacgacgagtggacccaggacagagccaagcccgtgacccagatcgtgtctgccgaagcctggggcagagccgatgatgtgattaagatccactggcaggaaaagaagtccaacaccatcctgggcagccaggaaggcaacaccatgaagaccaacgacacctacatgaagttcagctggctgaccgtgcccgagaagtccctggacaaagaacacagatgcatcgtgcggcacgaaaacaacaagaacggcgtggaccaggaaatcatcttcccacccatcaagaccgatgtgattacaatggaccccaaggacaactgctccaaggacgccaacgataccctgctgctccagctgaccaacaccagcgcctactacatgtacttgttgctgctgctgaagtccgtggtgtacttcgccatcatcacatgctgcctgctgcggagaaccgccttctgctgcaacggcgagaagtctagggccaagcgatctggatctggagcaacaaacttctcactactcaaacaagcaggtgacgtggaggagaatcccgggcctactagtatggactggatttggcgcatccttttccttgtcggcgctgctaccggcgcgcattccttcgaagaagtgcagctggttgaatcaggtggcggcctggttcaacctggcggatctctgagactgtcttgtgccgccagcggcttcagcttcaacacctacgccatgaactgggtccgacaggctcctggcaaaggactggaatgggtgtcccacatcagaagcaagagcaacaacttcgccacctactacgccgacagcgtgaaggacagattcaccatcagccgggacaacgccaagaacagcctgtacctccagatgaactccctgagagccgaggacaccgccgtgtattattgcgccagacaaggcggcgacttccctatggattattggggccagggcaccctggtcaccgtttcttctacgcgtatccagaaccctgatcctgccgtgtaccagctgcgggatagcaagagcagcgacaagagcgtgtgtctgttcaccgacttcgacagccagaccaacgtgtcccagagcaaggactccgacgtgtacatcaccgataagtgcgtgctggacatgcggagcatggacttcaagagcaactccgccgtggcctggtccaacaagtccgatttcgcctgcgccaacgccttcaacaacagcattatccccgaggacacattcttcccaagccccgagagcagcgactccaccgaccacgtgaagcccaaagagacagagaacaccaagcagcccagcaagagctgccacaagcccaaggccatcgtgcacaccgagaaagtgaacatgatgagcctgaccgtgctgggcctgcggatgctgttcgccaaaaccgtggccgtgaacttcctgctgaccgccaagctgttcttcctc

SEQ ID NO: 7519 - DNA, 2565 bp, synthetic construct
  source 1..2565: mol_type = other DNA
atggccttaccagtgaccgccttgctcctgccgctggccttgctgctccacgccgccaggccggaagtgcagctggttgaatctggcggaggactggttcagcctggcggatctctgagactgtcttgtgccgccagcggcttcagcttcagcgacttttggatgagctgggtccgacaggcccctggcaaaggacttgaatgggtcgccacaatcagccaggccggcagcgagaaggactacgtggactctgtgaagggcagattcaccatcagccgggacaacgccaagaagtccctgtacctccagatgaacagcctgagagccgaggacaccgccgtgtactattgtgcctctggcgtgtacagcttcgactacagaggccagggcaccctggtcacagtctcttctggtaccggcggaggcggatctggcggcggaggtagcggtggcggaggatctgaattcgacgtggtcatgacacagagcccttctagcctgtctgccagcgtgggcgacagagtgaccatcacctgtaaagccagcgaggacatctacatccggctggcctggtatcagcagaagcctggaaaggcccctaagctgctgatctacgccgccacctctctggaaacaggcgtgccaagcagattttccggcagcggctctggcaccgatttcaccctgacaatatccagcctccagcctgaggacttcgccacctactactgccagcagtattggaccacaccttggacctttggcggaggcaccaaggtggaaatcaaactcgaggacctgaagaacgtgttcccacctgaggtggccgtgttcgagcctagcgaggccgagatcagccacacccagaaagccaccctcgtgtgcctggctaccggcttctaccccgaccatgtggaactgtcttggtgggtcaacggcaaagaggtgcacagcggcgtgtgtaccgacccccagccactgaaagaacagcccgccctgaacgacagccggtactgcctgagcagcagactgagagtgtccgccaccttctggcagaacccccggaaccacttcagatgccaggtgcagttctacggcctgagcgagaacgacgagtggacccaggacagagccaagcccgtgacccagatcgtgtctgccgaagcctggggcagagccgatgatgtgattaagatccactggcaggaaaagaagtccaacaccatcctgggcagccaggaaggcaacaccatgaagaccaacgacacctacatgaagttcagctggctgaccgtgcccgagaagtccctggacaaagaacacagatgcatcgtgcggcacgaaaacaacaagaacggcgtggaccaggaaatcatcttcccacccatcaagaccgatgtgattacaatggaccccaaggacaactgctccaaggacgccaacgataccctgctgctccagctgaccaacaccagcgcctactacatgtacttgttgctgctgctgaagtccgtggtgtacttcgccatcatcacatgctgcctgctgcggagaaccgccttctgctgcaacggcgagaagtctagggccaagcgatctggatctggagcaacaaacttctcactactcaaacaagcaggtgacgtggaggagaatcccgggcctactagtatggactggatttggcgcatccttttccttgtcggcgctgctaccggcgcgcattccttcgaacaggtgcagctccaagagtctggccctggactggtcaagcctagccagacactgagcctgacctgtaccgtgtccggctacagcatcaccatcgactacacctggaactggatcagacagcctcctggcaaaggactggaatggatcggctacatcacctacagcggcagcaccgactacaaccccagcctgaaaagccgggtgctgatctccgtggacaccagcaagaatcaggtgtccctgaagctgagcagcgtgacagccgctgataccgccgtgtactactgtgccagactgggcagaagatacgccctggattattggggccagggcaccaccgtgacagtgtcatctacgcgtatccagaaccctgatcctgccgtgtaccagctgcgggatagcaagagcagcgacaagagcgtgtgtctgttcaccgacttcgacagccagaccaacgtgtcccagagcaaggactccgacgtgtacatcaccgataagtgcgtgctggacatgcggagcatggacttcaagagcaactccgccgtggcctggtccaacaagtccgatttcgcctgcgccaacgccttcaacaacagcattatccccgaggacacattcttcccaagccccgagagcagcgactccaccgaccacgtgaagcccaaagagacagagaacaccaagcagcccagcaagagctgccacaagcccaaggccatcgtgcacaccgagaaagtgaacatgatgagcctgaccgtgctgggcctgcggatgctgttcgccaaaaccgtggccgtgaacttcctgctgaccgccaagctgttcttcctc

SEQ ID NO: 7520 - DNA, 2580 bp, synthetic construct
  source 1..2580: mol_type = other DNA
atggccttaccagtgaccgccttgctcctgccgctggccttgctgctccacgccgccaggccggaagtgcagctggttgaatctggcggaggactggttcagcctggcggatctctgagactgtcttgtgccgccagcggcttcagcttcagcgacttttggatgagctgggtccgacaggcccctggcaaaggacttgaatgggtcgccacaatcagccaggccggcagcgagaaggactacgtggactctgtgaagggcagattcaccatcagccgggacaacgccaagaagtccctgtacctccagatgaacagcctgagagccgaggacaccgccgtgtactattgtgcctctggcgtgtacagcttcgactacagaggccagggcaccctggtcacagtctcttctggtaccggcggaggcggatctggcggcggaggtagcggtggcggaggatctgaattcgacatccagatgacccagaccacaagcagcctgtctgccagcctgggcgacagagtgaccatctcttgtagagccagccaggacatcagcaactacctgaactggtatcagcagaaacccgacggcaccgtgaagctgctgatctactacaccagcatcctgcacagcggcgtgcccagcagattttctggctctggcagcggcaccgactacagcctgaccatcagcaatctggaacaagaggacttcgctacctacttctgccagcaaggcaacaccctgccttggacatttggcggaggcaccaagctggaaatcaaagctctcgaggacctgaagaacgtgttcccacctgaggtggccgtgttcgagcctagcgaggccgagatcagccacacccagaaagccaccctcgtgtgcctggctaccggcttctaccccgaccatgtggaactgtcttggtgggtcaacggcaaagaggtgcacagcggcgtgtgtaccgacccccagccactgaaagaacagcccgccctgaacgacagccggtactgcctgagcagcagactgagagtgtccgccaccttctggcagaacccccggaaccacttcagatgccaggtgcagttctacggcctgagcgagaacgacgagtggacccaggacagagccaagcccgtgacccagatcgtgtctgccgaagcctggggcagagccgatgatgtgattaagatccactggcaggaaaagaagtccaacaccatcctgggcagccaggaaggcaacaccatgaagaccaacgacacctacatgaagttcagctggctgaccgtgcccgagaagtccctggacaaagaacacagatgcatcgtgcggcacgaaaacaacaagaacggcgtggaccaggaaatcatcttcccacccatcaagaccgatgtgattacaatggaccccaaggacaactgctccaaggacgccaacgataccctgctgctccagctgaccaacaccagcgcctactacatgtacttgttgctgctgctgaagtccgtggtgtacttcgccatcatcacatgctgcctgctgcggagaaccgccttctgctgcaacggcgagaagtctagggccaagcgatctggatctggagcaacaaacttctcactactcaaacaagcaggtgacgtggaggagaatcccgggcctactagtatggactggatttggcgcatccttttccttgtcggcgctgctaccggcgcgcattccttcgaagaagtgcaactggttgaatctggcggcggactggttaagcctggcggatctctgaagctgagctgtgccgcctctggcttcgccttcagcatctacgatatgagctgggtccgacagacccctgagaagagactggaatgggtcgcctacatctctagcggcggagggacctactatcccgacacagtgaagggcagattcaccatctccagagacaacgccaagaacaccctgtacctccagatgagcagcctgaagtccgaggacaccgccatgtactactgcgccagacacagcggctatggcacacattggggagtgctgtttgcctactggggccagggaacactggtcacagtttctgctacgcgtatccagaaccctgatcctgccgtgtaccagctgcgggatagcaagagcagcgacaagagcgtgtgtctgttcaccgacttcgacagccagaccaacgtgtcccagagcaaggactccgacgtgtacatcaccgataagtgcgtgctggacatgcggagcatggacttcaagagcaactccgccgtggcctggtccaacaagtccgatttcgcctgcgccaacgccttcaacaacagcattatccccgaggacacattcttcccaagccccgagagcagcgactccaccgaccacgtgaagcccaaagagacagagaacaccaagcagcccagcaagagctgccacaagcccaaggccatcgtgcacaccgagaaagtgaacatgatgagcctgaccgtgctgggcctgcggatgctgttcgccaaaaccgtggccgtgaacttcctgctgaccgccaagctgttcttcctc

SEQ ID NO: 7521 - DNA, 2610 bp, synthetic construct
  source 1..2610: mol_type = other DNA
atggccttaccagtgaccgccttgctcctgccgctggccttgctgctccacgccgccaggccggaagtgcagctggttgaatctggcggaggactggttcagcctggcggatctctgagactgtcttgtgccgccagcggcttcagcttcagcgacttttggatgagctgggtccgacaggcccctggcaaaggacttgaatgggtcgccacaatcagccaggccggcagcgagaaggactacgtggactctgtgaagggcagattcaccatcagccgggacaacgccaagaagtccctgtacctccagatgaacagcctgagagccgaggacaccgccgtgtactattgtgcctctggcgtgtacagcttcgactacagaggccagggcaccctggtcacagtctcttctggtaccggcggaggcggatctggcggcggaggtagcggtggcggaggatctgaattcgacatcgtgatgacacagagccctgatagcctggccgtgtctctgggagagagagccaccatcaactgcaagagcagccagagcctgctgtacagaagcaaccagaagaactacctggcctggtatcagcagaagcccggccagcctcctaagctgctgatctactgggccagcaccagagaaagcggcgtgcccgatagattttctggctctggcagcggcaccgacttcaccctgacaatttctagcctgcaagccgaggacgtggccgtgtactactgccagcagtattacaactaccccagaaccttcggccagggcaccaaggtggaaatcaagagaacagttctcgaggacctgaagaacgtgttcccacctgaggtggccgtgttcgagcctagcgaggccgagatcagccacacccagaaagccaccctcgtgtgcctggctaccggcttctaccccgaccatgtggaactgtcttggtgggtcaacggcaaagaggtgcacagcggcgtgtgtaccgacccccagccactgaaagaacagcccgccctgaacgacagccggtactgcctgagcagcagactgagagtgtccgccaccttctggcagaacccccggaaccacttcagatgccaggtgcagttctacggcctgagcgagaacgacgagtggacccaggacagagccaagcccgtgacccagatcgtgtctgccgaagcctggggcagagccgatgatgtgattaagatccactggcaggaaaagaagtccaacaccatcctgggcagccaggaaggcaacaccatgaagaccaacgacacctacatgaagttcagctggctgaccgtgcccgagaagtccctggacaaagaacacagatgcatcgtgcggcacgaaaacaacaagaacggcgtggaccaggaaatcatcttcccacccatcaagaccgatgtgattacaatggaccccaaggacaactgctccaaggacgccaacgataccctgctgctccagctgaccaacaccagcgcctactacatgtacttgttgctgctgctgaagtccgtggtgtacttcgccatcatcacatgctgcctgctgcggagaaccgccttctgctgcaacggcgagaagtctagggccaagcgatctggatctggagcaacaaacttctcactactcaaacaagcaggtgacgtggaggagaatcccgggcctactagtatggactggatttggcgcatccttttccttgtcggcgctgctaccggcgcgcattccttcgaagaagttcagctgcttgaatcaggcggcggactggttcaacctggcggatctctgagactgagctgtgccgccagcggctacagcatcacaagcgactatgcctggaactgggtccgacaggcccctggcaaaggactggaatgggtgtcctacatcagcaacagcggcagcaccagctacaaccccagcctgaagtcccggttcaccatcagcagagacaacagcaagaacaccctgtacctccagatgaacagcctgagagctgaggacaccgccgtgtattattgcgccaaagagcggaactacgactacgacgattactactacgctatggactactggggccagggaaccctggtcacagtctcttctacgcgtatccagaaccctgatcctgccgtgtaccagctgcgggatagcaagagcagcgacaagagcgtgtgtctgttcaccgacttcgacagccagaccaacgtgtcccagagcaaggactccgacgtgtacatcaccgataagtgcgtgctggacatgcggagcatggacttcaagagcaactccgccgtggcctggtccaacaagtccgatttcgcctgcgccaacgccttcaacaacagcattatccccgaggacacattcttcccaagccccgagagcagcgactccaccgaccacgtgaagcccaaagagacagagaacaccaagcagcccagcaagagctgccacaagcccaaggccatcgtgcacaccgagaaagtgaacatgatgagcctgaccgtgctgggcctgcggatgctgttcgccaaaaccgtggccgtgaacttcctgctgaccgccaagctgttcttcctc

SEQ ID NO: 7522 - DNA, 2589 bp, synthetic construct
  source 1..2589: mol_type = other DNA
atggccttaccagtgaccgccttgctcctgccgctggccttgctgctccacgccgccaggccggaagtgcagctggttgaatctggcggaggactggttcagcctggcggatctctgagactgtcttgtgccgccagcggcttcagcttcagcgacttttggatgagctgggtccgacaggcccctggcaaaggacttgaatgggtcgccacaatcagccaggccggcagcgagaaggactacgtggactctgtgaagggcagattcaccatcagccgggacaacgccaagaagtccctgtacctccagatgaacagcctgagagccgaggacaccgccgtgtactattgtgcctctggcgtgtacagcttcgactacagaggccagggcaccctggtcacagtctcttctggtaccggcggaggcggatctggcggcggaggtagcggtggcggaggatctgaattcgacgtggtcatgacacagagccctctgagcctgcctgtgacacttggacagcctgccagcatcagctgtagaagcagccagagcctgctgcacagcagcggcaatacctacctggaatggtatcagcagaggcccggacagagccccagacctctgatctacaagatcagcacccggttcagcggcgtgcccgatagattttctggctctggcagcggcaccgacttcaccctgaagattagcagagtggaagccgaggacgtgggcgtgtactactgcttccaaggcagccacgtgccatacacctttggcggcggaacaaaggtggaaatcaagagactcgaggacctgaagaacgtgttcccacctgaggtggccgtgttcgagcctagcgaggccgagatcagccacacccagaaagccaccctcgtgtgcctggctaccggcttctaccccgaccatgtggaactgtcttggtgggtcaacggcaaagaggtgcacagcggcgtgtgtaccgacccccagccactgaaagaacagcccgccctgaacgacagccggtactgcctgagcagcagactgagagtgtccgccaccttctggcagaacccccggaaccacttcagatgccaggtgcagttctacggcctgagcgagaacgacgagtggacccaggacagagccaagcccgtgacccagatcgtgtctgccgaagcctggggcagagccgatgatgtgattaagatccactggcaggaaaagaagtccaacaccatcctgggcagccaggaaggcaacaccatgaagaccaacgacacctacatgaagttcagctggctgaccgtgcccgagaagtccctggacaaagaacacagatgcatcgtgcggcacgaaaacaacaagaacggcgtggaccaggaaatcatcttcccacccatcaagaccgatgtgattacaatggaccccaaggacaactgctccaaggacgccaacgataccctgctgctccagctgaccaacaccagcgcctactacatgtacttgttgctgctgctgaagtccgtggtgtacttcgccatcatcacatgctgcctgctgcggagaaccgccttctgctgcaacggcgagaagtctagggccaagcgatctggatctggagcaacaaacttctcactactcaaacaagcaggtgacgtggaggagaatcccgggcctactagtatggactggatttggcgcatccttttccttgtcggcgctgctaccggcgcgcattccttcgaacaagttcagctggttcagagcggagccgaagtgaagaaacctggggcctctgtgaaggtgtcctgcaaagcctctggcctgaccatcgaggactactacatgcactgggtccgacaggcccctggacaaggacttgaatggatgggctggatcgaccccgagaacggcgatacagagtacggccctaagttccagggcagagtgaccatgaccagagacaccagcatcaacaccgcctacatggaactgagccggctgagatccgatgacaccgccgtgtactattgcgccgtgcacaatgcccactacggcacttggtttgcctattggggccagggcacactggtcaccgttagctctacgcgtatccagaaccctgatcctgccgtgtaccagctgcgggatagcaagagcagcgacaagagcgtgtgtctgttcaccgacttcgacagccagaccaacgtgtcccagagcaaggactccgacgtgtacatcaccgataagtgcgtgctggacatgcggagcatggacttcaagagcaactccgccgtggcctggtccaacaagtccgatttcgcctgcgccaacgccttcaacaacagcattatccccgaggacacattcttcccaagccccgagagcagcgactccaccgaccacgtgaagcccaaagagacagagaacaccaagcagcccagcaagagctgccacaagcccaaggccatcgtgcacaccgagaaagtgaacatgatgagcctgaccgtgctgggcctgcggatgctgttcgccaaaaccgtggccgtgaacttcctgctgaccgccaagctgttcttcctc

SEQ ID NO: 7523 - DNA, 2565 bp, synthetic construct
  source 1..2565: mol_type = other DNA
atggccttaccagtgaccgccttgctcctgccgctggccttgctgctccacgccgccaggccggaagtgcagctggttgaatctggcggaggactggttcagcctggcggatctctgagactgtcttgtgccgccagcggcttcagcttcagcgacttttggatgagctgggtccgacaggcccctggcaaaggacttgaatgggtcgccacaatcagccaggccggcagcgagaaggactacgtggactctgtgaagggcagattcaccatcagccgggacaacgccaagaagtccctgtacctccagatgaacagcctgagagccgaggacaccgccgtgtactattgtgcctctggcgtgtacagcttcgactacagaggccagggcaccctggtcacagtctcttctggtaccggcggaggcggatctggcggcggaggtagcggtggcggaggatctgaattcgacatccagatgacacagagccctagcagcctgtctgccagcgtgggagacagagtgaccatcacctgtagagccagcgagaacatctacagcaacctggcctggtatcagcagaagcctggcaaggcccctaagctgctgatctacgccgccaccaatctggctgatggcgtgccaagcagattttccggctctggcagcggcaccgatttcaccctgacaatatccagcctccagcctgaggacttcgccacctactactgccagcacttttggggcacccctacattcggccagggcaccaaggtggaaatcaagagaacagttctcgaggacctgaagaacgtgttcccacctgaggtggccgtgttcgagcctagcgaggccgagatcagccacacccagaaagccaccctcgtgtgcctggctaccggcttctaccccgaccatgtggaactgtcttggtgggtcaacggcaaagaggtgcacagcggcgtgtgtaccgacccccagccactgaaagaacagcccgccctgaacgacagccggtactgcctgagcagcagactgagagtgtccgccaccttctggcagaacccccggaaccacttcagatgccaggtgcagttctacggcctgagcgagaacgacgagtggacccaggacagagccaagcccgtgacccagatcgtgtctgccgaagcctggggcagagccgatgatgtgattaagatccactggcaggaaaagaagtccaacaccatcctgggcagccaggaaggcaacaccatgaagaccaacgacacctacatgaagttcagctggctgaccgtgcccgagaagtccctggacaaagaacacagatgcatcgtgcggcacgaaaacaacaagaacggcgtggaccaggaaatcatcttcccacccatcaagaccgatgtgattacaatggaccccaaggacaactgctccaaggacgccaacgataccctgctgctccagctgaccaacaccagcgcctactacatgtacttgttgctgctgctgaagtccgtggtgtacttcgccatcatcacatgctgcctgctgcggagaaccgccttctgctgcaacggcgagaagtctagggccaagcgatctggatctggagcaacaaacttctcactactcaaacaagcaggtgacgtggaggagaatcccgggcctactagtatggactggatttggcgcatccttttccttgtcggcgctgctaccggcgcgcattccttcgaagaagtgcagctggttgaatcaggtggcggcctggttcaacctggcggatctctgagactgagctgtgccgcctctggcttcagcctgacaaattacggcgtgcactgggtccgacaggcccctggaaaaggactggaatgggtgtccgtgatttggagcggcggcagcaccgattacaacgccgccttcatcagccggttcaccatcagcgccgacaccagcaagaataccgcctacctccagatgaactccctgagagccgaggacaccgccgtgtactattgcgccagagaactgatccacgctatggacaactggggccagggaaccctggtcacagtctcttctacgcgtatccagaaccctgatcctgccgtgtaccagctgcgggatagcaagagcagcgacaagagcgtgtgtctgttcaccgacttcgacagccagaccaacgtgtcccagagcaaggactccgacgtgtacatcaccgataagtgcgtgctggacatgcggagcatggacttcaagagcaactccgccgtggcctggtccaacaagtccgatttcgcctgcgccaacgccttcaacaacagcattatccccgaggacacattcttcccaagccccgagagcagcgactccaccgaccacgtgaagcccaaagagacagagaacaccaagcagcccagcaagagctgccacaagcccaaggccatcgtgcacaccgagaaagtgaacatgatgagcctgaccgtgctgggcctgcggatgctgttcgccaaaaccgtggccgtgaacttcctgctgaccgccaagctgttcttcctc

SEQ ID NO: 7524 - DNA, 2586 bp, synthetic construct
  source 1..2586: mol_type = other DNA
atggccttaccagtgaccgccttgctcctgccgctggccttgctgctccacgccgccaggccggaagtgcagctggttgaatctggcggaggactggttcagcctggcggatctctgagactgtcttgtgccgccagcggcttcagcttcagcgacttttggatgagctgggtccgacaggcccctggcaaaggacttgaatgggtcgccacaatcagccaggccggcagcgagaaggactacgtggactctgtgaagggcagattcaccatcagccgggacaacgccaagaagtccctgtacctccagatgaacagcctgagagccgaggacaccgccgtgtactattgtgcctctggcgtgtacagcttcgactacagaggccagggcaccctggtcacagtctcttctggtaccggcggaggcggatctggcggcggaggtagcggtggcggaggatctgaattcgacttcgtgatgacacagagccctctgagcctgcctgtgacacctggcgaacctgccagcatcagctgtagaagcagccagagcatcgtgcacagcaacggcaacacctacctggaatggtatctccagaagcctggacagagcccacagctgctgatctacaaggtgtccaacagattcagcggcgtgcccgacagattttctggcagcggctctggcaccgacttcaccctgaagattagcagagtggaagccgaggacgtgggcgtgtactactgcttccaaggctctcacgtgcccctgacctttggacagggcaccaagctggaaatcaagagactcgaggacctgaagaacgtgttcccacctgaggtggccgtgttcgagcctagcgaggccgagatcagccacacccagaaagccaccctcgtgtgcctggctaccggcttctaccccgaccatgtggaactgtcttggtgggtcaacggcaaagaggtgcacagcggcgtgtgtaccgacccccagccactgaaagaacagcccgccctgaacgacagccggtactgcctgagcagcagactgagagtgtccgccaccttctggcagaacccccggaaccacttcagatgccaggtgcagttctacggcctgagcgagaacgacgagtggacccaggacagagccaagcccgtgacccagatcgtgtctgccgaagcctggggcagagccgatgatgtgattaagatccactggcaggaaaagaagtccaacaccatcctgggcagccaggaaggcaacaccatgaagaccaacgacacctacatgaagttcagctggctgaccgtgcccgagaagtccctggacaaagaacacagatgcatcgtgcggcacgaaaacaacaagaacggcgtggaccaggaaatcatcttcccacccatcaagaccgatgtgattacaatggaccccaaggacaactgctccaaggacgccaacgataccctgctgctccagctgaccaacaccagcgcctactacatgtacttgttgctgctgctgaagtccgtggtgtacttcgccatcatcacatgctgcctgctgcggagaaccgccttctgctgcaacggcgagaagtctagggccaagcgatctggatctggagcaacaaacttctcactactcaaacaagcaggtgacgtggaggagaatcccgggcctactagtatggactggatttggcgcatccttttccttgtcggcgctgctaccggcgcgcattccttcgaagaagtgcagctggttgaaagcggagccgaagtgaagaaacctggggcctctgtgaaggtgtcctgcaaggccagcggctacacctttaccagctactggattcactgggtccgacaggcccctggacaaggacttgagtggatgggcgagaacgacccctccaacggcaggaccaactacaacgagaagttcaagaaccgcgtgaccctgaccgtggacaccagcatctctaccgcctacatggaactgagccggctgagatccgatgacaccgccgtgtactattgcgccagaggacccaactacttttacagcatggactactggggccagggcacaatggtcaccgttagctctacgcgtatccagaaccctgatcctgccgtgtaccagctgcgggatagcaagagcagcgacaagagcgtgtgtctgttcaccgacttcgacagccagaccaacgtgtcccagagcaaggactccgacgtgtacatcaccgataagtgcgtgctggacatgcggagcatggacttcaagagcaactccgccgtggcctggtccaacaagtccgatttcgcctgcgccaacgccttcaacaacagcattatccccgaggacacattcttcccaagccccgagagcagcgactccaccgaccacgtgaagcccaaagagacagagaacaccaagcagcccagcaagagctgccacaagcccaaggccatcgtgcacaccgagaaagtgaacatgatgagcctgaccgtgctgggcctgcggatgctgttcgccaaaaccgtggccgtgaacttcctgctgaccgccaagctgttcttcctc

SEQ ID NO: 7525 - DNA, 2565 bp, synthetic construct
  source 1..2565: mol_type = other DNA
atggccttaccagtgaccgccttgctcctgccgctggccttgctgctccacgccgccaggccggaagtgcagctggttgaatctggcggaggactggttcagcctggcggatctctgagactgtcttgtgccgccagcggcttcagcttcagcgacttttggatgagctgggtccgacaggcccctggcaaaggacttgaatgggtcgccacaatcagccaggccggcagcgagaaggactacgtggactctgtgaagggcagattcaccatcagccgggacaacgccaagaagtccctgtacctccagatgaacagcctgagagccgaggacaccgccgtgtactattgtgcctctggcgtgtacagcttcgactacagaggccagggcaccctggtcacagtctcttctggtaccggcggaggcggatctggcggcggaggtagcggtggcggaggatctgaattcgacatccagctgactcagagccctagctttctgagcgccagcgtgggcgacagagtgaccatcacatgtagcgccagatccagcatcagcttcatgtactggtatcagcagaagcccggcaaggcccctaagctgctgatctacgacaccagcaatctggcctctggcgtgcccagcagattttctggaagcggcagcggcaccgagttcaccctgacaatctctagcctggaagccgaggatgccgccacctactattgccagcagtggtccagctatcccctgacatttggacagggcaccaagctggaaatcaaactcgaggacctgaagaacgtgttcccacctgaggtggccgtgttcgagcctagcgaggccgagatcagccacacccagaaagccaccctcgtgtgcctggctaccggcttctaccccgaccatgtggaactgtcttggtgggtcaacggcaaagaggtgcacagcggcgtgtgtaccgacccccagccactgaaagaacagcccgccctgaacgacagccggtactgcctgagcagcagactgagagtgtccgccaccttctggcagaacccccggaaccacttcagatgccaggtgcagttctacggcctgagcgagaacgacgagtggacccaggacagagccaagcccgtgacccagatcgtgtctgccgaagcctggggcagagccgatgatgtgattaagatccactggcaggaaaagaagtccaacaccatcctgggcagccaggaaggcaacaccatgaagaccaacgacacctacatgaagttcagctggctgaccgtgcccgagaagtccctggacaaagaacacagatgcatcgtgcggcacgaaaacaacaagaacggcgtggaccaggaaatcatcttcccacccatcaagaccgatgtgattacaatggaccccaaggacaactgctccaaggacgccaacgataccctgctgctccagctgaccaacaccagcgcctactacatgtacttgttgctgctgctgaagtccgtggtgtacttcgccatcatcacatgctgcctgctgcggagaaccgccttctgctgcaacggcgagaagtctagggccaagcgatctggatctggagcaacaaacttctcactactcaaacaagcaggtgacgtggaggagaatcccgggcctactagtatggactggatttggcgcatccttttccttgtcggcgctgctaccggcgcgcattccttcgaacaggttcagctggttcagtctggggccgaagtgaagaaacctggggcctctgtgaaggtgtcctgcaaggcttccggctacacctttaccggctcttggatgaactgggtccgacaggctcctggacagggactcgaatggatcggcagaatctatcctggcgacggcgagacaaactacaacggcaagttcaaggaccgcgtgacaatcaccgccgacaagagcacaagcaccgcctacatggaactgagcagcctgcggagcgaagataccgccgtgtactactgcgcccggatctacggcaacaacgtgtacttcgatgtgtggggccagggcacaaccgtgacagtctcttctacgcgtatccagaaccctgatcctgccgtgtaccagctgcgggatagcaagagcagcgacaagagcgtgtgtctgttcaccgacttcgacagccagaccaacgtgtcccagagcaaggactccgacgtgtacatcaccgataagtgcgtgctggacatgcggagcatggacttcaagagcaactccgccgtggcctggtccaacaagtccgatttcgcctgcgccaacgccttcaacaacagcattatccccgaggacacattcttcccaagccccgagagcagcgactccaccgaccacgtgaagcccaaagagacagagaacaccaagcagcccagcaagagctgccacaagcccaaggccatcgtgcacaccgagaaagtgaacatgatgagcctgaccgtgctgggcctgcggatgctgttcgccaaaaccgtggccgtgaacttcctgctgaccgccaagctgttcttcctc

SEQ ID NO: 7526 - DNA, 2589 bp, synthetic construct
  source 1..2589: mol_type = other DNA
atggccttaccagtgaccgccttgctcctgccgctggccttgctgctccacgccgccaggccggaagtgcagctggttgaatctggcggaggactggttcagcctggcggatctctgagactgtcttgtgccgccagcggcttcagcttcagcgacttttggatgagctgggtccgacaggcccctggcaaaggacttgaatgggtcgccacaatcagccaggccggcagcgagaaggactacgtggactctgtgaagggcagattcaccatcagccgggacaacgccaagaagtccctgtacctccagatgaacagcctgagagccgaggacaccgccgtgtactattgtgcctctggcgtgtacagcttcgactacagaggccagggcaccctggtcacagtctcttctggtaccggcggaggcggatctggcggcggaggtagcggtggcggaggatctgaattccagctggtgctgacacagtctccaagcgcctctgccagcctgggatctagcgtgaagctgacctgtacactgagcagcggccacaagaccgacaccatcgactggtatcagcagcagcctggcaaggcccctagatacctgatgaagctggaaggcagcggcagctacaacaaaggctctggcgtgcccgatagattcagcggcagttcttctggcgctgattggtatctgaccatcagcagcctccagagcgaggacgaggccgattactactgcggcacagactaccccggcaactacctgtttggcggcggaacacagctgacagtgcttggcctcgaggacctgaagaacgtgttcccacctgaggtggccgtgttcgagcctagcgaggccgagatcagccacacccagaaagccaccctcgtgtgcctggctaccggcttctaccccgaccatgtggaactgtcttggtgggtcaacggcaaagaggtgcacagcggcgtgtgtaccgacccccagccactgaaagaacagcccgccctgaacgacagccggtactgcctgagcagcagactgagagtgtccgccaccttctggcagaacccccggaaccacttcagatgccaggtgcagttctacggcctgagcgagaacgacgagtggacccaggacagagccaagcccgtgacccagatcgtgtctgccgaagcctggggcagagccgatgatgtgattaagatccactggcaggaaaagaagtccaacaccatcctgggcagccaggaaggcaacaccatgaagaccaacgacacctacatgaagttcagctggctgaccgtgcccgagaagtccctggacaaagaacacagatgcatcgtgcggcacgaaaacaacaagaacggcgtggaccaggaaatcatcttcccacccatcaagaccgatgtgattacaatggaccccaaggacaactgctccaaggacgccaacgataccctgctgctccagctgaccaacaccagcgcctactacatgtacttgttgctgctgctgaagtccgtggtgtacttcgccatcatcacatgctgcctgctgcggagaaccgccttctgctgcaacggcgagaagtctagggccaagcgatctggatctggagcaacaaacttctcactactcaaacaagcaggtgacgtggaggagaatcccgggcctactagtatggactggatttggcgcatccttttccttgtcggcgctgctaccggcgcgcattccttcgaacaagaacagctggttgaaagcggcggaggactggttcaacctggcggttctctgagactgagctgtgccgccagcggcttcaccttcagcgactactacatgagctggatcagacaggccccaggcaaaggactggaatgggtcgccacaatctaccccagcagcggcaagacctactacgccgattctgccaagggcagactgaccatctccagcgacaacgccaaggacagcctgtacctccagatgaacagcctgagagccgaggacaccgccgtgtactactgcaccagagatagctacgccgacgacgccgctctgtttgacatttggggccagggcaccaccgtgaccgtttcttctacgcgtatccagaaccctgatcctgccgtgtaccagctgcgggatagcaagagcagcgacaagagcgtgtgtctgttcaccgacttcgacagccagaccaacgtgtcccagagcaaggactccgacgtgtacatcaccgataagtgcgtgctggacatgcggagcatggacttcaagagcaactccgccgtggcctggtccaacaagtccgatttcgcctgcgccaacgccttcaacaacagcattatccccgaggacacattcttcccaagccccgagagcagcgactccaccgaccacgtgaagcccaaagagacagagaacaccaagcagcccagcaagagctgccacaagcccaaggccatcgtgcacaccgagaaagtgaacatgatgagcctgaccgtgctgggcctgcggatgctgttcgccaaaaccgtggccgtgaacttcctgctgaccgccaagctgttcttcctc

SEQ ID NO: 7527 - DNA, 2565 bp, synthetic construct; identical to SEQ ID NO: 7523
  source 1..2565: mol_type = other DNA

SEQ ID NO: 7528 - DNA, 2586 bp, synthetic construct; identical to SEQ ID NO: 7524
  source 1..2586: mol_type = other DNA

SEQ ID NO: 7529 - DNA, 2565 bp, synthetic construct; identical to SEQ ID NO: 7525
  source 1..2565: mol_type = other DNA

SEQ ID NO: 7530 - DNA, 2589 bp, synthetic construct; identical to SEQ ID NO: 7526
  source 1..2589: mol_type = other DNA

SEQ ID NO: 7531 - DNA, 2586 bp, synthetic construct
  source 1..2586: mol_type = other DNA
atggccttaccagtgaccgccttgctcctgccgctggccttgctgctccacgccgccaggccggaagtgcagctggttgaatctggcggaggactggttcagcctggcggatctctgagactgtcttgtgccgccagcggcttcagcttcagcgacttttggatgagctgggtccgacaggcccctggcaaaggacttgaatgggtcgccacaatcagccaggccggcagcgagaaggactacgtggactctgtgaagggcagattcaccatcagccgggacaacgccaagaagtccctgtacctccagatgaacagcctgagagccgaggacaccgccgtgtactattgtgcctctggcgtgtacagcttcgactacagaggccagggcaccctggtcacagtctcttctggtaccggcggaggcggatctggcggcggaggtagcggtggcggaggatctgaattcgatatccagctcactcaaagcccctctagtctctctgcctcagtgggggatcgggtcagttttacttgtcaagcttcacaggatatcaacaacttccttaattggtatcagcagaagccaggaaaagcacccaagctgctcatctatgatgcctcaaatttggagacgggtgttcccagtcgattctctgggtcagggtccgggaccgactttacgtttacgatctcctctctgcagcccgaagacatcgccacatactattgtcaacagtacggcaacttgcctttcacatttgggggcgggactaaggttgaaatcaagaggctcgaggacctgaagaacgtgttcccacctgaggtggccgtgttcgagcctagcgaggccgagatcagccacacccagaaagccaccctcgtgtgcctggctaccggcttctaccccgaccatgtggaactgtcttggtgggtcaacggcaaagaggtgcacagcggcgtgtgtaccgacccccagccactgaaagaacagcccgccctgaacgacagccggtactgcctgagcagcagactgagagtgtccgccaccttctggcagaacccccggaaccacttcagatgccaggtgcagttctacggcctgagcgagaacgacgagtggacccaggacagagccaagcccgtgacccagatcgtgtctgccgaagcctggggcagagccgatgatgtgattaagatccactggcaggaaaagaagtccaacaccatcctgggcagccaggaaggcaacaccatgaagaccaacgacacctacatgaagttcagctggctgaccgtgcccgagaagtccctggacaaagaacacagatgcatcgtgcggcacgaaaacaacaagaacggcgtggaccaggaaatcatcttcccacccatcaagaccgatgtgattacaatggaccccaaggacaactgctccaaggacgccaacgataccctgctgctccagctgaccaacaccagcgcctactacatgtacttgttgctgctgctgaagtccgtggtgtacttcgccatcatcacatgctgcctgctgcggagaaccgccttctgctgcaacggcgagaagtctagggccaagcgatctggatctggagcaacaaacttctcactactcaaacaagcaggtgacgtggaggagaatcccgggcctactagtatggactggatttggcgcatccttttccttgtcggcgctgctaccggcgcgcattccttcgaacaggtacagctgcaggaatctgggcccggacttgtcaagccaagtcagacactttctcttacatgtaccgtgagcggcggaagtataagcagtggaggcttttactggtcttggatacggcagcacccaggcaaaggcttggagtggattggatacattcatcattcaggatctacacactataatccatcccttaagtcccgggtcaccattagcattgatacgtctaagaatctgttcagtctcaggctgtcctccgtcactgctgccgacacagccgtgtactactgcgcctccttggtttactgcggaggcgactgttatagcggctttgattattgggggcaggggaccctcgtaaccgtgagctctacgcgtatccagaaccctgatcctgccgtgtaccagctgcgggatagcaagagcagcgacaagagcgtgtgtctgttcaccgacttcgacagccagaccaacgtgtcccagagcaaggactccgacgtgtacatcaccgataagtgcgtgctggacatgcggagcatggacttcaagagcaactccgccgtggcctggtccaacaagtccgatttcgcctgcgccaacgccttcaacaacagcattatccccgaggacacattcttcccaagccccgagagcagcgactccaccgaccacgtgaagcccaaagagacagagaacaccaagcagcccagcaagagctgccacaagcccaaggccatcgtgcacaccgagaaagtgaacatgatgagcctgaccgtgctgggcctgcggatgctgttcgccaaaaccgtggccgtgaacttcctgctgaccgccaagctgttcttcctc

SEQ ID NO: 7532 - DNA, 2574 bp, synthetic construct
  source 1..2574: mol_type = other DNA
atggccttaccagtgaccgccttgctcctgccgctggccttgctgctccacgccgccaggccggaagtgcagctggttgaatctggcggaggactggttcagcctggcggatctctgagactgtcttgtgccgccagcggcttcagcttcagcgacttttggatgagctgggtccgacaggcccctggcaaaggacttgaatgggtcgccacaatcagccaggccggcagcgagaaggactacgtggactctgtgaagggcagattcaccatcagccgggacaacgccaagaagtccctgtacctccagatgaacagcctgagagccgaggacaccgccgtgtactattgtgcctctggcgtgtacagcttcgactacagaggccagggcaccctggtcacagtctcttctggtaccggcggaggcggatctggcggcggaggtagcggtggcggaggatctgaattcgacattcagatgacacagagccctagcagcctgagcgcctctgtgggagacagagtgaccatcacatgcaagagcagccagagcgtgctgtactccagcaatcagaagaactacctggcctggttccagcagaagcctggcaaggctcctaagctgctgatctactgggccagcaccagagaaagcggcgtgccaagcagattttctggcagcggctctggcaccgacttcaccctgacaatatccagcctccagcctgaggacttcgccacctacttttgccaccagtacctgagcagctacacattcggacagggcaccaaggtggaaatcaagcggctcgaggacctgaagaacgtgttcccacctgaggtggccgtgttcgagcctagcgaggccgagatcagccacacccagaaagccaccctcgtgtgcctggctaccggcttctaccccgaccatgtggaactgtcttggtgggtcaacggcaaagaggtgcacagcggcgtgtgtaccgacccccagccactgaaagaacagcccgccctgaacgacagccggtactgcctgagcagcagactgagagtgtccgccaccttctggcagaacccccggaaccacttcagatgccaggtgcagttctacggcctgagcgagaacgacgagtggacccaggacagagccaagcccgtgacccagatcgtgtctgccgaagcctggggcagagccgatgatgtgattaagatccactggcaggaaaagaagtccaacaccatcctgggcagccaggaaggcaacaccatgaagaccaacgacacctacatgaagttcagctggctgaccgtgcccgagaagtccctggacaaagaacacagatgcatcgtgcggcacgaaaacaacaagaacggcgtggaccaggaaatcatcttcccacccatcaagaccgatgtgattacaatggaccccaaggacaactgctccaaggacgccaacgataccctgctgctccagctgaccaacaccagcgcctactacatgtacttgttgctgctgctgaagtccgtggtgtacttcgccatcatcacatgctgcctgctgcggagaaccgccttctgctgcaacggcgagaagtctagggccaagcgatctggatctggagcaacaaacttctcactactcaaacaagcaggtgacgtggaggagaatcccgggcctactagtatggactggatttggcgcatccttttccttgtcggcgctgctaccggcgcgcattccttcgaagaggtgcagctggttgaatctggcggaggactggttcagcctggcggatctctgagactgtcttgtgccgccagcggctacaccttcaccacctattggatgcactgggtccgacaggcccctggcaaaggacttgagtgggtcggatatatcaggcccagcaccggctacacagagtacaaccagaagttcaaggaccgcttcaccatcagcgccgacaccagcaagaataccgcctacctccagatgaacagcctgagagccgaggacaccgccgtgtactactgtgccagatccagatggctgctggactattggggccagggcacactggttacagtttctacgcgtatccagaaccctgatcctgccgtgtaccagctgcgggatagcaagagcagcgacaagagcgtgtgtctgttcaccgacttcgacagccagaccaacgtgtcccagagcaaggactccgacgtgtacatcaccgataagtgcgtgctggacatgcggagcatggacttcaagagcaactccgccgtggcctggtccaacaagtccgatttcgcctgcgccaacgccttcaacaacagcattatccccgaggacacattcttcccaagccccgagagcagcgactccaccgaccacgtgaagcccaaagagacagagaacaccaagcagcccagcaagagctgccacaagcccaaggccatcgtgcacaccgagaaagtgaacatgatgagcctgaccgtgctgggcctgcggatgctgttcgccaaaaccgtggccgtgaacttcctgctgaccgccaagctgttcttcctc

SEQ ID NO: 7533 - DNA, 2565 bp, synthetic construct
  source 1..2565: mol_type = other DNA
atggccttaccagtgaccgccttgctcctgccgctggccttgctgctccacgccgccaggccggaagtgcagctggttgaatctggcggaggactggttcagcctggcggatctctgagactgtcttgtgccgccagcggcttcagcttcagcgacttttggatgagctgggtccgacaggcccctggcaaaggacttgaatgggtcgccacaatcagccaggccggcagcgagaaggactacgtggactctgtgaagggcagattcaccatcagccgggacaacgccaagaagtccctgtacctccagatgaacagcctgagagccgaggacaccgccgtgtactattgtgcctctggcgtgtacagcttcgactacagaggccagggcaccctggtcacagtctcttctggtaccggcggaggcggatctggcggcggaggtagcggtggcggaggatctgaattcgacatccagatgacacagagccctagcagcctgtctgccagcgtgggagacagagtgaccatcacctgtagagccagccaggacatcagcaactacctgaactggtatcagcagaagcccggcaaggcccctaagctgctgatctactacaccagcagactgcacagcggcgtgcccagcagattttctggctctggcagcggcaccgacttcaccctgacaatatctagcctccagcctgaggacttcgccacctactattgccagcagggcaacaccctgccttacacatttggacagggcaccaaggtggaaatcaagagactcgaggacctgaagaacgtgttcccacctgaggtggccgtgttcgagcctagcgaggccgagatcagccacacccagaaagccaccctcgtgtgcctggctaccggcttctaccccgaccatgtggaactgtcttggtgggtcaacggcaaagaggtgcacagcggcgtgtgtaccgacccccagccactgaaagaacagcccgccctgaacgacagccggtactgcctgagcagcagactgagagtgtccgccaccttctggcagaacccccggaaccacttcagatgccaggtgcagttctacggcctgagcgagaacgacgagtggacccaggacagagccaagcccgtgacccagatcgtgtctgccgaagcctggggcagagccgatgatgtgattaagatccactggcaggaaaagaagtccaacaccatcctgggcagccaggaaggcaacaccatgaagaccaacgacacctacatgaagttcagctggctgaccgtgcccgagaagtccctggacaaagaacacagatgcatcgtgcggcacgaaaacaacaagaacggcgtggaccaggaaatcatcttcccacccatcaagaccgatgtgattacaatggaccccaaggacaactgctccaaggacgccaacgataccctgctgctccagctgaccaacaccagcgcctactacatgtacttgttgctgctgctgaagtccgtggtgtacttcgccatcatcacatgctgcctgctgcggagaaccgccttctgctgcaacggcgagaagtctagggccaagcgatctggatctggagcaacaaacttctcactactcaaacaagcaggtgacgtggaggagaatcccgggcctactagtatggactggatttggcgcatccttttccttgtcggcgctgctaccggcgcgcattccttcgaagaagtgcagctggttgaatcaggtggcggcctggttcaacctggcggatctctgagactgagctgtgccgccagcggcttcaccttcagcgactactttatgagctgggtccgacaggcccctggcaaaggacttgaatgggtcgccaccatcagcaatggcggcacctacacttactaccccgacagcgtgaagggcagattcaccatctccagagacaacagcaagaacaccctgtacctccagatgaactccctgagagccgaggacaccgccgtgtactactgcgccagattcgacggctacatcttcgactattggggccagggcaccctggtcacagtctcttctacgcgtatccagaaccctgatcctgccgtgtaccagctgcgggatagcaagagcagcgacaagagcgtgtgtctgttcaccgacttcgacagccagaccaacgtgtcccagagcaaggactccgacgtgtacatcaccgataagtgcgtgctggacatgcggagcatggacttcaagagcaactccgccgtggcctggtccaacaagtccgatttcgcctgcgccaacgccttcaacaacagcattatccccgaggacacattcttcccaagccccgagagcagcgactccaccgaccacgtgaagcccaaagagacagagaacaccaagcagcccagcaagagctgccacaagcccaaggccatcgtgcacaccgagaaagtgaacatgatgagcctgaccgtgctgggcctgcggatgctgttcgccaaaaccgtggccgtgaacttcctgctgaccgccaagctgttcttcctc

SEQ ID NO: 7534 - DNA, 2580 bp, synthetic construct
  source 1..2580: mol_type = other DNA
atggccttaccagtgaccgccttgctcctgccgctggccttgctgctccacgccgccaggccggaagtgcagctggttgaatctggcggaggactggttcagcctggcggatctctgagactgtcttgtgccgccagcggcttcagcttcagcgacttttggatgagctgggtccgacaggcccctggcaaaggacttgaatgggtcgccacaatcagccaggccggcagcgagaaggactacgtggactctgtgaagggcagattcaccatcagccgggacaacgccaagaagtccctgtacctccagatgaacagcctgagagccgaggacaccgccgtgtactattgtgcctctggcgtgtacagcttcgactacagaggccagggcaccctggtcacagtctcttctggtaccggcggaggcggatctggcggcggaggtagcggtggcggaggatctgaattcgacatccagatgacacagactacatcctccctgtctgcctctctgggagacagagtcaccatcagttgcagggcaagtcaggacattagtaagtacctgaactggtatcagcagaaaccagatggaactgttaaactcctgatctaccatacatcaagattacactcaggagtcccatcaaggttcagtggcagtgggtctggaacagattattctctcaccattagcaacctggagcaagaagatattgccacttacttttgccaacagggtaatacgcttccgtacacgttcggaggggggaccaagctggagatcacactcgagatccagaaccctgatcctgccgtgtaccagctgcgggatagcaagagcagcgacaagagcgtgtgtctgttcaccgacttcgacagccagaccaacgtgtcccagagcaaggactccgacgtgtacatcaccgataagtgcgtgctggacatgcggagcatggacttcaagagcaactccgccgtggcctggtccaacaagtccgatttcgcctgcgccaacgccttcaacaacagcattatccccgaggacacattcttcccaagccccgagagcagcgactccaccgaccacgtgaagcccaaagagacagagaacaccaagcagcccagcaagagctgccacaagcccaaggccatcgtgcacaccgagaaagtgaacatgatgagcctgaccgtgctgggcctgcggatgctgttcgccaaaaccgtggccgtgaacttcctgctgaccgccaagctgttcttcctccgcgccaagagaagcggatctggcgtgaagcagaccctgaatttcgacctgctgaagctggctggcgacgtggaatccaacccaggccctactagtatggactggatttggcgcatccttttccttgtcggcgctgctaccggcgcgcattccttcgaagtgaaactgcaggagtcaggacctggcctggtggcgccctcacagagcctgtccgtcacatgcactgtctcaggggtctcattacccgactatggtgtaagctggattcgccagcctccacgaaagggtctggagtggctgggagtaatatggggtagtgaaaccacatactataattcagctctcaaatccagactgaccatcatcaaggacaactccaagagccaagttttcttaaaaatgaacagtctgcaaactgatgacacagccatttactactgtgccaaacattattactacggtggtagctatgctatggactactggggccaaggaacctcagtcaccgtctcctcaacgcgtgaggacctgaagaacgtgttcccacctgaggtggccgtgttcgagcctagcgaggccgagatcagccacacccagaaagccaccctcgtgtgcctggctaccggcttctaccccgaccatgtggaactgtcttggtgggtcaacggcaaagaggtgcacagcggcgtgtgtaccgacccccagccactgaaagaacagcccgccctgaacgacagccggtactgcctgagcagcagactgagagtgtccgccaccttctggcagaacccccggaaccacttcagatgccaggtgcagttctacggcctgagcgagaacgacgagtggacccaggacagagccaagcccgtgacccagatcgtgtctgccgaagcctggggcagagccgatgatgtgattaagatccactggcaggaaaagaagtccaacaccatcctgggcagccaggaaggcaacaccatgaagaccaacgacacctacatgaagttcagctggctgaccgtgcccgagaagtccctggacaaagaacacagatgcatcgtgcggcacgaaaacaacaagaacggcgtggaccaggaaatcatcttcccacccatcaagaccgatgtgattacaatggaccccaaggacaactgctccaaggacgccaacgataccctgctgctccagctgaccaacaccagcgcctactacatgtacttgttgctgctgctgaagtccgtggtgtacttcgccatcatcacatgctgcctgctgcggagaaccgccttctgctgcaacggcgagaagtct

SEQ ID NO: 7535 - DNA, 2583 bp, synthetic construct
  source 1..2583: mol_type = other DNA
atggccttaccagtgaccgccttgctcctgccgctggccttgctgctccacgccgccaggccggaagtgcagctggttgaatctggcggaggactggttcagcctggcggatctctgagactgtcttgtgccgccagcggcttcagcttcagcgacttttggatgagctgggtccgacaggcccctggcaaaggacttgaatgggtcgccacaatcagccaggccggcagcgagaaggactacgtggactctgtgaagggcagattcaccatcagccgggacaacgccaagaagtccctgtacctccagatgaacagcctgagagccgaggacaccgccgtgtactattgtgcctctggcgtgtacagcttcgactacagaggccagggcaccctggtcacagtctcttctggtaccggcggaggcggatctggcggcggaggtagcggtggcggaggatctgaattcgagatcgtgatgacccagagccctgccaccctgtctctgagccctggcgaaagagccaccctgagctgtagagccagccaggacatcagcaagtacctgaactggtatcagcagaagcccggccaggcccccagactgctgatctaccacaccagcagactgcacagcggcatccccgccagattttctggctctggcagcggcaccgactacaccctgacaatcagcagcctccagcccgaggacttcgccgtgtacttctgtcagcaaggcaacaccctgccctacaccttcggccagggcaccaagctggaaatcaagctcgagatccagaaccctgatcctgccgtgtaccagctgcgggatagcaagagcagcgacaagagcgtgtgtctgttcaccgacttcgacagccagaccaacgtgtcccagagcaaggactccgacgtgtacatcaccgataagtgcgtgctggacatgcggagcatggacttcaagagcaactccgccgtggcctggtccaacaagtccgatttcgcctgcgccaacgccttcaacaacagcattatccccgaggacacattcttcccaagccccgagagcagcgactccaccgaccacgtgaagcccaaagagacagagaacaccaagcagcccagcaagagctgccacaagcccaaggccatcgtgcacaccgagaaagtgaacatgatgagcctgaccgtgctgggcctgcggatgctgttcgccaaaaccgtggccgtgaacttcctgctgaccgccaagctgttcttcctccgcgccaagagaagcggatctggcgtgaagcagaccctgaatttcgacctgctgaagctggctggcgacgtggaatccaacccaggccctactagtatggactggatttggcgcatccttttccttgtcggcgctgctaccggcgcgcattccttcgaacaggtgcaactccaggaatctggccctggcctcgtgaagcccagcgagacactgagcctgacctgtaccgtgtccggcgtgtccctgcctgactatggcgtgtcctggatcagacagccccctggcaagggcctggaatggatcggagtgatttggggcagcgaaaccacctactacaacagctccctgaagtccagagtgaccatctccaaggacaactccaagaaccaggtgtccctgaagctgagcagcgtgacagccgccgacaccgccgtgtattactgcgccaagcactactactacggcggcagctacgctatggactactggggccagggaaccctcgtgaccgtgtctagtacgcgtgaggacctgaagaacgtgttcccacctgaggtggccgtgttcgagcctagcgaggccgagatcagccacacccagaaagccaccctcgtgtgcctggctaccggcttctaccccgaccatgtggaactgtcttggtgggtcaacggcaaagaggtgcacagcggcgtgtgtaccgacccccagccactgaaagaacagcccgccctgaacgacagccggtactgcctgagcagcagactgagagtgtccgccaccttctggcagaacccccggaaccacttcagatgccaggtgcagttctacggcctgagcgagaacgacgagtggacccaggacagagccaagcccgtgacccagatcgtgtctgccgaagcctggggcagagccgatgatgtgattaagatccactggcaggaaaagaagtccaacaccatcctgggcagccaggaaggcaacaccatgaagaccaacgacacctacatgaagttcagctggctgaccgtgcccgagaagtccctggacaaagaacacagatgcatcgtgcggcacgaaaacaacaagaacggcgtggaccaggaaatcatcttcccacccatcaagaccgatgtgattacaatggaccccaaggacaactgctccaaggacgccaacgataccctgctgctccagctgaccaacaccagcgcctactacatgtacttgttgctgctgctgaagtccgtggtgtacttcgccatcatcacatgctgcctgctgcggagaaccgccttctgctgcaacggcgagaagtct

SEQ ID NO: 7536 - DNA, 2586 bp, synthetic construct
  source 1..2586: mol_type = other DNA
atggccttaccagtgaccgccttgctcctgccgctggccttgctgctccacgccgccaggccggaagtgcagctggttgaatctggcggaggactggttcagcctggcggatctctgagactgtcttgtgccgccagcggcttcagcttcagcgacttttggatgagctgggtccgacaggcccctggcaaaggacttgaatgggtcgccacaatcagccaggccggcagcgagaaggactacgtggactctgtgaagggcagattcaccatcagccgggacaacgccaagaagtccctgtacctccagatgaacagcctgagagccgaggacaccgccgtgtactattgtgcctctggcgtgtacagcttcgactacagaggccagggcaccctggtcacagtctcttctggtaccggcggaggcggatctggcggcggaggtagcggtggcggaggatctgaattcgacgagatcgtgctgacacagagccccgccaccctgtcactgtctccaggcgaaagagccaccctgagctgtagcgccagcagcagcgtgtcctacatgcactggtatcagcagaagcccggccaggcccccagactgctgatctacgataccagcaagctggcctccggcatccccgccagattttctggcagcggctccggcaccgacttcaccctgacaatcagcagcctggaacccgaggacgtggccgtgtactactgttttcaaggcagcgtgtaccccttcaccttcggccagggcaccaagctggaaatcaagagactcgagatccagaaccctgatcctgccgtgtaccagctgcgggatagcaagagcagcgacaagagcgtgtgtctgttcaccgacttcgacagccagaccaacgtgtcccagagcaaggactccgacgtgtacatcaccgataagtgcgtgctggacatgcggagcatggacttcaagagcaactccgccgtggcctggtccaacaagtccgatttcgcctgcgccaacgccttcaacaacagcattatccccgaggacacattcttcccaagccccgagagcagcgactccaccgaccacgtgaagcccaaagagacagagaacaccaagcagcccagcaagagctgccacaagcccaaggccatcgtgcacaccgagaaagtgaacatgatgagcctgaccgtgctgggcctgcggatgctgttcgccaaaaccgtggccgtgaacttcctgctgaccgccaagctgttcttcctccgcgccaagagaagcggatctggcgtgaagcagaccctgaatttcgacctgctgaagctggctggcgacgtggaatccaacccaggccctactagtatggactggatttggcgcatccttttccttgtcggcgctgctaccggcgcgcattccttcgaacaggtgcagctccaggaatctggccctggcctcgtgaagcctagccagaccctgagcctgacctgtaccgtgtctggcggcagcatcagcacaagcggcatgggcgtgggctggatcagacagcaccctggcaagggcctggaatggatcggccacatttggtgggacgacgacaagcggtacaaccccgccctgaagtccagagtgaccatcagcgtggacaccagcaagaaccagttcagcctgaagctgagcagcgtgacagccgccgataccgccgtgtattattgcgcccggatggaactgtggtcctactacttcgactactggggccagggaaccctcgtgaccgtgtctagtacgcgtgaggacctgaagaacgtgttcccacctgaggtggccgtgttcgagcctagcgaggccgagatcagccacacccagaaagccaccctcgtgtgcctggctaccggcttctaccccgaccatgtggaactgtcttggtgggtcaacggcaaagaggtgcacagcggcgtgtgtaccgacccccagccactgaaagaacagcccgccctgaacgacagccggtactgcctgagcagcagactgagagtgtccgccaccttctggcagaacccccggaaccacttcagatgccaggtgcagttctacggcctgagcgagaacgacgagtggacccaggacagagccaagcccgtgacccagatcgtgtctgccgaagcctggggcagagccgatgatgtgattaagatccactggcaggaaaagaagtccaacaccatcctgggcagccaggaaggcaacaccatgaagaccaacgacacctacatgaagttcagctggctgaccgtgcccgagaagtccctggacaaagaacacagatgcatcgtgcggcacgaaaacaacaagaacggcgtggaccaggaaatcatcttcccacccatcaagaccgatgtgattacaatggaccccaaggacaactgctccaaggacgccaacgataccctgctgctccagctgaccaacaccagcgcctactacatgtacttgttgctgctgctgaagtccgtggtgtacttcgccatcatcacatgctgcctgctgcggagaaccgccttctgctgcaacggcgagaagtct

SEQ ID NO: 7537 - DNA, 2580 bp, synthetic construct
  source 1..2580: mol_type = other DNA
atggccttaccagtgaccgccttgctcctgccgctggccttgctgctccacgccgccaggccggaagtgcagctggttgaatctggcggaggactggttcagcctggcggatctctgagactgtcttgtgccgccagcggcttcagcttcagcgacttttggatgagctgggtccgacaggcccctggcaaaggacttgaatgggtcgccacaatcagccaggccggcagcgagaaggactacgtggactctgtgaagggcagattcaccatcagccgggacaacgccaagaagtccctgtacctccagatgaacagcctgagagccgaggacaccgccgtgtactattgtgcctctggcgtgtacagcttcgactacagaggccagggcaccctggtcacagtctcttctggtaccggcggaggcggatctggcggcggaggtagcggtggcggaggatctgaattcgactacatccacgtgacacagagccctagcagcctgtccgtgtccatcggcgatagagtgaccatcaactgccagacctctcaaggcgtgggcagcgacctgcactggtatcagcacaaacctggcagagcccctaagctgctgatccaccatgccagctctgtggaagatggcgtgcccagcagattttccggcaccggatttcacaccagcttcaacctgacaatcaacgacctccaggccgacgacatcggcacctactactgtcaagtgctccagagcttcggcagaggcagcagactggatacaaaactcgagatccagaaccctgatcctgccgtgtaccagctgcgggatagcaagagcagcgacaagagcgtgtgtctgttcaccgacttcgacagccagaccaacgtgtcccagagcaaggactccgacgtgtacatcaccgataagtgcgtgctggacatgcggagcatggacttcaagagcaactccgccgtggcctggtccaacaagtccgatttcgcctgcgccaacgccttcaacaacagcattatccccgaggacacattcttcccaagccccgagagcagcgactccaccgaccacgtgaagcccaaagagacagagaacaccaagcagcccagcaagagctgccacaagcccaaggccatcgtgcacaccgagaaagtgaacatgatgagcctgaccgtgctgggcctgcggatgctgttcgccaaaaccgtggccgtgaacttcctgctgaccgccaagctgttcttcctccgcgccaagagaagcggatctggcgtgaagcagaccctgaatttcgacctgctgaagctggctggcgacgtggaatccaacccaggccctactagtatggactggatttggcgcatccttttccttgtcggcgctgctaccggcgcgcattccttcgaaagggcacacctggtgcagtctggcaccgccatgaagaaacctggcgcttccgtcagagtgtcctgtcagacaagcggctacaccttcacagcccacatcctgttctggttcagacaggccccaggcagaggactggaatgggtcggatggatcaagccccagtacggggccgtgaatttcggcggaggcttcagagacagagtgaccctgaccagggacgtgtaccgggaaatcgcctacatggacatccggggcctgaagcctgatgacaccgccgtgtactactgcgccagggatagaagctacggcgacagctcttgggctctcgatgcttggggacagggcacaacagtggtggtgtctgctacgcgtgaggacctgaagaacgtgttcccacctgaggtggccgtgttcgagcctagcgaggccgagatcagccacacccagaaagccaccctcgtgtgcctggctaccggcttctaccccgaccatgtggaactgtcttggtgggtcaacggcaaagaggtgcacagcggcgtgtgtaccgacccccagccactgaaagaacagcccgccctgaacgacagccggtactgcctgagcagcagactgagagtgtccgccaccttctggcagaacccccggaaccacttcagatgccaggtgcagttctacggcctgagcgagaacgacgagtggacccaggacagagccaagcccgtgacccagatcgtgtctgccgaagcctggggcagagccgatgatgtgattaagatccactggcaggaaaagaagtccaacaccatcctgggcagccaggaaggcaacaccatgaagaccaacgacacctacatgaagttcagctggctgaccgtgcccgagaagtccctggacaaagaacacagatgcatcgtgcggcacgaaaacaacaagaacggcgtggaccaggaaatcatcttcccacccatcaagaccgatgtgattacaatggaccccaaggacaactgctccaaggacgccaacgataccctgctgctccagctgaccaacaccagcgcctactacatgtacttgttgctgctgctgaagtccgtggtgtacttcgccatcatcacatgctgcctgctgcggagaaccgccttctgctgcaacggcgagaagtct

SEQ ID NO: 7538 - DNA, 2610 bp, synthetic construct
  source 1..2610: mol_type = other DNA
atggccttaccagtgaccgccttgctcctgccgctggccttgctgctccacgccgccaggccggaagtgcagctggttgaatctggcggaggactggttcagcctggcggatctctgagactgtcttgtgccgccagcggcttcagcttcagcgacttttggatgagctgggtccgacaggcccctggcaaaggacttgaatgggtcgccacaatcagccaggccggcagcgagaaggactacgtggactctgtgaagggcagattcaccatcagccgggacaacgccaagaagtccctgtacctccagatgaacagcctgagagccgaggacaccgccgtgtactattgtgcctctggcgtgtacagcttcgactacagaggccagggcaccctggtcacagtctcttctggtaccggcggaggcggatctggcggcggaggtagcggtggcggaggatctgaattcgacgtgcagatgatccagacccccgatagcctggccgtgtccctgggacagagagccaccatctcttgcagagccagcgagagcgtggacaactacggcatcagcttcatgcactggtatcagcagaagcccggccagagccccaagctgctgatctacagagcctccaacctggaaagcggcatccccgccagattttccggcagcggcagcagaaccgacttcaccctgaccatcaaccccgtggaaaccgacgacgtggcaacctactactgccagcagaacaacaaggacccccccacctttggcggaggcaccaagctggaaatcaagctcgagatccagaaccctgatcctgccgtgtaccagctgcgggatagcaagagcagcgacaagagcgtgtgtctgttcaccgacttcgacagccagaccaacgtgtcccagagcaaggactccgacgtgtacatcaccgataagtgcgtgctggacatgcggagcatggacttcaagagcaactccgccgtggcctggtccaacaagtccgatttcgcctgcgccaacgccttcaacaacagcattatccccgaggacacattcttcccaagccccgagagcagcgactccaccgaccacgtgaagcccaaagagacagagaacaccaagcagcccagcaagagctgccacaagcccaaggccatcgtgcacaccgagaaagtgaacatgatgagcctgaccgtgctgggcctgcggatgctgttcgccaaaaccgtggccgtgaacttcctgctgaccgccaagctgttcttcctccgcgccaagagaagcggatctggcgtgaagcagaccctgaatttcgacctgctgaagctggctggcgacgtggaatccaacccaggccctactagtatggactggatttggcgcatccttttccttgtcggcgctgctaccggcgcgcattccttcgaagggggaggcggctctcaggtgcaactccagcagtctggcgctgagcttgtgaagcctggggccagcgtgaagattagctgcaaggccagcggctacgccttcagcagctactggatgaactgggtcaagcagcggcctggcaagggcctggaatggatcggccaaatctaccccggcgacggcgacaccacctacaacggcaagttcaagggcaaggccaccctgacagccgacaagagcagcagcaccgtgtacatgcaactgaacagcctgaccagcgaggacagcgccgtgtacttctgcgtgcggtactactacggcagctccggctacttcgactattggggccagggcaccacactgaccgtgtcctctacgcgtgaggacctgaagaacgtgttcccacctgaggtggccgtgttcgagcctagcgaggccgagatcagccacacccagaaagccaccctcgtgtgcctggctaccggcttctaccccgaccatgtggaactgtcttggtgggtcaacggcaaagaggtgcacagcggcgtgtgtaccgacccccagccactgaaagaacagcccgccctgaacgacagccggtactgcctgagcagcagactgagagtgtccgccaccttctggcagaacccccggaaccacttcagatgccaggtgcagttctacggcctgagcgagaacgacgagtggacccaggacagagccaagcccgtgacccagatcgtgtctgccgaagcctggggcagagccgatgatgtgattaagatccactggcaggaaaagaagtccaacaccatcctgggcagccaggaaggcaacaccatgaagaccaacgacacctacatgaagttcagctggctgaccgtgcccgagaagtccctggacaaagaacacagatgcatcgtgcggcacgaaaacaacaagaacggcgtggaccaggaaatcatcttcccacccatcaagaccgatgtgattacaatggaccccaaggacaactgctccaaggacgccaacgataccctgctgctccagctgaccaacaccagcgcctactacatgtacttgttgctgctgctgaagtccgtggtgtacttcgccatcatcacatgctgcctgctgcggagaaccgccttctgctgcaacggcgagaagtct

SEQ ID NO: 7539 - DNA, 2583 bp, synthetic construct
  source 1..2583: mol_type = other DNA
atggccttaccagtgaccgccttgctcctgccgctggccttgctgctccacgccgccaggccggaagtgcagctggttgaatctggcggaggactggttcagcctggcggatctctgagactgtcttgtgccgccagcggcttcagcttcagcgacttttggatgagctgggtccgacaggcccctggcaaaggacttgaatgggtcgccacaatcagccaggccggcagcgagaaggactacgtggactctgtgaagggcagattcaccatcagccgggacaacgccaagaagtccctgtacctccagatgaacagcctgagagccgaggacaccgccgtgtactattgtgcctctggcgtgtacagcttcgactacagaggccagggcaccctggtcacagtctcttctggtaccggcggaggcggatctggcggcggaggtagcggtggcggaggatctgaattcgacgtgcagatgatccagacccccagcagcctgtctgccagcctgggcgatagagtgaccatcagctgtcgggccagccaggacatcggcaactacctgaactggtatcagcagaaacccgacggcaccgtgaagctgctgatctactacaccagcagactgcacagcggcgtgcccagcagattttctggcagcggctctggcaccgagtacagcctgaccatctccaacctggaacaggaagatattgctacctacttctgtcagcaaggcagcgccctgccccctacatttggcggcggaacaaagctggaaatcaacctcgagatccagaaccctgatcctgccgtgtaccagctgcgggatagcaagagcagcgacaagagcgtgtgtctgttcaccgacttcgacagccagaccaacgtgtcccagagcaaggactccgacgtgtacatcaccgataagtgcgtgctggacatgcggagcatggacttcaagagcaactccgccgtggcctggtccaacaagtccgatttcgcctgcgccaacgccttcaacaacagcattatccccgaggacacattcttcccaagccccgagagcagcgactccaccgaccacgtgaagcccaaagagacagagaacaccaagcagcccagcaagagctgccacaagcccaaggccatcgtgcacaccgagaaagtgaacatgatgagcctgaccgtgctgggcctgcggatgctgttcgccaaaaccgtggccgtgaacttcctgctgaccgccaagctgttcttcctccgcgccaagagaagcggatctggcgtgaagcagaccctgaatttcgacctgctgaagctggctggcgacgtggaatccaacccaggccctactagtatggactggatttggcgcatccttttccttgtcggcgctgctaccggcgcgcattccttcgaagctctccagctccagcagtctggcgcagaactcgtgcggcctggcgcttctgtgaccctgagctgtaaagccagcggctacaccttcaccgactacgagatgcactgggtcaagcagacccctgtgcacggcctggaatggatcggagccatcgaccctgagacaggcggcaccgcctacaaccagaagttcgagggcaaggccatcctgaccgccgacaagagcagcagcacagcctacatggaactgcggagcctgacctccgaggacagccccgtgtactactgtgccagacggcggtactacggcagcagctccttcgactattggggccagggcaccaccctgaccgtgtctagtacgcgtgaggacctgaagaacgtgttcccacctgaggtggccgtgttcgagcctagcgaggccgagatcagccacacccagaaagccaccctcgtgtgcctggctaccggcttctaccccgaccatgtggaactgtcttggtgggtcaacggcaaagaggtgcacagcggcgtgtgtaccgacccccagccactgaaagaacagcccgccctgaacgacagccggtactgcctgagcagcagactgagagtgtccgccaccttctggcagaacccccggaaccacttcagatgccaggtgcagttctacggcctgagcgagaacgacgagtggacccaggacagagccaagcccgtgacccagatcgtgtctgccgaagcctggggcagagccgatgatgtgattaagatccactggcaggaaaagaagtccaacaccatcctgggcagccaggaaggcaacaccatgaagaccaacgacacctacatgaagttcagctggctgaccgtgcccgagaagtccctggacaaagaacacagatgcatcgtgcggcacgaaaacaacaagaacggcgtggaccaggaaatcatcttcccacccatcaagaccgatgtgattacaatggaccccaaggacaactgctccaaggacgccaacgataccctgctgctccagctgaccaacaccagcgcctactacatgtacttgttgctgctgctgaagtccgtggtgtacttcgccatcatcacatgctgcctgctgcggagaaccgccttctgctgcaacggcgagaagtct

SEQ ID NO: 7540 - DNA, 2595 bp, synthetic construct
  source 1..2595: mol_type = other DNA
atggccttaccagtgaccgccttgctcctgccgctggccttgctgctccacgccgccaggccggaagtgcagctggttgaatctggcggaggactggttcagcctggcggatctctgagactgtcttgtgccgccagcggcttcagcttcagcgacttttggatgagctgggtccgacaggcccctggcaaaggacttgaatgggtcgccacaatcagccaggccggcagcgagaaggactacgtggactctgtgaagggcagattcaccatcagccgggacaacgccaagaagtccctgtacctccagatgaacagcctgagagccgaggacaccgccgtgtactattgtgcctctggcgtgtacagcttcgactacagaggccagggcaccctggtcacagtctcttctggtaccggcggaggcggatctggcggcggaggtagcggtggcggaggatctgaattcgacatcgtcctgacccagtccccagccagcctggcggtgtccctgggtcaacgagctaccatttcctgcagagcctctaagtccgtatccacttccggctatagttacctgcattggtaccaacagaaaccagggcagccacccaagctgctcatctatctggcctcaaacctggagtccggcgtgcccgccagattctccggaagtgggagcggcaccgactttacattgaacatccacccagtcgaagaggaagatgctgccacttattactgtcagcactccagggagctgccatttacatttggctctggcacaaaactggagatcaaactcgagatccagaaccctgatcctgccgtgtaccagctgcgggatagcaagagcagcgacaagagcgtgtgtctgttcaccgacttcgacagccagaccaacgtgtcccagagcaaggactccgacgtgtacatcaccgataagtgcgtgctggacatgcggagcatggacttcaagagcaactccgccgtggcctggtccaacaagtccgatttcgcctgcgccaacgccttcaacaacagcattatccccgaggacacattcttcccaagccccgagagcagcgactccaccgaccacgtgaagcccaaagagacagagaacaccaagcagcccagcaagagctgccacaagcccaaggccatcgtgcacaccgagaaagtgaacatgatgagcctgaccgtgctgggcctgcggatgctgttcgccaaaaccgtggccgtgaacttcctgctgaccgccaagctgttcttcctccgcgccaagagaagcggatctggcgtgaagcagaccctgaatttcgacctgctgaagctggctggcgacgtggaatccaacccaggccctactagtatggactggatttggcgcatccttttccttgtcggcgctgctaccggcgcgcattccttcgaacaggttcagctggtcgagtccgggggaggtctggtacagccgggtggcagcctcaagctgtcatgtgccgcatctggttttgactttagcaggtattggatgagctgggtccgccaggccccgggcaagggacttgagtggattggagaaataaaccctacttccagcacaatcaacttcacaccttctttgaaagataaggtttttatctctcgggataacgctaaaaacacactgtacttgcagatgtctaaggtgcgaagcgaagacaccgccctctattattgcgcccggggtaattactaccgctatggggatgcgatggactattgggggcaaggtacctccgtcacggtctcaacgcgtgaggacctgaagaacgtgttcccacctgaggtggccgtgttcgagcctagcgaggccgagatcagccacacccagaaagccaccctcgtgtgcctggctaccggcttctaccccgaccatgtggaactgtcttggtgggtcaacggcaaagaggtgcacagcggcgtgtgtaccgacccccagccactgaaagaacagcccgccctgaacgacagccggtactgcctgagcagcagactgagagtgtccgccaccttctggcagaacccccggaaccacttcagatgccaggtgcagttctacggcctgagcgagaacgacgagtggacccaggacagagccaagcccgtgacccagatcgtgtctgccgaagcctggggcagagccgatgatgtgattaagatccactggcaggaaaagaagtccaacaccatcctgggcagccaggaaggcaacaccatgaagaccaacgacacctacatgaagttcagctggctgaccgtgcccgagaagtccctggacaaagaacacagatgcatcgtgcggcacgaaaacaacaagaacggcgtggaccaggaaatcatcttcccacccatcaagaccgatgtgattacaatggaccccaaggacaactgctccaaggacgccaacgataccctgctgctccagctgaccaacaccagcgcctactacatgtacttgttgctgctgctgaagtccgtggtgtacttcgccatcatcacatgctgcctgctgcggagaaccgccttctgctgcaacggcgagaagtct

SEQ ID NO: 7541 - DNA, 2589 bp, synthetic construct
  source 1..2589: mol_type = other DNA
atggccttaccagtgaccgccttgctcctgccgctggccttgctgctccacgccgccaggccggaagtgcagctggttgaatctggcggaggactggttcagcctggcggatctctgagactgtcttgtgccgccagcggcttcagcttcagcgacttttggatgagctgggtccgacaggcccctggcaaaggacttgaatgggtcgccacaatcagccaggccggcagcgagaaggactacgtggactctgtgaagggcagattcaccatcagccgggacaacgccaagaagtccctgtacctccagatgaacagcctgagagccgaggacaccgccgtgtactattgtgcctctggcgtgtacagcttcgactacagaggccagggcaccctggtcacagtctcttctggtaccggcggaggcggatctggcggcggaggtagcggtggcggaggatctgaattcgacatccagatgacccagagccctagctcactgagcgccagcgtgggcgacagggtgaccattacctgctccgccagccaggacatcagcaactacctgaactggtaccagcagaagcccggcaaggcccccaagctgctgatctactacacctccaacctgcactccggcgtgcccagcaggttcagcggaagcggcagcggcaccgatttcaccctgaccatctccagcctgcagcccgaggacttcgccacctactactgccagcagtacaggaagctcccctggactttcggccagggcaccaaactggagatcaagcgtctcgagatccagaaccctgatcctgccgtgtaccagctgcgggatagcaagagcagcgacaagagcgtgtgtctgttcaccgacttcgacagccagaccaacgtgtcccagagcaaggactccgacgtgtacatcaccgataagtgcgtgctggacatgcggagcatggacttcaagagcaactccgccgtggcctggtccaacaagtccgatttcgcctgcgccaacgccttcaacaacagcattatccccgaggacacattcttcccaagccccgagagcagcgactccaccgaccacgtgaagcccaaagagacagagaacaccaagcagcccagcaagagctgccacaagcccaaggccatcgtgcacaccgagaaagtgaacatgatgagcctgaccgtgctgggcctgcggatgctgttcgccaaaaccgtggccgtgaacttcctgctgaccgccaagctgttcttcctccgcgccaagagaagcggatctggcgtgaagcagaccctgaatttcgacctgctgaagctggctggcgacgtggaatccaacccaggccctactagtatggactggatttggcgcatccttttccttgtcggcgctgctaccggcgcgcattccttcgaacaggtgcagctggtccagagcggcgccgaagtgaagaagcccggcagctccgtgaaagtgagctgcaaggccagcggcggcaccttcagcaactactggatgcactgggtgaggcaggcccccggacagggcctggagtggatgggcgccacctacaggggccacagcgacacctactacaaccagaagttcaagggccgggtgaccatcaccgccgacaagagcaccagcaccgcctacatggaactgagcagcctcaggagcgaggacaccgctgtgtattactgcgccaggggcgccatctacgacggctacgacgtgctggacaactggggccagggcacactggtgaccgtgtccagcacgcgtgaggacctgaagaacgtgttcccacctgaggtggccgtgttcgagcctagcgaggccgagatcagccacacccagaaagccaccctcgtgtgcctggctaccggcttctaccccgaccatgtggaactgtcttggtgggtcaacggcaaagaggtgcacagcggcgtgtgtaccgacccccagccactgaaagaacagcccgccctgaacgacagccggtactgcctgagcagcagactgagagtgtccgccaccttctggcagaacccccggaaccacttcagatgccaggtgcagttctacggcctgagcgagaacgacgagtggacccaggacagagccaagcccgtgacccagatcgtgtctgccgaagcctggggcagagccgatgatgtgattaagatccactggcaggaaaagaagtccaacaccatcctgggcagccaggaaggcaacaccatgaagaccaacgacacctacatgaagttcagctggctgaccgtgcccgagaagtccctggacaaagaacacagatgcatcgtgcggcacgaaaacaacaagaacggcgtggaccaggaaatcatcttcccacccatcaagaccgatgtgattacaatggaccccaaggacaactgctccaaggacgccaacgataccctgctgctccagctgaccaacaccagcgcctactacatgtacttgttgctgctgctgaagtccgtggtgtacttcgccatcatcacatgctgcctgctgcggagaaccgccttctgctgcaacggcgagaagtct

SEQ ID NO: 7542 - DNA, 2589 bp, synthetic construct
  source 1..2589: mol_type = other DNA
atggccttaccagtgaccgccttgctcctgccgctggccttgctgctccacgccgccaggccggaagtgcagctggttgaatctggcggaggactggttcagcctggcggatctctgagactgtcttgtgccgccagcggcttcagcttcagcgacttttggatgagctgggtccgacaggcccctggcaaaggacttgaatgggtcgccacaatcagccaggccggcagcgagaaggactacgtggactctgtgaagggcagattcaccatcagccgggacaacgccaagaagtccctgtacctccagatgaacagcctgagagccgaggacaccgccgtgtactattgtgcctctggcgtgtacagcttcgactacagaggccagggcaccctggtcacagtctcttctggtaccggcggaggcggatctggcggcggaggtagcggtggcggaggatctgaattcgacatcgtgctgacacagagccctgccaccctgtctctgagccctggcgatagagccaccatcagctgtagagccagcgagagcgtgaccatcctgggcagccacctgatctactggtatcagcagaagcccggccagccccccagactgctgattcagctggcctccaatgtgcagaccggcgtgccagccagattttccggcagcggcagcagaaccgacttcaccctgaccatcagcagcgtggaacccgaggacttcgccgtgtactactgcctccagagccggaccatccccagaacattcggccagggcaccaagctggaaatcaagagactcgagatccagaaccctgatcctgccgtgtaccagctgcgggatagcaagagcagcgacaagagcgtgtgtctgttcaccgacttcgacagccagaccaacgtgtcccagagcaaggactccgacgtgtacatcaccgataagtgcgtgctggacatgcggagcatggacttcaagagcaactccgccgtggcctggtccaacaagtccgatttcgcctgcgccaacgccttcaacaacagcattatccccgaggacacattcttcccaagccccgagagcagcgactccaccgaccacgtgaagcccaaagagacagagaacaccaagcagcccagcaagagctgccacaagcccaaggccatcgtgcacaccgagaaagtgaacatgatgagcctgaccgtgctgggcctgcggatgctgttcgccaaaaccgtggccgtgaacttcctgctgaccgccaagctgttcttcctccgcgccaagagaagcggatctggcgtgaagcagaccctgaatttcgacctgctgaagctggctggcgacgtggaatccaacccaggccctactagtatggactggatttggcgcatccttttccttgtcggcgctgctaccggcgcgcattccttcgaacaggtgcagctggtgcagtctggccccgaagtgaagaaacccggcgagtccgtgaagatcagctgcaaggccagcggctacaccttccggcactacagcatgaactgggtcaagcaggccccaggccagggcctgaagtggatgggcagaatcaacaccgagagcggcgtgcccatctacgccgacgacttcaagggccggttcagcttcaccgtggacaccagcgccagcaccgcctacctggaaatctccagcctgaccagcgaggataccgccgtgtatttctgctccaacgactacctgtacagcctggatttctggggccagggaaccaccctgacagtgtcctctacgcgtgaggacctgaagaacgtgttcccacctgaggtggccgtgttcgagcctagcgaggccgagatcagccacacccagaaagccaccctcgtgtgcctggctaccggcttctaccccgaccatgtggaactgtcttggtgggtcaacggcaaagaggtgcacagcggcgtgtgtaccgacccccagccactgaaagaacagcccgccctgaacgacagccggtactgcctgagcagcagactgagagtgtccgccaccttctggcagaacccccggaaccacttcagatgccaggtgcagttctacggcctgagcgagaacgacgagtggacccaggacagagccaagcccgtgacccagatcgtgtctgccgaagcctggggcagagccgatgatgtgattaagatccactggcaggaaaagaagtccaacaccatcctgggcagccaggaaggcaacaccatgaagaccaacgacacctacatgaagttcagctggctgaccgtgcccgagaagtccctggacaaagaacacagatgcatcgtgcggcacgaaaacaacaagaacggcgtggaccaggaaatcatcttcccacccatcaagaccgatgtgattacaatggaccccaaggacaactgctccaaggacgccaacgataccctgctgctccagctgaccaacaccagcgcctactacatgtacttgttgctgctgctgaagtccgtggtgtacttcgccatcatcacatgctgcctgctgcggagaaccgccttctgctgcaacggcgagaagtct

SEQ ID NO: 7543 - DNA, 2592 bp, synthetic construct
  source 1..2592: mol_type = other DNA
atggccttaccagtgaccgccttgctcctgccgctggccttgctgctccacgccgccaggccggaagtgcagctggttgaatctggcggaggactggttcagcctggcggatctctgagactgtcttgtgccgccagcggcttcagcttcagcgacttttggatgagctgggtccgacaggcccctggcaaaggacttgaatgggtcgccacaatcagccaggccggcagcgagaaggactacgtggactctgtgaagggcagattcaccatcagccgggacaacgccaagaagtccctgtacctccagatgaacagcctgagagccgaggacaccgccgtgtactattgtgcctctggcgtgtacagcttcgactacagaggccagggcaccctggtcacagtctcttctggtaccggcggaggcggatctggcggcggaggtagcggtggcggaggatctgaattccagtctgtgctgacacagcctcctagtgtgtctggcgctcctggacagagagtgaccatcagctgtacaggcagcagcagcaatatcggagccggctttgacgtgcactggtatcagcagctgcctggcacagcccctaaactgctgatctacggcaacagcaacagacccagcggcgtgcccgatagattttccggctctaagagcggcacaagcgccagcctggctattactggactccaggccgaggacgaggccgactactactgtcagagctacgacagcagcctgagcggctacgttttcggcaccggcaccaaagtgacagtgcttggtctcgagatccagaaccctgatcctgccgtgtaccagctgcgggatagcaagagcagcgacaagagcgtgtgtctgttcaccgacttcgacagccagaccaacgtgtcccagagcaaggactccgacgtgtacatcaccgataagtgcgtgctggacatgcggagcatggacttcaagagcaactccgccgtggcctggtccaacaagtccgatttcgcctgcgccaacgccttcaacaacagcattatccccgaggacacattcttcccaagccccgagagcagcgactccaccgaccacgtgaagcccaaagagacagagaacaccaagcagcccagcaagagctgccacaagcccaaggccatcgtgcacaccgagaaagtgaacatgatgagcctgaccgtgctgggcctgcggatgctgttcgccaaaaccgtggccgtgaacttcctgctgaccgccaagctgttcttcctccgcgccaagagaagcggatctggcgtgaagcagaccctgaatttcgacctgctgaagctggctggcgacgtggaatccaacccaggccctactagtatggactggatttggcgcatccttttccttgtcggcgctgctaccggcgcgcattccttcgaacaagttcagctggttcagagcggagccgaagtgaagaaacctggggcctctgtgaaggtgtcctgcaaggcttccggctacacctttaccgattactacatgcactgggtccgacaggctcccggccaaagacttgaatggatgggctggatcaaccccaacagcggcggcacaaattacgcccagaagttccaggaccggatcaccgtgaccagagacaccagctccaacaccggctacatggaactgacccggctgagatccgatgacaccgccgtgtactactgcgctagaagcccttactccggcgtgctggataagtggggacagggcacactggtcaccgtgtcatctacgcgtgaggacctgaagaacgtgttcccacctgaggtggccgtgttcgagcctagcgaggccgagatcagccacacccagaaagccaccctcgtgtgcctggctaccggcttctaccccgaccatgtggaactgtcttggtgggtcaacggcaaagaggtgcacagcggcgtgtgtaccgacccccagccactgaaagaacagcccgccctgaacgacagccggtactgcctgagcagcagactgagagtgtccgccaccttctggcagaacccccggaaccacttcagatgccaggtgcagttctacggcctgagcgagaacgacgagtggacccaggacagagccaagcccgtgacccagatcgtgtctgccgaagcctggggcagagccgatgatgtgattaagatccactggcaggaaaagaagtccaacaccatcctgggcagccaggaaggcaacaccatgaagaccaacgacacctacatgaagttcagctggctgaccgtgcccgagaagtccctggacaaagaacacagatgcatcgtgcggcacgaaaacaacaagaacggcgtggaccaggaaatcatcttcccacccatcaagaccgatgtgattacaatggaccccaaggacaactgctccaaggacgccaacgataccctgctgctccagctgaccaacaccagcgcctactacatgtacttgttgctgctgctgaagtccgtggtgtacttcgccatcatcacatgctgcctgctgcggagaaccgccttctgctgcaacggcgagaagtct

SEQ ID NO: 7544 - DNA, 2583 bp, synthetic construct
  source 1..2583: mol_type = other DNA
atggccttaccagtgaccgccttgctcctgccgctggccttgctgctccacgccgccaggccggaagtgcagctggttgaatctggcggaggactggttcagcctggcggatctctgagactgtcttgtgccgccagcggcttcagcttcagcgacttttggatgagctgggtccgacaggcccctggcaaaggacttgaatgggtcgccacaatcagccaggccggcagcgagaaggactacgtggactctgtgaagggcagattcaccatcagccgggacaacgccaagaagtccctgtacctccagatgaacagcctgagagccgaggacaccgccgtgtactattgtgcctctggcgtgtacagcttcgactacagaggccagggcaccctggtcacagtctcttctggtaccggcggaggcggatctggcggcggaggtagcggtggcggaggatctgaattccaggctgttctgacacagcctccatctgcctctggcacacctggacagagagtgaccatctcctgtagcggcagcagcagcaacatcggcagctacaccgtgtcctggtatcagcagctccctggaacagcccctaagttcctgatctacagcaacaaccagcggcctagcggcgtgcccgatagattttctggcagcaagagcggcacaagcgccagcctggctatttctggactccagtctgaggacgaggccgactactattgtgccgcctgggacgatagcctgaacggctatgtgtttggcaccggcaccaaagtgacagtgcttggtctcgagatccagaaccctgatcctgccgtgtaccagctgcgggatagcaagagcagcgacaagagcgtgtgtctgttcaccgacttcgacagccagaccaacgtgtcccagagcaaggactccgacgtgtacatcaccgataagtgcgtgctggacatgcggagcatggacttcaagagcaactccgccgtggcctggtccaacaagtccgatttcgcctgcgccaacgccttcaacaacagcattatccccgaggacacattcttcccaagccccgagagcagcgactccaccgaccacgtgaagcccaaagagacagagaacaccaagcagcccagcaagagctgccacaagcccaaggccatcgtgcacaccgagaaagtgaacatgatgagcctgaccgtgctgggcctgcggatgctgttcgccaaaaccgtggccgtgaacttcctgctgaccgccaagctgttcttcctccgcgccaagagaagcggatctggcgtgaagcagaccctgaatttcgacctgctgaagctggctggcgacgtggaatccaacccaggccctactagtatggactggatttggcgcatccttttccttgtcggcgctgctaccggcgcgcattccttcgaagttcaactggttcagagcggagccgaagtgaagaagcctggcgagagcctgaagattagctgcaaaggcagcggctacgacttcaccacctactggatcggctgggtccgacagatgcctggcaaaggactggaatggatgggcatcatctaccccggcgacagcgacaccagatacagccctagcgttagaggccgcgtgaccatcagcgccgacaagtctatcaacaccgcctacctccagtggtccagcctggaagcctctgacaccgccatgtactactgcgccagaatgtggaccttcagccaggatggatggggccagggaacactggtcacagtgtcatctacgcgtgaggacctgaagaacgtgttcccacctgaggtggccgtgttcgagcctagcgaggccgagatcagccacacccagaaagccaccctcgtgtgcctggctaccggcttctaccccgaccatgtggaactgtcttggtgggtcaacggcaaagaggtgcacagcggcgtgtgtaccgacccccagccactgaaagaacagcccgccctgaacgacagccggtactgcctgagcagcagactgagagtgtccgccaccttctggcagaacccccggaaccacttcagatgccaggtgcagttctacggcctgagcgagaacgacgagtggacccaggacagagccaagcccgtgacccagatcgtgtctgccgaagcctggggcagagccgatgatgtgattaagatccactggcaggaaaagaagtccaacaccatcctgggcagccaggaaggcaacaccatgaagaccaacgacacctacatgaagttcagctggctgaccgtgcccgagaagtccctggacaaagaacacagatgcatcgtgcggcacgaaaacaacaagaacggcgtggaccaggaaatcatcttcccacccatcaagaccgatgtgattacaatggaccccaaggacaactgctccaaggacgccaacgataccctgctgctccagctgaccaacaccagcgcctactacatgtacttgttgctgctgctgaagtccgtggtgtacttcgccatcatcacatgctgcctgctgcggagaaccgccttctgctgcaacggcgagaagtct

SEQ ID NO: 7545 - DNA, 2592 bp, synthetic construct
  source 1..2592: mol_type = other DNA
atggccttaccagtgaccgccttgctcctgccgctggccttgctgctccacgccgccaggccggaagtgcagctggttgaatctggcggaggactggttcagcctggcggatctctgagactgtcttgtgccgccagcggcttcagcttcagcgacttttggatgagctgggtccgacaggcccctggcaaaggacttgaatgggtcgccacaatcagccaggccggcagcgagaaggactacgtggactctgtgaagggcagattcaccatcagccgggacaacgccaagaagtccctgtacctccagatgaacagcctgagagccgaggacaccgccgtgtactattgtgcctctggcgtgtacagcttcgactacagaggccagggcaccctggtcacagtctcttctggtaccggcggaggcggatctggcggcggaggtagcggtggcggaggatctgaattcgacatcgtgatgacccagagccccgatagcctggccgtgtctctgggagagagagccaccatcaactgcaagagcagccagagcatcctgtacagcagcaaccagaagaactacctggcctggtatcagcagaagcccggccagagccctaagctgctgatctactgggccagcaccagagaaagcggcgtgcccgatagattcagcggcagcggctctggcaccgacttcaccctgaccatcagttctcttcaggccgaggacgtggccgtgtactactgccaccagtacatcagctcctacaccttcggccagggcaccaagctggaaatcaagctcgagatccagaaccctgatcctgccgtgtaccagctgcgggatagcaagagcagcgacaagagcgtgtgtctgttcaccgacttcgacagccagaccaacgtgtcccagagcaaggactccgacgtgtacatcaccgataagtgcgtgctggacatgcggagcatggacttcaagagcaactccgccgtggcctggtccaacaagtccgatttcgcctgcgccaacgccttcaacaacagcattatccccgaggacacattcttcccaagccccgagagcagcgactccaccgaccacgtgaagcccaaagagacagagaacaccaagcagcccagcaagagctgccacaagcccaaggccatcgtgcacaccgagaaagtgaacatgatgagcctgaccgtgctgggcctgcggatgctgttcgccaaaaccgtggccgtgaacttcctgctgaccgccaagctgttcttcctccgcgccaagagaagcggatctggcgtgaagcagaccctgaatttcgacctgctgaagctggctggcgacgtggaatccaacccaggccctactagtatggactggatttggcgcatccttttccttgtcggcgctgctaccggcgcgcattccttcgaacaggtgcagctggtgcagtctggcgctgaagtgaagaaacctggggccagcgtgaaggtgtcctgcaaggccagcggctacacctttgccagccagtggatgcactggatgagacaggcccctggacagggcctggaatggatcggctggatcaaccccggcaacgtgaacaccaagtacaacgagaagttcaagggcagagccaccctgacagtggacaccagcaccaacaccgcctacatggaactgagcagcctgcggagcgaggacaccgccgtgtattattgcgccagaagcacctggtacagacccctggattattggggccagggaacccttgtgaccgtgtcctctacgcgtgaggacctgaagaacgtgttcccacctgaggtggccgtgttcgagcctagcgaggccgagatcagccacacccagaaagccaccctcgtgtgcctggctaccggcttctaccccgaccatgtggaactgtcttggtgggtcaacggcaaagaggtgcacagcggcgtgtgtaccgacccccagccactgaaagaacagcccgccctgaacgacagccggtactgcctgagcagcagactgagagtgtccgccaccttctggcagaacccccggaaccacttcagatgccaggtgcagttctacggcctgagcgagaacgacgagtggacccaggacagagccaagcccgtgacccagatcgtgtctgccgaagcctggggcagagccgatgatgtgattaagatccactggcaggaaaagaagtccaacaccatcctgggcagccaggaaggcaacaccatgaagaccaacgacacctacatgaagttcagctggctgaccgtgcccgagaagtccctggacaaagaacacagatgcatcgtgcggcacgaaaacaacaagaacggcgtggaccaggaaatcatcttcccacccatcaagaccgatgtgattacaatggaccccaaggacaactgctccaaggacgccaacgataccctgctgctccagctgaccaacaccagcgcctactacatgtacttgttgctgctgctgaagtccgtggtgtacttcgccatcatcacatgctgcctgctgcggagaaccgccttctgctgcaacggcgagaagtct

SEQ ID NO: 7546 - DNA, 2592 bp, synthetic construct
  source 1..2592: mol_type = other DNA
atggccttaccagtgaccgccttgctcctgccgctggccttgctgctccacgccgccaggccggaagtgcagctggttgaatctggcggaggactggttcagcctggcggatctctgagactgtcttgtgccgccagcggcttcagcttcagcgacttttggatgagctgggtccgacaggcccctggcaaaggacttgaatgggtcgccacaatcagccaggccggcagcgagaaggactacgtggactctgtgaagggcagattcaccatcagccgggacaacgccaagaagtccctgtacctccagatgaacagcctgagagccgaggacaccgccgtgtactattgtgcctctggcgtgtacagcttcgactacagaggccagggcaccctggtcacagtctcttctggtaccggcggaggcggatctggcggcggaggtagcggtggcggaggatctgaattcgaccacatcgtgctgacccagagccctagcagcctgtctgccagcctgggcgacagagtgaccatcagctgtagagccagccaggacatcagcacctacctgaactggtatcagcagaaacccgacggcaccgtgaagctgctgatcttctacaccagcagactgcacgccggggtgcccagcagattttctggcagcggctctggcacccaccacagcctgaccatctccaacctggaacaggaagatattgctacctacttctgtcagcaaggcaacagcctgcccttcaccttcggcagcggcaccaagctggaaatcaagagactcgagatccagaaccctgatcctgccgtgtaccagctgcgggatagcaagagcagcgacaagagcgtgtgtctgttcaccgacttcgacagccagaccaacgtgtcccagagcaaggactccgacgtgtacatcaccgataagtgcgtgctggacatgcggagcatggacttcaagagcaactccgccgtggcctggtccaacaagtccgatttcgcctgcgccaacgccttcaacaacagcattatccccgaggacacattcttcccaagccccgagagcagcgactccaccgaccacgtgaagcccaaagagacagagaacaccaagcagcccagcaagagctgccacaagcccaaggccatcgtgcacaccgagaaagtgaacatgatgagcctgaccgtgctgggcctgcggatgctgttcgccaaaaccgtggccgtgaacttcctgctgaccgccaagctgttcttcctccgcgccaagagaagcggatctggcgtgaagcagaccctgaatttcgacctgctgaagctggctggcgacgtggaatccaacccaggccctactagtatggactggatttggcgcatccttttccttgtcggcgctgctaccggcgcgcattccttcgaacaggtgcagctgaaagagagcggccctgagctggaaaagcctggggccagcgtgaagattagctgcaaggccagcggctacagcttcaccgcctacagcatgaactgggtcaagcagaacaacggcatgagcctggaatggatcggcagcatcgacccctactacggcgacaccaaatacgcccagaagttcaagggcaaggccaccctgaccgtggataaggccagcagcaccgcctacctccagctgaagtctctgaccagcgaggacagcgccgtgtactactgcgccagacggatgattaccaccggcgactggtacttcgacgtgtggggagccggaaccaccgtgacagtgtctagcacgcgtgaggacctgaagaacgtgttcccacctgaggtggccgtgttcgagcctagcgaggccgagatcagccacacccagaaagccaccctcgtgtgcctggctaccggcttctaccccgaccatgtggaactgtcttggtgggtcaacggcaaagaggtgcacagcggcgtgtgtaccgacccccagccactgaaagaacagcccgccctgaacgacagccggtactgcctgagcagcagactgagagtgtccgccaccttctggcagaacccccggaaccacttcagatgccaggtgcagttctacggcctgagcgagaacgacgagtggacccaggacagagccaagcccgtgacccagatcgtgtctgccgaagcctggggcagagccgatgatgtgattaagatccactggcaggaaaagaagtccaacaccatcctgggcagccaggaaggcaacaccatgaagaccaacgacacctacatgaagttcagctggctgaccgtgcccgagaagtccctggacaaagaacacagatgcatcgtgcggcacgaaaacaacaagaacggcgtggaccaggaaatcatcttcccacccatcaagaccgatgtgattacaatggaccccaaggacaactgctccaaggacgccaacgataccctgctgctccagctgaccaacaccagcgcctactacatgtacttgttgctgctgctgaagtccgtggtgtacttcgccatcatcacatgctgcctgctgcggagaaccgccttctgctgcaacggcgagaagtct

SEQ ID NO: 7547 - DNA, 2592 bp, synthetic construct; identical to SEQ ID NO: 7546
  source 1..2592: mol_type = other DNA

SEQ ID NO: 7548 - DNA, 2592 bp, synthetic construct
  source 1..2592: mol_type = other DNA
atggccttaccagtgaccgccttgctcctgccgctggccttgctgctccacgccgccaggccggaagtgcagctggttgaatctggcggaggactggttcagcctggcggatctctgagactgtcttgtgccgccagcggcttcagcttcagcgacttttggatgagctgggtccgacaggcccctggcaaaggacttgaatgggtcgccacaatcagccaggccggcagcgagaaggactacgtggactctgtgaagggcagattcaccatcagccgggacaacgccaagaagtccctgtacctccagatgaacagcctgagagccgaggacaccgccgtgtactattgtgcctctggcgtgtacagcttcgactacagaggccagggcaccctggtcacagtctcttctggtaccggcggaggcggatctggcggcggaggtagcggtggcggaggatctgaattcgacgagatcgtgctgacacagagccctgccaccctgtctctgagccctggcgaaagagccaccctgagctgtagagccagccagagcgtgtccagctacctggcctggtatcagcagaagcccggccaggctccccggctgctgatctacgatgccagcaatagagccaccggcatccccgccagattttccggctctggcagcggcaccgacttcaccctgaccatcagctccctggaacccgaggacttcgccgtgtactactgccagcagcggagcaactggcccatcacattcggccagggcacccggctggaaatcaaactcgagatccagaaccctgatcctgccgtgtaccagctgcgggatagcaagagcagcgacaagagcgtgtgtctgttcaccgacttcgacagccagaccaacgtgtcccagagcaaggactccgacgtgtacatcaccgataagtgcgtgctggacatgcggagcatggacttcaagagcaactccgccgtggcctggtccaacaagtccgatttcgcctgcgccaacgccttcaacaacagcattatccccgaggacacattcttcccaagccccgagagcagcgactccaccgaccacgtgaagcccaaagagacagagaacaccaagcagcccagcaagagctgccacaagcccaaggccatcgtgcacaccgagaaagtgaacatgatgagcctgaccgtgctgggcctgcggatgctgttcgccaaaaccgtggccgtgaacttcctgctgaccgccaagctgttcttcctccgcgccaagagaagcggatctggcgtgaagcagaccctgaatttcgacctgctgaagctggctggcgacgtggaatccaacccaggccctactagtatggactggatttggcgcatccttttccttgtcggcgctgctaccggcgcgcattccttcgaagaagtgcagctggtggaatcaggcggcggactggtgcagcctggcagaagcctgagactgagctgtgccgccagcggcttcaccttcaacgactacgccatgcactgggtgcgccaggcccctggaaaaggactggaatgggtgtccacaatcagctggaacagcggcagcatcggctacgccgatagcgtgaagggccggttcaccatcagccgggacaacgccaagaagtccctgtacctccagatgaacagcctgcgggccgaggacacagccctgtactattgcgccaaggacatccagtacggcaactactactacggcatggacgtgtggggccagggaaccaccgtgaccgtgtcatctacgcgtgaggacctgaagaacgtgttcccacctgaggtggccgtgttcgagcctagcgaggccgagatcagccacacccagaaagccaccctcgtgtgcctggctaccggcttctaccccgaccatgtggaactgtcttggtgggtcaacggcaaagaggtgcacagcggcgtgtgtaccgacccccagccactgaaagaacagcccgccctgaacgacagccggtactgcctgagcagcagactgagagtgtccgccaccttctggcagaacccccggaaccacttcagatgccaggtgcagttctacggcctgagcgagaacgacgagtggacccaggacagagccaagcccgtgacccagatcgtgtctgccgaagcctggggcagagccgatgatgtgattaagatccactggcaggaaaagaagtccaacaccatcctgggcagccaggaaggcaacaccatgaagaccaacgacacctacatgaagttcagctggctgaccgtgcccgagaagtccctggacaaagaacacagatgcatcgtgcggcacgaaaacaacaagaacggcgtggaccaggaaatcatcttcccacccatcaagaccgatgtgattacaatggaccccaaggacaactgctccaaggacgccaacgataccctgctgctccagctgaccaacaccagcgcctactacatgtacttgttgctgctgctgaagtccgtggtgtacttcgccatcatcacatgctgcctgctgcggagaaccgccttctgctgcaacggcgagaagtct

SEQ ID NO: 7549 - DNA, 2598 bp, synthetic construct
  source 1..2598: mol_type = other DNA
atggccttaccagtgaccgccttgctcctgccgctggccttgctgctccacgccgccaggccggaagtgcagctggttgaatctggcggaggactggttcagcctggcggatctctgagactgtcttgtgccgccagcggcttcagcttcagcgacttttggatgagctgggtccgacaggcccctggcaaaggacttgaatgggtcgccacaatcagccaggccggcagcgagaaggactacgtggactctgtgaagggcagattcaccatcagccgggacaacgccaagaagtccctgtacctccagatgaacagcctgagagccgaggacaccgccgtgtactattgtgcctctggcgtgtacagcttcgactacagaggccagggcaccctggtcacagtctcttctggtaccggcggaggcggatctggcggcggaggtagcggtggcggaggatctgaattcgacatcgtgatgacccagacccccctgagcctgcctgtgacacctggcgagcctgccagcatctcctgcagaagcagcaagagcctgctgcacagcaacggcatcacctacctgtactggtatctgcagaaacccggccagagcccccaactgctgatctaccagatgagcaacctggtgtccggcgtgcccgacagattttctggcagcggctccggcaccgacttcaccctgaagatcagccgggtggaagccgaggacgtgggcgtgtactactgcgcccagaacctggaactgccctacacctttggcggcggaacaaaggtggaaatcaagcggctcgagatccagaaccctgatcctgccgtgtaccagctgcgggatagcaagagcagcgacaagagcgtgtgtctgttcaccgacttcgacagccagaccaacgtgtcccagagcaaggactccgacgtgtacatcaccgataagtgcgtgctggacatgcggagcatggacttcaagagcaactccgccgtggcctggtccaacaagtccgatttcgcctgcgccaacgccttcaacaacagcattatccccgaggacacattcttcccaagccccgagagcagcgactccaccgaccacgtgaagcccaaagagacagagaacaccaagcagcccagcaagagctgccacaagcccaaggccatcgtgcacaccgagaaagtgaacatgatgagcctgaccgtgctgggcctgcggatgctgttcgccaaaaccgtggccgtgaacttcctgctgaccgccaagctgttcttcctccgcgccaagagaagcggatctggcgtgaagcagaccctgaatttcgacctgctgaagctggctggcgacgtggaatccaacccaggccctactagtatggactggatttggcgcatccttttccttgtcggcgctgctaccggcgcgcattccttcgaacaggtgcaactggtgcagagcggagccgaagtgaaaaagcccggcagcagcgtgaaggtgtcctgcaaggccagcggctacgccttcagctactcctggatcaactgggtgcgccaggcccctggacagggcctggaatggatgggcagaatcttccccggcgacggcgacaccgactacaacggcaagttcaagggcagagtgaccatcaccgccgacaagagcaccagcaccgcctacatggaactgagcagcctgcggagcgaggataccgccgtgtactattgtgccagaaacgtgttcgacggctactggctggtgtactggggccagggaacacttgtgaccgtgtccagcacgcgtgaggacctgaagaacgtgttcccacctgaggtggccgtgttcgagcctagcgaggccgagatcagccacacccagaaagccaccctcgtgtgcctggctaccggcttctaccccgaccatgtggaactgtcttggtgggtcaacggcaaagaggtgcacagcggcgtgtgtaccgacccccagccactgaaagaacagcccgccctgaacgacagccggtactgcctgagcagcagactgagagtgtccgccaccttctggcagaacccccggaaccacttcagatgccaggtgcagttctacggcctgagcgagaacgacgagtggacccaggacagagccaagcccgtgacccagatcgtgtctgccgaagcctggggcagagccgatgatgtgattaagatccactggcaggaaaagaagtccaacaccatcctgggcagccaggaaggcaacaccatgaagaccaacgacacctacatgaagttcagctggctgaccgtgcccgagaagtccctggacaaagaacacagatgcatcgtgcggcacgaaaacaacaagaacggcgtggaccaggaaatcatcttcccacccatcaagaccgatgtgattacaatggaccccaaggacaactgctccaaggacgccaacgataccctgctgctccagctgaccaacaccagcgcctactacatgtacttgttgctgctgctgaagtccgtggtgtacttcgccatcatcacatgctgcctgctgcggagaaccgccttctgctgcaacggcgagaagtct

SEQ ID NO: 7550 - DNA, 2601 bp, synthetic construct
  source 1..2601: mol_type = other DNA
atggccttaccagtgaccgccttgctcctgccgctggccttgctgctccacgccgccaggccggaagtgcagctggttgaatctggcggaggactggttcagcctggcggatctctgagactgtcttgtgccgccagcggcttcagcttcagcgacttttggatgagctgggtccgacaggcccctggcaaaggacttgaatgggtcgccacaatcagccaggccggcagcgagaaggactacgtggactctgtgaagggcagattcaccatcagccgggacaacgccaagaagtccctgtacctccagatgaacagcctgagagccgaggacaccgccgtgtactattgtgcctctggcgtgtacagcttcgactacagaggccagggcaccctggtcacagtctcttctggtaccggcggaggcggatctggcggcggaggtagcggtggcggaggatctgaattcgacatccagatgacccagagccccagcagcctgtctgccagcgtgggcgacagagtgaccatcacctgtcggagcagccagagcatcgtgcactccgtgggcaacaccttcctggaatggtatcagcagaagcccggcaaggcccccaagctgctgatctacaaggtgtccaacagattcagcggcgtgcccagcaggtttagcggctctggcagcggcaccgacttcaccctgaccatctctagcctccagcccgaggacttcgccacctactactgttttcaaggcagccagttcccctacaccttcggccagggaacaaaggtggaaatcaagcggctcgagatccagaaccctgatcctgccgtgtaccagctgcgggatagcaagagcagcgacaagagcgtgtgtctgttcaccgacttcgacagccagaccaacgtgtcccagagcaaggactccgacgtgtacatcaccgataagtgcgtgctggacatgcggagcatggacttcaagagcaactccgccgtggcctggtccaacaagtccgatttcgcctgcgccaacgccttcaacaacagcattatccccgaggacacattcttcccaagccccgagagcagcgactccaccgaccacgtgaagcccaaagagacagagaacaccaagcagcccagcaagagctgccacaagcccaaggccatcgtgcacaccgagaaagtgaacatgatgagcctgaccgtgctgggcctgcggatgctgttcgccaaaaccgtggccgtgaacttcctgctgaccgccaagctgttcttcctccgcgccaagagaagcggatctggcgtgaagcagaccctgaatttcgacctgctgaagctggctggcgacgtggaatccaacccaggccctactagtatggactggatttggcgcatccttttccttgtcggcgctgctaccggcgcgcattccttcgaagaagtgcaactggtggaaagcggaggcggcctggtgcagcctggcggatctctgagactgagctgtgccgccagcggctacgagttcagccggtcctggatgaactgggtgcgccaggcccctggcaagggactggaatgggtgggaagaatctaccccggcgacggcgacaccaactacagcggcaagttcaagggccggttcaccatcagcgccgacaccagcaagaacaccgcctacctccagatgaacagcctgcgggccgaggataccgccgtgtactactgtgccagagatggcagctcctgggactggtacttcgacgtgtggggacagggaacccttgtgaccgtgtccagcacgcgtgaggacctgaagaacgtgttcccacctgaggtggccgtgttcgagcctagcgaggccgagatcagccacacccagaaagccaccctcgtgtgcctggctaccggcttctaccccgaccatgtggaactgtcttggtgggtcaacggcaaagaggtgcacagcggcgtgtgtaccgacccccagccactgaaagaacagcccgccctgaacgacagccggtactgcctgagcagcagactgagagtgtccgccaccttctggcagaacccccggaaccacttcagatgccaggtgcagttctacggcctgagcgagaacgacgagtggacccaggacagagccaagcccgtgacccagatcgtgtctgccgaagcctggggcagagccgatgatgtgattaagatccactggcaggaaaagaagtccaacaccatcctgggcagccaggaaggcaacaccatgaagaccaacgacacctacatgaagttcagctggctgaccgtgcccgagaagtccctggacaaagaacacagatgcatcgtgcggcacgaaaacaacaagaacggcgtggaccaggaaatcatcttcccacccatcaagaccgatgtgattacaatggaccccaaggacaactgctccaaggacgccaacgataccctgctgctccagctgaccaacaccagcgcctactacatgtacttgttgctgctgctgaagtccgtggtgtacttcgccatcatcacatgctgcctgctgcggagaaccgccttctgctgcaacggcgagaagtct

SEQ ID NO: 7551 - DNA, 2595 bp, synthetic construct
  source 1..2595: mol_type = other DNA
atggccttaccagtgaccgccttgctcctgccgctggccttgctgctccacgccgccaggccggaagtgcagctggttgaatctggcggaggactggttcagcctggcggatctctgagactgtcttgtgccgccagcggcttcagcttcagcgacttttggatgagctgggtccgacaggcccctggcaaaggacttgaatgggtcgccacaatcagccaggccggcagcgagaaggactacgtggactctgtgaagggcagattcaccatcagccgggacaacgccaagaagtccctgtacctccagatgaacagcctgagagccgaggacaccgccgtgtactattgtgcctctggcgtgtacagcttcgactacagaggccagggcaccctggtcacagtctcttctggtaccggcggaggcggatctggcggcggaggtagcggtggcggaggatctgaattcgacatccagatgacccagagccccagcagcctgtctgccagcgtgggcgacagagtgaccatcacctgtagagccagccagaccatctggtcctacctgaactggtatcagcagaggcccggcaaggcccccaacctgctgatctatgccgccagctctctccagagcggcgtgcccagcagattttccggcagaggcagcggcaccgacttcaccctgaccatcagttccttgcaggccgaggacttcgccacctactactgccagcagagctacagcatcccccagattttcggccagggcaccaagctggaaatcaagctcgagatccagaaccctgatcctgccgtgtaccagctgcgggatagcaagagcagcgacaagagcgtgtgtctgttcaccgacttcgacagccagaccaacgtgtcccagagcaaggactccgacgtgtacatcaccgataagtgcgtgctggacatgcggagcatggacttcaagagcaactccgccgtggcctggtccaacaagtccgatttcgcctgcgccaacgccttcaacaacagcattatccccgaggacacattcttcccaagccccgagagcagcgactccaccgaccacgtgaagcccaaagagacagagaacaccaagcagcccagcaagagctgccacaagcccaaggccatcgtgcacaccgagaaagtgaacatgatgagcctgaccgtgctgggcctgcggatgctgttcgccaaaaccgtggccgtgaacttcctgctgaccgccaagctgttcttcctccgcgccaagagaagcggatctggcgtgaagcagaccctgaatttcgacctgctgaagctggctggcgacgtggaatccaacccaggccctactagtatggactggatttggcgcatccttttccttgtcggcgctgctaccggcgcgcattccttcgaacaggtgcagctccagcagtctggacccggcctcgtgaagcctagccagacactgagcctgacctgcgccatcagcggcgatagcgtgtccagcaatagcgccgcctggaactggatcagacagtccccctctcggggcctggaatggctgggccggacctactaccgcagcaagtggtacaacgactacgccgtgtccgtgaagtcccggatcaccatcaaccccgacaccagcaagaaccagttctccttgcaactgaacagcgtgacccccgaggacaccgccgtgtactactgcgccagagaagtgaccggcgacctggaagatgccttcgacatctggggccagggaacaatggtcacagtgtccagcacgcgtgaggacctgaagaacgtgttcccacctgaggtggccgtgttcgagcctagcgaggccgagatcagccacacccagaaagccaccctcgtgtgcctggctaccggcttctaccccgaccatgtggaactgtcttggtgggtcaacggcaaagaggtgcacagcggcgtgtgtaccgacccccagccactgaaagaacagcccgccctgaacgacagccggtactgcctgagcagcagactgagagtgtccgccaccttctggcagaacccccggaaccacttcagatgccaggtgcagttctacggcctgagcgagaacgacgagtggacccaggacagagccaagcccgtgacccagatcgtgtctgccgaagcctggggcagagccgatgatgtgattaagatccactggcaggaaaagaagtccaacaccatcctgggcagccaggaaggcaacaccatgaagaccaacgacacctacatgaagttcagctggctgaccgtgcccgagaagtccctggacaaagaacacagatgcatcgtgcggcacgaaaacaacaagaacggcgtggaccaggaaatcatcttcccacccatcaagaccgatgtgattacaatggaccccaaggacaactgctccaaggacgccaacgataccctgctgctccagctgaccaacaccagcgcctactacatgtacttgttgctgctgctgaagtccgtggtgtacttcgccatcatcacatgctgcctgctgcggagaaccgccttctgctgcaacggcgagaagtct

SEQ ID NO: 7552 - DNA, 2574 bp, synthetic construct
  source 1..2574: mol_type = other DNA
atggccttaccagtgaccgccttgctcctgccgctggccttgctgctccacgccgccaggccggaagtgcagctggttgaatctggcggaggactggttcagcctggcggatctctgagactgtcttgtgccgccagcggcttcagcttcagcgacttttggatgagctgggtccgacaggcccctggcaaaggacttgaatgggtcgccacaatcagccaggccggcagcgagaaggactacgtggactctgtgaagggcagattcaccatcagccgggacaacgccaagaagtccctgtacctccagatgaacagcctgagagccgaggacaccgccgtgtactattgtgcctctggcgtgtacagcttcgactacagaggccagggcaccctggtcacagtctcttctggtaccggcggaggcggatctggcggcggaggtagcggtggcggaggatctgaattcgacatccagatgacccagagccccgccaccatcgagaacacaagcctgtctgccagcgtgggcgacagagtgaccatcacctgtagagccagccagggcatcagctcttggctgacctggtatcagcagaagcccgagaaggcccccaagagcctgatctacgccgccagctctctgcagtctggcgtgcccagcagattttccggcagcggctctggcaccgacttcaccctgacaatcagcagcctgcagcccgaggacttcgccacctactactgccagcagtacgacagctaccccatcaccttcggccagggcacccggctggaaatcaagctcgagatccagaaccctgatcctgccgtgtaccagctgcgggatagcaagagcagcgacaagagcgtgtgtctgttcaccgacttcgacagccagaccaacgtgtcccagagcaaggactccgacgtgtacatcaccgataagtgcgtgctggacatgcggagcatggacttcaagagcaactccgccgtggcctggtccaacaagtccgatttcgcctgcgccaacgccttcaacaacagcattatccccgaggacacattcttcccaagccccgagagcagcgactccaccgaccacgtgaagcccaaagagacagagaacaccaagcagcccagcaagagctgccacaagcccaaggccatcgtgcacaccgagaaagtgaacatgatgagcctgaccgtgctgggcctgcggatgctgttcgccaaaaccgtggccgtgaacttcctgctgaccgccaagctgttcttcctccgcgccaagagaagcggatctggcgtgaagcagaccctgaatttcgacctgctgaagctggctggcgacgtggaatccaacccaggccctactagtatggactggatttggcgcatccttttccttgtcggcgctgctaccggcgcgcattccttcgaacaggtgcaactgcagcagtggggagccggactgctgaagcctagcgagacactgagcctgacctgcgccgtgtacggcggcagcttcagcgcctactattggagctggatcagacagccccctggcaagggcctggaatggatcggcgacatcaatcacggcggaggcaccaactacaaccccagcctgaagtcccgcgtgaccatctccgtggacaccagcaagaaccagttctccctgaagctgaacagcgtgacagccgccgacacagccgtgtactactgtgccagcctgaccgcctattggggccagggatctcttgtgaccgtgtccagcacgcgtgaggacctgaagaacgtgttcccacctgaggtggccgtgttcgagcctagcgaggccgagatcagccacacccagaaagccaccctcgtgtgcctggctaccggcttctaccccgaccatgtggaactgtcttggtgggtcaacggcaaagaggtgcacagcggcgtgtgtaccgacccccagccactgaaagaacagcccgccctgaacgacagccggtactgcctgagcagcagactgagagtgtccgccaccttctggcagaacccccggaaccacttcagatgccaggtgcagttctacggcctgagcgagaacgacgagtggacccaggacagagccaagcccgtgacccagatcgtgtctgccgaagcctggggcagagccgatgatgtgattaagatccactggcaggaaaagaagtccaacaccatcctgggcagccaggaaggcaacaccatgaagaccaacgacacctacatgaagttcagctggctgaccgtgcccgagaagtccctggacaaagaacacagatgcatcgtgcggcacgaaaacaacaagaacggcgtggaccaggaaatcatcttcccacccatcaagaccgatgtgattacaatggaccccaaggacaactgctccaaggacgccaacgataccctgctgctccagctgaccaacaccagcgcctactacatgtacttgttgctgctgctgaagtccgtggtgtacttcgccatcatcacatgctgcctgctgcggagaaccgccttctgctgcaacggcgagaagtct

SEQ ID NO: 7553 - DNA, 2589 bp, synthetic construct
  source 1..2589: mol_type = other DNA
atggccttaccagtgaccgccttgctcctgccgctggccttgctgctccacgccgccaggccggaagtgcagctggttgaatctggcggaggactggttcagcctggcggatctctgagactgtcttgtgccgccagcggcttcagcttcagcgacttttggatgagctgggtccgacaggcccctggcaaaggacttgaatgggtcgccacaatcagccaggccggcagcgagaaggactacgtggactctgtgaagggcagattcaccatcagccgggacaacgccaagaagtccctgtacctccagatgaacagcctgagagccgaggacaccgccgtgtactattgtgcctctggcgtgtacagcttcgactacagaggccagggcaccctggtcacagtctcttctggtaccggcggaggcggatctggcggcggaggtagcggtggcggaggatctgaattcgacgagatcgtgctgacccagagccctgatagcctggccgtgtctctgggcgagagagccaccatcaactgcaaggccagccagagcgtggacttcgacggcgacagctacctgaactggtatcagcagaagcccggccagccccccaaggtgctgatctatgccgccagcacactgcagagcggcgtgcccagcagattttctggcagcggctccggcaccgacttcaccctgaccatcaacagcctggaagccgaggacgccgccacctactactgccagcagagcaacgaggacccctggacctttggcggcggaacaaaggtggaaatcaagctcgagatccagaaccctgatcctgccgtgtaccagctgcgggatagcaagagcagcgacaagagcgtgtgtctgttcaccgacttcgacagccagaccaacgtgtcccagagcaaggactccgacgtgtacatcaccgataagtgcgtgctggacatgcggagcatggacttcaagagcaactccgccgtggcctggtccaacaagtccgatttcgcctgcgccaacgccttcaacaacagcattatccccgaggacacattcttcccaagccccgagagcagcgactccaccgaccacgtgaagcccaaagagacagagaacaccaagcagcccagcaagagctgccacaagcccaaggccatcgtgcacaccgagaaagtgaacatgatgagcctgaccgtgctgggcctgcggatgctgttcgccaaaaccgtggccgtgaacttcctgctgaccgccaagctgttcttcctccgcgccaagagaagcggatctggcgtgaagcagaccctgaatttcgacctgctgaagctggctggcgacgtggaatccaacccaggccctactagtatggactggatttggcgcatccttttccttgtcggcgctgctaccggcgcgcattccttcgaacaggtgcaactggtgcagtccggcgctgaagtgaagaaacctggggccagcgtgaaggtgtcctgcaaggtgtccggctacacctttaccgactactacattacctgggtgcgccaggcccctggacaggccctggaatggatgggctggatctaccccggcagcggcaacaccaagtacagccagaagttccagggcagattcgtgttcagcgtggacaccagcgccagcaccgcctacctgcaactgtctagcctgaaggccgaagataccgccgtgtactactgcgccaactacggcaactattggttcgcctattggggccagggaacccttgtgaccgtgtcctctacgcgtgaggacctgaagaacgtgttcccacctgaggtggccgtgttcgagcctagcgaggccgagatcagccacacccagaaagccaccctcgtgtgcctggctaccggcttctaccccgaccatgtggaactgtcttggtgggtcaacggcaaagaggtgcacagcggcgtgtgtaccgacccccagccactgaaagaacagcccgccctgaacgacagccggtactgcctgagcagcagactgagagtgtccgccaccttctggcagaacccccggaaccacttcagatgccaggtgcagttctacggcctgagcgagaacgacgagtggacccaggacagagccaagcccgtgacccagatcgtgtctgccgaagcctggggcagagccgatgatgtgattaagatccactggcaggaaaagaagtccaacaccatcctgggcagccaggaaggcaacaccatgaagaccaacgacacctacatgaagttcagctggctgaccgtgcccgagaagtccctggacaaagaacacagatgcatcgtgcggcacgaaaacaacaagaacggcgtggaccaggaaatcatcttcccacccatcaagaccgatgtgattacaatggaccccaaggacaactgctccaaggacgccaacgataccctgctgctccagctgaccaacaccagcgcctactacatgtacttgttgctgctgctgaagtccgtggtgtacttcgccatcatcacatgctgcctgctgcggagaaccgccttctgctgcaacggcgagaagtct

SEQ ID NO: 7554 - DNA, 2580 bp, synthetic construct
  source 1..2580: mol_type = other DNA
atggccttaccagtgaccgccttgctcctgccgctggccttgctgctccacgccgccaggccggaagtgcagctggttgaatctggcggaggactggttcagcctggcggatctctgagactgtcttgtgccgccagcggcttcagcttcagcgacttttggatgagctgggtccgacaggcccctggcaaaggacttgaatgggtcgccacaatcagccaggccggcagcgagaaggactacgtggactctgtgaagggcagattcaccatcagccgggacaacgccaagaagtccctgtacctccagatgaacagcctgagagccgaggacaccgccgtgtactattgtgcctctggcgtgtacagcttcgactacagaggccagggcaccctggtcacagtctcttctggtaccggcggaggcggatctggcggcggaggtagcggtggcggaggatctgaattcgacatccagatgacccagagccccagcagcctgtctgccagcgtgggcgacagagtgaccatcacctgtagagccagccagggcatcagctcttggctggcctggtatcagcagaagcccgagaaggcccccaagagcctgatctacgccgcctctagtctccagagcggcgtgcccagcagattttctggcagcggctccggcaccgacttcaccctgacaatcagctccctccagcccgaggacttcgccacctactactgccagcagtacaacagctaccctcccacctttggcggaggcaccaaggtggaaatcaagctcgagatccagaaccctgatcctgccgtgtaccagctgcgggatagcaagagcagcgacaagagcgtgtgtctgttcaccgacttcgacagccagaccaacgtgtcccagagcaaggactccgacgtgtacatcaccgataagtgcgtgctggacatgcggagcatggacttcaagagcaactccgccgtggcctggtccaacaagtccgatttcgcctgcgccaacgccttcaacaacagcattatccccgaggacacattcttcccaagccccgagagcagcgactccaccgaccacgtgaagcccaaagagacagagaacaccaagcagcccagcaagagctgccacaagcccaaggccatcgtgcacaccgagaaagtgaacatgatgagcctgaccgtgctgggcctgcggatgctgttcgccaaaaccgtggccgtgaacttcctgctgaccgccaagctgttcttcctccgcgccaagagaagcggatctggcgtgaagcagaccctgaatttcgacctgctgaagctggctggcgacgtggaatccaacccaggccctactagtatggactggatttggcgcatccttttccttgtcggcgctgctaccggcgcgcattccttcgaagaagtgcaactggtgcagtctggcggagggctggtgcatcctgggggaagcctgagactgagctgtgccggctctggcttcgccttcagcagcagcaccatgcactggatcagacaggcccctggcaagggcctggaatggatcagcctgatcggaagcggagggggcatctactacggcgacagcgtgaagggccggttcaccatcagccgggacaacgccaagaacagcctgtacctccagatgaactccctgcgggccgaggacatggccgtgtactattgtgtgcggggctacttcgactgggtggactacttcgattactggggccagggcaccctcgtgaccgtgtcatctacgcgtgaggacctgaagaacgtgttcccacctgaggtggccgtgttcgagcctagcgaggccgagatcagccacacccagaaagccaccctcgtgtgcctggctaccggcttctaccccgaccatgtggaactgtcttggtgggtcaacggcaaagaggtgcacagcggcgtgtgtaccgacccccagccactgaaagaacagcccgccctgaacgacagccggtactgcctgagcagcagactgagagtgtccgccaccttctggcagaacccccggaaccacttcagatgccaggtgcagttctacggcctgagcgagaacgacgagtggacccaggacagagccaagcccgtgacccagatcgtgtctgccgaagcctggggcagagccgatgatgtgattaagatccactggcaggaaaagaagtccaacaccatcctgggcagccaggaaggcaacaccatgaagaccaacgacacctacatgaagttcagctggctgaccgtgcccgagaagtccctggacaaagaacacagatgcatcgtgcggcacgaaaacaacaagaacggcgtggaccaggaaatcatcttcccacccatcaagaccgatgtgattacaatggaccccaaggacaactgctccaaggacgccaacgataccctgctgctccagctgaccaacaccagcgcctactacatgtacttgttgctgctgctgaagtccgtggtgtacttcgccatcatcacatgctgcctgctgcggagaaccgccttctgctgcaacggcgagaagtct

SEQ ID NO: 7555 - DNA, 2610 bp, synthetic construct
  source 1..2610: mol_type = other DNA
atggccttaccagtgaccgccttgctcctgccgctggccttgctgctccacgccgccaggccggaagtgcagctggttgaatctggcggaggactggttcagcctggcggatctctgagactgtcttgtgccgccagcggcttcagcttcagcgacttttggatgagctgggtccgacaggcccctggcaaaggacttgaatgggtcgccacaatcagccaggccggcagcgagaaggactacgtggactctgtgaagggcagattcaccatcagccgggacaacgccaagaagtccctgtacctccagatgaacagcctgagagccgaggacaccgccgtgtactattgtgcctctggcgtgtacagcttcgactacagaggccagggcaccctggtcacagtctcttctggtaccggcggaggcggatctggcggcggaggtagcggtggcggaggatctgaattcgacgacatcgtgatgacacagtcaccagatagcctcaccgtctccctgggggagcggaccaccattaattgtaaatccagccaaagcgtgctggactcaagcaagaacaagaatagcctcgcctggtatcagcagaagcccggtcagcctccaaagctgctgctttcttgggcctccaccagagagtccgggattcctgataggtttagtggttcaggctccggcacagattttactctgaccattgattctctccagccagaggattctgcaacttattactgccagcaaagcgcccactttcctataacttttggccagggaacccgacttgaaatcaagctcgagatccagaaccctgatcctgccgtgtaccagctgcgggatagcaagagcagcgacaagagcgtgtgtctgttcaccgacttcgacagccagaccaacgtgtcccagagcaaggactccgacgtgtacatcaccgataagtgcgtgctggacatgcggagcatggacttcaagagcaactccgccgtggcctggtccaacaagtccgatttcgcctgcgccaacgccttcaacaacagcattatccccgaggacacattcttcccaagccccgagagcagcgactccaccgaccacgtgaagcccaaagagacagagaacaccaagcagcccagcaagagctgccacaagcccaaggccatcgtgcacaccgagaaagtgaacatgatgagcctgaccgtgctgggcctgcggatgctgttcgccaaaaccgtggccgtgaacttcctgctgaccgccaagctgttcttcctccgcgccaagagaagcggatctggcgtgaagcagaccctgaatttcgacctgctgaagctggctggcgacgtggaatccaacccaggccctactagtatggactggatttggcgcatccttttccttgtcggcgctgctaccggcgcgcattccttcgaacaggtgcagctggtgcagagcggtgccgaagtgaagaaaccaggtgcatccgttaaagtttcatgtaaggctagtggatataccttcaccaattacggaatgaactgggtgaaacaggcccctggccagggactgaagtggatggggtggattaacacctacaccggggagccgacttatgcagacgactttaaggggcgggtcacgatgacctccgacacctccaccagtaccgcctacctggagctgcacaaccttaggtcagacgataccgccgtgtattactgtgcccgatggtcttggtccgacggatactatgtctacttcgactattggggccaggggaccacagttaccgtgtcctctacgcgtgaggacctgaagaacgtgttcccacctgaggtggccgtgttcgagcctagcgaggccgagatcagccacacccagaaagccaccctcgtgtgcctggctaccggcttctaccccgaccatgtggaactgtcttggtgggtcaacggcaaagaggtgcacagcggcgtgtgtaccgacccccagccactgaaagaacagcccgccctgaacgacagccggtactgcctgagcagcagactgagagtgtccgccaccttctggcagaacccccggaaccacttcagatgccaggtgcagttctacggcctgagcgagaacgacgagtggacccaggacagagccaagcccgtgacccagatcgtgtctgccgaagcctggggcagagccgatgatgtgattaagatccactggcaggaaaagaagtccaacaccatcctgggcagccaggaaggcaacaccatgaagaccaacgacacctacatgaagttcagctggctgaccgtgcccgagaagtccctggacaaagaacacagatgcatcgtgcggcacgaaaacaacaagaacggcgtggaccaggaaatcatcttcccacccatcaagaccgatgtgattacaatggaccccaaggacaactgctccaaggacgccaacgataccctgctgctccagctgaccaacaccagcgcctactacatgtacttgttgctgctgctgaagtccgtggtgtacttcgccatcatcacatgctgcctgctgcggagaaccgccttctgctgcaacggcgagaagtct

SEQ ID NO: 7556 - DNA, 2598 bp, synthetic construct
  source 1..2598: mol_type = other DNA
atggccttaccagtgaccgccttgctcctgccgctggccttgctgctccacgccgccaggccggaagtgcagctggttgaatctggcggaggactggttcagcctggcggatctctgagactgtcttgtgccgccagcggcttcagcttcagcgacttttggatgagctgggtccgacaggcccctggcaaaggacttgaatgggtcgccacaatcagccaggccggcagcgagaaggactacgtggactctgtgaagggcagattcaccatcagccgggacaacgccaagaagtccctgtacctccagatgaacagcctgagagccgaggacaccgccgtgtactattgtgcctctggcgtgtacagcttcgactacagaggccagggcaccctggtcacagtctcttctggtaccggcggaggcggatctggcggcggaggtagcggtggcggaggatctgaattcgacgagatcgtgctgacacagagccctggaagcctggccgtgtctcctggcgagcgcgtgacaatgagctgcaagagcagccagagcgtgttcttcagcagctcccagaagaactacctggcctggtatcagcagatccccggccagagccccagactgctgatctactgggccagcaccagagaaagcggcgtgcccgatagattcaccggcagcggctctggcaccgacttcaccctgacaatcagcagcgtgcagcccgaggacctggctatctactactgccaccagtacctgagcagccggaccttcggccagggcaccaagctggaaatcaagagactcgagatccagaaccctgatcctgccgtgtaccagctgcgggatagcaagagcagcgacaagagcgtgtgtctgttcaccgacttcgacagccagaccaacgtgtcccagagcaaggactccgacgtgtacatcaccgataagtgcgtgctggacatgcggagcatggacttcaagagcaactccgccgtggcctggtccaacaagtccgatttcgcctgcgccaacgccttcaacaacagcattatccccgaggacacattcttcccaagccccgagagcagcgactccaccgaccacgtgaagcccaaagagacagagaacaccaagcagcccagcaagagctgccacaagcccaaggccatcgtgcacaccgagaaagtgaacatgatgagcctgaccgtgctgggcctgcggatgctgttcgccaaaaccgtggccgtgaacttcctgctgaccgccaagctgttcttcctccgcgccaagagaagcggatctggcgtgaagcagaccctgaatttcgacctgctgaagctggctggcgacgtggaatccaacccaggccctactagtatggactggatttggcgcatccttttccttgtcggcgctgctaccggcgcgcattccttcgaacaggtgcaactgcagcagcctggcgctgaggtcgtgaagccaggcgcttccgtgaagatgtcctgcaaggccagcggctacaccttcaccagctactacatccactggatcaagcagacccctggacagggcctggaatgggtgggagtgatctaccccggcaacgacgacatcagctacaaccagaagttccagggcaaggccaccctgaccgccgacaagtctagcaccaccgcctacatgcaactgtccagcctgaccagcgaggacagcgccgtgtactactgcgccagagaagtgcggctgcggtacttcgatgtgtggggccagggaaccaccgtgaccgtgtcatctacgcgtgaggacctgaagaacgtgttcccacctgaggtggccgtgttcgagcctagcgaggccgagatcagccacacccagaaagccaccctcgtgtgcctggctaccggcttctaccccgaccatgtggaactgtcttggtgggtcaacggcaaagaggtgcacagcggcgtgtgtaccgacccccagccactgaaagaacagcccgccctgaacgacagccggtactgcctgagcagcagactgagagtgtccgccaccttctggcagaacccccggaaccacttcagatgccaggtgcagttctacggcctgagcgagaacgacgagtggacccaggacagagccaagcccgtgacccagatcgtgtctgccgaagcctggggcagagccgatgatgtgattaagatccactggcaggaaaagaagtccaacaccatcctgggcagccaggaaggcaacaccatgaagaccaacgacacctacatgaagttcagctggctgaccgtgcccgagaagtccctggacaaagaacacagatgcatcgtgcggcacgaaaacaacaagaacggcgtggaccaggaaatcatcttcccacccatcaagaccgatgtgattacaatggaccccaaggacaactgctccaaggacgccaacgataccctgctgctccagctgaccaacaccagcgcctactacatgtacttgttgctgctgctgaagtccgtggtgtacttcgccatcatcacatgctgcctgctgcggagaaccgccttctgctgcaacggcgagaagtct

SEQ ID NO: 7557 - DNA, 2610 bp, synthetic construct
  source 1..2610: mol_type = other DNA
atggccttaccagtgaccgccttgctcctgccgctggccttgctgctccacgccgccaggccggaagtgcagctggttgaatctggcggaggactggttcagcctggcggatctctgagactgtcttgtgccgccagcggcttcagcttcagcgacttttggatgagctgggtccgacaggcccctggcaaaggacttgaatgggtcgccacaatcagccaggccggcagcgagaaggactacgtggactctgtgaagggcagattcaccatcagccgggacaacgccaagaagtccctgtacctccagatgaacagcctgagagccgaggacaccgccgtgtactattgtgcctctggcgtgtacagcttcgactacagaggccagggcaccctggtcacagtctcttctggtaccggcggaggcggatctggcggcggaggtagcggtggcggaggatctgaattcgatgtgctgctgacccagagccctctgagcctgcctgtgacactgggacagcctgccagcatctcctgtcggagcagccagaccatcgtgcacagcaacggcaacacctacctggaatggttccagcagcggccaggccagagccccagactgctgatctaccaggtgtccaacagattcagcggcgtgcccgacagattctccggcagcggctctggcaccgacttcaccctgaagatcagccgggtggaagccgaggacgtgggcgtgtactactgttttcaaggcagccacgtgccccggacctttggcggaggaacaaaggtggaaatcaagagagccctcgagatccagaaccctgatcctgccgtgtaccagctgcgggatagcaagagcagcgacaagagcgtgtgtctgttcaccgacttcgacagccagaccaacgtgtcccagagcaaggactccgacgtgtacatcaccgataagtgcgtgctggacatgcggagcatggacttcaagagcaactccgccgtggcctggtccaacaagtccgatttcgcctgcgccaacgccttcaacaacagcattatccccgaggacacattcttcccaagccccgagagcagcgactccaccgaccacgtgaagcccaaagagacagagaacaccaagcagcccagcaagagctgccacaagcccaaggccatcgtgcacaccgagaaagtgaacatgatgagcctgaccgtgctgggcctgcggatgctgttcgccaaaaccgtggccgtgaacttcctgctgaccgccaagctgttcttcctccgcgccaagagaagcggatctggcgtgaagcagaccctgaatttcgacctgctgaagctggctggcgacgtggaatccaacccaggccctactagtatggactggatttggcgcatccttttccttgtcggcgctgctaccggcgcgcattccttcgaacagatccaactggtgcagagcggcagcgagctgaagaaacctggggccagcgtgaaggtgtcctgcaaggccagcggctacacctttaccaactacggcatgaactgggtgcgccaggcccctggacagggcctgaaatggatgggctggatcaacaccaacaccggcgagcctaagtacgccgaagagttcaagggcagattcgccctgagcctggacaccagcgtgtccacagcctacctccagatcaacagcctgaaggccgaggataccgccgtgtacttctgcgccagaggctacggcaactacgccagaggggcttggctggcctattggggccagggaacactcgtgaccgtgtcctctacgcgtgaggacctgaagaacgtgttcccacctgaggtggccgtgttcgagcctagcgaggccgagatcagccacacccagaaagccaccctcgtgtgcctggctaccggcttctaccccgaccatgtggaactgtcttggtgggtcaacggcaaagaggtgcacagcggcgtgtgtaccgacccccagccactgaaagaacagcccgccctgaacgacagccggtactgcctgagcagcagactgagagtgtccgccaccttctggcagaacccccggaaccacttcagatgccaggtgcagttctacggcctgagcgagaacgacgagtggacccaggacagagccaagcccgtgacccagatcgtgtctgccgaagcctggggcagagccgatgatgtgattaagatccactggcaggaaaagaagtccaacaccatcctgggcagccaggaaggcaacaccatgaagaccaacgacacctacatgaagttcagctggctgaccgtgcccgagaagtccctggacaaagaacacagatgcatcgtgcggcacgaaaacaacaagaacggcgtggaccaggaaatcatcttcccacccatcaagaccgatgtgattacaatggaccccaaggacaactgctccaaggacgccaacgataccctgctgctccagctgaccaacaccagcgcctactacatgtacttgttgctgctgctgaagtccgtggtgtacttcgccatcatcacatgctgcctgctgcggagaaccgccttctgctgcaacggcgagaagtct

SEQ ID NO: 7558 - DNA, 2565 bp, synthetic construct
  source 1..2565: mol_type = other DNA
atggccttaccagtgaccgccttgctcctgccgctggccttgctgctccacgccgccaggccggaagtgcagctggttgaatctggcggaggactggttcagcctggcggatctctgagactgtcttgtgccgccagcggcttcagcttcagcgacttttggatgagctgggtccgacaggcccctggcaaaggacttgaatgggtcgccacaatcagccaggccggcagcgagaaggactacgtggactctgtgaagggcagattcaccatcagccgggacaacgccaagaagtccctgtacctccagatgaacagcctgagagccgaggacaccgccgtgtactattgtgcctctggcgtgtacagcttcgactacagaggccagggcaccctggtcacagtctcttctggtaccggcggaggcggatctggcggcggaggtagcggtggcggaggatctgaattcgacgagatcgtgctgacacagagccctgccacactctctctgagccctggcgaaagagccaccctgagctgtagcgccagcagcagcatcaactacatctactggctccagcagaagcccggccaggcccccagaatcctgatctacctgaccagcaacctggcctccggcgtgccagccagattttctggcagcggctccggcaccgacttcaccctgacaatcagcagcctggaacccgaggacttcgccgtgtactactgcctccagtggtccagcaaccccctgacctttggcggaggcaccaaggtggaaatcaagctcgagatccagaaccctgatcctgccgtgtaccagctgcgggatagcaagagcagcgacaagagcgtgtgtctgttcaccgacttcgacagccagaccaacgtgtcccagagcaaggactccgacgtgtacatcaccgataagtgcgtgctggacatgcggagcatggacttcaagagcaactccgccgtggcctggtccaacaagtccgatttcgcctgcgccaacgccttcaacaacagcattatccccgaggacacattcttcccaagccccgagagcagcgactccaccgaccacgtgaagcccaaagagacagagaacaccaagcagcccagcaagagctgccacaagcccaaggccatcgtgcacaccgagaaagtgaacatgatgagcctgaccgtgctgggcctgcggatgctgttcgccaaaaccgtggccgtgaacttcctgctgaccgccaagctgttcttcctccgcgccaagagaagcggatctggcgtgaagcagaccctgaatttcgacctgctgaagctggctggcgacgtggaatccaacccaggccctactagtatggactggatttggcgcatccttttccttgtcggcgctgctaccggcgcgcattccttcgaagaagtgcaactggtggaaagcgggggaggacttgtgaagcctggcggctctctgagactgagctgtgccgcctctggcttcaccttcagcagctacgacatgagctgggtgcgccaggctcctggcaagggactggaatgggtgtccaccatcagcagcggcggcagctacacctactacctggacagcatcaagggccggttcaccatctccagagacaacgccaagaacagcctgtacctccagatgaactccctgcgggccgaggacacagccgtgtattattgcgccagacagggcctggattactggggcagaggcacccttgtgaccgtgtcctctacgcgtgaggacctgaagaacgtgttcccacctgaggtggccgtgttcgagcctagcgaggccgagatcagccacacccagaaagccaccctcgtgtgcctggctaccggcttctaccccgaccatgtggaactgtcttggtgggtcaacggcaaagaggtgcacagcggcgtgtgtaccgacccccagccactgaaagaacagcccgccctgaacgacagccggtactgcctgagcagcagactgagagtgtccgccaccttctggcagaacccccggaaccacttcagatgccaggtgcagttctacggcctgagcgagaacgacgagtggacccaggacagagccaagcccgtgacccagatcgtgtctgccgaagcctggggcagagccgatgatgtgattaagatccactggcaggaaaagaagtccaacaccatcctgggcagccaggaaggcaacaccatgaagaccaacgacacctacatgaagttcagctggctgaccgtgcccgagaagtccctggacaaagaacacagatgcatcgtgcggcacgaaaacaacaagaacggcgtggaccaggaaatcatcttcccacccatcaagaccgatgtgattacaatggaccccaaggacaactgctccaaggacgccaacgataccctgctgctccagctgaccaacaccagcgcctactacatgtacttgttgctgctgctgaagtccgtggtgtacttcgccatcatcacatgctgcctgctgcggagaaccgccttctgctgcaacggcgagaagtct

SEQ ID NO: 7559 - DNA, 2592 bp, synthetic construct
  source 1..2592: mol_type = other DNA
atggccttaccagtgaccgccttgctcctgccgctggccttgctgctccacgccgccaggccggaagtgcagctggttgaatctggcggaggactggttcagcctggcggatctctgagactgtcttgtgccgccagcggcttcagcttcagcgacttttggatgagctgggtccgacaggcccctggcaaaggacttgaatgggtcgccacaatcagccaggccggcagcgagaaggactacgtggactctgtgaagggcagattcaccatcagccgggacaacgccaagaagtccctgtacctccagatgaacagcctgagagccgaggacaccgccgtgtactattgtgcctctggcgtgtacagcttcgactacagaggccagggcaccctggtcacagtctcttctggtaccggcggaggcggatctggcggcggaggtagcggtggcggaggatctgaattcgacatcgtgatgacccagagccccgatagcctggccgtgtctctgggagagagagccaccatcaactgccgggccagcaagagcgtgtccaccagcggctacagcttcatgcactggtatcagcagaagcccggccagccccccaagctgctgatctacctggcctccaacctggaaagcggcgtgcccgatagattcagcggcagcggctctggcaccgacttcaccctgaccatcagttctcttcaggccgaggacgtggccgtgtactactgccagcacagcagagaggtgccctggacattcggccagggcacaaaggtggaaatcaagcggctcgagatccagaaccctgatcctgccgtgtaccagctgcgggatagcaagagcagcgacaagagcgtgtgtctgttcaccgacttcgacagccagaccaacgtgtcccagagcaaggactccgacgtgtacatcaccgataagtgcgtgctggacatgcggagcatggacttcaagagcaactccgccgtggcctggtccaacaagtccgatttcgcctgcgccaacgccttcaacaacagcattatccccgaggacacattcttcccaagccccgagagcagcgactccaccgaccacgtgaagcccaaagagacagagaacaccaagcagcccagcaagagctgccacaagcccaaggccatcgtgcacaccgagaaagtgaacatgatgagcctgaccgtgctgggcctgcggatgctgttcgccaaaaccgtggccgtgaacttcctgctgaccgccaagctgttcttcctccgcgccaagagaagcggatctggcgtgaagcagaccctgaatttcgacctgctgaagctggctggcgacgtggaatccaacccaggccctactagtatggactggatttggcgcatccttttccttgtcggcgctgctaccggcgcgcattccttcgaacaggtgcagctggtgcagtctggggccgaagtgaagaaacctggggccagcgtgaaggtgtcctgcaaggccagcggatacacctttaccaactacggcatgaactgggtgcgccaggcccctggacagggcctggaatggatgggctggatcaacacctacaccggcgagcccacatacgccgacgccttcaagggcagattcgccttcagcctggacaccagcacctccaccgcctacctccagatcaacagcctgcggagcgacgacaccgccgtgtattattgcgccagagattacggcgactacgggatggactattggggccagggaaccaccgtgaccgtgtcctctacgcgtgaggacctgaagaacgtgttcccacctgaggtggccgtgttcgagcctagcgaggccgagatcagccacacccagaaagccaccctcgtgtgcctggctaccggcttctaccccgaccatgtggaactgtcttggtgggtcaacggcaaagaggtgcacagcggcgtgtgtaccgacccccagccactgaaagaacagcccgccctgaacgacagccggtactgcctgagcagcagactgagagtgtccgccaccttctggcagaacccccggaaccacttcagatgccaggtgcagttctacggcctgagcgagaacgacgagtggacccaggacagagccaagcccgtgacccagatcgtgtctgccgaagcctggggcagagccgatgatgtgattaagatccactggcaggaaaagaagtccaacaccatcctgggcagccaggaaggcaacaccatgaagaccaacgacacctacatgaagttcagctggctgaccgtgcccgagaagtccctggacaaagaacacagatgcatcgtgcggcacgaaaacaacaagaacggcgtggaccaggaaatcatcttcccacccatcaagaccgatgtgattacaatggaccccaaggacaactgctccaaggacgccaacgataccctgctgctccagctgaccaacaccagcgcctactacatgtacttgttgctgctgctgaagtccgtggtgtacttcgccatcatcacatgctgcctgctgcggagaaccgccttctgctgcaacggcgagaagtct

SEQ ID NO: 7560 - DNA, 2580 bp, synthetic construct
  source 1..2580: mol_type = other DNA
atggccttaccagtgaccgccttgctcctgccgctggccttgctgctccacgccgccaggccggaagtgcagctggttgaatctggcggaggactggttcagcctggcggatctctgagactgtcttgtgccgccagcggcttcagcttcagcgacttttggatgagctgggtccgacaggcccctggcaaaggacttgaatgggtcgccacaatcagccaggccggcagcgagaaggactacgtggactctgtgaagggcagattcaccatcagccgggacaacgccaagaagtccctgtacctccagatgaacagcctgagagccgaggacaccgccgtgtactattgtgcctctggcgtgtacagcttcgactacagaggccagggcaccctggtcacagtctcttctggtaccggcggaggcggatctggcggcggaggtagcggtggcggaggatctgaattcgacatcgtgatgacccagacccccctgaccctgagcgtgacaatcggacagcctgccagcatctcctgcaagagcagccagagcctgctggacagcgacggcaagacctacctgaactggctgctgcagaggccaggccagagccccgagagactgatctacctggtgtccaagctggactccggcgtgcccgatagattcacaggcagcggctccggcaccgacttcaccctgaagatcagccgggtggaagccgaggacctgggcgtgtactgttgttggcagggcacccacttcccttacaccttcggcggagggaccaaggtggaaatcaagggcctcgagatccagaaccctgatcctgccgtgtaccagctgcgggatagcaagagcagcgacaagagcgtgtgtctgttcaccgacttcgacagccagaccaacgtgtcccagagcaaggactccgacgtgtacatcaccgataagtgcgtgctggacatgcggagcatggacttcaagagcaactccgccgtggcctggtccaacaagtccgatttcgcctgcgccaacgccttcaacaacagcattatccccgaggacacattcttcccaagccccgagagcagcgactccaccgaccacgtgaagcccaaagagacagagaacaccaagcagcccagcaagagctgccacaagcccaaggccatcgtgcacaccgagaaagtgaacatgatgagcctgaccgtgctgggcctgcggatgctgttcgccaaaaccgtggccgtgaacttcctgctgaccgccaagctgttcttcctccgcgccaagagaagcggatctggcgtgaagcagaccctgaatttcgacctgctgaagctggctggcgacgtggaatccaacccaggccctactagtatggactggatttggcgcatccttttccttgtcggcgctgctaccggcgcgcattccttcgaacaggtgcaactgcagcagcctggcgctgaacttgtgcggccaggcgcctctgtgaagctgagctgtaaagccagcggctacaccttcaccagctactggatgaactgggtcaagcagcgcccaggccagggcctggaatggatcggaatgatcgaccccagcgacagcgagacacactacaaccacatcttcaaggacaaggccaccctgaccgtggacaagtccagcagcacagcctacctgcaactgtccagcctgaccagcgaggacagcgccgtgtactactgcgcccggaacctgtatctgtggggccagggaacaagcgtgaccgtgtctagcacgcgtgaggacctgaagaacgtgttcccacctgaggtggccgtgttcgagcctagcgaggccgagatcagccacacccagaaagccaccctcgtgtgcctggctaccggcttctaccccgaccatgtggaactgtcttggtgggtcaacggcaaagaggtgcacagcggcgtgtgtaccgacccccagccactgaaagaacagcccgccctgaacgacagccggtactgcctgagcagcagactgagagtgtccgccaccttctggcagaacccccggaaccacttcagatgccaggtgcagttctacggcctgagcgagaacgacgagtggacccaggacagagccaagcccgtgacccagatcgtgtctgccgaagcctggggcagagccgatgatgtgattaagatccactggcaggaaaagaagtccaacaccatcctgggcagccaggaaggcaacaccatgaagaccaacgacacctacatgaagttcagctggctgaccgtgcccgagaagtccctggacaaagaacacagatgcatcgtgcggcacgaaaacaacaagaacggcgtggaccaggaaatcatcttcccacccatcaagaccgatgtgattacaatggaccccaaggacaactgctccaaggacgccaacgataccctgctgctccagctgaccaacaccagcgcctactacatgtacttgttgctgctgctgaagtccgtggtgtacttcgccatcatcacatgctgcctgctgcggagaaccgccttctgctgcaacggcgagaagtct

SEQ ID NO: 7561 - DNA, 2604 bp, synthetic construct
  source 1..2604: mol_type = other DNA
atggccttaccagtgaccgccttgctcctgccgctggccttgctgctccacgccgccaggccggaagtgcagctggttgaatctggcggaggactggttcagcctggcggatctctgagactgtcttgtgccgccagcggcttcagcttcagcgacttttggatgagctgggtccgacaggcccctggcaaaggacttgaatgggtcgccacaatcagccaggccggcagcgagaaggactacgtggactctgtgaagggcagattcaccatcagccgggacaacgccaagaagtccctgtacctccagatgaacagcctgagagccgaggacaccgccgtgtactattgtgcctctggcgtgtacagcttcgactacagaggccagggcaccctggtcacagtctcttctggtaccggcggaggcggatctggcggcggaggtagcggtggcggaggatctgaattcgacatcgtgatgacccagagccccgatagcctggccgtgtctctgggagagagagccaccatcaactgcgagagcagccagagcctgctgaacagcggcaaccagaagaactacctgacctggtatcagcagaagcccggccagccccccaagcccctgatctattgggccagcaccagagaaagcggcgtgcccgatagattcagcggcagcggaagcggcaccgacttcaccctgaccatcagttctcttcaggccgaggacgtggccgtgtactactgccagaacgactacagctacccctacaccttcggccagggcaccaagctggaaatcaagagactcgagatccagaaccctgatcctgccgtgtaccagctgcgggatagcaagagcagcgacaagagcgtgtgtctgttcaccgacttcgacagccagaccaacgtgtcccagagcaaggactccgacgtgtacatcaccgataagtgcgtgctggacatgcggagcatggacttcaagagcaactccgccgtggcctggtccaacaagtccgatttcgcctgcgccaacgccttcaacaacagcattatccccgaggacacattcttcccaagccccgagagcagcgactccaccgaccacgtgaagcccaaagagacagagaacaccaagcagcccagcaagagctgccacaagcccaaggccatcgtgcacaccgagaaagtgaacatgatgagcctgaccgtgctgggcctgcggatgctgttcgccaaaaccgtggccgtgaacttcctgctgaccgccaagctgttcttcctccgcgccaagagaagcggatctggcgtgaagcagaccctgaatttcgacctgctgaagctggctggcgacgtggaatccaacccaggccctactagtatggactggatttggcgcatccttttccttgtcggcgctgctaccggcgcgcattccttcgaagaagtgcagctggtgcagtctggggccgaagtgaagaagcctggcgagagcctgaagatcagctgcaagggcagcggctacagcttcaccgactactacatgaagtgggccagacagatgcccggcaagggcctggaatggatgggcgacatcatccccagcaacggggccaccttctacaaccagaaattcaagggccaagtgaccatctccgccgacaagagcatcagcaccacctacctccagtggtccagcctgaaggccagcgacaccgccatgtactattgcgccagaagccatctgctgcgggccagttggttcgcctattggggccagggaacaatggtcacagtgtccagcacgcgtgaggacctgaagaacgtgttcccacctgaggtggccgtgttcgagcctagcgaggccgagatcagccacacccagaaagccaccctcgtgtgcctggctaccggcttctaccccgaccatgtggaactgtcttggtgggtcaacggcaaagaggtgcacagcggcgtgtgtaccgacccccagccactgaaagaacagcccgccctgaacgacagccggtactgcctgagcagcagactgagagtgtccgccaccttctggcagaacccccggaaccacttcagatgccaggtgcagttctacggcctgagcgagaacgacgagtggacccaggacagagccaagcccgtgacccagatcgtgtctgccgaagcctggggcagagccgatgatgtgattaagatccactggcaggaaaagaagtccaacaccatcctgggcagccaggaaggcaacaccatgaagaccaacgacacctacatgaagttcagctggctgaccgtgcccgagaagtccctggacaaagaacacagatgcatcgtgcggcacgaaaacaacaagaacggcgtggaccaggaaatcatcttcccacccatcaagaccgatgtgattacaatggaccccaaggacaactgctccaaggacgccaacgataccctgctgctccagctgaccaacaccagcgcctactacatgtacttgttgctgctgctgaagtccgtggtgtacttcgccatcatcacatgctgcctgctgcggagaaccgccttctgctgcaacggcgagaagtct

SEQ ID NO: 7562 - DNA, 2589 bp, synthetic construct
  source 1..2589: mol_type = other DNA
atggccttaccagtgaccgccttgctcctgccgctggccttgctgctccacgccgccaggccggaagtgcagctggttgaatctggcggaggactggttcagcctggcggatctctgagactgtcttgtgccgccagcggcttcagcttcagcgacttttggatgagctgggtccgacaggcccctggcaaaggacttgaatgggtcgccacaatcagccaggccggcagcgagaaggactacgtggactctgtgaagggcagattcaccatcagccgggacaacgccaagaagtccctgtacctccagatgaacagcctgagagccgaggacaccgccgtgtactattgtgcctctggcgtgtacagcttcgactacagaggccagggcaccctggtcacagtctcttctggtaccggcggaggcggatctggcggcggaggtagcggtggcggaggatctgaattcgacatccagatgacccagtctaccagttccctgagtgcatccctcggagacagggtgacgatcagttgcagcgcaagccaagggatcaataactatctgaactggtatcagcagaaaccggacggaacagtcgaactcctgatttattacaccagcacccttcagagtggcgtcccttcccggttcagtggctccggaagcgggaccgattactccctgaccatttctaatctggagccagaggacataggaacgtattattgccagcagtatagtaaactgccacgaacttttggaggggggacgaaactggagatcaaactcgagatccagaaccctgatcctgccgtgtaccagctgcgggatagcaagagcagcgacaagagcgtgtgtctgttcaccgacttcgacagccagaccaacgtgtcccagagcaaggactccgacgtgtacatcaccgataagtgcgtgctggacatgcggagcatggacttcaagagcaactccgccgtggcctggtccaacaagtccgatttcgcctgcgccaacgccttcaacaacagcattatccccgaggacacattcttcccaagccccgagagcagcgactccaccgaccacgtgaagcccaaagagacagagaacaccaagcagcccagcaagagctgccacaagcccaaggccatcgtgcacaccgagaaagtgaacatgatgagcctgaccgtgctgggcctgcggatgctgttcgccaaaaccgtggccgtgaacttcctgctgaccgccaagctgttcttcctccgcgccaagagaagcggatctggcgtgaagcagaccctgaatttcgacctgctgaagctggctggcgacgtggaatccaacccaggccctactagtatggactggatttggcgcatccttttccttgtcggcgctgctaccggcgcgcattccttcgaacaggtgcaactccagcagtccggaagcgagcttatgatgccaggggcatcagtgaagatcagctgcaaggctactggctacaccttctctaattactggatagagtgggttaaacaaaggccagggcacggcctggaatggatcggcgagatcctgcctgggacaggccgaaccatttataacgagaagttcaaaggcaaggctactttcaccgcagatataagctctaatacagtgcaaatgcagctctcttccctgacaagtgaggatagtgccgtgtattattgcgcacgaagagattactatggaaatttttattacgctatggattattggggtcaaggaacaagtgtgaccgttagcagcacgcgtgaggacctgaagaacgtgttcccacctgaggtggccgtgttcgagcctagcgaggccgagatcagccacacccagaaagccaccctcgtgtgcctggctaccggcttctaccccgaccatgtggaactgtcttggtgggtcaacggcaaagaggtgcacagcggcgtgtgtaccgacccccagccactgaaagaacagcccgccctgaacgacagccggtactgcctgagcagcagactgagagtgtccgccaccttctggcagaacccccggaaccacttcagatgccaggtgcagttctacggcctgagcgagaacgacgagtggacccaggacagagccaagcccgtgacccagatcgtgtctgccgaagcctggggcagagccgatgatgtgattaagatccactggcaggaaaagaagtccaacaccatcctgggcagccaggaaggcaacaccatgaagaccaacgacacctacatgaagttcagctggctgaccgtgcccgagaagtccctggacaaagaacacagatgcatcgtgcggcacgaaaacaacaagaacggcgtggaccaggaaatcatcttcccacccatcaagaccgatgtgattacaatggaccccaaggacaactgctccaaggacgccaacgataccctgctgctccagctgaccaacaccagcgcctactacatgtacttgttgctgctgctgaagtccgtggtgtacttcgccatcatcacatgctgcctgctgcggagaaccgccttctgctgcaacggcgagaagtct

SEQ ID NO: 7563 - DNA, 2574 bp, synthetic construct
  source 1..2574: mol_type = other DNA
atggccttaccagtgaccgccttgctcctgccgctggccttgctgctccacgccgccaggccggaagtgcagctggttgaatctggcggaggactggttcagcctggcggatctctgagactgtcttgtgccgccagcggcttcagcttcagcgacttttggatgagctgggtccgacaggcccctggcaaaggacttgaatgggtcgccacaatcagccaggccggcagcgagaaggactacgtggactctgtgaagggcagattcaccatcagccgggacaacgccaagaagtccctgtacctccagatgaacagcctgagagccgaggacaccgccgtgtactattgtgcctctggcgtgtacagcttcgactacagaggccagggcaccctggtcacagtctcttctggtaccggcggaggcggatctggcggcggaggtagcggtggcggaggatctgaattcgacatccagatgacccagagccctgccagcctgtccgtgtctgtgggcgagacagtgaccatcacctgtcgggccagcgagaacatctacagcaacctggcctggtatcagcagaagcagggcaagagcccccaactgctggtgtacgccgccaccaatctggccgatggcgtgcccagcagattttccggctctggcagcggcacccagtacagcctgaagatcaacagcctccagagcgaggacttcggcagctactactgccagcacttctggggcacctggacctttggaggaggcaccaccctggaaatcaagctcgagatccagaaccctgatcctgccgtgtaccagctgcgggatagcaagagcagcgacaagagcgtgtgtctgttcaccgacttcgacagccagaccaacgtgtcccagagcaaggactccgacgtgtacatcaccgataagtgcgtgctggacatgcggagcatggacttcaagagcaactccgccgtggcctggtccaacaagtccgatttcgcctgcgccaacgccttcaacaacagcattatccccgaggacacattcttcccaagccccgagagcagcgactccaccgaccacgtgaagcccaaagagacagagaacaccaagcagcccagcaagagctgccacaagcccaaggccatcgtgcacaccgagaaagtgaacatgatgagcctgaccgtgctgggcctgcggatgctgttcgccaaaaccgtggccgtgaacttcctgctgaccgccaagctgttcttcctccgcgccaagagaagcggatctggcgtgaagcagaccctgaatttcgacctgctgaagctggctggcgacgtggaatccaacccaggccctactagtatggactggatttggcgcatccttttccttgtcggcgctgctaccggcgcgcattccttcgaagaagtgcaactccagcagagcggccctgagcttgtgaagcctggcgcttccgtgaagatgagctgcaaggccagcggctacaccttcaccgactactacatgaagtggatgaagcagagccacggcaagtccctggaatggatcggcgacatcaaccccaacaacggcggcaccacctacaaccagaagttcaagggcaaggccaccctgaccgtggacaagagcagcagcaccgcctacatgcaactgaacagcctgaccagcgaggacagcgccgtgtactactgcgccagagactacggctacggctatttcgactactggggccagggcacaaccctgacagtgtcctctacgcgtgaggacctgaagaacgtgttcccacctgaggtggccgtgttcgagcctagcgaggccgagatcagccacacccagaaagccaccctcgtgtgcctggctaccggcttctaccccgaccatgtggaactgtcttggtgggtcaacggcaaagaggtgcacagcggcgtgtgtaccgacccccagccactgaaagaacagcccgccctgaacgacagccggtactgcctgagcagcagactgagagtgtccgccaccttctggcagaacccccggaaccacttcagatgccaggtgcagttctacggcctgagcgagaacgacgagtggacccaggacagagccaagcccgtgacccagatcgtgtctgccgaagcctggggcagagccgatgatgtgattaagatccactggcaggaaaagaagtccaacaccatcctgggcagccaggaaggcaacaccatgaagaccaacgacacctacatgaagttcagctggctgaccgtgcccgagaagtccctggacaaagaacacagatgcatcgtgcggcacgaaaacaacaagaacggcgtggaccaggaaatcatcttcccacccatcaagaccgatgtgattacaatggaccccaaggacaactgctccaaggacgccaacgataccctgctgctccagctgaccaacaccagcgcctactacatgtacttgttgctgctgctgaagtccgtggtgtacttcgccatcatcacatgctgcctgctgcggagaaccgccttctgctgcaacggcgagaagtct

SEQ ID NO: 7564 - DNA, 2583 bp, synthetic construct
  source 1..2583: mol_type = other DNA
atggccttaccagtgaccgccttgctcctgccgctggccttgctgctccacgccgccaggccggaagtgcagctggttgaatctggcggaggactggttcagcctggcggatctctgagactgtcttgtgccgccagcggcttcagcttcagcgacttttggatgagctgggtccgacaggcccctggcaaaggacttgaatgggtcgccacaatcagccaggccggcagcgagaaggactacgtggactctgtgaagggcagattcaccatcagccgggacaacgccaagaagtccctgtacctccagatgaacagcctgagagccgaggacaccgccgtgtactattgtgcctctggcgtgtacagcttcgactacagaggccagggcaccctggtcacagtctcttctggtaccggcggaggcggatctggcggcggaggtagcggtggcggaggatctgaattcgagatcgtgctgacacagagccctggcaccctgagcctgtctccaggcgaaagagccacactgagctgtcgggcctctcagagcgtgggaggctacctggcttggtatcagcagaagccaggccaggcccccagactgctgatctacgacgccagcaatcgggccacaggcatccccgccagattttctggcagcggctccggcaccgacttcaccctgacaatcagcagcctggaacccgaggacttcgccgtgtactactgccagcagcggaacaactggccccccatgtacacattcggccagggcaccaagctggaaatcaagagactcgagatccagaaccctgatcctgccgtgtaccagctgcgggatagcaagagcagcgacaagagcgtgtgtctgttcaccgacttcgacagccagaccaacgtgtcccagagcaaggactccgacgtgtacatcaccgataagtgcgtgctggacatgcggagcatggacttcaagagcaactccgccgtggcctggtccaacaagtccgatttcgcctgcgccaacgccttcaacaacagcattatccccgaggacacattcttcccaagccccgagagcagcgactccaccgaccacgtgaagcccaaagagacagagaacaccaagcagcccagcaagagctgccacaagcccaaggccatcgtgcacaccgagaaagtgaacatgatgagcctgaccgtgctgggcctgcggatgctgttcgccaaaaccgtggccgtgaacttcctgctgaccgccaagctgttcttcctccgcgccaagagaagcggatctggcgtgaagcagaccctgaatttcgacctgctgaagctggctggcgacgtggaatccaacccaggccctactagtatggactggatttggcgcatccttttccttgtcggcgctgctaccggcgcgcattccttcgaacaggtgcaactggtgcagagcggagccgaagtgaagaaacccggcagcagcgtgaaggtgtcctgcaaggcttccggcggcaccttcagcagctacgccatttcttgggtgcgccaggctcctggacagggcctggaatggatgggcggcatcatccctatcctgggcaccgccaactacgcccagaaattccagggcagagtgaccatcaccgccgacgagagcaccagcaccgcctacatggaactgagcagcctgcggagcgaggacacagccgtgtattattgcgccagatggggcggaggggccttcgacatttggggccagggaacaatggtcaccgtgtccagcacgcgtgaggacctgaagaacgtgttcccacctgaggtggccgtgttcgagcctagcgaggccgagatcagccacacccagaaagccaccctcgtgtgcctggctaccggcttctaccccgaccatgtggaactgtcttggtgggtcaacggcaaagaggtgcacagcggcgtgtgtaccgacccccagccactgaaagaacagcccgccctgaacgacagccggtactgcctgagcagcagactgagagtgtccgccaccttctggcagaacccccggaaccacttcagatgccaggtgcagttctacggcctgagcgagaacgacgagtggacccaggacagagccaagcccgtgacccagatcgtgtctgccgaagcctggggcagagccgatgatgtgattaagatccactggcaggaaaagaagtccaacaccatcctgggcagccaggaaggcaacaccatgaagaccaacgacacctacatgaagttcagctggctgaccgtgcccgagaagtccctggacaaagaacacagatgcatcgtgcggcacgaaaacaacaagaacggcgtggaccaggaaatcatcttcccacccatcaagaccgatgtgattacaatggaccccaaggacaactgctccaaggacgccaacgataccctgctgctccagctgaccaacaccagcgcctactacatgtacttgttgctgctgctgaagtccgtggtgtacttcgccatcatcacatgctgcctgctgcggagaaccgccttctgctgcaacggcgagaagtct

SEQ ID NO: 7565 - DNA, 2568 bp, synthetic construct
  source 1..2568: mol_type = other DNA
atggccttaccagtgaccgccttgctcctgccgctggccttgctgctccacgccgccaggccggaagtgcagctggttgaatctggcggaggactggttcagcctggcggatctctgagactgtcttgtgccgccagcggcttcagcttcagcgacttttggatgagctgggtccgacaggcccctggcaaaggacttgaatgggtcgccacaatcagccaggccggcagcgagaaggactacgtggactctgtgaagggcagattcaccatcagccgggacaacgccaagaagtccctgtacctccagatgaacagcctgagagccgaggacaccgccgtgtactattgtgcctctggcgtgtacagcttcgactacagaggccagggcaccctggtcacagtctcttctggtaccggcggaggcggatctggcggcggaggtagcggtggcggaggatctgaattccagatcgtgctgacacagagccctgccctgatgagcgccagccctggcgagaaagtgaccatgacctgtagcgccagcagcagcgtgcgctacatgtactggtatcagcagaagcccagaagcagccccaagccctggattcacctgaccagcaatctggcctctggcgtgcccgctagattttccggctctggcagcggcaccagctacagcctgaccatcagcagcatggaagccgaggacgccgccacctactactgccagcagtggtccagccaccccttcacatttggctccggcaccaagctggaaatcaagctcgagatccagaaccctgatcctgccgtgtaccagctgcgggatagcaagagcagcgacaagagcgtgtgtctgttcaccgacttcgacagccagaccaacgtgtcccagagcaaggactccgacgtgtacatcaccgataagtgcgtgctggacatgcggagcatggacttcaagagcaactccgccgtggcctggtccaacaagtccgatttcgcctgcgccaacgccttcaacaacagcattatccccgaggacacattcttcccaagccccgagagcagcgactccaccgaccacgtgaagcccaaagagacagagaacaccaagcagcccagcaagagctgccacaagcccaaggccatcgtgcacaccgagaaagtgaacatgatgagcctgaccgtgctgggcctgcggatgctgttcgccaaaaccgtggccgtgaacttcctgctgaccgccaagctgttcttcctccgcgccaagagaagcggatctggcgtgaagcagaccctgaatttcgacctgctgaagctggctggcgacgtggaatccaacccaggccctactagtatggactggatttggcgcatccttttccttgtcggcgctgctaccggcgcgcattccttcgaagatgtgcaactccaggaaagcggccctggccttgtgaagcctagccagagcctgtccctgacctgtaccgtgaccggcttcagcatcaccagcgactactcttggaactggatcagacagttccctggcaacaaactggaatggatgggctacatcagctactccggccacacctcctacaaccccagcctggaaagccggatctccatcaccagagacaccagcaagaaccagttcttcttgcaactgaacagcgtgaccaccgaggataccgccacatattactgtaccagaggcaactgggacgtggtgtactggggccagggcacacttgtgaccgtgtctgctacgcgtgaggacctgaagaacgtgttcccacctgaggtggccgtgttcgagcctagcgaggccgagatcagccacacccagaaagccaccctcgtgtgcctggctaccggcttctaccccgaccatgtggaactgtcttggtgggtcaacggcaaagaggtgcacagcggcgtgtgtaccgacccccagccactgaaagaacagcccgccctgaacgacagccggtactgcctgagcagcagactgagagtgtccgccaccttctggcagaacccccggaaccacttcagatgccaggtgcagttctacggcctgagcgagaacgacgagtggacccaggacagagccaagcccgtgacccagatcgtgtctgccgaagcctggggcagagccgatgatgtgattaagatccactggcaggaaaagaagtccaacaccatcctgggcagccaggaaggcaacaccatgaagaccaacgacacctacatgaagttcagctggctgaccgtgcccgagaagtccctggacaaagaacacagatgcatcgtgcggcacgaaaacaacaagaacggcgtggaccaggaaatcatcttcccacccatcaagaccgatgtgattacaatggaccccaaggacaactgctccaaggacgccaacgataccctgctgctccagctgaccaacaccagcgcctactacatgtacttgttgctgctgctgaagtccgtggtgtacttcgccatcatcacatgctgcctgctgcggagaaccgccttctgctgcaacggcgagaagtct

SEQ ID NO: 7566 - DNA, 2598 bp, synthetic construct
  source 1..2598: mol_type = other DNA
atggccttaccagtgaccgccttgctcctgccgctggccttgctgctccacgccgccaggccggaagtgcagctggttgaatctggcggaggactggttcagcctggcggatctctgagactgtcttgtgccgccagcggcttcagcttcagcgacttttggatgagctgggtccgacaggcccctggcaaaggacttgaatgggtcgccacaatcagccaggccggcagcgagaaggactacgtggactctgtgaagggcagattcaccatcagccgggacaacgccaagaagtccctgtacctccagatgaacagcctgagagccgaggacaccgccgtgtactattgtgcctctggcgtgtacagcttcgactacagaggccagggcaccctggtcacagtctcttctggtaccggcggaggcggatctggcggcggaggtagcggtggcggaggatctgaattcgacgtcgtgatgacccagagccctctgagcctgcctgtgacactgggacagcctgccagcatctcctgtcggagcagccagagcatcgtgcacagcgacggcaacacctacctggaatggtatcagcagcggccaggccagagccccagacggctgatctacaaggtgtccaacagattcagcggcgtgcccgacagattctccggcagcggctctggcaccgacttcaccctgaagatcagcagagtggaagccgaggacgtgggcgtgtactactgttttcaaggcagccacgccccctggacctttggcggaggaacaaaggtggaaatcaagctcgagatccagaaccctgatcctgccgtgtaccagctgcgggatagcaagagcagcgacaagagcgtgtgtctgttcaccgacttcgacagccagaccaacgtgtcccagagcaaggactccgacgtgtacatcaccgataagtgcgtgctggacatgcggagcatggacttcaagagcaactccgccgtggcctggtccaacaagtccgatttcgcctgcgccaacgccttcaacaacagcattatccccgaggacacattcttcccaagccccgagagcagcgactccaccgaccacgtgaagcccaaagagacagagaacaccaagcagcccagcaagagctgccacaagcccaaggccatcgtgcacaccgagaaagtgaacatgatgagcctgaccgtgctgggcctgcggatgctgttcgccaaaaccgtggccgtgaacttcctgctgaccgccaagctgttcttcctccgcgccaagagaagcggatctggcgtgaagcagaccctgaatttcgacctgctgaagctggctggcgacgtggaatccaacccaggccctactagtatggactggatttggcgcatccttttccttgtcggcgctgctaccggcgcgcattccttcgaagaagtgcaactggtggaatcaggcggcggactggtgcagcctggcggatctctgagactgagctgtgccgccagcggcttcaccttcagcagctacggaatgcactgggtgcgccaggcccctggcaaaggactggaatgggtggcctacatcaccaccagaagcagcaccatctactacgccgacagcgtgaagggccggttcaccatctccagagacaacgccaagaacagcctgtacctccagatgaactccctgcgggccgaggacaccgccgtgtactattgcaccagagagcccctgaccggctactacgctatggactattggggccagggcaccagcgtgaccgtgtctagtacgcgtgaggacctgaagaacgtgttcccacctgaggtggccgtgttcgagcctagcgaggccgagatcagccacacccagaaagccaccctcgtgtgcctggctaccggcttctaccccgaccatgtggaactgtcttggtgggtcaacggcaaagaggtgcacagcggcgtgtgtaccgacccccagccactgaaagaacagcccgccctgaacgacagccggtactgcctgagcagcagactgagagtgtccgccaccttctggcagaacccccggaaccacttcagatgccaggtgcagttctacggcctgagcgagaacgacgagtggacccaggacagagccaagcccgtgacccagatcgtgtctgccgaagcctggggcagagccgatgatgtgattaagatccactggcaggaaaagaagtccaacaccatcctgggcagccaggaaggcaacaccatgaagaccaacgacacctacatgaagttcagctggctgaccgtgcccgagaagtccctggacaaagaacacagatgcatcgtgcggcacgaaaacaacaagaacggcgtggaccaggaaatcatcttcccacccatcaagaccgatgtgattacaatggaccccaaggacaactgctccaaggacgccaacgataccctgctgctccagctgaccaacaccagcgcctactacatgtacttgttgctgctgctgaagtccgtggtgtacttcgccatcatcacatgctgcctgctgcggagaaccgccttctgctgcaacggcgagaagtct

SEQ ID NO: 7567 - DNA, 2574 bp, synthetic construct
  source 1..2574: mol_type = other DNA
atggccttaccagtgaccgccttgctcctgccgctggccttgctgctccacgccgccaggccggaagtgcagctggttgaatctggcggaggactggttcagcctggcggatctctgagactgtcttgtgccgccagcggcttcagcttcagcgacttttggatgagctgggtccgacaggcccctggcaaaggacttgaatgggtcgccacaatcagccaggccggcagcgagaaggactacgtggactctgtgaagggcagattcaccatcagccgggacaacgccaagaagtccctgtacctccagatgaacagcctgagagccgaggacaccgccgtgtactattgtgcctctggcgtgtacagcttcgactacagaggccagggcaccctggtcacagtctcttctggtaccggcggaggcggatctggcggcggaggtagcggtggcggaggatctgaattcgacatccagatgacccagagccccagcagcctgtctgccagcgtgggcgacagagtgaccatcacctgtagagccagccagagcatcagcctgtggctgaactggtatcagcagaagcccggcaaggcccccaagctgctgatctacgccgccagcacactccagagcggcgtgccaagcagattttccggcagcggctccggcaccgacttcaccctgacaatcagctccctccagcccgaggacttcgccacctactactgccagcagtactacaccagcccctacaccttcggccagggcaccaaggtggaaatcaagagactcgagatccagaaccctgatcctgccgtgtaccagctgcgggatagcaagagcagcgacaagagcgtgtgtctgttcaccgacttcgacagccagaccaacgtgtcccagagcaaggactccgacgtgtacatcaccgataagtgcgtgctggacatgcggagcatggacttcaagagcaactccgccgtggcctggtccaacaagtccgatttcgcctgcgccaacgccttcaacaacagcattatccccgaggacacattcttcccaagccccgagagcagcgactccaccgaccacgtgaagcccaaagagacagagaacaccaagcagcccagcaagagctgccacaagcccaaggccatcgtgcacaccgagaaagtgaacatgatgagcctgaccgtgctgggcctgcggatgctgttcgccaaaaccgtggccgtgaacttcctgctgaccgccaagctgttcttcctccgcgccaagagaagcggatctggcgtgaagcagaccctgaatttcgacctgctgaagctggctggcgacgtggaatccaacccaggccctactagtatggactggatttggcgcatccttttccttgtcggcgctgctaccggcgcgcattccttcgaacaggtgcaactgctggaatctggcggcggactggtgcagcctggcggatctctgagactgagctgtgccgccagcggcttcaccttcagcagctacgccatgagctgggtgcgccaggcccctggaaaaggactggaatgggtgtccgtgatccggtccagcggcagcagcacctattacgccgatagcgtgaagggccggttcaccatcagccgggacaacagcaagaacaccctgtacctccagatgaacagcctgcgggccgaggacaccgccgtgtactattgtgctaggggaggcggctacttcgactactggggccagggaacactcgtgaccgtgtcctctacgcgtgaggacctgaagaacgtgttcccacctgaggtggccgtgttcgagcctagcgaggccgagatcagccacacccagaaagccaccctcgtgtgcctggctaccggcttctaccccgaccatgtggaactgtcttggtgggtcaacggcaaagaggtgcacagcggcgtgtgtaccgacccccagccactgaaagaacagcccgccctgaacgacagccggtactgcctgagcagcagactgagagtgtccgccaccttctggcagaacccccggaaccacttcagatgccaggtgcagttctacggcctgagcgagaacgacgagtggacccaggacagagccaagcccgtgacccagatcgtgtctgccgaagcctggggcagagccgatgatgtgattaagatccactggcaggaaaagaagtccaacaccatcctgggcagccaggaaggcaacaccatgaagaccaacgacacctacatgaagttcagctggctgaccgtgcccgagaagtccctggacaaagaacacagatgcatcgtgcggcacgaaaacaacaagaacggcgtggaccaggaaatcatcttcccacccatcaagaccgatgtgattacaatggaccccaaggacaactgctccaaggacgccaacgataccctgctgctccagctgaccaacaccagcgcctactacatgtacttgttgctgctgctgaagtccgtggtgtacttcgccatcatcacatgctgcctgctgcggagaaccgccttctgctgcaacggcgagaagtct

SEQ ID NO: 7568 - DNA, 2583 bp, synthetic construct
  source 1..2583: mol_type = other DNA
atggccttaccagtgaccgccttgctcctgccgctggccttgctgctccacgccgccaggccggaagtgcagctggttgaatctggcggaggactggttcagcctggcggatctctgagactgtcttgtgccgccagcggcttcagcttcagcgacttttggatgagctgggtccgacaggcccctggcaaaggacttgaatgggtcgccacaatcagccaggccggcagcgagaaggactacgtggactctgtgaagggcagattcaccatcagccgggacaacgccaagaagtccctgtacctccagatgaacagcctgagagccgaggacaccgccgtgtactattgtgcctctggcgtgtacagcttcgactacagaggccagggcaccctggtcacagtctcttctggtaccggcggaggcggatctggcggcggaggtagcggtggcggaggatctgaattcgacatccagatgacccagagccccagcagcctgtctgccagcgtgggcgacagagtgaccatcacctgtagagccagccagagcatcagcagctacctgaactggtatcagcagaagcccggcaaggcccccaaactgctgatctacgccgtgtccacactccagagcggcgtgcccagcagattttctggcagcggctccggcaccgacttcaccctgacaatcagctccctccagcccgaggacttcgccacctactactgtcagcagagcggcaccttccctcccaccacatttggacagggcaccaaggtggaaatcaagagactcgagatccagaaccctgatcctgccgtgtaccagctgcgggatagcaagagcagcgacaagagcgtgtgtctgttcaccgacttcgacagccagaccaacgtgtcccagagcaaggactccgacgtgtacatcaccgataagtgcgtgctggacatgcggagcatggacttcaagagcaactccgccgtggcctggtccaacaagtccgatttcgcctgcgccaacgccttcaacaacagcattatccccgaggacacattcttcccaagccccgagagcagcgactccaccgaccacgtgaagcccaaagagacagagaacaccaagcagcccagcaagagctgccacaagcccaaggccatcgtgcacaccgagaaagtgaacatgatgagcctgaccgtgctgggcctgcggatgctgttcgccaaaaccgtggccgtgaacttcctgctgaccgccaagctgttcttcctccgcgccaagagaagcggatctggcgtgaagcagaccctgaatttcgacctgctgaagctggctggcgacgtggaatccaacccaggccctactagtatggactggatttggcgcatccttttccttgtcggcgctgctaccggcgcgcattccttcgaacaggtgcaactgctggaatctggcggcggactggtgcagcctggcggatctctgagactgagctgtgccgccagcggcttcaccttcagcagccacggaatgcactgggtgcgccaggcccctggaaagggactggaatgggtgtccgtgatctccggcagcggcagcaataccggctacgccgatagcgtgaagggccggttcaccatcagccgggacaacagcaagaacaccctgtacctccagatgaacagcctgcgggccgaggacaccgccgtgtactattgtgccagacagtggggcagctacgccttcgattcttggggccagggcaccctcgtgaccgtgtcatctacgcgtgaggacctgaagaacgtgttcccacctgaggtggccgtgttcgagcctagcgaggccgagatcagccacacccagaaagccaccctcgtgtgcctggctaccggcttctaccccgaccatgtggaactgtcttggtgggtcaacggcaaagaggtgcacagcggcgtgtgtaccgacccccagccactgaaagaacagcccgccctgaacgacagccggtactgcctgagcagcagactgagagtgtccgccaccttctggcagaacccccggaaccacttcagatgccaggtgcagttctacggcctgagcgagaacgacgagtggacccaggacagagccaagcccgtgacccagatcgtgtctgccgaagcctggggcagagccgatgatgtgattaagatccactggcaggaaaagaagtccaacaccatcctgggcagccaggaaggcaacaccatgaagaccaacgacacctacatgaagttcagctggctgaccgtgcccgagaagtccctggacaaagaacacagatgcatcgtgcggcacgaaaacaacaagaacggcgtggaccaggaaatcatcttcccacccatcaagaccgatgtgattacaatggaccccaaggacaactgctccaaggacgccaacgataccctgctgctccagctgaccaacaccagcgcctactacatgtacttgttgctgctgctgaagtccgtggtgtacttcgccatcatcacatgctgcctgctgcggagaaccgccttctgctgcaacggcgagaagtct

SEQ ID NO: 7569 - DNA, 2613 bp, synthetic construct
  source 1..2613: mol_type = other DNA
atggccttaccagtgaccgccttgctcctgccgctggccttgctgctccacgccgccaggccggaagtgcagctggttgaatctggcggaggactggttcagcctggcggatctctgagactgtcttgtgccgccagcggcttcagcttcagcgacttttggatgagctgggtccgacaggcccctggcaaaggacttgaatgggtcgccacaatcagccaggccggcagcgagaaggactacgtggactctgtgaagggcagattcaccatcagccgggacaacgccaagaagtccctgtacctccagatgaacagcctgagagccgaggacaccgccgtgtactattgtgcctctggcgtgtacagcttcgactacagaggccagggcaccctggtcacagtctcttctggtaccggcggaggcggatctggcggcggaggtagcggtggcggaggatctgaattcgacatcgtgatgagccagagccctagcagcctggccgtgtccgtgggcgagaaagtgaccatgagctgcaagagcagccagtccctgctgcacagcagcaaccagaagaactacctggcctggtatcagcagaagcccggccagtcccccaaggtgctgatctactgggccagcaccagagaaagcggcgtgcccgatagattcaccggcagcggctctggcaccgacttcaccctgaccatcaccagcgtgaagtccgaggacctggctgtgtactactgccagcagtattacagctacccctggaccttcggcggaggcacccggctggaaatcaaaagactcgagatccagaaccctgatcctgccgtgtaccagctgcgggatagcaagagcagcgacaagagcgtgtgtctgttcaccgacttcgacagccagaccaacgtgtcccagagcaaggactccgacgtgtacatcaccgataagtgcgtgctggacatgcggagcatggacttcaagagcaactccgccgtggcctggtccaacaagtccgatttcgcctgcgccaacgccttcaacaacagcattatccccgaggacacattcttcccaagccccgagagcagcgactccaccgaccacgtgaagcccaaagagacagagaacaccaagcagcccagcaagagctgccacaagcccaaggccatcgtgcacaccgagaaagtgaacatgatgagcctgaccgtgctgggcctgcggatgctgttcgccaaaaccgtggccgtgaacttcctgctgaccgccaagctgttcttcctccgcgccaagagaagcggatctggcgtgaagcagaccctgaatttcgacctgctgaagctggctggcgacgtggaatccaacccaggccctactagtatggactggatttggcgcatccttttccttgtcggcgctgctaccggcgcgcattccttcgaagaagtgcaactccagcagagcgtggccgagcttgtgaagcctggcgcttccgtgaagatgtcctgcaaggtgtccggctacaccctgacagaccacaccatccactggatgaagcagcggcctgagcagggcctggaatggatcggctacatctaccccagggacggcatcaccggctacaacgagaagttcaagggcaaggccacactgaccgccgacaccagcagcagcacagcctacatgcaactgaacagcctgaccagcgaggacagcgccgtgtacttctgtgccagatggggctacagctacagaaactacgcctactactacgactactggggccagggcacaaccctgaccgtgtctagtacgcgtgaggacctgaagaacgtgttcccacctgaggtggccgtgttcgagcctagcgaggccgagatcagccacacccagaaagccaccctcgtgtgcctggctaccggcttctaccccgaccatgtggaactgtcttggtgggtcaacggcaaagaggtgcacagcggcgtgtgtaccgacccccagccactgaaagaacagcccgccctgaacgacagccggtactgcctgagcagcagactgagagtgtccgccaccttctggcagaacccccggaaccacttcagatgccaggtgcagttctacggcctgagcgagaacgacgagtggacccaggacagagccaagcccgtgacccagatcgtgtctgccgaagcctggggcagagccgatgatgtgattaagatccactggcaggaaaagaagtccaacaccatcctgggcagccaggaaggcaacaccatgaagaccaacgacacctacatgaagttcagctggctgaccgtgcccgagaagtccctggacaaagaacacagatgcatcgtgcggcacgaaaacaacaagaacggcgtggaccaggaaatcatcttcccacccatcaagaccgatgtgattacaatggaccccaaggacaactgctccaaggacgccaacgataccctgctgctccagctgaccaacaccagcgcctactacatgtacttgttgctgctgctgaagtccgtggtgtacttcgccatcatcacatgctgcctgctgcggagaaccgccttctgctgcaacggcgagaagtct

SEQ ID NO: 7570 - DNA, 2604 bp, synthetic construct
  source 1..2604: mol_type = other DNA
atggccttaccagtgaccgccttgctcctgccgctggccttgctgctccacgccgccaggccggaagtgcagctggttgaatctggcggaggactggttcagcctggcggatctctgagactgtcttgtgccgccagcggcttcagcttcagcgacttttggatgagctgggtccgacaggcccctggcaaaggacttgaatgggtcgccacaatcagccaggccggcagcgagaaggactacgtggactctgtgaagggcagattcaccatcagccgggacaacgccaagaagtccctgtacctccagatgaacagcctgagagccgaggacaccgccgtgtactattgtgcctctggcgtgtacagcttcgactacagaggccagggcaccctggtcacagtctcttctggtaccggcggaggcggatctggcggcggaggtagcggtggcggaggatctgaattcgagatcgtgctgacacagagccctggcaccctgagcctgtctccaggcgaaagagccacactgagctgtcgggccagccagagcgtgtccagctcttacctggcctggtatcagcagaagcccggccaggctccccggctgctgatctacggaacaagcagcagagccaccggcatccccgacagattttctggcagcggctccggcaccgacttcaccctgacaatcagcagactggaacccgaggacttcgccgtgtactactgccagcagtacggcagcagccccttcacctttggcggaggcaccaaggtggaaatcaagagactcgagatccagaaccctgatcctgccgtgtaccagctgcgggatagcaagagcagcgacaagagcgtgtgtctgttcaccgacttcgacagccagaccaacgtgtcccagagcaaggactccgacgtgtacatcaccgataagtgcgtgctggacatgcggagcatggacttcaagagcaactccgccgtggcctggtccaacaagtccgatttcgcctgcgccaacgccttcaacaacagcattatccccgaggacacattcttcccaagccccgagagcagcgactccaccgaccacgtgaagcccaaagagacagagaacaccaagcagcccagcaagagctgccacaagcccaaggccatcgtgcacaccgagaaagtgaacatgatgagcctgaccgtgctgggcctgcggatgctgttcgccaaaaccgtggccgtgaacttcctgctgaccgccaagctgttcttcctccgcgccaagagaagcggatctggcgtgaagcagaccctgaatttcgacctgctgaagctggctggcgacgtggaatccaacccaggccctactagtatggactggatttggcgcatccttttccttgtcggcgctgctaccggcgcgcattccttcgaacaggtgcaactccaggaatctggccccggactggctaagcccagcgagacactgagcctgacctgtaccgtgtccggcgacagcatcaccagctactactggtcctggatcagacagccccctggcaagggcctggaatggatcggctacatctactacagcggcagcaccaactacaaccccagcctgaagtccagagtgaccatcagcgtggacaccagcaagaaccagttctccctgaagctgagcagcgtgacagccgccgacaccgccgtgtattattgcgccagagatcagcggagaatcgccgctgccggcacccacttttacggcatggatgtgtggggccagggcaccaccgtgaccgtgtcatctacgcgtgaggacctgaagaacgtgttcccacctgaggtggccgtgttcgagcctagcgaggccgagatcagccacacccagaaagccaccctcgtgtgcctggctaccggcttctaccccgaccatgtggaactgtcttggtgggtcaacggcaaagaggtgcacagcggcgtgtgtaccgacccccagccactgaaagaacagcccgccctgaacgacagccggtactgcctgagcagcagactgagagtgtccgccaccttctggcagaacccccggaaccacttcagatgccaggtgcagttctacggcctgagcgagaacgacgagtggacccaggacagagccaagcccgtgacccagatcgtgtctgccgaagcctggggcagagccgatgatgtgattaagatccactggcaggaaaagaagtccaacaccatcctgggcagccaggaaggcaacaccatgaagaccaacgacacctacatgaagttcagctggctgaccgtgcccgagaagtccctggacaaagaacacagatgcatcgtgcggcacgaaaacaacaagaacggcgtggaccaggaaatcatcttcccacccatcaagaccgatgtgattacaatggaccccaaggacaactgctccaaggacgccaacgataccctgctgctccagctgaccaacaccagcgcctactacatgtacttgttgctgctgctgaagtccgtggtgtacttcgccatcatcacatgctgcctgctgcggagaaccgccttctgctgcaacggcgagaagtct

SEQ ID NO: 7571 - DNA, 2580 bp, synthetic construct
  source 1..2580: mol_type = other DNA
atggccttaccagtgaccgccttgctcctgccgctggccttgctgctccacgccgccaggccggaagtgcagctggttgaatctggcggaggactggttcagcctggcggatctctgagactgtcttgtgccgccagcggcttcagcttcagcgacttttggatgagctgggtccgacaggcccctggcaaaggacttgaatgggtcgccacaatcagccaggccggcagcgagaaggactacgtggactctgtgaagggcagattcaccatcagccgggacaacgccaagaagtccctgtacctccagatgaacagcctgagagccgaggacaccgccgtgtactattgtgcctctggcgtgtacagcttcgactacagaggccagggcaccctggtcacagtctcttctggtaccggcggaggcggatctggcggcggaggtagcggtggcggaggatctgaattcgacatcctgctgacccagagccccgtgatcctgtccgtgtctcctggcgagagagtgtccttcagctgtcgggccagccagagcatcggcaccaacatccactggtatcagcagcggaccaacggcagccccagactgctgattaagtacgccagcgagtccatcagcggcatccccagcagattttccggcagcggctccggcaccgacttcaccctgagcatcaacagcgtggaaagcgaggacattgccgactactactgccagcagaacaacaactggcccaccaccttcggagccggcaccaagctggaactgaagctcgagatccagaaccctgatcctgccgtgtaccagctgcgggatagcaagagcagcgacaagagcgtgtgtctgttcaccgacttcgacagccagaccaacgtgtcccagagcaaggactccgacgtgtacatcaccgataagtgcgtgctggacatgcggagcatggacttcaagagcaactccgccgtggcctggtccaacaagtccgatttcgcctgcgccaacgccttcaacaacagcattatccccgaggacacattcttcccaagccccgagagcagcgactccaccgaccacgtgaagcccaaagagacagagaacaccaagcagcccagcaagagctgccacaagcccaaggccatcgtgcacaccgagaaagtgaacatgatgagcctgaccgtgctgggcctgcggatgctgttcgccaaaaccgtggccgtgaacttcctgctgaccgccaagctgttcttcctccgcgccaagagaagcggatctggcgtgaagcagaccctgaatttcgacctgctgaagctggctggcgacgtggaatccaacccaggccctactagtatggactggatttggcgcatccttttccttgtcggcgctgctaccggcgcgcattccttcgaacaggtgcagctgaagcagagcggacctggcctggtgcagcctagccagagcctgtccatcacctgtaccgtgtccggcttcagcctgaccaactacggcgtgcactgggtgcgccagagccctggaaaaggactggaatggctgggagtgatttggagcggcggcaacaccgactacaacacccccttcaccagcagactgtctatcaacaaggacaacagcaagagccaggtgttcttcaagatgaacagcctccagagcaacgacaccgccatctactactgtgctagagccctgacctactatgactacgagttcgcctactggggccagggcacactcgtgacagtgtctgctacgcgtgaggacctgaagaacgtgttcccacctgaggtggccgtgttcgagcctagcgaggccgagatcagccacacccagaaagccaccctcgtgtgcctggctaccggcttctaccccgaccatgtggaactgtcttggtgggtcaacggcaaagaggtgcacagcggcgtgtgtaccgacccccagccactgaaagaacagcccgccctgaacgacagccggtactgcctgagcagcagactgagagtgtccgccaccttctggcagaacccccggaaccacttcagatgccaggtgcagttctacggcctgagcgagaacgacgagtggacccaggacagagccaagcccgtgacccagatcgtgtctgccgaagcctggggcagagccgatgatgtgattaagatccactggcaggaaaagaagtccaacaccatcctgggcagccaggaaggcaacaccatgaagaccaacgacacctacatgaagttcagctggctgaccgtgcccgagaagtccctggacaaagaacacagatgcatcgtgcggcacgaaaacaacaagaacggcgtggaccaggaaatcatcttcccacccatcaagaccgatgtgattacaatggaccccaaggacaactgctccaaggacgccaacgataccctgctgctccagctgaccaacaccagcgcctactacatgtacttgttgctgctgctgaagtccgtggtgtacttcgccatcatcacatgctgcctgctgcggagaaccgccttctgctgcaacggcgagaagtct

SEQ ID NO: 7572 - DNA, 2559 bp, synthetic construct
  source 1..2559: mol_type = other DNA
atggccttaccagtgaccgccttgctcctgccgctggccttgctgctccacgccgccaggccggaagtgcagctggttgaatctggcggaggactggttcagcctggcggatctctgagactgtcttgtgccgccagcggcttcagcttcagcgacttttggatgagctgggtccgacaggcccctggcaaaggacttgaatgggtcgccacaatcagccaggccggcagcgagaaggactacgtggactctgtgaagggcagattcaccatcagccgggacaacgccaagaagtccctgtacctccagatgaacagcctgagagccgaggacaccgccgtgtactattgtgcctctggcgtgtacagcttcgactacagaggccagggcaccctggtcacagtctcttctggtaccggcggaggcggatctggcggcggaggtagcggtggcggaggatctgaattcatgacccagagccccaagttcctgctggtgtctgccggcgacagagtgaccctgacatgcaaggccagccagagcgtgaacaacgacgtgtactggtatcagcaggaacccggccagtcccccaagctgctgatctactgggccagcaccagagaaagcggcgtgcccgatagattcaccggcagcggctctggcaccgacttcaccctgacaatcagcagcgtgcaggccgaggacctggccgtgtactactgcaagcagagctacaacctgtacaccttcggcggaggcaccaagctggaaatcaagagactcgagatccagaaccctgatcctgccgtgtaccagctgcgggatagcaagagcagcgacaagagcgtgtgtctgttcaccgacttcgacagccagaccaacgtgtcccagagcaaggactccgacgtgtacatcaccgataagtgcgtgctggacatgcggagcatggacttcaagagcaactccgccgtggcctggtccaacaagtccgatttcgcctgcgccaacgccttcaacaacagcattatccccgaggacacattcttcccaagccccgagagcagcgactccaccgaccacgtgaagcccaaagagacagagaacaccaagcagcccagcaagagctgccacaagcccaaggccatcgtgcacaccgagaaagtgaacatgatgagcctgaccgtgctgggcctgcggatgctgttcgccaaaaccgtggccgtgaacttcctgctgaccgccaagctgttcttcctccgcgccaagagaagcggatctggcgtgaagcagaccctgaatttcgacctgctgaagctggctggcgacgtggaatccaacccaggccctactagtatggactggatttggcgcatccttttccttgtcggcgctgctaccggcgcgcattccttcgaagaatctggaagaggactggtgcagcctggcggcagcagaaagctgtcttgtgccgccagcggcttcaccttcagcaccagcggaatgcactgggtgcgccaggcccctgagaagggactggaatgggtggcctacatcagctccggcagcaccaccatctaccacgccgataccgtgaagggccggttcaccatcagccgggacaaccccaagaataccctgttcctccagatgaccagcctgcggagcgaggacaccgccatgtactattgctgcgccagaagcggccagttcggcaactacttcgactactggggccagggcaccaccctgaccgtgtcatctacgcgtgaggacctgaagaacgtgttcccacctgaggtggccgtgttcgagcctagcgaggccgagatcagccacacccagaaagccaccctcgtgtgcctggctaccggcttctaccccgaccatgtggaactgtcttggtgggtcaacggcaaagaggtgcacagcggcgtgtgtaccgacccccagccactgaaagaacagcccgccctgaacgacagccggtactgcctgagcagcagactgagagtgtccgccaccttctggcagaacccccggaaccacttcagatgccaggtgcagttctacggcctgagcgagaacgacgagtggacccaggacagagccaagcccgtgacccagatcgtgtctgccgaagcctggggcagagccgatgatgtgattaagatccactggcaggaaaagaagtccaacaccatcctgggcagccaggaaggcaacaccatgaagaccaacgacacctacatgaagttcagctggctgaccgtgcccgagaagtccctggacaaagaacacagatgcatcgtgcggcacgaaaacaacaagaacggcgtggaccaggaaatcatcttcccacccatcaagaccgatgtgattacaatggaccccaaggacaactgctccaaggacgccaacgataccctgctgctccagctgaccaacaccagcgcctactacatgtacttgttgctgctgctgaagtccgtggtgtacttcgccatcatcacatgctgcctgctgcggagaaccgccttctgctgcaacggcgagaagtct

SEQ ID NO: 7573 - DNA, 2574 bp, synthetic construct
  source 1..2574: mol_type = other DNA
atggccttaccagtgaccgccttgctcctgccgctggccttgctgctccacgccgccaggccggaagtgcagctggttgaatctggcggaggactggttcagcctggcggatctctgagactgtcttgtgccgccagcggcttcagcttcagcgacttttggatgagctgggtccgacaggcccctggcaaaggacttgaatgggtcgccacaatcagccaggccggcagcgagaaggactacgtggactctgtgaagggcagattcaccatcagccgggacaacgccaagaagtccctgtacctccagatgaacagcctgagagccgaggacaccgccgtgtactattgtgcctctggcgtgtacagcttcgactacagaggccagggcaccctggtcacagtctcttctggtaccggcggaggcggatctggcggcggaggtagcggtggcggaggatctgaattccagagcccatctagcctggctgtgtctgccggcgagaaagtgaccatgagctgcaagagcagccagagcctgctgaacagccggacccggaagaactacctggcctggtatcagcagaagcccggccagagccccaagctgctgatctactgggccagcaccagagaaagcggcgtgcccgatagattcaccggctctggcagcggcaccgacttcaccctgacaatcagcagcgtgcaggccgaggacctggccgtgtactactgcaagcagagcaacctgtacaccttcggcggaggcaccaagctggaaatcaagctcgagatccagaaccctgatcctgccgtgtaccagctgcgggatagcaagagcagcgacaagagcgtgtgtctgttcaccgacttcgacagccagaccaacgtgtcccagagcaaggactccgacgtgtacatcaccgataagtgcgtgctggacatgcggagcatggacttcaagagcaactccgccgtggcctggtccaacaagtccgatttcgcctgcgccaacgccttcaacaacagcattatccccgaggacacattcttcccaagccccgagagcagcgactccaccgaccacgtgaagcccaaagagacagagaacaccaagcagcccagcaagagctgccacaagcccaaggccatcgtgcacaccgagaaagtgaacatgatgagcctgaccgtgctgggcctgcggatgctgttcgccaaaaccgtggccgtgaacttcctgctgaccgccaagctgttcttcctccgcgccaagagaagcggatctggcgtgaagcagaccctgaatttcgacctgctgaagctggctggcgacgtggaatccaacccaggccctactagtatggactggatttggcgcatccttttccttgtcggcgctgctaccggcgcgcattccttcgaacaggtgcagctggaagagtctggacccgagcttgtgaagcctggggccagcgtgaagctgtcctgtaaagccagcggctacaccttcaccgagtacatcatccactgggtcaagcagcggagcggccagggcctggaatggatcggctggttttaccctggctccggcagcatcaagtacaacgagaagttcaaggacaaggccaccctgaccgccgacaagtccagcagcaccgtgtacatggaactgagcggcctgaccagcgaggacagcgccgtgtatttctgcgccagacacgacggctacagctacttcgactattggggccagggcaccacactgaccgtgtcctctacgcgtgaggacctgaagaacgtgttcccacctgaggtggccgtgttcgagcctagcgaggccgagatcagccacacccagaaagccaccctcgtgtgcctggctaccggcttctaccccgaccatgtggaactgtcttggtgggtcaacggcaaagaggtgcacagcggcgtgtgtaccgacccccagccactgaaagaacagcccgccctgaacgacagccggtactgcctgagcagcagactgagagtgtccgccaccttctggcagaacccccggaaccacttcagatgccaggtgcagttctacggcctgagcgagaacgacgagtggacccaggacagagccaagcccgtgacccagatcgtgtctgccgaagcctggggcagagccgatgatgtgattaagatccactggcaggaaaagaagtccaacaccatcctgggcagccaggaaggcaacaccatgaagaccaacgacacctacatgaagttcagctggctgaccgtgcccgagaagtccctggacaaagaacacagatgcatcgtgcggcacgaaaacaacaagaacggcgtggaccaggaaatcatcttcccacccatcaagaccgatgtgattacaatggaccccaaggacaactgctccaaggacgccaacgataccctgctgctccagctgaccaacaccagcgcctactacatgtacttgttgctgctgctgaagtccgtggtgtacttcgccatcatcacatgctgcctgctgcggagaaccgccttctgctgcaacggcgagaagtct

SEQ ID NO: 7574 - DNA, 2583 bp, synthetic construct
  source 1..2583: mol_type = other DNA
atggccttaccagtgaccgccttgctcctgccgctggccttgctgctccacgccgccaggccggaagtgcagctggttgaatctggcggaggactggttcagcctggcggatctctgagactgtcttgtgccgccagcggcttcagcttcagcgacttttggatgagctgggtccgacaggcccctggcaaaggacttgaatgggtcgccacaatcagccaggccggcagcgagaaggactacgtggactctgtgaagggcagattcaccatcagccgggacaacgccaagaagtccctgtacctccagatgaacagcctgagagccgaggacaccgccgtgtactattgtgcctctggcgtgtacagcttcgactacagaggccagggcaccctggtcacagtctcttctggtaccggcggaggcggatctggcggcggaggtagcggtggcggaggatctgaattcgacatccagatgacccagagccccagcagcctgtctgcctctctgggcgagagagtgtccctgacctgtcgggccacacaggaactgagcggctacctgtcttggctgcagcagaagcccgacggcaccatcaagcggctgatctacgccgccagcaccctggatagcggcgtgcccaagagattcagcggcaacagaagcggcagcgactacagcctgaccatcagctccctggaaagcgaggacttcgccgactactactgcctgcagtacgccatctacccctacaccttcggcggaggcaccaagctggaaatcaagctcgagatccagaaccctgatcctgccgtgtaccagctgcgggatagcaagagcagcgacaagagcgtgtgtctgttcaccgacttcgacagccagaccaacgtgtcccagagcaaggactccgacgtgtacatcaccgataagtgcgtgctggacatgcggagcatggacttcaagagcaactccgccgtggcctggtccaacaagtccgatttcgcctgcgccaacgccttcaacaacagcattatccccgaggacacattcttcccaagccccgagagcagcgactccaccgaccacgtgaagcccaaagagacagagaacaccaagcagcccagcaagagctgccacaagcccaaggccatcgtgcacaccgagaaagtgaacatgatgagcctgaccgtgctgggcctgcggatgctgttcgccaaaaccgtggccgtgaacttcctgctgaccgccaagctgttcttcctccgcgccaagagaagcggatctggcgtgaagcagaccctgaatttcgacctgctgaagctggctggcgacgtggaatccaacccaggccctactagtatggactggatttggcgcatccttttccttgtcggcgctgctaccggcgcgcattccttcgaagaggtgcaactgcagcagtctggccccgagcttgtgaagcctggcgcctccgtgaagatgagctgcaaggccagcggctacacctttaccagctacttcatccactgggtcaagcagaaacccggccagggcctggaatggatcggcttcatcaacccttacaacgacggcagcaagtacaacgagaagttcaagggcaaggccaccctgaccagcgacaagagcagcagcaccgcctacatggaactgtccagcctgacatccgaggacagcgccgtgtactactgcaccagggacgacggctactacggctacgccatggactactggggccagggaacaagcgtcaccgtgtcctctacgcgtgaggacctgaagaacgtgttcccacctgaggtggccgtgttcgagcctagcgaggccgagatcagccacacccagaaagccaccctcgtgtgcctggctaccggcttctaccccgaccatgtggaactgtcttggtgggtcaacggcaaagaggtgcacagcggcgtgtgtaccgacccccagccactgaaagaacagcccgccctgaacgacagccggtactgcctgagcagcagactgagagtgtccgccaccttctggcagaacccccggaaccacttcagatgccaggtgcagttctacggcctgagcgagaacgacgagtggacccaggacagagccaagcccgtgacccagatcgtgtctgccgaagcctggggcagagccgatgatgtgattaagatccactggcaggaaaagaagtccaacaccatcctgggcagccaggaaggcaacaccatgaagaccaacgacacctacatgaagttcagctggctgaccgtgcccgagaagtccctggacaaagaacacagatgcatcgtgcggcacgaaaacaacaagaacggcgtggaccaggaaatcatcttcccacccatcaagaccgatgtgattacaatggaccccaaggacaactgctccaaggacgccaacgataccctgctgctccagctgaccaacaccagcgcctactacatgtacttgttgctgctgctgaagtccgtggtgtacttcgccatcatcacatgctgcctgctgcggagaaccgccttctgctgcaacggcgagaagtct

SEQ ID NO: 7575 - DNA, 2598 bp, synthetic construct
  source 1..2598: mol_type = other DNA
atggccttaccagtgaccgccttgctcctgccgctggccttgctgctccacgccgccaggccggaagtgcagctggttgaatctggcggaggactggttcagcctggcggatctctgagactgtcttgtgccgccagcggcttcagcttcagcgacttttggatgagctgggtccgacaggcccctggcaaaggacttgaatgggtcgccacaatcagccaggccggcagcgagaaggactacgtggactctgtgaagggcagattcaccatcagccgggacaacgccaagaagtccctgtacctccagatgaacagcctgagagccgaggacaccgccgtgtactattgtgcctctggcgtgtacagcttcgactacagaggccagggcaccctggtcacagtctcttctggtaccggcggaggcggatctggcggcggaggtagcggtggcggaggatctgaattcgacaccatcgtgctgacacagagccctgcttccctggccgtgtccctgggacagagagccaccatctcttgcagagccagcgagagcgtggacagctacggcaacagcttcatgcactggtatcagcagaagcccggccagccccccaagctgctgatctacctggcctccaacctggaaagcggcgtgcccgccagattttctggcagcggcagcagaaccgacttcaccctgaccatcgaccccgtggaagccgatgatgccgccacctactactgccagcagaacaactacgacccctggaccttcggcggaggcaccaagctggaaatcaagctcgagatccagaaccctgatcctgccgtgtaccagctgcgggatagcaagagcagcgacaagagcgtgtgtctgttcaccgacttcgacagccagaccaacgtgtcccagagcaaggactccgacgtgtacatcaccgataagtgcgtgctggacatgcggagcatggacttcaagagcaactccgccgtggcctggtccaacaagtccgatttcgcctgcgccaacgccttcaacaacagcattatccccgaggacacattcttcccaagccccgagagcagcgactccaccgaccacgtgaagcccaaagagacagagaacaccaagcagcccagcaagagctgccacaagcccaaggccatcgtgcacaccgagaaagtgaacatgatgagcctgaccgtgctgggcctgcggatgctgttcgccaaaaccgtggccgtgaacttcctgctgaccgccaagctgttcttcctccgcgccaagagaagcggatctggcgtgaagcagaccctgaatttcgacctgctgaagctggctggcgacgtggaatccaacccaggccctactagtatggactggatttggcgcatccttttccttgtcggcgctgctaccggcgcgcattccttcgaagaagtgcaactccagcagagcggccctgagcttgtgaagcctggcgcttccgtgaagatgagctgcaaggccagcggctacaccttcaccagctacgtgatgcactgggtcaagcagaaacctggacagggcctggaatggatcggctacatcaacccctacaacgacggcaccaagtacaacgagaagttcaagggcaaggccaccctgacaagcgacaccagcagcagcaccgcctacatggaactgaacagcctgaccagcgaggacagcgccgtgtacttctgcgccagacccatctacttcgacaacgactacttcgattactggggccagggcaccaccctgaaggtgtcctctacgcgtgaggacctgaagaacgtgttcccacctgaggtggccgtgttcgagcctagcgaggccgagatcagccacacccagaaagccaccctcgtgtgcctggctaccggcttctaccccgaccatgtggaactgtcttggtgggtcaacggcaaagaggtgcacagcggcgtgtgtaccgacccccagccactgaaagaacagcccgccctgaacgacagccggtactgcctgagcagcagactgagagtgtccgccaccttctggcagaacccccggaaccacttcagatgccaggtgcagttctacggcctgagcgagaacgacgagtggacccaggacagagccaagcccgtgacccagatcgtgtctgccgaagcctggggcagagccgatgatgtgattaagatccactggcaggaaaagaagtccaacaccatcctgggcagccaggaaggcaacaccatgaagaccaacgacacctacatgaagttcagctggctgaccgtgcccgagaagtccctggacaaagaacacagatgcatcgtgcggcacgaaaacaacaagaacggcgtggaccaggaaatcatcttcccacccatcaagaccgatgtgattacaatggaccccaaggacaactgctccaaggacgccaacgataccctgctgctccagctgaccaacaccagcgcctactacatgtacttgttgctgctgctgaagtccgtggtgtacttcgccatcatcacatgctgcctgctgcggagaaccgccttctgctgcaacggcgagaagtct

SEQ ID NO: 7576 - DNA, 2583 bp, synthetic construct
  source 1..2583: mol_type = other DNA
atggccttaccagtgaccgccttgctcctgccgctggccttgctgctccacgccgccaggccggaagtgcagctggttgaatctggcggaggactggttcagcctggcggatctctgagactgtcttgtgccgccagcggcttcagcttcagcgacttttggatgagctgggtccgacaggcccctggcaaaggacttgaatgggtcgccacaatcagccaggccggcagcgagaaggactacgtggactctgtgaagggcagattcaccatcagccgggacaacgccaagaagtccctgtacctccagatgaacagcctgagagccgaggacaccgccgtgtactattgtgcctctggcgtgtacagcttcgactacagaggccagggcaccctggtcacagtctcttctggtaccggcggaggcggatctggcggcggaggtagcggtggcggaggatctgaattcgacatccagatgacccagagccccagcagcctgtctgccagcgtgggcgacagagtgaccatcacatgcaaggccagccaggacgtgggaatcgccgtggcctggtatcagcagaaacccggcaaggtgcccaagctgctgatctactgggccagcaccagacacaccggcgtgcccgatagattttccggcagcggctccggcaccgacttcaccctgacaatcagctccctccagcccgaggacgtggcaacctactactgccagcagtacagcagctacccctacaccttcggccagggcaccaaggtggaaatcaagagactcgagatccagaaccctgatcctgccgtgtaccagctgcgggatagcaagagcagcgacaagagcgtgtgtctgttcaccgacttcgacagccagaccaacgtgtcccagagcaaggactccgacgtgtacatcaccgataagtgcgtgctggacatgcggagcatggacttcaagagcaactccgccgtggcctggtccaacaagtccgatttcgcctgcgccaacgccttcaacaacagcattatccccgaggacacattcttcccaagccccgagagcagcgactccaccgaccacgtgaagcccaaagagacagagaacaccaagcagcccagcaagagctgccacaagcccaaggccatcgtgcacaccgagaaagtgaacatgatgagcctgaccgtgctgggcctgcggatgctgttcgccaaaaccgtggccgtgaacttcctgctgaccgccaagctgttcttcctccgcgccaagagaagcggatctggcgtgaagcagaccctgaatttcgacctgctgaagctggctggcgacgtggaatccaacccaggccctactagtatggactggatttggcgcatccttttccttgtcggcgctgctaccggcgcgcattccttcgaagaagtgcaactggtggaatcaggcggcggactggtgcagcctggcggatctctgagactgagctgtgccgccagcggcttcgacttcagccggtactggatgagctgggtgcgccaggcccctggcaaaggactggaatggatcggcgagatcaaccccgacagcagcaccatcaactacgcccccagcctgaaggacaagttcatcatcagccgggacaacgccaagaacagcctgtacctccagatgaactccctgcgggccgaggacaccgccgtgtactattgcgccagacccgacggcaactactggtacttcgacgtgtggggccagggaaccctcgtgaccgtgtcatctacgcgtgaggacctgaagaacgtgttcccacctgaggtggccgtgttcgagcctagcgaggccgagatcagccacacccagaaagccaccctcgtgtgcctggctaccggcttctaccccgaccatgtggaactgtcttggtgggtcaacggcaaagaggtgcacagcggcgtgtgtaccgacccccagccactgaaagaacagcccgccctgaacgacagccggtactgcctgagcagcagactgagagtgtccgccaccttctggcagaacccccggaaccacttcagatgccaggtgcagttctacggcctgagcgagaacgacgagtggacccaggacagagccaagcccgtgacccagatcgtgtctgccgaagcctggggcagagccgatgatgtgattaagatccactggcaggaaaagaagtccaacaccatcctgggcagccaggaaggcaacaccatgaagaccaacgacacctacatgaagttcagctggctgaccgtgcccgagaagtccctggacaaagaacacagatgcatcgtgcggcacgaaaacaacaagaacggcgtggaccaggaaatcatcttcccacccatcaagaccgatgtgattacaatggaccccaaggacaactgctccaaggacgccaacgataccctgctgctccagctgaccaacaccagcgcctactacatgtacttgttgctgctgctgaagtccgtggtgtacttcgccatcatcacatgctgcctgctgcggagaaccgccttctgctgcaacggcgagaagtct

SEQ ID NO: 7577 - DNA, 2583 bp, synthetic construct
  source 1..2583: mol_type = other DNA
atggccttaccagtgaccgccttgctcctgccgctggccttgctgctccacgccgccaggccggaagtgcagctggttgaatctggcggaggactggttcagcctggcggatctctgagactgtcttgtgccgccagcggcttcagcttcagcgacttttggatgagctgggtccgacaggcccctggcaaaggacttgaatgggtcgccacaatcagccaggccggcagcgagaaggactacgtggactctgtgaagggcagattcaccatcagccgggacaacgccaagaagtccctgtacctccagatgaacagcctgagagccgaggacaccgccgtgtactattgtgcctctggcgtgtacagcttcgactacagaggccagggcaccctggtcacagtctcttctggtaccggcggaggcggatctggcggcggaggtagcggtggcggaggatctgaattcgacatcgtgatgacccagagccagaagagcatgagcaccagcgtgggcgacagagtgagcatcacctgcaaggccagccaggacgtgatcaccggcgtggcctggtaccagcagaagcccggccagagccccaagctgctgatctacagcgccagctacagatacaccggcgtgcccgacagattcaccggcagcggcagcggcaccgacttcaccttcaccatcagcaacgtgcaggccgaggacctggccgtgtactactgccagcagcactacagcacccccctgaccttcggcgccggcaccaagctggagctgaagctcgagatccagaaccctgatcctgccgtgtaccagctgcgggatagcaagagcagcgacaagagcgtgtgtctgttcaccgacttcgacagccagaccaacgtgtcccagagcaaggactccgacgtgtacatcaccgataagtgcgtgctggacatgcggagcatggacttcaagagcaactccgccgtggcctggtccaacaagtccgatttcgcctgcgccaacgccttcaacaacagcattatccccgaggacacattcttcccaagccccgagagcagcgactccaccgaccacgtgaagcccaaagagacagagaacaccaagcagcccagcaagagctgccacaagcccaaggccatcgtgcacaccgagaaagtgaacatgatgagcctgaccgtgctgggcctgcggatgctgttcgccaaaaccgtggccgtgaacttcctgctgaccgccaagctgttcttcctccgcgccaagagaagcggatctggcgtgaagcagaccctgaatttcgacctgctgaagctggctggcgacgtggaatccaacccaggccctactagtatggactggatttggcgcatccttttccttgtcggcgctgctaccggcgcgcattccttcgaacaggtgcagctgcagcagcccggcgccgagctggtgagacccggcgccagcgtgaagctgagctgcaaggccagcggctacagcttcaccacctactggatgaactgggtgaagcagagacccggccagggcctggagtggatcggcatgatccaccccagcgacagcgagaccagactgaaccagaagttcaaggacaaggccaccctgaccgtggacaagagcagcagcaccgcctacatgcagctgagcagccccaccagcgaggacagcgccgtgtactactgcgccagaagcaccatgatcgccaccagagccatggactactggggccagggcaccagcgtgaccgtgagcagcacgcgtgaggacctgaagaacgtgttcccacctgaggtggccgtgttcgagcctagcgaggccgagatcagccacacccagaaagccaccctcgtgtgcctggctaccggcttctaccccgaccatgtggaactgtcttggtgggtcaacggcaaagaggtgcacagcggcgtgtgtaccgacccccagccactgaaagaacagcccgccctgaacgacagccggtactgcctgagcagcagactgagagtgtccgccaccttctggcagaacccccggaaccacttcagatgccaggtgcagttctacggcctgagcgagaacgacgagtggacccaggacagagccaagcccgtgacccagatcgtgtctgccgaagcctggggcagagccgatgatgtgattaagatccactggcaggaaaagaagtccaacaccatcctgggcagccaggaaggcaacaccatgaagaccaacgacacctacatgaagttcagctggctgaccgtgcccgagaagtccctggacaaagaacacagatgcatcgtgcggcacgaaaacaacaagaacggcgtggaccaggaaatcatcttcccacccatcaagaccgatgtgattacaatggaccccaaggacaactgctccaaggacgccaacgataccctgctgctccagctgaccaacaccagcgcctactacatgtacttgttgctgctgctgaagtccgtggtgtacttcgccatcatcacatgctgcctgctgcggagaaccgccttctgctgcaacggcgagaagtct

SEQ ID NO: 7578 - DNA, 2601 bp, synthetic construct
  source 1..2601: mol_type = other DNA
atggccttaccagtgaccgccttgctcctgccgctggccttgctgctccacgccgccaggccggaagtgcagctggttgaatctggcggaggactggttcagcctggcggatctctgagactgtcttgtgccgccagcggcttcagcttcagcgacttttggatgagctgggtccgacaggcccctggcaaaggacttgaatgggtcgccacaatcagccaggccggcagcgagaaggactacgtggactctgtgaagggcagattcaccatcagccgggacaacgccaagaagtccctgtacctccagatgaacagcctgagagccgaggacaccgccgtgtactattgtgcctctggcgtgtacagcttcgactacagaggccagggcaccctggtcacagtctcttctggtaccggcggaggcggatctggcggcggaggtagcggtggcggaggatctgaattccagagcgtgctgacacagcctccatccgtgtctggcgctccaggccagagagtgaccatctcctgtaccggcagcggcagcaacatcggagccccctacgacgtgtcctggtatcagcaactgcctggcaccgcccccaagctgctgatctaccacaacaacaagcggcccagcggcgtgcccgatagattcagcggctctaagagcggcaccagcgccagcctggctatcactggactccaggccgaggacgaggccgactactactgtgccacagtggaagccggcctgagcggctctgtgtttggcggcggaacaaagctgaccgtgctgggagctctcgagatccagaaccctgatcctgccgtgtaccagctgcgggatagcaagagcagcgacaagagcgtgtgtctgttcaccgacttcgacagccagaccaacgtgtcccagagcaaggactccgacgtgtacatcaccgataagtgcgtgctggacatgcggagcatggacttcaagagcaactccgccgtggcctggtccaacaagtccgatttcgcctgcgccaacgccttcaacaacagcattatccccgaggacacattcttcccaagccccgagagcagcgactccaccgaccacgtgaagcccaaagagacagagaacaccaagcagcccagcaagagctgccacaagcccaaggccatcgtgcacaccgagaaagtgaacatgatgagcctgaccgtgctgggcctgcggatgctgttcgccaaaaccgtggccgtgaacttcctgctgaccgccaagctgttcttcctccgcgccaagagaagcggatctggcgtgaagcagaccctgaatttcgacctgctgaagctggctggcgacgtggaatccaacccaggccctactagtatggactggatttggcgcatccttttccttgtcggcgctgctaccggcgcgcattccttcgaacaggtgcaactggtgcagagcggagccgaagtgaagaaacctggggccagcgtgaaggtgtcctgcaaggtgtccggctacaccctgaccgagctgagcattcactgggtgcgccaggcccctggcaagggactggaatggatgggcggcttcgaccccgaagagaacgagatcgtgtacgcccagcggttccagggcagagtgacaatgaccgaggacaccagcaccgacaccgcctacatggaactgagcagcctgcggagcgaggataccgccgtgtactactgcgccatcgtgggcagcttcagccctctgacactgggcctgtggggccagggaactatggtcaccgtgtccagcacgcgtgaggacctgaagaacgtgttcccacctgaggtggccgtgttcgagcctagcgaggccgagatcagccacacccagaaagccaccctcgtgtgcctggctaccggcttctaccccgaccatgtggaactgtcttggtgggtcaacggcaaagaggtgcacagcggcgtgtgtaccgacccccagccactgaaagaacagcccgccctgaacgacagccggtactgcctgagcagcagactgagagtgtccgccaccttctggcagaacccccggaaccacttcagatgccaggtgcagttctacggcctgagcgagaacgacgagtggacccaggacagagccaagcccgtgacccagatcgtgtctgccgaagcctggggcagagccgatgatgtgattaagatccactggcaggaaaagaagtccaacaccatcctgggcagccaggaaggcaacaccatgaagaccaacgacacctacatgaagttcagctggctgaccgtgcccgagaagtccctggacaaagaacacagatgcatcgtgcggcacgaaaacaacaagaacggcgtggaccaggaaatcatcttcccacccatcaagaccgatgtgattacaatggaccccaaggacaactgctccaaggacgccaacgataccctgctgctccagctgaccaacaccagcgcctactacatgtacttgttgctgctgctgaagtccgtggtgtacttcgccatcatcacatgctgcctgctgcggagaaccgccttctgctgcaacggcgagaagtct

SEQ ID NO: 7579 - DNA, 2601 bp, synthetic construct
  source 1..2601: mol_type = other DNA
atggccttaccagtgaccgccttgctcctgccgctggccttgctgctccacgccgccaggccggaagtgcagctggttgaatctggcggaggactggttcagcctggcggatctctgagactgtcttgtgccgccagcggcttcagcttcagcgacttttggatgagctgggtccgacaggcccctggcaaaggacttgaatgggtcgccacaatcagccaggccggcagcgagaaggactacgtggactctgtgaagggcagattcaccatcagccgggacaacgccaagaagtccctgtacctccagatgaacagcctgagagccgaggacaccgccgtgtactattgtgcctctggcgtgtacagcttcgactacagaggccagggcaccctggtcacagtctcttctggtaccggcggaggcggatctggcggcggaggtagcggtggcggaggatctgaattccagagcgtgctgacacagcctccatccgtgtctggcgctccaggccagagagtgaccatctcctgtaccggcagcggcagcaacatcggagccccctacgacgtgtcctggtatcagcaactgcctggcaccgcccccaagctgctgatctaccacaacaacaagcggcccagcggcgtgcccgatagattcagcggctctaagagcggcaccagcgccagcctggctatcactggactccaggccgaggacgaggccgactactactgccagagctacgacagcagcagcatcagcaccatcttcggcggaggcaccaagctgacagtgctgggagctctcgagatccagaaccctgatcctgccgtgtaccagctgcgggatagcaagagcagcgacaagagcgtgtgtctgttcaccgacttcgacagccagaccaacgtgtcccagagcaaggactccgacgtgtacatcaccgataagtgcgtgctggacatgcggagcatggacttcaagagcaactccgccgtggcctggtccaacaagtccgatttcgcctgcgccaacgccttcaacaacagcattatccccgaggacacattcttcccaagccccgagagcagcgactccaccgaccacgtgaagcccaaagagacagagaacaccaagcagcccagcaagagctgccacaagcccaaggccatcgtgcacaccgagaaagtgaacatgatgagcctgaccgtgctgggcctgcggatgctgttcgccaaaaccgtggccgtgaacttcctgctgaccgccaagctgttcttcctccgcgccaagagaagcggatctggcgtgaagcagaccctgaatttcgacctgctgaagctggctggcgacgtggaatccaacccaggccctactagtatggactggatttggcgcatccttttccttgtcggcgctgctaccggcgcgcattccttcgaacaggtgcaactggtgcagagcggagccgaagtgaagaaacctggggccagcgtgaaggtgtcctgcaaggtgtccggctacaccctgaccgagctgagcattcactgggtgcgccaggcccctggcaagggactggaatggatgggcggcttcgaccccgaagagaacgagatcgtgtacgcccagcggttccagggcagagtgacaatgaccgaggacaccagcaccgacaccgcctacatggaactgagcagcctgcggagcgaggataccgccgtgtactactgtgccatcgtgggcagcttcagcggaatcgcctacagaccttggggccagggcacaatggtcaccgtgtctagcacgcgtgaggacctgaagaacgtgttcccacctgaggtggccgtgttcgagcctagcgaggccgagatcagccacacccagaaagccaccctcgtgtgcctggctaccggcttctaccccgaccatgtggaactgtcttggtgggtcaacggcaaagaggtgcacagcggcgtgtgtaccgacccccagccactgaaagaacagcccgccctgaacgacagccggtactgcctgagcagcagactgagagtgtccgccaccttctggcagaacccccggaaccacttcagatgccaggtgcagttctacggcctgagcgagaacgacgagtggacccaggacagagccaagcccgtgacccagatcgtgtctgccgaagcctggggcagagccgatgatgtgattaagatccactggcaggaaaagaagtccaacaccatcctgggcagccaggaaggcaacaccatgaagaccaacgacacctacatgaagttcagctggctgaccgtgcccgagaagtccctggacaaagaacacagatgcatcgtgcggcacgaaaacaacaagaacggcgtggaccaggaaatcatcttcccacccatcaagaccgatgtgattacaatggaccccaaggacaactgctccaaggacgccaacgataccctgctgctccagctgaccaacaccagcgcctactacatgtacttgttgctgctgctgaagtccgtggtgtacttcgccatcatcacatgctgcctgctgcggagaaccgccttctgctgcaacggcgagaagtct

SEQ ID NO: 7580 - DNA, 2565 bp, synthetic construct
  source 1..2565: mol_type = other DNA
atggccttaccagtgaccgccttgctcctgccgctggccttgctgctccacgccgccaggccggaagtgcagctggttgaatctggcggaggactggttcagcctggcggatctctgagactgtcttgtgccgccagcggcttcagcttcagcgacttttggatgagctgggtccgacaggcccctggcaaaggacttgaatgggtcgccacaatcagccaggccggcagcgagaaggactacgtggactctgtgaagggcagattcaccatcagccgggacaacgccaagaagtccctgtacctccagatgaacagcctgagagccgaggacaccgccgtgtactattgtgcctctggcgtgtacagcttcgactacagaggccagggcaccctggtcacagtctcttctggtaccggcggaggcggatctggcggcggaggtagcggtggcggaggatctgaattcgacatccagatgacccagagccccagcagcctgtctgccagcgtgggcgacagagtgaccatcacctgtagagccagccagggcatcagaaacaacctggcctggtatcagcagaagcccggcaaggcccccaagcggctgatctacgccgccagcaatctccagagcggcgtgcccagcagattcacaggctctggcagcggcaccgagttcaccctgatcgtgtctagcctccagcccgaggacttcgccacctactactgcctccagcaccacagctaccccctgacatctggcggaggcaccaaggtggaactcgagatccagaaccctgatcctgccgtgtaccagctgcgggatagcaagagcagcgacaagagcgtgtgtctgttcaccgacttcgacagccagaccaacgtgtcccagagcaaggactccgacgtgtacatcaccgataagtgcgtgctggacatgcggagcatggacttcaagagcaactccgccgtggcctggtccaacaagtccgatttcgcctgcgccaacgccttcaacaacagcattatccccgaggacacattcttcccaagccccgagagcagcgactccaccgaccacgtgaagcccaaagagacagagaacaccaagcagcccagcaagagctgccacaagcccaaggccatcgtgcacaccgagaaagtgaacatgatgagcctgaccgtgctgggcctgcggatgctgttcgccaaaaccgtggccgtgaacttcctgctgaccgccaagctgttcttcctccgcgccaagagaagcggatctggcgtgaagcagaccctgaatttcgacctgctgaagctggctggcgacgtggaatccaacccaggccctactagtatggactggatttggcgcatccttttccttgtcggcgctgctaccggcgcgcattccttcgaagaggtgcaggtgctggaaagtggcggaggactggtgcagcctggcggctctctgagactgtcttgtgccgccagcggcttcaccttcagcagctacgccatgagctgggtgcgccaggcccctggaaaaggactggaatgggtgtccgccatcagcggctctggcgggtctaccaactacgccgatagcgtgaagggccggttcaccatcagccgggacaacagcaagaacaccctgtacctccagatgaacagcctgcgggccgaggacaccgccgtgtattattgtgccggcagcagcgggtggagcgagtattggggacagggcaccctcgtgaccgtgtcctctacgcgtgaggacctgaagaacgtgttcccacctgaggtggccgtgttcgagcctagcgaggccgagatcagccacacccagaaagccaccctcgtgtgcctggctaccggcttctaccccgaccatgtggaactgtcttggtgggtcaacggcaaagaggtgcacagcggcgtgtgtaccgacccccagccactgaaagaacagcccgccctgaacgacagccggtactgcctgagcagcagactgagagtgtccgccaccttctggcagaacccccggaaccacttcagatgccaggtgcagttctacggcctgagcgagaacgacgagtggacccaggacagagccaagcccgtgacccagatcgtgtctgccgaagcctggggcagagccgatgatgtgattaagatccactggcaggaaaagaagtccaacaccatcctgggcagccaggaaggcaacaccatgaagaccaacgacacctacatgaagttcagctggctgaccgtgcccgagaagtccctggacaaagaacacagatgcatcgtgcggcacgaaaacaacaagaacggcgtggaccaggaaatcatcttcccacccatcaagaccgatgtgattacaatggaccccaaggacaactgctccaaggacgccaacgataccctgctgctccagctgaccaacaccagcgcctactacatgtacttgttgctgctgctgaagtccgtggtgtacttcgccatcatcacatgctgcctgctgcggagaaccgccttctgctgcaacggcgagaagtct

SEQ ID NO: 7581 - DNA, 2583 bp, synthetic construct
  source 1..2583: mol_type = other DNA
atggccttaccagtgaccgccttgctcctgccgctggccttgctgctccacgccgccaggccggaagtgcagctggttgaatctggcggaggactggttcagcctggcggatctctgagactgtcttgtgccgccagcggcttcagcttcagcgacttttggatgagctgggtccgacaggcccctggcaaaggacttgaatgggtcgccacaatcagccaggccggcagcgagaaggactacgtggactctgtgaagggcagattcaccatcagccgggacaacgccaagaagtccctgtacctccagatgaacagcctgagagccgaggacaccgccgtgtactattgtgcctctggcgtgtacagcttcgactacagaggccagggcaccctggtcacagtctcttctggtaccggcggaggcggatctggcggcggaggtagcggtggcggaggatctgaattcgacgagatccagctggtgcagagcggagccgaagtgaagaagcctggcgagagcctgcggatcagctgcaagggcagcggcttcaacatcgaggactactacatccactgggtgcgccagatgcccggcaagggcctggaatggatgggcagaatcgaccccgagaacgacgagactaagtacggccccatcttccagggccacgtgaccatcagcgccgacaccagcatcaacaccgtgtacctccagtggtccagcctgaaggccagcgacaccgccatgtactactgcgcctttagaggcggcgtgtactggggccagggcaccacagtgacagtgtctagcctcgagatccagaaccctgatcctgccgtgtaccagctgcgggatagcaagagcagcgacaagagcgtgtgtctgttcaccgacttcgacagccagaccaacgtgtcccagagcaaggactccgacgtgtacatcaccgataagtgcgtgctggacatgcggagcatggacttcaagagcaactccgccgtggcctggtccaacaagtccgatttcgcctgcgccaacgccttcaacaacagcattatccccgaggacacattcttcccaagccccgagagcagcgactccaccgaccacgtgaagcccaaagagacagagaacaccaagcagcccagcaagagctgccacaagcccaaggccatcgtgcacaccgagaaagtgaacatgatgagcctgaccgtgctgggcctgcggatgctgttcgccaaaaccgtggccgtgaacttcctgctgaccgccaagctgttcttcctccgcgccaagagaagcggatctggcgtgaagcagaccctgaatttcgacctgctgaagctggctggcgacgtggaatccaacccaggccctactagtatggactggatttggcgcatccttttccttgtcggcgctgctaccggcgcgcattccttcgaagatgtcgtgatgacccagagccccgacagcctggctgtgtctctgggagagagagccaccatcaactgcaagtccagccagtccctgctggacagcgacggcaagacctacctgaactggctccagcagaagcccggccagccccccaagagactgatctccctggtgtccaagctggactccggcgtgcccgatagattttccggctctggcagcggcaccgacttcaccctgacaatcagctcccttcaggccgaggacgtggccgtgtactattgctggcagggcacacacttccccggcacctttggcggaggcaccaaggtggaaatcaagacgcgtgaggacctgaagaacgtgttcccacctgaggtggccgtgttcgagcctagcgaggccgagatcagccacacccagaaagccaccctcgtgtgcctggctaccggcttctaccccgaccatgtggaactgtcttggtgggtcaacggcaaagaggtgcacagcggcgtgtgtaccgacccccagccactgaaagaacagcccgccctgaacgacagccggtactgcctgagcagcagactgagagtgtccgccaccttctggcagaacccccggaaccacttcagatgccaggtgcagttctacggcctgagcgagaacgacgagtggacccaggacagagccaagcccgtgacccagatcgtgtctgccgaagcctggggcagagccgatgatgtgattaagatccactggcaggaaaagaagtccaacaccatcctgggcagccaggaaggcaacaccatgaagaccaacgacacctacatgaagttcagctggctgaccgtgcccgagaagtccctggacaaagaacacagatgcatcgtgcggcacgaaaacaacaagaacggcgtggaccaggaaatcatcttcccacccatcaagaccgatgtgattacaatggaccccaaggacaactgctccaaggacgccaacgataccctgctgctccagctgaccaacaccagcgcctactacatgtacttgttgctgctgctgaagtccgtggtgtacttcgccatcatcacatgctgcctgctgcggagaaccgccttctgctgcaacggcgagaagtct

SEQ ID NO: 7582 - DNA, 2604 bp, synthetic construct
  source 1..2604: mol_type = other DNA
atggccttaccagtgaccgccttgctcctgccgctggccttgctgctccacgccgccaggccggaagtgcagctggttgaatctggcggaggactggttcagcctggcggatctctgagactgtcttgtgccgccagcggcttcagcttcagcgacttttggatgagctgggtccgacaggcccctggcaaaggacttgaatgggtcgccacaatcagccaggccggcagcgagaaggactacgtggactctgtgaagggcagattcaccatcagccgggacaacgccaagaagtccctgtacctccagatgaacagcctgagagccgaggacaccgccgtgtactattgtgcctctggcgtgtacagcttcgactacagaggccagggcaccctggtcacagtctcttctggtaccggcggaggcggatctggcggcggaggtagcggtggcggaggatctgaattcgacgagcttgtgatgacccagagccccagcagcctgacagtgacagccggcgagaaagtgaccatgagctgcaagagcagccagagcctgctgaacagcggcaaccagaagaactacctgacctggtatcagcagaagcccggccagccccccaagctgctgatctactgggccagcaccagagaaagcggcgtgcccgatagattcaccggctctggcagcggcaccgacttcaccctgacaatcagcagcgtgcaggccgaggacctggccgtgtactactgccagaacgactacagctaccccctgaccttcggagccggcaccaagctggaaatcaagctcgagatccagaaccctgatcctgccgtgtaccagctgcgggatagcaagagcagcgacaagagcgtgtgtctgttcaccgacttcgacagccagaccaacgtgtcccagagcaaggactccgacgtgtacatcaccgataagtgcgtgctggacatgcggagcatggacttcaagagcaactccgccgtggcctggtccaacaagtccgatttcgcctgcgccaacgccttcaacaacagcattatccccgaggacacattcttcccaagccccgagagcagcgactccaccgaccacgtgaagcccaaagagacagagaacaccaagcagcccagcaagagctgccacaagcccaaggccatcgtgcacaccgagaaagtgaacatgatgagcctgaccgtgctgggcctgcggatgctgttcgccaaaaccgtggccgtgaacttcctgctgaccgccaagctgttcttcctccgcgccaagagaagcggatctggcgtgaagcagaccctgaatttcgacctgctgaagctggctggcgacgtggaatccaacccaggccctactagtatggactggatttggcgcatccttttccttgtcggcgctgctaccggcgcgcattccttcgaagaagtgcagctgctggaacagtctggcgccgaacttgtgcggcctggcaccagcgtgaagatcagctgtaaagccagcggctacgccttcaccaactactggctgggctgggtcaagcagaggcctggacacggcctggaatggatcggcgacatctttcccggctccggcaacatccactacaacgagaagttcaagggcaaggccaccctgaccgccgacaagtctagcagcaccgcctacatgcagctgtccagcctgacctttgaggacagcgccgtgtatttctgtgcccggctgcggaactgggacgagcccatggattattggggccagggcaccaccgtgaccgtgtctagtacgcgtgaggacctgaagaacgtgttcccacctgaggtggccgtgttcgagcctagcgaggccgagatcagccacacccagaaagccaccctcgtgtgcctggctaccggcttctaccccgaccatgtggaactgtcttggtgggtcaacggcaaagaggtgcacagcggcgtgtgtaccgacccccagccactgaaagaacagcccgccctgaacgacagccggtactgcctgagcagcagactgagagtgtccgccaccttctggcagaacccccggaaccacttcagatgccaggtgcagttctacggcctgagcgagaacgacgagtggacccaggacagagccaagcccgtgacccagatcgtgtctgccgaagcctggggcagagccgatgatgtgattaagatccactggcaggaaaagaagtccaacaccatcctgggcagccaggaaggcaacaccatgaagaccaacgacacctacatgaagttcagctggctgaccgtgcccgagaagtccctggacaaagaacacagatgcatcgtgcggcacgaaaacaacaagaacggcgtggaccaggaaatcatcttcccacccatcaagaccgatgtgattacaatggaccccaaggacaactgctccaaggacgccaacgataccctgctgctccagctgaccaacaccagcgcctactacatgtacttgttgctgctgctgaagtccgtggtgtacttcgccatcatcacatgctgcctgctgcggagaaccgccttctgctgcaacggcgagaagtct

SEQ ID NO: 7583 - DNA, 2607 bp, synthetic construct
  source 1..2607: mol_type = other DNA
atggccttaccagtgaccgccttgctcctgccgctggccttgctgctccacgccgccaggccggaagtgcagctggttgaatctggcggaggactggttcagcctggcggatctctgagactgtcttgtgccgccagcggcttcagcttcagcgacttttggatgagctgggtccgacaggcccctggcaaaggacttgaatgggtcgccacaatcagccaggccggcagcgagaaggactacgtggactctgtgaagggcagattcaccatcagccgggacaacgccaagaagtccctgtacctccagatgaacagcctgagagccgaggacaccgccgtgtactattgtgcctctggcgtgtacagcttcgactacagaggccagggcaccctggtcacagtctcttctggtaccggcggaggcggatctggcggcggaggtagcggtggcggaggatctgaattcgacgagctgcagatgacccagagccctagcagcctgtctgccagcgtgggcgacagagtgaccatcacctgtagagccagccagagcatcagcagctacctgaactggtatcagcagaagcccggccagccccccaaactgctgatctactgggccagcaccagagaaagcggcgtgcccgatagattcagcggcagcgagagcggcaccaactacaccctgaccatcagctccctgcagcccgaggacttcgccacctacttttgccagcagagcgacagcctgcccatcacctttggacagggcacccggctggacattcagctcgagatccagaaccctgatcctgccgtgtaccagctgcgggatagcaagagcagcgacaagagcgtgtgtctgttcaccgacttcgacagccagaccaacgtgtcccagagcaaggactccgacgtgtacatcaccgataagtgcgtgctggacatgcggagcatggacttcaagagcaactccgccgtggcctggtccaacaagtccgatttcgcctgcgccaacgccttcaacaacagcattatccccgaggacacattcttcccaagccccgagagcagcgactccaccgaccacgtgaagcccaaagagacagagaacaccaagcagcccagcaagagctgccacaagcccaaggccatcgtgcacaccgagaaagtgaacatgatgagcctgaccgtgctgggcctgcggatgctgttcgccaaaaccgtggccgtgaacttcctgctgaccgccaagctgttcttcctccgcgccaagagaagcggatctggcgtgaagcagaccctgaatttcgacctgctgaagctggctggcgacgtggaatccaacccaggccctactagtatggactggatttggcgcatccttttccttgtcggcgctgctaccggcgcgcattccttcgaagaggtgcaactgctggaatctgggggcggagtggtgcagcctggcagaagcctgagactgagctgtgccgccagcggcttcaccttcagctcctacggaatgcactgggtgcgccaggcccctggcaaaggactggaatgggtggccgtgatctcctacgacggcagcaacaagtactacgccgacagcgtgaagggccggttcaccatcagccgggacaacagcaagaacaccctgtacctgcagatgaacagcctgcgggccgaggacaccgccgtgtactactgcgccaaggatatgggctggggcagcggctggcggccttactactactacggcatggacgtgtggggccagggcaccaccgtgacagtgtcatctacgcgtgaggacctgaagaacgtgttcccacctgaggtggccgtgttcgagcctagcgaggccgagatcagccacacccagaaagccaccctcgtgtgcctggctaccggcttctaccccgaccatgtggaactgtcttggtgggtcaacggcaaagaggtgcacagcggcgtgtgtaccgacccccagccactgaaagaacagcccgccctgaacgacagccggtactgcctgagcagcagactgagagtgtccgccaccttctggcagaacccccggaaccacttcagatgccaggtgcagttctacggcctgagcgagaacgacgagtggacccaggacagagccaagcccgtgacccagatcgtgtctgccgaagcctggggcagagccgatgatgtgattaagatccactggcaggaaaagaagtccaacaccatcctgggcagccaggaaggcaacaccatgaagaccaacgacacctacatgaagttcagctggctgaccgtgcccgagaagtccctggacaaagaacacagatgcatcgtgcggcacgaaaacaacaagaacggcgtggaccaggaaatcatcttcccacccatcaagaccgatgtgattacaatggaccccaaggacaactgctccaaggacgccaacgataccctgctgctccagctgaccaacaccagcgcctactacatgtacttgttgctgctgctgaagtccgtggtgtacttcgccatcatcacatgctgcctgctgcggagaaccgccttctgctgcaacggcgagaagtct

SEQ ID NO: 7584 - DNA, 2598 bp, synthetic construct
  source 1..2598: mol_type = other DNA
atggccttaccagtgaccgccttgctcctgccgctggccttgctgctccacgccgccaggccggaagtgcagctggttgaatctggcggaggactggttcagcctggcggatctctgagactgtcttgtgccgccagcggcttcagcttcagcgacttttggatgagctgggtccgacaggcccctggcaaaggacttgaatgggtcgccacaatcagccaggccggcagcgagaaggactacgtggactctgtgaagggcagattcaccatcagccgggacaacgccaagaagtccctgtacctccagatgaacagcctgagagccgaggacaccgccgtgtactattgtgcctctggcgtgtacagcttcgactacagaggccagggcaccctggtcacagtctcttctggtaccggcggaggcggatctggcggcggaggtagcggtggcggaggatctgaattcgacgacatccaaatgacacagagtccttctagtttgagtgcgagcgtgggggacagggtgaccattacctgcagggccagccagagcataagctcataccttaattggtaccagcaaaaaccaggtaaggcccctaagctcctgatctacgcggcctcttcacttcaatctggggtcccttcccgcttcagtggctccggcagcggcaccgacttcacgctcactatatcaagtctgcagcctgaggatctcgccacctattactgtcaacaaagttattccacccctttcacctttggaccgggcacgaaagtggatattaagctcgagatccagaaccctgatcctgccgtgtaccagctgcgggatagcaagagcagcgacaagagcgtgtgtctgttcaccgacttcgacagccagaccaacgtgtcccagagcaaggactccgacgtgtacatcaccgataagtgcgtgctggacatgcggagcatggacttcaagagcaactccgccgtggcctggtccaacaagtccgatttcgcctgcgccaacgccttcaacaacagcattatccccgaggacacattcttcccaagccccgagagcagcgactccaccgaccacgtgaagcccaaagagacagagaacaccaagcagcccagcaagagctgccacaagcccaaggccatcgtgcacaccgagaaagtgaacatgatgagcctgaccgtgctgggcctgcggatgctgttcgccaaaaccgtggccgtgaacttcctgctgaccgccaagctgttcttcctccgcgccaagagaagcggatctggcgtgaagcagaccctgaatttcgacctgctgaagctggctggcgacgtggaatccaacccaggccctactagtatggactggatttggcgcatccttttccttgtcggcgctgctaccggcgcgcattccttcgaagtgcacgaggtccagcttgtgcagtccggggcagaggtcaagaagcctggttctagcgtaaaagtgagttgcaaagcctcaggtgggacattttcatcctacgcgatcagttgggttagacaggctcctggtcaagggctggaatggatgggcggaattattccaatcttcggaacagcgaattacgcgcagaagttccagggtagagtaaccatcactgctgacaagtccacctccaccgcatacatggaattgtctagtctccggagcgaggatacggcggtgtattattgtgctacgttcgccctgtttggcttccgcgaacaggctttcgacatctgggggcagggcacgacagtcacggttagtagtacgcgtgaggacctgaagaacgtgttcccacctgaggtggccgtgttcgagcctagcgaggccgagatcagccacacccagaaagccaccctcgtgtgcctggctaccggcttctaccccgaccatgtggaactgtcttggtgggtcaacggcaaagaggtgcacagcggcgtgtgtaccgacccccagccactgaaagaacagcccgccctgaacgacagccggtactgcctgagcagcagactgagagtgtccgccaccttctggcagaacccccggaaccacttcagatgccaggtgcagttctacggcctgagcgagaacgacgagtggacccaggacagagccaagcccgtgacccagatcgtgtctgccgaagcctggggcagagccgatgatgtgattaagatccactggcaggaaaagaagtccaacaccatcctgggcagccaggaaggcaacaccatgaagaccaacgacacctacatgaagttcagctggctgaccgtgcccgagaagtccctggacaaagaacacagatgcatcgtgcggcacgaaaacaacaagaacggcgtggaccaggaaatcatcttcccacccatcaagaccgatgtgattacaatggaccccaaggacaactgctccaaggacgccaacgataccctgctgctccagctgaccaacaccagcgcctactacatgtacttgttgctgctgctgaagtccgtggtgtacttcgccatcatcacatgctgcctgctgcggagaaccgccttctgctgcaacggcgagaagtct

SEQ ID NO: 7585 - DNA, 2592 bp, synthetic construct
  source 1..2592: mol_type = other DNA
atggccttaccagtgaccgccttgctcctgccgctggccttgctgctccacgccgccaggccggaagtgcagctggttgaatctggcggaggactggttcagcctggcggatctctgagactgtcttgtgccgccagcggcttcagcttcagcgacttttggatgagctgggtccgacaggcccctggcaaaggacttgaatgggtcgccacaatcagccaggccggcagcgagaaggactacgtggactctgtgaagggcagattcaccatcagccgggacaacgccaagaagtccctgtacctccagatgaacagcctgagagccgaggacaccgccgtgtactattgtgcctctggcgtgtacagcttcgactacagaggccagggcaccctggtcacagtctcttctggtaccggcggaggcggatctggcggcggaggtagcggtggcggaggatctgaattcgacatcgtgctgacccagagccctctgagcctggccgtgtctctgggacagcctgccatcatcagctgcaaggccagccagagcgtgtcctttgccggcacctctctgatgcactggtatcaccagaagcccggccagcagcccagactgctgatctacagagccagcaacctggaagccggcgtgcccgatagattttccggcagcggcagcaagaccgacttcaccctgaccatcagccccgtggaagccgaagatgccgccacctactactgccagcagagcagagagtacccctacaccttcggcggaggcaccaagctggaaatcaagaggctcgagatccagaaccctgatcctgccgtgtaccagctgcgggatagcaagagcagcgacaagagcgtgtgtctgttcaccgacttcgacagccagaccaacgtgtcccagagcaaggactccgacgtgtacatcaccgataagtgcgtgctggacatgcggagcatggacttcaagagcaactccgccgtggcctggtccaacaagtccgatttcgcctgcgccaacgccttcaacaacagcattatccccgaggacacattcttcccaagccccgagagcagcgactccaccgaccacgtgaagcccaaagagacagagaacaccaagcagcccagcaagagctgccacaagcccaaggccatcgtgcacaccgagaaagtgaacatgatgagcctgaccgtgctgggcctgcggatgctgttcgccaaaaccgtggccgtgaacttcctgctgaccgccaagctgttcttcctccgcgccaagagaagcggatctggcgtgaagcagaccctgaatttcgacctgctgaagctggctggcgacgtggaatccaacccaggccctactagtatggactggatttggcgcatccttttccttgtcggcgctgctaccggcgcgcattccttcgaacaggtccaactggtgcagagcggagccgaggtcgtgaagcctggcgcttccgtgaagattagctgcaaagccagcggctacacctttaccggctactttatgaactgggtcaagcagagccctggccagagcctggaatggatcggcagaatccacccctacgacggcgacaccttctacaaccagaagttccagggcaaggccaccctgacagtggacaagagcagcaacaccgcccacatggaactgctgagcctgaccagcgaggacttcgccgtgtactactgcaccagatacgacggcagccgggctatggactattggggccagggcaccaccgtgaccgtgtctagtacgcgtgaggacctgaagaacgtgttcccacctgaggtggccgtgttcgagcctagcgaggccgagatcagccacacccagaaagccaccctcgtgtgcctggctaccggcttctaccccgaccatgtggaactgtcttggtgggtcaacggcaaagaggtgcacagcggcgtgtgtaccgacccccagccactgaaagaacagcccgccctgaacgacagccggtactgcctgagcagcagactgagagtgtccgccaccttctggcagaacccccggaaccacttcagatgccaggtgcagttctacggcctgagcgagaacgacgagtggacccaggacagagccaagcccgtgacccagatcgtgtctgccgaagcctggggcagagccgatgatgtgattaagatccactggcaggaaaagaagtccaacaccatcctgggcagccaggaaggcaacaccatgaagaccaacgacacctacatgaagttcagctggctgaccgtgcccgagaagtccctggacaaagaacacagatgcatcgtgcggcacgaaaacaacaagaacggcgtggaccaggaaatcatcttcccacccatcaagaccgatgtgattacaatggaccccaaggacaactgctccaaggacgccaacgataccctgctgctccagctgaccaacaccagcgcctactacatgtacttgttgctgctgctgaagtccgtggtgtacttcgccatcatcacatgctgcctgctgcggagaaccgccttctgctgcaacggcgagaagtct

SEQ ID NO: 7586 - DNA, 2583 bp, synthetic construct
  source 1..2583: mol_type = other DNA
atggccttaccagtgaccgccttgctcctgccgctggccttgctgctccacgccgccaggccggaagtgcagctggttgaatctggcggaggactggttcagcctggcggatctctgagactgtcttgtgccgccagcggcttcagcttcagcgacttttggatgagctgggtccgacaggcccctggcaaaggacttgaatgggtcgccacaatcagccaggccggcagcgagaaggactacgtggactctgtgaagggcagattcaccatcagccgggacaacgccaagaagtccctgtacctccagatgaacagcctgagagccgaggacaccgccgtgtactattgtgcctctggcgtgtacagcttcgactacagaggccagggcaccctggtcacagtctcttctggtaccggcggaggcggatctggcggcggaggtagcggtggcggaggatctgaattcgacgacgttgtgatgacccagacccccctgagcctgcctgtgacacctggcgaacctgccagcatcagctgtcggagcagccagagcctggtgcacagaaacggcaacacctacctgcactggtatctccagaagcccggccagagccccaagctgctgatccacaaggtgtccaacagattcagcggcgtgcccgacagattctccggcagcggctctggcaccgacttcaccctgaagatcagccgggtggaagccgaggacctgggcgtgtacttctgtagccagagcacccatgtgccccccctgacatttggagccggcaccaagctggaactgaagctcgagatccagaaccctgatcctgccgtgtaccagctgcgggatagcaagagcagcgacaagagcgtgtgtctgttcaccgacttcgacagccagaccaacgtgtcccagagcaaggactccgacgtgtacatcaccgataagtgcgtgctggacatgcggagcatggacttcaagagcaactccgccgtggcctggtccaacaagtccgatttcgcctgcgccaacgccttcaacaacagcattatccccgaggacacattcttcccaagccccgagagcagcgactccaccgaccacgtgaagcccaaagagacagagaacaccaagcagcccagcaagagctgccacaagcccaaggccatcgtgcacaccgagaaagtgaacatgatgagcctgaccgtgctgggcctgcggatgctgttcgccaaaaccgtggccgtgaacttcctgctgaccgccaagctgttcttcctccgcgccaagagaagcggatctggcgtgaagcagaccctgaatttcgacctgctgaagctggctggcgacgtggaatccaacccaggccctactagtatggactggatttggcgcatccttttccttgtcggcgctgctaccggcgcgcattccttcgaagaagtgcagctggtgcagtctggcgctgaggtggaaaagcctggggccagcgtgaagattagctgcaaggccagcggcagcagcttcaccggctacaacatgaactgggtgcgccagaacatcggcaagagcctggaatggatcggagccatcgacccctactacggcggcaccagctacaaccagaagttcaagggcagagccaccctgaccgtggacaagagcaccagcaccgcctacatgcacctgaagtccctgcggagcgaggacaccgccgtgtactactgtgtgtccggcatggaatattggggccagggcaccagcgtgaccgtgtctagtacgcgtgaggacctgaagaacgtgttcccacctgaggtggccgtgttcgagcctagcgaggccgagatcagccacacccagaaagccaccctcgtgtgcctggctaccggcttctaccccgaccatgtggaactgtcttggtgggtcaacggcaaagaggtgcacagcggcgtgtgtaccgacccccagccactgaaagaacagcccgccctgaacgacagccggtactgcctgagcagcagactgagagtgtccgccaccttctggcagaacccccggaaccacttcagatgccaggtgcagttctacggcctgagcgagaacgacgagtggacccaggacagagccaagcccgtgacccagatcgtgtctgccgaagcctggggcagagccgatgatgtgattaagatccactggcaggaaaagaagtccaacaccatcctgggcagccaggaaggcaacaccatgaagaccaacgacacctacatgaagttcagctggctgaccgtgcccgagaagtccctggacaaagaacacagatgcatcgtgcggcacgaaaacaacaagaacggcgtggaccaggaaatcatcttcccacccatcaagaccgatgtgattacaatggaccccaaggacaactgctccaaggacgccaacgataccctgctgctccagctgaccaacaccagcgcctactacatgtacttgttgctgctgctgaagtccgtggtgtacttcgccatcatcacatgctgcctgctgcggagaaccgccttctgctgcaacggcgagaagtct

SEQ ID NO: 7587 - DNA, 2577 bp, synthetic construct
  source 1..2577: mol_type = other DNA
atggccttaccagtgaccgccttgctcctgccgctggccttgctgctccacgccgccaggccggaagtgcagctggttgaatctggcggaggactggttcagcctggcggatctctgagactgtcttgtgccgccagcggcttcagcttcagcgacttttggatgagctgggtccgacaggcccctggcaaaggacttgaatgggtcgccacaatcagccaggccggcagcgagaaggactacgtggactctgtgaagggcagattcaccatcagccgggacaacgccaagaagtccctgtacctccagatgaacagcctgagagccgaggacaccgccgtgtactattgtgcctctggcgtgtacagcttcgactacagaggccagggcaccctggtcacagtctcttctggtaccggcggaggcggatctggcggcggaggtagcggtggcggaggatctgaattcgacgagatcgtgatgacccagacccctgccaccctgtctgtgtctgccggcgagagagtgaccattacctgcaaggccagccagagcgtgtccaacgacgtgacctggtatcagcagaagcccggccaggcccccagactgctgatctacagcgccagcaacagatacagcggcgtgcccgccagattttccggcagcggctacggcaccgagttcaccttcaccatcagcagcgtgcagagcgaggacttcgccgtgtacttctgtcagcaagactacagcagcttcggccagggcaccaagctggaaatcaagaggctcgagatccagaaccctgatcctgccgtgtaccagctgcgggatagcaagagcagcgacaagagcgtgtgtctgttcaccgacttcgacagccagaccaacgtgtcccagagcaaggactccgacgtgtacatcaccgataagtgcgtgctggacatgcggagcatggacttcaagagcaactccgccgtggcctggtccaacaagtccgatttcgcctgcgccaacgccttcaacaacagcattatccccgaggacacattcttcccaagccccgagagcagcgactccaccgaccacgtgaagcccaaagagacagagaacaccaagcagcccagcaagagctgccacaagcccaaggccatcgtgcacaccgagaaagtgaacatgatgagcctgaccgtgctgggcctgcggatgctgttcgccaaaaccgtggccgtgaacttcctgctgaccgccaagctgttcttcctccgcgccaagagaagcggatctggcgtgaagcagaccctgaatttcgacctgctgaagctggctggcgacgtggaatccaacccaggccctactagtatggactggatttggcgcatccttttccttgtcggcgctgctaccggcgcgcattccttcgaacaggtgcagctggtggaatctggacctggcgtggtgcagcctggcagaagcctgagaatcagctgtgccgtgtccggcttcagcgtgaccaactacggcgtgcactgggtgcgccagccacctggaaaaggactggaatggctgggcgtgatctgggctggcggcatcaccaactacaacagcgccttcatgtcccggctgaccatctccaaggacaacagcaagaacaccgtgtacctccagatgaacagcctgcgggccgaggacaccgccatgtactactgtgcttccagaggcggccactacggctacgccctggattattggggccagggaaccctcgtgaccgtgtcctctacgcgtgaggacctgaagaacgtgttcccacctgaggtggccgtgttcgagcctagcgaggccgagatcagccacacccagaaagccaccctcgtgtgcctggctaccggcttctaccccgaccatgtggaactgtcttggtgggtcaacggcaaagaggtgcacagcggcgtgtgtaccgacccccagccactgaaagaacagcccgccctgaacgacagccggtactgcctgagcagcagactgagagtgtccgccaccttctggcagaacccccggaaccacttcagatgccaggtgcagttctacggcctgagcgagaacgacgagtggacccaggacagagccaagcccgtgacccagatcgtgtctgccgaagcctggggcagagccgatgatgtgattaagatccactggcaggaaaagaagtccaacaccatcctgggcagccaggaaggcaacaccatgaagaccaacgacacctacatgaagttcagctggctgaccgtgcccgagaagtccctggacaaagaacacagatgcatcgtgcggcacgaaaacaacaagaacggcgtggaccaggaaatcatcttcccacccatcaagaccgatgtgattacaatggaccccaaggacaactgctccaaggacgccaacgataccctgctgctccagctgaccaacaccagcgcctactacatgtacttgttgctgctgctgaagtccgtggtgtacttcgccatcatcacatgctgcctgctgcggagaaccgccttctgctgcaacggcgagaagtct

SEQ ID NO: 7588 - DNA, 2583 bp, synthetic construct
  source 1..2583: mol_type = other DNA
atggccttaccagtgaccgccttgctcctgccgctggccttgctgctccacgccgccaggccggaagtgcagctggttgaatctggcggaggactggttcagcctggcggatctctgagactgtcttgtgccgccagcggcttcagcttcagcgacttttggatgagctgggtccgacaggcccctggcaaaggacttgaatgggtcgccacaatcagccaggccggcagcgagaaggactacgtggactctgtgaagggcagattcaccatcagccgggacaacgccaagaagtccctgtacctccagatgaacagcctgagagccgaggacaccgccgtgtactattgtgcctctggcgtgtacagcttcgactacagaggccagggcaccctggtcacagtctcttctggtaccggcggaggcggatctggcggcggaggtagcggtggcggaggatctgaattcgacatccagatgacccagaccgccagcagcctgcctgcctctctgggcgacagagtgaccatctcctgtagcgccagccaggacatcagcaactacctgaactggtatcagcagaaacccgacggcaccgtgaagctgctgatcttctacagcagcaacctgcacagcggcgtgcccagcagattttctggcggcggaagcggcaccgactacagcctgaccatcagcaatctggaacccgaggacattgccacctacttttgccaccagtacagcaagctgccctggacctttggcggaggcaccaagctggaaatcaagagactcgagatccagaaccctgatcctgccgtgtaccagctgcgggatagcaagagcagcgacaagagcgtgtgtctgttcaccgacttcgacagccagaccaacgtgtcccagagcaaggactccgacgtgtacatcaccgataagtgcgtgctggacatgcggagcatggacttcaagagcaactccgccgtggcctggtccaacaagtccgatttcgcctgcgccaacgccttcaacaacagcattatccccgaggacacattcttcccaagccccgagagcagcgactccaccgaccacgtgaagcccaaagagacagagaacaccaagcagcccagcaagagctgccacaagcccaaggccatcgtgcacaccgagaaagtgaacatgatgagcctgaccgtgctgggcctgcggatgctgttcgccaaaaccgtggccgtgaacttcctgctgaccgccaagctgttcttcctccgcgccaagagaagcggatctggcgtgaagcagaccctgaatttcgacctgctgaagctggctggcgacgtggaatccaacccaggccctactagtatggactggatttggcgcatccttttccttgtcggcgctgctaccggcgcgcattccttcgaagaagtgaccctggtggaaagcggcggagacttcgtgaagcctggcggctctctgaaggtgtcctgtgccgccagcggcttcgcctttagccactacgccatgagctgggtgcgccagacccctgccaagagactggaatgggtggcctacatcagcagcggcggctccggcacctactactccgatagcgtgaagggccggttcaccatcagccgggacaacgccaagaacaccctgtacctccagatgcggagcctgcggagcgaggacagcgccatgtatttctgcaccagagtgaagctgggcacctattacttcgactcttggggccagggcaccaccctgaccgtgtcatctacgcgtgaggacctgaagaacgtgttcccacctgaggtggccgtgttcgagcctagcgaggccgagatcagccacacccagaaagccaccctcgtgtgcctggctaccggcttctaccccgaccatgtggaactgtcttggtgggtcaacggcaaagaggtgcacagcggcgtgtgtaccgacccccagccactgaaagaacagcccgccctgaacgacagccggtactgcctgagcagcagactgagagtgtccgccaccttctggcagaacccccggaaccacttcagatgccaggtgcagttctacggcctgagcgagaacgacgagtggacccaggacagagccaagcccgtgacccagatcgtgtctgccgaagcctggggcagagccgatgatgtgattaagatccactggcaggaaaagaagtccaacaccatcctgggcagccaggaaggcaacaccatgaagaccaacgacacctacatgaagttcagctggctgaccgtgcccgagaagtccctggacaaagaacacagatgcatcgtgcggcacgaaaacaacaagaacggcgtggaccaggaaatcatcttcccacccatcaagaccgatgtgattacaatggaccccaaggacaactgctccaaggacgccaacgataccctgctgctccagctgaccaacaccagcgcctactacatgtacttgttgctgctgctgaagtccgtggtgtacttcgccatcatcacatgctgcctgctgcggagaaccgccttctgctgcaacggcgagaagtct

SEQ ID NO: 7589 - DNA, 2589 bp, synthetic construct
  source 1..2589: mol_type = other DNA
atggccttaccagtgaccgccttgctcctgccgctggccttgctgctccacgccgccaggccggaagtgcagctggttgaatctggcggaggactggttcagcctggcggatctctgagactgtcttgtgccgccagcggcttcagcttcagcgacttttggatgagctgggtccgacaggcccctggcaaaggacttgaatgggtcgccacaatcagccaggccggcagcgagaaggactacgtggactctgtgaagggcagattcaccatcagccgggacaacgccaagaagtccctgtacctccagatgaacagcctgagagccgaggacaccgccgtgtactattgtgcctctggcgtgtacagcttcgactacagaggccagggcaccctggtcacagtctcttctggtaccggcggaggcggatctggcggcggaggtagcggtggcggaggatctgaattccagttcgtgctgacccagagcccttctgcctctgctgccctgggagcctctgccaagctgacctgtacactgagcagcgcccacaagacctacaccatcgactggtatcagcagcagaagggaaaggcccccagatacctgatccaagtgaagtccgacggcacctacacaaaggccaccggcgtgcccgatagattcagcggcagtagcagcggagccgatagatacctgattatccccagcgtgcaggccgacgacgaggccgattactactgcggcaccgattacaccggcggctacgtgttcggcggaggcacacaactgaccgtgacactcgagatccagaaccctgatcctgccgtgtaccagctgcgggatagcaagagcagcgacaagagcgtgtgtctgttcaccgacttcgacagccagaccaacgtgtcccagagcaaggactccgacgtgtacatcaccgataagtgcgtgctggacatgcggagcatggacttcaagagcaactccgccgtggcctggtccaacaagtccgatttcgcctgcgccaacgccttcaacaacagcattatccccgaggacacattcttcccaagccccgagagcagcgactccaccgaccacgtgaagcccaaagagacagagaacaccaagcagcccagcaagagctgccacaagcccaaggccatcgtgcacaccgagaaagtgaacatgatgagcctgaccgtgctgggcctgcggatgctgttcgccaaaaccgtggccgtgaacttcctgctgaccgccaagctgttcttcctccgcgccaagagaagcggatctggcgtgaagcagaccctgaatttcgacctgctgaagctggctggcgacgtggaatccaacccaggccctactagtatggactggatttggcgcatccttttccttgtcggcgctgctaccggcgcgcattccttcgaagagcaactgaaagagtctggcggcggactgttcaagcccaccgataccctgaccctgacctgcaccgtgtccggcttcagcctgagctactacggcgtgaactgggtgcgccaggcccctggcaatggcctggaatggatcggcacaatcggcggcagcggcgacacctactatgcctcttgggccaagtccagaagcaccatcatcagaaacaccaacgagaacaccgtgaccctgaagatgaccagcctgacagccgccgacaccgccacctacttttgcgtcagatacgccaacatcggctacgagtatttcaacgtgtggggacccggcaccctcgtgaccgtgtcatctacgcgtgaggacctgaagaacgtgttcccacctgaggtggccgtgttcgagcctagcgaggccgagatcagccacacccagaaagccaccctcgtgtgcctggctaccggcttctaccccgaccatgtggaactgtcttggtgggtcaacggcaaagaggtgcacagcggcgtgtgtaccgacccccagccactgaaagaacagcccgccctgaacgacagccggtactgcctgagcagcagactgagagtgtccgccaccttctggcagaacccccggaaccacttcagatgccaggtgcagttctacggcctgagcgagaacgacgagtggacccaggacagagccaagcccgtgacccagatcgtgtctgccgaagcctggggcagagccgatgatgtgattaagatccactggcaggaaaagaagtccaacaccatcctgggcagccaggaaggcaacaccatgaagaccaacgacacctacatgaagttcagctggctgaccgtgcccgagaagtccctggacaaagaacacagatgcatcgtgcggcacgaaaacaacaagaacggcgtggaccaggaaatcatcttcccacccatcaagaccgatgtgattacaatggaccccaaggacaactgctccaaggacgccaacgataccctgctgctccagctgaccaacaccagcgcctactacatgtacttgttgctgctgctgaagtccgtggtgtacttcgccatcatcacatgctgcctgctgcggagaaccgccttctgctgcaacggcgagaagtct

SEQ ID NO: 7590 - DNA, 2604 bp, synthetic construct
  source 1..2604: mol_type = other DNA
atggccttaccagtgaccgccttgctcctgccgctggccttgctgctccacgccgccaggccggaagtgcagctggttgaatctggcggaggactggttcagcctggcggatctctgagactgtcttgtgccgccagcggcttcagcttcagcgacttttggatgagctgggtccgacaggcccctggcaaaggacttgaatgggtcgccacaatcagccaggccggcagcgagaaggactacgtggactctgtgaagggcagattcaccatcagccgggacaacgccaagaagtccctgtacctccagatgaacagcctgagagccgaggacaccgccgtgtactattgtgcctctggcgtgtacagcttcgactacagaggccagggcaccctggtcacagtctcttctggtaccggcggaggcggatctggcggcggaggtagcggtggcggaggatctgaattccagttcgtgctgacccagagcccttctgtgtctgccgccctgggagcctctgccaagctgacctgtacactgagcagcgcccacaagacctacaccatcgactggtatcagcagcagcagggcgaggcccccagatacctgatgcaagtgaagtccgacggcagctacaccaagggcaccggcgtgcccgatagattcagcggcagtagcagcggagccgatagatacctgattatccccagcgtgcaggccgacgacgaggccggatatgtgtgcggcgctgacgacaatggcggctacgtgttcggcggaggcacccaactgacagtgacactcgagatccagaaccctgatcctgccgtgtaccagctgcgggatagcaagagcagcgacaagagcgtgtgtctgttcaccgacttcgacagccagaccaacgtgtcccagagcaaggactccgacgtgtacatcaccgataagtgcgtgctggacatgcggagcatggacttcaagagcaactccgccgtggcctggtccaacaagtccgatttcgcctgcgccaacgccttcaacaacagcattatccccgaggacacattcttcccaagccccgagagcagcgactccaccgaccacgtgaagcccaaagagacagagaacaccaagcagcccagcaagagctgccacaagcccaaggccatcgtgcacaccgagaaagtgaacatgatgagcctgaccgtgctgggcctgcggatgctgttcgccaaaaccgtggccgtgaacttcctgctgaccgccaagctgttcttcctccgcgccaagagaagcggatctggcgtgaagcagaccctgaatttcgacctgctgaagctggctggcgacgtggaatccaacccaggccctactagtatggactggatttggcgcatccttttccttgtcggcgctgctaccggcgcgcattccttcgaacagagcgtgaaagagtctgagggcggcctgttcaagcccaccgataccctgaccctgacctgcaccgtgtccggcttcagcctgagcagacacgccctgacatgggtgcgccaggcccctggaaatggcctggaatggatcggagccatcgacaacgccggcaccacctactatgcctcttgggccaagtccagaagcaccatcacccggaacaccgacctgcacaccgtgaccctgaagatgaccagcctgaccgccagcgacaccgccacctacttttgcgccagagtgttctacgacatcaacagcggctactacctggacggcatggacctgtggggacctggcacacttgtgaccgtgtccagcacgcgtgaggacctgaagaacgtgttcccacctgaggtggccgtgttcgagcctagcgaggccgagatcagccacacccagaaagccaccctcgtgtgcctggctaccggcttctaccccgaccatgtggaactgtcttggtgggtcaacggcaaagaggtgcacagcggcgtgtgtaccgacccccagccactgaaagaacagcccgccctgaacgacagccggtactgcctgagcagcagactgagagtgtccgccaccttctggcagaacccccggaaccacttcagatgccaggtgcagttctacggcctgagcgagaacgacgagtggacccaggacagagccaagcccgtgacccagatcgtgtctgccgaagcctggggcagagccgatgatgtgattaagatccactggcaggaaaagaagtccaacaccatcctgggcagccaggaaggcaacaccatgaagaccaacgacacctacatgaagttcagctggctgaccgtgcccgagaagtccctggacaaagaacacagatgcatcgtgcggcacgaaaacaacaagaacggcgtggaccaggaaatcatcttcccacccatcaagaccgatgtgattacaatggaccccaaggacaactgctccaaggacgccaacgataccctgctgctccagctgaccaacaccagcgcctactacatgtacttgttgctgctgctgaagtccgtggtgtacttcgccatcatcacatgctgcctgctgcggagaaccgccttctgctgcaacggcgagaagtct

SEQ ID NO: 7591 - DNA, 2586 bp, synthetic construct
  source 1..2586: mol_type = other DNA
atggccttaccagtgaccgccttgctcctgccgctggccttgctgctccacgccgccaggccggaagtgcagctggttgaatctggcggaggactggttcagcctggcggatctctgagactgtcttgtgccgccagcggcttcagcttcagcgacttttggatgagctgggtccgacaggcccctggcaaaggacttgaatgggtcgccacaatcagccaggccggcagcgagaaggactacgtggactctgtgaagggcagattcaccatcagccgggacaacgccaagaagtccctgtacctccagatgaacagcctgagagccgaggacaccgccgtgtactattgtgcctctggcgtgtacagcttcgactacagaggccagggcaccctggtcacagtctcttctggtaccggcggaggcggatctggcggcggaggtagcggtggcggaggatctgaattcgacatccagatgacccagagccccagcagcctgtctgccagcgtgggcgacagagtgaccatcacctgtagagccagccagggcatcagctcttggctggcctggtatcagcagaagcccgagaaggcccccaagagcctgatctacgccgcctctagtctccagagcggcgtgcccagcagattttctggcagcggctccggcaccgacttcaccctgacaatcagctccctccagcccgaggacttcgccacctactactgccagcagtacaacagctacccccccacctttggcggaggcaccaaggtggaaatcaagctcgagatccagaaccctgatcctgccgtgtaccagctgcgggatagcaagagcagcgacaagagcgtgtgtctgttcaccgacttcgacagccagaccaacgtgtcccagagcaaggactccgacgtgtacatcaccgataagtgcgtgctggacatgcggagcatggacttcaagagcaactccgccgtggcctggtccaacaagtccgatttcgcctgcgccaacgccttcaacaacagcattatccccgaggacacattcttcccaagccccgagagcagcgactccaccgaccacgtgaagcccaaagagacagagaacaccaagcagcccagcaagagctgccacaagcccaaggccatcgtgcacaccgagaaagtgaacatgatgagcctgaccgtgctgggcctgcggatgctgttcgccaaaaccgtggccgtgaacttcctgctgaccgccaagctgttcttcctccgcgccaagagaagcggatctggcgtgaagcagaccctgaatttcgacctgctgaagctggctggcgacgtggaatccaacccaggccctactagtatggactggatttggcgcatccttttccttgtcggcgctgctaccggcgcgcattccttcgaagaagtgcaactggtggaatcaggcggcggactggtgcagcctggcgagtctctgagactgagctgtgtggcctccggcttcaccttcagccggtacaagatgaactgggtgcgccaggcccctggcaagggactggaatgggtgtcctacatcagccgcagcggcagagacatctactacgccgacagcgtgaagggccggttcaccatcagcagagacaacgccaagaacagcctgtacctccagatgaactccctgcgggacgaggacaccgccgtgtactactgtgccggaaccgtgaccacctattactacttcggcatggacgtgtggggccacggcaccaccgtgacagtgtcatctacgcgtgaggacctgaagaacgtgttcccacctgaggtggccgtgttcgagcctagcgaggccgagatcagccacacccagaaagccaccctcgtgtgcctggctaccggcttctaccccgaccatgtggaactgtcttggtgggtcaacggcaaagaggtgcacagcggcgtgtgtaccgacccccagccactgaaagaacagcccgccctgaacgacagccggtactgcctgagcagcagactgagagtgtccgccaccttctggcagaacccccggaaccacttcagatgccaggtgcagttctacggcctgagcgagaacgacgagtggacccaggacagagccaagcccgtgacccagatcgtgtctgccgaagcctggggcagagccgatgatgtgattaagatccactggcaggaaaagaagtccaacaccatcctgggcagccaggaaggcaacaccatgaagaccaacgacacctacatgaagttcagctggctgaccgtgcccgagaagtccctggacaaagaacacagatgcatcgtgcggcacgaaaacaacaagaacggcgtggaccaggaaatcatcttcccacccatcaagaccgatgtgattacaatggaccccaaggacaactgctccaaggacgccaacgataccctgctgctccagctgaccaacaccagcgcctactacatgtacttgttgctgctgctgaagtccgtggtgtacttcgccatcatcacatgctgcctgctgcggagaaccgccttctgctgcaacggcgagaagtct

SEQ ID NO: 7592 - DNA, 2589 bp, synthetic construct
  source 1..2589: mol_type = other DNA
atggccttaccagtgaccgccttgctcctgccgctggccttgctgctccacgccgccaggccggaagtgcagctggttgaatctggcggaggactggttcagcctggcggatctctgagactgtcttgtgccgccagcggcttcagcttcagcgacttttggatgagctgggtccgacaggcccctggcaaaggacttgaatgggtcgccacaatcagccaggccggcagcgagaaggactacgtggactctgtgaagggcagattcaccatcagccgggacaacgccaagaagtccctgtacctccagatgaacagcctgagagccgaggacaccgccgtgtactattgtgcctctggcgtgtacagcttcgactacagaggccagggcaccctggtcacagtctcttctggtaccggcggaggcggatctggcggcggaggtagcggtggcggaggatctgaattcgacatccagatgacccagagccccagcagcctgtctgccagcgtgggcgacagagtgaccatcacctgtagagccagccagggcatcagctcttggctggcctggtatcagcagaagcccgagaaggcccccaagagcctgatctacgccgcctctagtctccagagcggcgtgcccagcagattttctggcagcggctccggcaccgacttcaccctgacaatcagctccctccagcccgaggacttcgccacctactactgccagcagtacaacagctaccctcccacctttggcggaggcaccaaggtggaaatcaagctcgagatccagaaccctgatcctgccgtgtaccagctgcgggatagcaagagcagcgacaagagcgtgtgtctgttcaccgacttcgacagccagaccaacgtgtcccagagcaaggactccgacgtgtacatcaccgataagtgcgtgctggacatgcggagcatggacttcaagagcaactccgccgtggcctggtccaacaagtccgatttcgcctgcgccaacgccttcaacaacagcattatccccgaggacacattcttcccaagccccgagagcagcgactccaccgaccacgtgaagcccaaagagacagagaacaccaagcagcccagcaagagctgccacaagcccaaggccatcgtgcacaccgagaaagtgaacatgatgagcctgaccgtgctgggcctgcggatgctgttcgccaaaaccgtggccgtgaacttcctgctgaccgccaagctgttcttcctccgcgccaagagaagcggatctggcgtgaagcagaccctgaatttcgacctgctgaagctggctggcgacgtggaatccaacccaggccctactagtatggactggatttggcgcatccttttccttgtcggcgctgctaccggcgcgcattccttcgaagaagtgcaactggtggaatccgggggaggctctgtgcagcctggcgagtctctgagactgagctgtgtggcctccggcttcaccttcagccggtacaagatgaactgggtgcgccaggcccctggcaagggactggaatgggtgtcctacatcagccgcagcggcagagacatctactacgccgacagcgtgaagggccggttcaccatcagcagagacaacgccaagaacagcctgtacctccagatgaactccctgcgggacgaggacaccgccgtgtactactgtgccggaaccgtgaccacctattactacgacttcggcatggacgtgtggggccagggcacaaccgtgacagtgtctagcacgcgtgaggacctgaagaacgtgttcccacctgaggtggccgtgttcgagcctagcgaggccgagatcagccacacccagaaagccaccctcgtgtgcctggctaccggcttctaccccgaccatgtggaactgtcttggtgggtcaacggcaaagaggtgcacagcggcgtgtgtaccgacccccagccactgaaagaacagcccgccctgaacgacagccggtactgcctgagcagcagactgagagtgtccgccaccttctggcagaacccccggaaccacttcagatgccaggtgcagttctacggcctgagcgagaacgacgagtggacccaggacagagccaagcccgtgacccagatcgtgtctgccgaagcctggggcagagccgatgatgtgattaagatccactggcaggaaaagaagtccaacaccatcctgggcagccaggaaggcaacaccatgaagaccaacgacacctacatgaagttcagctggctgaccgtgcccgagaagtccctggacaaagaacacagatgcatcgtgcggcacgaaaacaacaagaacggcgtggaccaggaaatcatcttcccacccatcaagaccgatgtgattacaatggaccccaaggacaactgctccaaggacgccaacgataccctgctgctccagctgaccaacaccagcgcctactacatgtacttgttgctgctgctgaagtccgtggtgtacttcgccatcatcacatgctgcctgctgcggagaaccgccttctgctgcaacggcgagaagtct

SEQ ID NO: 7593 - DNA, 2583 bp, synthetic construct
  source 1..2583: mol_type = other DNA
atggccttaccagtgaccgccttgctcctgccgctggccttgctgctccacgccgccaggccggaagtgcagctggttgaatctggcggaggactggttcagcctggcggatctctgagactgtcttgtgccgccagcggcttcagcttcagcgacttttggatgagctgggtccgacaggcccctggcaaaggacttgaatgggtcgccacaatcagccaggccggcagcgagaaggactacgtggactctgtgaagggcagattcaccatcagccgggacaacgccaagaagtccctgtacctccagatgaacagcctgagagccgaggacaccgccgtgtactattgtgcctctggcgtgtacagcttcgactacagaggccagggcaccctggtcacagtctcttctggtaccggcggaggcggatctggcggcggaggtagcggtggcggaggatctgaattccagtctgtgctgacacagcctccatctgcctctggcacacctggacagagagtgaccatcagctgtagcggcagcagaagcaacgtcggcggcaactacgtgttctggtatcagcaggtcccaggcgctacccctaagctgctgatctacagaagcaatcagcggcctagcggcgtgcccgatagatttgccggaagcaagagcggcagctctgccagccttgccatctctggactgagaagcgaggacgaggccgactactactgtgccacctgggatgatagcctgagcggcttcgtgtttggcaccggcaccaaagtgacagtgcttggtctcgagatccagaaccctgatcctgccgtgtaccagctgcgggatagcaagagcagcgacaagagcgtgtgtctgttcaccgacttcgacagccagaccaacgtgtcccagagcaaggactccgacgtgtacatcaccgataagtgcgtgctggacatgcggagcatggacttcaagagcaactccgccgtggcctggtccaacaagtccgatttcgcctgcgccaacgccttcaacaacagcattatccccgaggacacattcttcccaagccccgagagcagcgactccaccgaccacgtgaagcccaaagagacagagaacaccaagcagcccagcaagagctgccacaagcccaaggccatcgtgcacaccgagaaagtgaacatgatgagcctgaccgtgctgggcctgcggatgctgttcgccaaaaccgtggccgtgaacttcctgctgaccgccaagctgttcttcctccgcgccaagagaagcggatctggcgtgaagcagaccctgaatttcgacctgctgaagctggctggcgacgtggaatccaacccaggccctactagtatggactggatttggcgcatccttttccttgtcggcgctgctaccggcgcgcattccttcgaagttcagctggttgaatctggcggcggactggttaagcctggcggatctctgagactgtcttgtgccgccagcggcttcaccttcagcgattactacatgagctggatcagacaggcccctggcaaaggactggaatgggtgtcctacatcagcagcagcggctccaccatctactacgccgatagcgtgaagggcagattcaccatcagccgggacaacgccaagaacagcctgtacctccagatgaactccctgagagccgaggacaccgccgtgtactattgcgccagaggctacggcaaagcctacgatcaatggggccagggcacactggtcaccgtttcttctacgcgtgaggacctgaagaacgtgttcccacctgaggtggccgtgttcgagcctagcgaggccgagatcagccacacccagaaagccaccctcgtgtgcctggctaccggcttctaccccgaccatgtggaactgtcttggtgggtcaacggcaaagaggtgcacagcggcgtgtgtaccgacccccagccactgaaagaacagcccgccctgaacgacagccggtactgcctgagcagcagactgagagtgtccgccaccttctggcagaacccccggaaccacttcagatgccaggtgcagttctacggcctgagcgagaacgacgagtggacccaggacagagccaagcccgtgacccagatcgtgtctgccgaagcctggggcagagccgatgatgtgattaagatccactggcaggaaaagaagtccaacaccatcctgggcagccaggaaggcaacaccatgaagaccaacgacacctacatgaagttcagctggctgaccgtgcccgagaagtccctggacaaagaacacagatgcatcgtgcggcacgaaaacaacaagaacggcgtggaccaggaaatcatcttcccacccatcaagaccgatgtgattacaatggaccccaaggacaactgctccaaggacgccaacgataccctgctgctccagctgaccaacaccagcgcctactacatgtacttgttgctgctgctgaagtccgtggtgtacttcgccatcatcacatgctgcctgctgcggagaaccgccttctgctgcaacggcgagaagtct

SEQ ID NO: 7594 - DNA, 2580 bp, synthetic construct
  source 1..2580: mol_type = other DNA
atggccttaccagtgaccgccttgctcctgccgctggccttgctgctccacgccgccaggccggaagtgcagctggttgaatctggcggaggactggttcagcctggcggatctctgagactgtcttgtgccgccagcggcttcagcttcagcgacttttggatgagctgggtccgacaggcccctggcaaaggacttgaatgggtcgccacaatcagccaggccggcagcgagaaggactacgtggactctgtgaagggcagattcaccatcagccgggacaacgccaagaagtccctgtacctccagatgaacagcctgagagccgaggacaccgccgtgtactattgtgcctctggcgtgtacagcttcgactacagaggccagggcaccctggtcacagtctcttctggtaccggcggaggcggatctggcggcggaggtagcggtggcggaggatctgaattccagtctgtggtcacacagccacctagcatgtctgccgctccaggccagcaagtgaccatctcttgtagcggcggcaacagcaacatcgagcggaactacgtgtcctggtatctgcaactgcctggcacagcccctaagctggtcatcttcgacaacgacagacggcccagcggcatccccgatagattttctggcagcaagagcggcaccagcgccacactgggaattaccggacttcagacaggcgacgaggccgactactactgtggcacatgggactctagcctgagaggctgggttttcggcggaggcacaaagctgacagtgcttggtctcgagatccagaaccctgatcctgccgtgtaccagctgcgggatagcaagagcagcgacaagagcgtgtgtctgttcaccgacttcgacagccagaccaacgtgtcccagagcaaggactccgacgtgtacatcaccgataagtgcgtgctggacatgcggagcatggacttcaagagcaactccgccgtggcctggtccaacaagtccgatttcgcctgcgccaacgccttcaacaacagcattatccccgaggacacattcttcccaagccccgagagcagcgactccaccgaccacgtgaagcccaaagagacagagaacaccaagcagcccagcaagagctgccacaagcccaaggccatcgtgcacaccgagaaagtgaacatgatgagcctgaccgtgctgggcctgcggatgctgttcgccaaaaccgtggccgtgaacttcctgctgaccgccaagctgttcttcctccgcgccaagagaagcggatctggcgtgaagcagaccctgaatttcgacctgctgaagctggctggcgacgtggaatccaacccaggccctactagtatggactggatttggcgcatccttttccttgtcggcgctgctaccggcgcgcattccttcgaagtgcagctcgttgagtctggcggcggactgattcaacctggcggaagcctgagactgagctgtgccgcttccggcttcaccttcagcaactacgccatgaactgggttcgacaggcccctggcaaaggactggaatgggtgtccaccatcaacggcagaggcagcagcaccatctacgccgattctgtgaagggcagattcaccatcagccgggacaacagcaagaacaccctgtacctccagatgaactccctgagagccgaggacaccgccacctattactgtgcccggtacatcagcagaggactgggcgattcttggggccagggcacactggttacagtgacgcgtgaggacctgaagaacgtgttcccacctgaggtggccgtgttcgagcctagcgaggccgagatcagccacacccagaaagccaccctcgtgtgcctggctaccggcttctaccccgaccatgtggaactgtcttggtgggtcaacggcaaagaggtgcacagcggcgtgtgtaccgacccccagccactgaaagaacagcccgccctgaacgacagccggtactgcctgagcagcagactgagagtgtccgccaccttctggcagaacccccggaaccacttcagatgccaggtgcagttctacggcctgagcgagaacgacgagtggacccaggacagagccaagcccgtgacccagatcgtgtctgccgaagcctggggcagagccgatgatgtgattaagatccactggcaggaaaagaagtccaacaccatcctgggcagccaggaaggcaacaccatgaagaccaacgacacctacatgaagttcagctggctgaccgtgcccgagaagtccctggacaaagaacacagatgcatcgtgcggcacgaaaacaacaagaacggcgtggaccaggaaatcatcttcccacccatcaagaccgatgtgattacaatggaccccaaggacaactgctccaaggacgccaacgataccctgctgctccagctgaccaacaccagcgcctactacatgtacttgttgctgctgctgaagtccgtggtgtacttcgccatcatcacatgctgcctgctgcggagaaccgccttctgctgcaacggcgagaagtct

SEQ ID NO: 7595 - DNA, 2583 bp, synthetic construct
  source 1..2583: mol_type = other DNA
atggccttaccagtgaccgccttgctcctgccgctggccttgctgctccacgccgccaggccggaagtgcagctggttgaatctggcggaggactggttcagcctggcggatctctgagactgtcttgtgccgccagcggcttcagcttcagcgacttttggatgagctgggtccgacaggcccctggcaaaggacttgaatgggtcgccacaatcagccaggccggcagcgagaaggactacgtggactctgtgaagggcagattcaccatcagccgggacaacgccaagaagtccctgtacctccagatgaacagcctgagagccgaggacaccgccgtgtactattgtgcctctggcgtgtacagcttcgactacagaggccagggcaccctggtcacagtctcttctggtaccggcggaggcggatctggcggcggaggtagcggtggcggaggatctgaattcgacgtcgtgatgacccagacccctctgagcctgcctgtgtccctgggcgatcaggccagcatcagctgtagaagcagccagagcctggtgcacagcaacggcaacacctacctgcactggtatctccagaagcccggccagagccccaagctgctgatctacaaggtgtccaacagattcagcggcgtgcccgacagattctccggcagcggctctggcaccgacttcaccctgaagatcagccgggtggaagccgaggacctgggcgtgtacttctgtagccagaacacccccgtgccccccaagtttggcagcggcaccaagctggaaatcaagctcgagatccagaaccctgatcctgccgtgtaccagctgcgggatagcaagagcagcgacaagagcgtgtgtctgttcaccgacttcgacagccagaccaacgtgtcccagagcaaggactccgacgtgtacatcaccgataagtgcgtgctggacatgcggagcatggacttcaagagcaactccgccgtggcctggtccaacaagtccgatttcgcctgcgccaacgccttcaacaacagcattatccccgaggacacattcttcccaagccccgagagcagcgactccaccgaccacgtgaagcccaaagagacagagaacaccaagcagcccagcaagagctgccacaagcccaaggccatcgtgcacaccgagaaagtgaacatgatgagcctgaccgtgctgggcctgcggatgctgttcgccaaaaccgtggccgtgaacttcctgctgaccgccaagctgttcttcctccgcgccaagagaagcggatctggcgtgaagcagaccctgaatttcgacctgctgaagctggctggcgacgtggaatccaacccaggccctactagtatggactggatttggcgcatccttttccttgtcggcgctgctaccggcgcgcattccttcgaacaggtgcagctccagcagtctggcgctgaactcgtgcggcctggcgcttctgtgaagctgtcttgcaaggccagcggctacaccttcaacgactacgagatgcactgggtcaagcagacccctgtgcacggcctgaagtggatcggagccctggaacccaagaccggcgataccgcctacagccagaagttcaagggcaaggccaccctgaccgccgacaagagcagcagcacagcctacatggaactgcggagcctgaccagcgaggacagcgccgtgtactactgcaccagctgctactactacacctacagcggccagggcaccctcgtgacagtgtctgctacgcgtgaggacctgaagaacgtgttcccacctgaggtggccgtgttcgagcctagcgaggccgagatcagccacacccagaaagccaccctcgtgtgcctggctaccggcttctaccccgaccatgtggaactgtcttggtgggtcaacggcaaagaggtgcacagcggcgtgtgtaccgacccccagccactgaaagaacagcccgccctgaacgacagccggtactgcctgagcagcagactgagagtgtccgccaccttctggcagaacccccggaaccacttcagatgccaggtgcagttctacggcctgagcgagaacgacgagtggacccaggacagagccaagcccgtgacccagatcgtgtctgccgaagcctggggcagagccgatgatgtgattaagatccactggcaggaaaagaagtccaacaccatcctgggcagccaggaaggcaacaccatgaagaccaacgacacctacatgaagttcagctggctgaccgtgcccgagaagtccctggacaaagaacacagatgcatcgtgcggcacgaaaacaacaagaacggcgtggaccaggaaatcatcttcccacccatcaagaccgatgtgattacaatggaccccaaggacaactgctccaaggacgccaacgataccctgctgctccagctgaccaacaccagcgcctactacatgtacttgttgctgctgctgaagtccgtggtgtacttcgccatcatcacatgctgcctgctgcggagaaccgccttctgctgcaacggcgagaagtct

SEQ ID NO: 7596 - DNA, 2580 bp, synthetic construct
  source 1..2580: mol_type = other DNA
atggccttaccagtgaccgccttgctcctgccgctggccttgctgctccacgccgccaggccggaagtgcagctggttgaatctggcggaggactggttcagcctggcggatctctgagactgtcttgtgccgccagcggcttcagcttcagcgacttttggatgagctgggtccgacaggcccctggcaaaggacttgaatgggtcgccacaatcagccaggccggcagcgagaaggactacgtggactctgtgaagggcagattcaccatcagccgggacaacgccaagaagtccctgtacctccagatgaacagcctgagagccgaggacaccgccgtgtactattgtgcctctggcgtgtacagcttcgactacagaggccagggcaccctggtcacagtctcttctggtaccggcggaggcggatctggcggcggaggtagcggtggcggaggatctgaattcgacatccaactgacccagagccccagcagcctgtctgcctctgtgggcgacagagtgaccatcacctgtagagccagccagggcatcagaaacgacctgggctggtatcagcagaagcccggcaaggcccccaagcggctgatctatgctgccagctccctccagaatggcgtgcccagcagattttccggcagcggctctggcaccgagttcaccctgaccatcagctccctccagcccgaggacttcgccacctactactgcctccagcacaacacctaccccgccttcggccagggcaccaaggtggaaatcaagagactcgagatccagaaccctgatcctgccgtgtaccagctgcgggatagcaagagcagcgacaagagcgtgtgtctgttcaccgacttcgacagccagaccaacgtgtcccagagcaaggactccgacgtgtacatcaccgataagtgcgtgctggacatgcggagcatggacttcaagagcaactccgccgtggcctggtccaacaagtccgatttcgcctgcgccaacgccttcaacaacagcattatccccgaggacacattcttcccaagccccgagagcagcgactccaccgaccacgtgaagcccaaagagacagagaacaccaagcagcccagcaagagctgccacaagcccaaggccatcgtgcacaccgagaaagtgaacatgatgagcctgaccgtgctgggcctgcggatgctgttcgccaaaaccgtggccgtgaacttcctgctgaccgccaagctgttcttcctccgcgccaagagaagcggatctggcgtgaagcagaccctgaatttcgacctgctgaagctggctggcgacgtggaatccaacccaggccctactagtatggactggatttggcgcatccttttccttgtcggcgctgctaccggcgcgcattccttcgaacaggtgcaactccaggaatctggccctggcctcgtgaagcctagccagaccctgagcctgacctgtaccgtgtctggcggcagcatcagcagcttcaactactactggtcctggatcagacaccaccctggcaagggcctggaatggatcggctacatctactacagcggcagcacctacagcaaccccagcctgaagtcccgcgtgaccatctccgtggacaccagcaagaaccagtttagcctgaccctgtccagcgtgacagccgccgataccgccgtgtactactgcgccagaggctacaactggaactacttcgactactggggccagggaaccctcgtgaccgtgtctagtacgcgtgaggacctgaagaacgtgttcccacctgaggtggccgtgttcgagcctagcgaggccgagatcagccacacccagaaagccaccctcgtgtgcctggctaccggcttctaccccgaccatgtggaactgtcttggtgggtcaacggcaaagaggtgcacagcggcgtgtgtaccgacccccagccactgaaagaacagcccgccctgaacgacagccggtactgcctgagcagcagactgagagtgtccgccaccttctggcagaacccccggaaccacttcagatgccaggtgcagttctacggcctgagcgagaacgacgagtggacccaggacagagccaagcccgtgacccagatcgtgtctgccgaagcctggggcagagccgatgatgtgattaagatccactggcaggaaaagaagtccaacaccatcctgggcagccaggaaggcaacaccatgaagaccaacgacacctacatgaagttcagctggctgaccgtgcccgagaagtccctggacaaagaacacagatgcatcgtgcggcacgaaaacaacaagaacggcgtggaccaggaaatcatcttcccacccatcaagaccgatgtgattacaatggaccccaaggacaactgctccaaggacgccaacgataccctgctgctccagctgaccaacaccagcgcctactacatgtacttgttgctgctgctgaagtccgtggtgtacttcgccatcatcacatgctgcctgctgcggagaaccgccttctgctgcaacggcgagaagtct

SEQ ID NO: 7597 - DNA, 2586 bp, synthetic construct
  source 1..2586: mol_type = other DNA
atggccttaccagtgaccgccttgctcctgccgctggccttgctgctccacgccgccaggccggaagtgcagctggttgaatctggcggaggactggttcagcctggcggatctctgagactgtcttgtgccgccagcggcttcagcttcagcgacttttggatgagctgggtccgacaggcccctggcaaaggacttgaatgggtcgccacaatcagccaggccggcagcgagaaggactacgtggactctgtgaagggcagattcaccatcagccgggacaacgccaagaagtccctgtacctccagatgaacagcctgagagccgaggacaccgccgtgtactattgtgcctctggcgtgtacagcttcgactacagaggccagggcaccctggtcacagtctcttctggtaccggcggaggcggatctggcggcggaggtagcggtggcggaggatctgaattcgacgacatcgtgctgacccagagccccgccagcctggccgtgagcctgggccagagcgtgaccatcagctgcagagccagcgagagcgtggagtactacggcaccagcctgatgcagtggtaccagcagaagcccggccagccccccaagctgctgatctacgccaccagcaacgtggagagcggcgtgcccgccagattcagcggcagcggcagcggcaccgacttcagcctgaacatccaccccgtggaggaggacgacatcgccatgtacttctgccagcagagcagaaagctgcccagcaccttcggcggcggcaccaagctggagatcaagctcgagatccagaaccctgatcctgccgtgtaccagctgcgggatagcaagagcagcgacaagagcgtgtgtctgttcaccgacttcgacagccagaccaacgtgtcccagagcaaggactccgacgtgtacatcaccgataagtgcgtgctggacatgcggagcatggacttcaagagcaactccgccgtggcctggtccaacaagtccgatttcgcctgcgccaacgccttcaacaacagcattatccccgaggacacattcttcccaagccccgagagcagcgactccaccgaccacgtgaagcccaaagagacagagaacaccaagcagcccagcaagagctgccacaagcccaaggccatcgtgcacaccgagaaagtgaacatgatgagcctgaccgtgctgggcctgcggatgctgttcgccaaaaccgtggccgtgaacttcctgctgaccgccaagctgttcttcctccgcgccaagagaagcggatctggcgtgaagcagaccctgaatttcgacctgctgaagctggctggcgacgtggaatccaacccaggccctactagtatggactggatttggcgcatccttttccttgtcggcgctgctaccggcgcgcattccttcgaagacgtgagactgcaggagagcggccccggccaggtgaagcccagccagaccgtgagcctgacctgcagcgtgaccggctacagcatcaccaacggcaaccactggtggaactggatcagacaggtgagcggcagcaagctggagtggatcggctacatcagcagcagcggcagcaccgacagcaaccccagcctgaagagcagaatcagcatcaccagagacaccagcaagaaccagctgttcctgcagctgaacagcgtgaccaccgaggacatcgccacctactactgcgccagaggctactacttcgactactggggccagggcaccaccctgaccgtgagcagcacgcgtgaggacctgaagaacgtgttcccacctgaggtggccgtgttcgagcctagcgaggccgagatcagccacacccagaaagccaccctcgtgtgcctggctaccggcttctaccccgaccatgtggaactgtcttggtgggtcaacggcaaagaggtgcacagcggcgtgtgtaccgacccccagccactgaaagaacagcccgccctgaacgacagccggtactgcctgagcagcagactgagagtgtccgccaccttctggcagaacccccggaaccacttcagatgccaggtgcagttctacggcctgagcgagaacgacgagtggacccaggacagagccaagcccgtgacccagatcgtgtctgccgaagcctggggcagagccgatgatgtgattaagatccactggcaggaaaagaagtccaacaccatcctgggcagccaggaaggcaacaccatgaagaccaacgacacctacatgaagttcagctggctgaccgtgcccgagaagtccctggacaaagaacacagatgcatcgtgcggcacgaaaacaacaagaacggcgtggaccaggaaatcatcttcccacccatcaagaccgatgtgattacaatggaccccaaggacaactgctccaaggacgccaacgataccctgctgctccagctgaccaacaccagcgcctactacatgtacttgttgctgctgctgaagtccgtggtgtacttcgccatcatcacatgctgcctgctgcggagaaccgccttctgctgcaacggcgagaagtct

SEQ ID NO: 7598 - DNA, 2583 bp, synthetic construct
  source 1..2583: mol_type = other DNA
atggccttaccagtgaccgccttgctcctgccgctggccttgctgctccacgccgccaggccggaagtgcagctggttgaatctggcggaggactggttcagcctggcggatctctgagactgtcttgtgccgccagcggcttcagcttcagcgacttttggatgagctgggtccgacaggcccctggcaaaggacttgaatgggtcgccacaatcagccaggccggcagcgagaaggactacgtggactctgtgaagggcagattcaccatcagccgggacaacgccaagaagtccctgtacctccagatgaacagcctgagagccgaggacaccgccgtgtactattgtgcctctggcgtgtacagcttcgactacagaggccagggcaccctggtcacagtctcttctggtaccggcggaggcggatctggcggcggaggtagcggtggcggaggatctgaattcgacatccagatgacccagagccccagcagcctgtctgccagcgtgggcgacagagtgaccatcacctgtagagccagccaggacgtgaacaccgccgtggcctggtatcagcagaagcctggcaaggcccccaagctgctgatctacagcgccagcttcctggaaagcggcgtgcccagcagattcagcggaagcagaagcggcaccgacttcaccctgaccatcagctccctccagcccgaggacttcgccacctactactgccagcagcactacaccacccctcccaccttcggccagaccaaggtggaaatcaagagactcgagatccagaaccctgatcctgccgtgtaccagctgcgggatagcaagagcagcgacaagagcgtgtgtctgttcaccgacttcgacagccagaccaacgtgtcccagagcaaggactccgacgtgtacatcaccgataagtgcgtgctggacatgcggagcatggacttcaagagcaactccgccgtggcctggtccaacaagtccgatttcgcctgcgccaacgccttcaacaacagcattatccccgaggacacattcttcccaagccccgagagcagcgactccaccgaccacgtgaagcccaaagagacagagaacaccaagcagcccagcaagagctgccacaagcccaaggccatcgtgcacaccgagaaagtgaacatgatgagcctgaccgtgctgggcctgcggatgctgttcgccaaaaccgtggccgtgaacttcctgctgaccgccaagctgttcttcctccgcgccaagagaagcggatctggcgtgaagcagaccctgaatttcgacctgctgaagctggctggcgacgtggaatccaacccaggccctactagtatggactggatttggcgcatccttttccttgtcggcgctgctaccggcgcgcattccttcgaagaagtgcaactggtggaatctggcggcggactggtgcagcctggcggatctctgagactgagctgtgccgccagcggcttcaacatcaaggacacctacatccactgggtgcgccaggcccctggaaagggactggaatgggtggcccggatctaccccaccaacggctacaccagatacgccgacagcgtgaagggccggttcaccatcagcgccgacaccagcaagaataccgcctacctccagatgaacagcctgcgggccgaggataccgccgtgtactactgctcaagatggggaggcgacggcttctacgctatggacgtgtggggccagggcacccttgtgaccgtgtcatctacgcgtgaggacctgaagaacgtgttcccacctgaggtggccgtgttcgagcctagcgaggccgagatcagccacacccagaaagccaccctcgtgtgcctggctaccggcttctaccccgaccatgtggaactgtcttggtgggtcaacggcaaagaggtgcacagcggcgtgtgtaccgacccccagccactgaaagaacagcccgccctgaacgacagccggtactgcctgagcagcagactgagagtgtccgccaccttctggcagaacccccggaaccacttcagatgccaggtgcagttctacggcctgagcgagaacgacgagtggacccaggacagagccaagcccgtgacccagatcgtgtctgccgaagcctggggcagagccgatgatgtgattaagatccactggcaggaaaagaagtccaacaccatcctgggcagccaggaaggcaacaccatgaagaccaacgacacctacatgaagttcagctggctgaccgtgcccgagaagtccctggacaaagaacacagatgcatcgtgcggcacgaaaacaacaagaacggcgtggaccaggaaatcatcttcccacccatcaagaccgatgtgattacaatggaccccaaggacaactgctccaaggacgccaacgataccctgctgctccagctgaccaacaccagcgcctactacatgtacttgttgctgctgctgaagtccgtggtgtacttcgccatcatcacatgctgcctgctgcggagaaccgccttctgctgcaacggcgagaagtct

SEQ ID NO: 7599 - DNA, 2580 bp, synthetic construct
  source 1..2580: mol_type = other DNA
atggccttaccagtgaccgccttgctcctgccgctggccttgctgctccacgccgccaggccggaagtgcagctggttgaatctggcggaggactggttcagcctggcggatctctgagactgtcttgtgccgccagcggcttcagcttcagcgacttttggatgagctgggtccgacaggcccctggcaaaggacttgaatgggtcgccacaatcagccaggccggcagcgagaaggactacgtggactctgtgaagggcagattcaccatcagccgggacaacgccaagaagtccctgtacctccagatgaacagcctgagagccgaggacaccgccgtgtactattgtgcctctggcgtgtacagcttcgactacagaggccagggcaccctggtcacagtctcttctggtaccggcggaggcggatctggcggcggaggtagcggtggcggaggatctgaattcgaccagagcgtgctgacacagcctcctagcgtgtcagtggcccctggcaagaccgccagaatcccctgcgagggcaactacatcggcagcagcaacgtgcactggtatcagcagaagcccggccaggctcccgtgctcgtgatccacttcgacagcgacagacccagcggcatccccgacagattcagcggcagcaacagcggcaacatggctaccctgaccatcagcagagtggaagccggggacgaggccgactactactgtcaagtgtgggagaaccacggctgggtgttcggcggaggcaccaagctgacagtgctgtctctcgagatccagaaccctgatcctgccgtgtaccagctgcgggatagcaagagcagcgacaagagcgtgtgtctgttcaccgacttcgacagccagaccaacgtgtcccagagcaaggactccgacgtgtacatcaccgataagtgcgtgctggacatgcggagcatggacttcaagagcaactccgccgtggcctggtccaacaagtccgatttcgcctgcgccaacgccttcaacaacagcattatccccgaggacacattcttcccaagccccgagagcagcgactccaccgaccacgtgaagcccaaagagacagagaacaccaagcagcccagcaagagctgccacaagcccaaggccatcgtgcacaccgagaaagtgaacatgatgagcctgaccgtgctgggcctgcggatgctgttcgccaaaaccgtggccgtgaacttcctgctgaccgccaagctgttcttcctccgcgccaagagaagcggatctggcgtgaagcagaccctgaatttcgacctgctgaagctggctggcgacgtggaatccaacccaggccctactagtatggactggatttggcgcatccttttccttgtcggcgctgctaccggcgcgcattccttcgaagaggtgcaactggtggaaacaggcggcggactggtgcagcctggcgagtctctgagactgagctgtgccgccagcggcttcaccttcagcgactacgagatgaactgggtgcgccaggcccctggaaagggcctggaatgggtgtcctacatcagcagctccggcagcaccatctactacgccgacagcgtgaagggccggtttaccatctaccgggacaacgccaagaacagcctgtacctccagatgaactccctgcgggccgaggacaccgccctgtactattgtgccagagcctggggcgtgggaccccctgattattggggacagggcaccctcgtgaccgtgtcctctacgcgtgaggacctgaagaacgtgttcccacctgaggtggccgtgttcgagcctagcgaggccgagatcagccacacccagaaagccaccctcgtgtgcctggctaccggcttctaccccgaccatgtggaactgtcttggtgggtcaacggcaaagaggtgcacagcggcgtgtgtaccgacccccagccactgaaagaacagcccgccctgaacgacagccggtactgcctgagcagcagactgagagtgtccgccaccttctggcagaacccccggaaccacttcagatgccaggtgcagttctacggcctgagcgagaacgacgagtggacccaggacagagccaagcccgtgacccagatcgtgtctgccgaagcctggggcagagccgatgatgtgattaagatccactggcaggaaaagaagtccaacaccatcctgggcagccaggaaggcaacaccatgaagaccaacgacacctacatgaagttcagctggctgaccgtgcccgagaagtccctggacaaagaacacagatgcatcgtgcggcacgaaaacaacaagaacggcgtggaccaggaaatcatcttcccacccatcaagaccgatgtgattacaatggaccccaaggacaactgctccaaggacgccaacgataccctgctgctccagctgaccaacaccagcgcctactacatgtacttgttgctgctgctgaagtccgtggtgtacttcgccatcatcacatgctgcctgctgcggagaaccgccttctgctgcaacggcgagaagtct

SEQ ID NO: 7600 - DNA, 2604 bp, synthetic construct
  source 1..2604: mol_type = other DNA
atggccttaccagtgaccgccttgctcctgccgctggccttgctgctccacgccgccaggccggaagtgcagctggttgaatctggcggaggactggttcagcctggcggatctctgagactgtcttgtgccgccagcggcttcagcttcagcgacttttggatgagctgggtccgacaggcccctggcaaaggacttgaatgggtcgccacaatcagccaggccggcagcgagaaggactacgtggactctgtgaagggcagattcaccatcagccgggacaacgccaagaagtccctgtacctccagatgaacagcctgagagccgaggacaccgccgtgtactattgtgcctctggcgtgtacagcttcgactacagaggccagggcaccctggtcacagtctcttctggtaccggcggaggcggatctggcggcggaggtagcggtggcggaggatctgaattcgacatccagatgacccagagccccagcagcctgtctgccagcgtgggcgataccgtgaccatcacctgtcaggccaacggctacctgaactggtatcagcagcggagaggcaaggcccccaagctgctgatctacgacggcagcaagctggaaagaggcgtgcccagcagattcagcggcagaagatggggccaggagtacaacctgaccatcaacaacctccagcccgaggatattgccacatacttttgccaggtgtacgagttcgtggtgcccggcacacggctggacctgaagagaacagtggctgctcctctcgagatccagaaccctgatcctgccgtgtaccagctgcgggatagcaagagcagcgacaagagcgtgtgtctgttcaccgacttcgacagccagaccaacgtgtcccagagcaaggactccgacgtgtacatcaccgataagtgcgtgctggacatgcggagcatggacttcaagagcaactccgccgtggcctggtccaacaagtccgatttcgcctgcgccaacgccttcaacaacagcattatccccgaggacacattcttcccaagccccgagagcagcgactccaccgaccacgtgaagcccaaagagacagagaacaccaagcagcccagcaagagctgccacaagcccaaggccatcgtgcacaccgagaaagtgaacatgatgagcctgaccgtgctgggcctgcggatgctgttcgccaaaaccgtggccgtgaacttcctgctgaccgccaagctgttcttcctccgcgccaagagaagcggatctggcgtgaagcagaccctgaatttcgacctgctgaagctggctggcgacgtggaatccaacccaggccctactagtatggactggatttggcgcatccttttccttgtcggcgctgctaccggcgcgcattccttcgaacaggtgcagctgctccagtctggcgctgccgtgacaaagcctggcgcttctgtgcgggtgtcctgtgaagccagcggctacaacatccgggactacttcatccactggtggcggcaggctccaggccagggactccagtgggtgggatggatcaaccccaagaccggccagcccaacaaccccagacagttccagggcagagtgtccctgaccagacacgccagctgggacttcgacaccttcagcttctacatggatctgaaggccctgcggagcgacgataccgccgtgtacttctgcgccagacagagaagcgactactgggatttcgacgtgtggggcagcggcacccaagtgacagtgtctagcgccagcaccaagggacccacgcgtgaggacctgaagaacgtgttcccacctgaggtggccgtgttcgagcctagcgaggccgagatcagccacacccagaaagccaccctcgtgtgcctggctaccggcttctaccccgaccatgtggaactgtcttggtgggtcaacggcaaagaggtgcacagcggcgtgtgtaccgacccccagccactgaaagaacagcccgccctgaacgacagccggtactgcctgagcagcagactgagagtgtccgccaccttctggcagaacccccggaaccacttcagatgccaggtgcagttctacggcctgagcgagaacgacgagtggacccaggacagagccaagcccgtgacccagatcgtgtctgccgaagcctggggcagagccgatgatgtgattaagatccactggcaggaaaagaagtccaacaccatcctgggcagccaggaaggcaacaccatgaagaccaacgacacctacatgaagttcagctggctgaccgtgcccgagaagtccctggacaaagaacacagatgcatcgtgcggcacgaaaacaacaagaacggcgtggaccaggaaatcatcttcccacccatcaagaccgatgtgattacaatggaccccaaggacaactgctccaaggacgccaacgataccctgctgctccagctgaccaacaccagcgcctactacatgtacttgttgctgctgctgaagtccgtggtgtacttcgccatcatcacatgctgcctgctgcggagaaccgccttctgctgcaacggcgagaagtct

SEQ ID NO: 7601 - DNA, 2622 bp, synthetic construct
  source 1..2622: mol_type = other DNA
atggccttaccagtgaccgccttgctcctgccgctggccttgctgctccacgccgccaggccggaagtgcagctggttgaatctggcggaggactggttcagcctggcggatctctgagactgtcttgtgccgccagcggcttcagcttcagcgacttttggatgagctgggtccgacaggcccctggcaaaggacttgaatgggtcgccacaatcagccaggccggcagcgagaaggactacgtggactctgtgaagggcagattcaccatcagccgggacaacgccaagaagtccctgtacctccagatgaacagcctgagagccgaggacaccgccgtgtactattgtgcctctggcgtgtacagcttcgactacagaggccagggcaccctggtcacagtctcttctggtaccggcggaggcggatctggcggcggaggtagcggtggcggaggatctgaattccagtctgccctgacacagcctcctagcgcctctggctctcccggccagagcatcaccatcagctgtaccggcaccagcaacaacttcgtgtcctggtatcagcagcacgccggcaaggcccccaagctcgtgatctacgacgtgaacaagcggcccagcggcgtgcccgatagattcagcggcagcaagagcggcaacaccgccagcctgacagtgtctggcctccagaccgatgacgaggccgtgtactactgcggcagcctcgtgggcaactgggacgtgatctttggcggaggcaccaagctgaccgtgctgctcgagatccagaaccctgatcctgccgtgtaccagctgcgggatagcaagagcagcgacaagagcgtgtgtctgttcaccgacttcgacagccagaccaacgtgtcccagagcaaggactccgacgtgtacatcaccgataagtgcgtgctggacatgcggagcatggacttcaagagcaactccgccgtggcctggtccaacaagtccgatttcgcctgcgccaacgccttcaacaacagcattatccccgaggacacattcttcccaagccccgagagcagcgactccaccgaccacgtgaagcccaaagagacagagaacaccaagcagcccagcaagagctgccacaagcccaaggccatcgtgcacaccgagaaagtgaacatgatgagcctgaccgtgctgggcctgcggatgctgttcgccaaaaccgtggccgtgaacttcctgctgaccgccaagctgttcttcctccgcgccaagagaagcggatctggcgtgaagcagaccctgaatttcgacctgctgaagctggctggcgacgtggaatccaacccaggccctactagtatggactggatttggcgcatccttttccttgtcggcgctgctaccggcgcgcattccttcgaacagccccagctccaggaatctggccccacactggtggaagccagcgagacactgagcctgacctgtgccgtgtccggcgattctaccgccgcctgcaatagcttctggggctgggtgcgccagcctcctggaaagggactggaatgggtgggaagcctgagccactgcgccagctattggaaccggggctggacctaccacaaccccagcctgaagtccagactgaccctggccctggacacccccaagaacctggtgttcctgaagctgaacagcgtgacagccgccgacaccgccacctactactgtgccagatttggcggcgaggtgctgcggtacaccgactggcctaaacctgcctgggtggacctgtggggcagaggaacactcgtgaccgtgtccagcacgcgtgaggacctgaagaacgtgttcccacctgaggtggccgtgttcgagcctagcgaggccgagatcagccacacccagaaagccaccctcgtgtgcctggctaccggcttctaccccgaccatgtggaactgtcttggtgggtcaacggcaaagaggtgcacagcggcgtgtgtaccgacccccagccactgaaagaacagcccgccctgaacgacagccggtactgcctgagcagcagactgagagtgtccgccaccttctggcagaacccccggaaccacttcagatgccaggtgcagttctacggcctgagcgagaacgacgagtggacccaggacagagccaagcccgtgacccagatcgtgtctgccgaagcctggggcagagccgatgatgtgattaagatccactggcaggaaaagaagtccaacaccatcctgggcagccaggaaggcaacaccatgaagaccaacgacacctacatgaagttcagctggctgaccgtgcccgagaagtccctggacaaagaacacagatgcatcgtgcggcacgaaaacaacaagaacggcgtggaccaggaaatcatcttcccacccatcaagaccgatgtgattacaatggaccccaaggacaactgctccaaggacgccaacgataccctgctgctccagctgaccaacaccagcgcctactacatgtacttgttgctgctgctgaagtccgtggtgtacttcgccatcatcacatgctgcctgctgcggagaaccgccttctgctgcaacggcgagaagtct

SEQ ID NO: 7602 - DNA, 2577 bp, synthetic construct
  source 1..2577: mol_type = other DNA
atggccttaccagtgaccgccttgctcctgccgctggccttgctgctccacgccgccaggccggaagtgcagctggttgaatctggcggaggactggttcagcctggcggatctctgagactgtcttgtgccgccagcggcttcagcttcagcgacttttggatgagctgggtccgacaggcccctggcaaaggacttgaatgggtcgccacaatcagccaggccggcagcgagaaggactacgtggactctgtgaagggcagattcaccatcagccgggacaacgccaagaagtccctgtacctccagatgaacagcctgagagccgaggacaccgccgtgtactattgtgcctctggcgtgtacagcttcgactacagaggccagggcaccctggtcacagtctcttctggtaccggcggaggcggatctggcggcggaggtagcggtggcggaggatctgaattcgagatcgtgctgacacagagccctggcaccctgagcctgtctccaggcgagacagccatcatcagctgccggacaagccagtacggcagcctggcctggtatcagcagaggccaggacaggcccccagactcgtgatctacagcggcagcacaagagccgccggaatccccgatagattcagcggctccagatggggacccgactacaacctgaccatcagcaacctggaaagcggcgacttcggcgtgtactactgccagcagtacgagttcttcggccagggcaccaaggtgcaggtggacatcaaaagactcgagatccagaaccctgatcctgccgtgtaccagctgcgggatagcaagagcagcgacaagagcgtgtgtctgttcaccgacttcgacagccagaccaacgtgtcccagagcaaggactccgacgtgtacatcaccgataagtgcgtgctggacatgcggagcatggacttcaagagcaactccgccgtggcctggtccaacaagtccgatttcgcctgcgccaacgccttcaacaacagcattatccccgaggacacattcttcccaagccccgagagcagcgactccaccgaccacgtgaagcccaaagagacagagaacaccaagcagcccagcaagagctgccacaagcccaaggccatcgtgcacaccgagaaagtgaacatgatgagcctgaccgtgctgggcctgcggatgctgttcgccaaaaccgtggccgtgaacttcctgctgaccgccaagctgttcttcctccgcgccaagagaagcggatctggcgtgaagcagaccctgaatttcgacctgctgaagctggctggcgacgtggaatccaacccaggccctactagtatggactggatttggcgcatccttttccttgtcggcgctgctaccggcgcgcattccttcgaacaggtgcagctggtgcagtctggcggccagatgaagaaacccggcgagagcatgagaatcagctgtcgggcctccggctacgagttcatcgactgcaccctgaactggatcagactggcccctggcaagcggcctgagtggatgggatggctgaagcctagaggcggagccgtgaactacgccagacctctccagggcagagtgaccatgaccagggacgtgtacagcgataccgccttcctggaactgcggagcctgaccgtggatgataccgccgtgtacttctgcaccagaggcaagaactgcgattacaactgggacttcgagcactggggcagaggcacccctgtgatcgtgtctagcacgcgtgaggacctgaagaacgtgttcccacctgaggtggccgtgttcgagcctagcgaggccgagatcagccacacccagaaagccaccctcgtgtgcctggctaccggcttctaccccgaccatgtggaactgtcttggtgggtcaacggcaaagaggtgcacagcggcgtgtgtaccgacccccagccactgaaagaacagcccgccctgaacgacagccggtactgcctgagcagcagactgagagtgtccgccaccttctggcagaacccccggaaccacttcagatgccaggtgcagttctacggcctgagcgagaacgacgagtggacccaggacagagccaagcccgtgacccagatcgtgtctgccgaagcctggggcagagccgatgatgtgattaagatccactggcaggaaaagaagtccaacaccatcctgggcagccaggaaggcaacaccatgaagaccaacgacacctacatgaagttcagctggctgaccgtgcccgagaagtccctggacaaagaacacagatgcatcgtgcggcacgaaaacaacaagaacggcgtggaccaggaaatcatcttcccacccatcaagaccgatgtgattacaatggaccccaaggacaactgctccaaggacgccaacgataccctgctgctccagctgaccaacaccagcgcctactacatgtacttgttgctgctgctgaagtccgtggtgtacttcgccatcatcacatgctgcctgctgcggagaaccgccttctgctgcaacggcgagaagtct

SEQ ID NO: 7603 - DNA, 2607 bp, synthetic construct
  source 1..2607: mol_type = other DNA
atggccttaccagtgaccgccttgctcctgccgctggccttgctgctccacgccgccaggccggaagtgcagctggttgaatctggcggaggactggttcagcctggcggatctctgagactgtcttgtgccgccagcggcttcagcttcagcgacttttggatgagctgggtccgacaggcccctggcaaaggacttgaatgggtcgccacaatcagccaggccggcagcgagaaggactacgtggactctgtgaagggcagattcaccatcagccgggacaacgccaagaagtccctgtacctccagatgaacagcctgagagccgaggacaccgccgtgtactattgtgcctctggcgtgtacagcttcgactacagaggccagggcaccctggtcacagtctcttctggtaccggcggaggcggatctggcggcggaggtagcggtggcggaggatctgaattcgagctggtgctgacacagagccctggcaccctgtctctgtctgccggcgaaagagccaccctgagctgtagagccagccagagcgtgtcctctggcagcctggcttggtatcagcagaagccaggccaggcccccagactgctgatctacggcgcttctaccagagccaccggcatccccgatagattcagcggctctggctccggcaccgacttcaccctgacaatcggcagactggaacccgaggacctggccgtgtactactgccagcagtacggcaccagcccctacacattcggccagggcaccaagctggaaatcctcgagatccagaaccctgatcctgccgtgtaccagctgcgggatagcaagagcagcgacaagagcgtgtgtctgttcaccgacttcgacagccagaccaacgtgtcccagagcaaggactccgacgtgtacatcaccgataagtgcgtgctggacatgcggagcatggacttcaagagcaactccgccgtggcctggtccaacaagtccgatttcgcctgcgccaacgccttcaacaacagcattatccccgaggacacattcttcccaagccccgagagcagcgactccaccgaccacgtgaagcccaaagagacagagaacaccaagcagcccagcaagagctgccacaagcccaaggccatcgtgcacaccgagaaagtgaacatgatgagcctgaccgtgctgggcctgcggatgctgttcgccaaaaccgtggccgtgaacttcctgctgaccgccaagctgttcttcctccgcgccaagagaagcggatctggcgtgaagcagaccctgaatttcgacctgctgaagctggctggcgacgtggaatccaacccaggccctactagtatggactggatttggcgcatccttttccttgtcggcgctgctaccggcgcgcattccttcgaactggaacagagcggagccgaagtgaagaaacccggcagcagcgtgcaggtgtcctgcaaagcaagcggcggcaccttctctatgtacggcttcaactgggtgcgccaggctcctggacacggcctggaatggatgggcggcatcatccccatcttcggcacctccaactacgcccagaaattccggggcagagtgaccttcaccgccgaccaggccacaagcaccgcctacatggaactgaccaacctgcggagcgacgacaccgccgtgtattattgcgccagagacttcggccccgactgggaggatggcgacagctacgatggcagcggcagaggcttcttcgacttctggggccagggaacccttgtgaccgtgtcctcaacgcgtgaggacctgaagaacgtgttcccacctgaggtggccgtgttcgagcctagcgaggccgagatcagccacacccagaaagccaccctcgtgtgcctggctaccggcttctaccccgaccatgtggaactgtcttggtgggtcaacggcaaagaggtgcacagcggcgtgtgtaccgacccccagccactgaaagaacagcccgccctgaacgacagccggtactgcctgagcagcagactgagagtgtccgccaccttctggcagaacccccggaaccacttcagatgccaggtgcagttctacggcctgagcgagaacgacgagtggacccaggacagagccaagcccgtgacccagatcgtgtctgccgaagcctggggcagagccgatgatgtgattaagatccactggcaggaaaagaagtccaacaccatcctgggcagccaggaaggcaacaccatgaagaccaacgacacctacatgaagttcagctggctgaccgtgcccgagaagtccctggacaaagaacacagatgcatcgtgcggcacgaaaacaacaagaacggcgtggaccaggaaatcatcttcccacccatcaagaccgatgtgattacaatggaccccaaggacaactgctccaaggacgccaacgataccctgctgctccagctgaccaacaccagcgcctactacatgtacttgttgctgctgctgaagtccgtggtgtacttcgccatcatcacatgctgcctgctgcggagaaccgccttctgctgcaacggcgagaagtct

SEQ ID NO: 7604 - DNA, 2547 bp, synthetic construct
  source 1..2547: mol_type = other DNA
atggccttaccagtgaccgccttgctcctgccgctggccttgctgctccacgccgccaggccggaagtgcagctggttgaatctggcggaggactggttcagcctggcggatctctgagactgtcttgtgccgccagcggcttcagcttcagcgacttttggatgagctgggtccgacaggcccctggcaaaggacttgaatgggtcgccacaatcagccaggccggcagcgagaaggactacgtggactctgtgaagggcagattcaccatcagccgggacaacgccaagaagtccctgtacctccagatgaacagcctgagagccgaggacaccgccgtgtactattgtgcctctggcgtgtacagcttcgactacagaggccagggcaccctggtcacagtctcttctggtaccggcggaggcggatctggcggcggaggtagcggtggcggaggatctgaattcgacatccagatgacccagagccccagcagcctgtctgccagcgtgggcgacagagtgaccatcacctgtcaggccagccaggacatcaacaactacctgaactggtatcagcagaagcccggcaaggcccccaagctgctgatctacgacgccagcaatctgcagaccggcgtgcccagcagattttccggctctggcagcggcaccgacttcaccttcaccatcgaggacattgccacctactactgccagcagtacaccttcggccctggcaccaaggtggacatcaaactcgagatccagaaccctgatcctgccgtgtaccagctgcgggatagcaagagcagcgacaagagcgtgtgtctgttcaccgacttcgacagccagaccaacgtgtcccagagcaaggactccgacgtgtacatcaccgataagtgcgtgctggacatgcggagcatggacttcaagagcaactccgccgtggcctggtccaacaagtccgatttcgcctgcgccaacgccttcaacaacagcattatccccgaggacacattcttcccaagccccgagagcagcgactccaccgaccacgtgaagcccaaagagacagagaacaccaagcagcccagcaagagctgccacaagcccaaggccatcgtgcacaccgagaaagtgaacatgatgagcctgaccgtgctgggcctgcggatgctgttcgccaaaaccgtggccgtgaacttcctgctgaccgccaagctgttcttcctccgcgccaagagaagcggatctggcgtgaagcagaccctgaatttcgacctgctgaagctggctggcgacgtggaatccaacccaggccctactagtatggactggatttggcgcatccttttccttgtcggcgctgctaccggcgcgcattccttcgaagaagtgcaactgctggaatctggcggcggactggtgcagcctggcggatctctgagactgagctgtgccgccagcggcttcacctttagctggtacagcatgacctgggtgcgccaggcccctggcaaaggactggaatgggtgtccagcatcgtgccctggggcgatttcacccagtacgccgatagcgtgaagggccggttcaccatcagccgggacaacagcaagaacaccctgtacctgcagatgaacagcctgcgggccgaggacaccgccgtgtactattgtgccaagggacctggctggggcagcttcgatctgtggggcagaggaacccttgtgaccgtgtccagcacgcgtgaggacctgaagaacgtgttcccacctgaggtggccgtgttcgagcctagcgaggccgagatcagccacacccagaaagccaccctcgtgtgcctggctaccggcttctaccccgaccatgtggaactgtcttggtgggtcaacggcaaagaggtgcacagcggcgtgtgtaccgacccccagccactgaaagaacagcccgccctgaacgacagccggtactgcctgagcagcagactgagagtgtccgccaccttctggcagaacccccggaaccacttcagatgccaggtgcagttctacggcctgagcgagaacgacgagtggacccaggacagagccaagcccgtgacccagatcgtgtctgccgaagcctggggcagagccgatgatgtgattaagatccactggcaggaaaagaagtccaacaccatcctgggcagccaggaaggcaacaccatgaagaccaacgacacctacatgaagttcagctggctgaccgtgcccgagaagtccctggacaaagaacacagatgcatcgtgcggcacgaaaacaacaagaacggcgtggaccaggaaatcatcttcccacccatcaagaccgatgtgattacaatggaccccaaggacaactgctccaaggacgccaacgataccctgctgctccagctgaccaacaccagcgcctactacatgtacttgttgctgctgctgaagtccgtggtgtacttcgccatcatcacatgctgcctgctgcggagaaccgccttctgctgcaacggcgagaagtct

SEQ ID NO: 7605 - DNA, 2577 bp, synthetic construct
  source 1..2577: mol_type = other DNA
atggccttaccagtgaccgccttgctcctgccgctggccttgctgctccacgccgccaggccggaagtgcagctggttgaatctggcggaggactggttcagcctggcggatctctgagactgtcttgtgccgccagcggcttcagcttcagcgacttttggatgagctgggtccgacaggcccctggcaaaggacttgaatgggtcgccacaatcagccaggccggcagcgagaaggactacgtggactctgtgaagggcagattcaccatcagccgggacaacgccaagaagtccctgtacctccagatgaacagcctgagagccgaggacaccgccgtgtactattgtgcctctggcgtgtacagcttcgactacagaggccagggcaccctggtcacagtctcttctggtaccggcggaggcggatctggcggcggaggtagcggtggcggaggatctgaattcgacatccagatgacccagagccccagcagcctgtctgccagcgtgggcgacagagtgaccatcacctgtaccgccagcctgagcgtgtccagcacctacctgcactggtatcagcagaagcccggcagcagccccaagctgtggatctacagcaccagcaacctggcctccggcgtgcccagcagattttctggcagcggctctggcaccagctacaccctgaccatcagctccctccagcccgaggacttcgccacctactactgccaccagtaccacagaagccccctgacctttggcggaggcaccaaggtggaaatcaagagactcgagatccagaaccctgatcctgccgtgtaccagctgcgggatagcaagagcagcgacaagagcgtgtgtctgttcaccgacttcgacagccagaccaacgtgtcccagagcaaggactccgacgtgtacatcaccgataagtgcgtgctggacatgcggagcatggacttcaagagcaactccgccgtggcctggtccaacaagtccgatttcgcctgcgccaacgccttcaacaacagcattatccccgaggacacattcttcccaagccccgagagcagcgactccaccgaccacgtgaagcccaaagagacagagaacaccaagcagcccagcaagagctgccacaagcccaaggccatcgtgcacaccgagaaagtgaacatgatgagcctgaccgtgctgggcctgcggatgctgttcgccaaaaccgtggccgtgaacttcctgctgaccgccaagctgttcttcctccgcgccaagagaagcggatctggcgtgaagcagaccctgaatttcgacctgctgaagctggctggcgacgtggaatccaacccaggccctactagtatggactggatttggcgcatccttttccttgtcggcgctgctaccggcgcgcattccttcgaagaagtgcaactggtggaatctggcggcggactggtgcagcctggcggatctctgagactgagctgtgccgccagcggcttcagcctgaccaaatacggcgtgcactgggtgcgccaggcccctggaaaaggactggaatgggtgggagtgaagtgggctggcggctccaccgactacaacagcgccctgatgagccggttcaccatcagcaaggacaacgccaagaacagcctgtacctccagatgaactccctgcgggccgaggacaccgccgtgtactactgtgccagagatcaccgggacgctatggactactggggccagggaacactcgtgaccgtgtcctctacgcgtgaggacctgaagaacgtgttcccacctgaggtggccgtgttcgagcctagcgaggccgagatcagccacacccagaaagccaccctcgtgtgcctggctaccggcttctaccccgaccatgtggaactgtcttggtgggtcaacggcaaagaggtgcacagcggcgtgtgtaccgacccccagccactgaaagaacagcccgccctgaacgacagccggtactgcctgagcagcagactgagagtgtccgccaccttctggcagaacccccggaaccacttcagatgccaggtgcagttctacggcctgagcgagaacgacgagtggacccaggacagagccaagcccgtgacccagatcgtgtctgccgaagcctggggcagagccgatgatgtgattaagatccactggcaggaaaagaagtccaacaccatcctgggcagccaggaaggcaacaccatgaagaccaacgacacctacatgaagttcagctggctgaccgtgcccgagaagtccctggacaaagaacacagatgcatcgtgcggcacgaaaacaacaagaacggcgtggaccaggaaatcatcttcccacccatcaagaccgatgtgattacaatggaccccaaggacaactgctccaaggacgccaacgataccctgctgctccagctgaccaacaccagcgcctactacatgtacttgttgctgctgctgaagtccgtggtgtacttcgccatcatcacatgctgcctgctgcggagaaccgccttctgctgcaacggcgagaagtct

SEQ ID NO: 7606 - DNA, 2589 bp, synthetic construct
  source 1..2589: mol_type = other DNA
atggccttaccagtgaccgccttgctcctgccgctggccttgctgctccacgccgccaggccggaagtgcagctggttgaatctggcggaggactggttcagcctggcggatctctgagactgtcttgtgccgccagcggcttcagcttcagcgacttttggatgagctgggtccgacaggcccctggcaaaggacttgaatgggtcgccacaatcagccaggccggcagcgagaaggactacgtggactctgtgaagggcagattcaccatcagccgggacaacgccaagaagtccctgtacctccagatgaacagcctgagagccgaggacaccgccgtgtactattgtgcctctggcgtgtacagcttcgactacagaggccagggcaccctggtcacagtctcttctggtaccggcggaggcggatctggcggcggaggtagcggtggcggaggatctgaattcgacatccagatgacccagagccccagcagcctgtctgccagcgtgggcgacagagtgaccatcacatgcaaggccagccaggacgtgggaacagccgtggcctggtatcagcagaagcctggcaaggcccccaagctgctgatctacagcgccagctacagatccaccggcgtgcccagcagattttccggctctggcagcggcaccgacttcaccctgaccatctctagcctccagcccgaggacttcgccacctactactgccagcaccactactccgccccctggacatttggcggaggcaccaaggtggaaatcaagctcgagatccagaaccctgatcctgccgtgtaccagctgcgggatagcaagagcagcgacaagagcgtgtgtctgttcaccgacttcgacagccagaccaacgtgtcccagagcaaggactccgacgtgtacatcaccgataagtgcgtgctggacatgcggagcatggacttcaagagcaactccgccgtggcctggtccaacaagtccgatttcgcctgcgccaacgccttcaacaacagcattatccccgaggacacattcttcccaagccccgagagcagcgactccaccgaccacgtgaagcccaaagagacagagaacaccaagcagcccagcaagagctgccacaagcccaaggccatcgtgcacaccgagaaagtgaacatgatgagcctgaccgtgctgggcctgcggatgctgttcgccaaaaccgtggccgtgaacttcctgctgaccgccaagctgttcttcctccgcgccaagagaagcggatctggcgtgaagcagaccctgaatttcgacctgctgaagctggctggcgacgtggaatccaacccaggccctactagtatggactggatttggcgcatccttttccttgtcggcgctgctaccggcgcgcattccttcgaagaagtgcaactggtggaatcaggcggcggactggtgcagcctggcggatctctgagactgagctgtgccgccagcggcttcaccttcagcagaaacggcatgagctgggtgcgccaggcccctggaaaaggactggaatgggtggcaaccgtgtccagcggcggcagctacatctactacgccgacagcgtgaagggccggttcaccatctccagagacaacgccaagaacagcctgtacctccagatgaactccctgcgggccgaggacaccgccgtgtactattgtgccagacagggcaccaccgccctggctaccagattcttcgatgtgtggggccagggcaccctcgtgaccgtgtcatctacgcgtgaggacctgaagaacgtgttcccacctgaggtggccgtgttcgagcctagcgaggccgagatcagccacacccagaaagccaccctcgtgtgcctggctaccggcttctaccccgaccatgtggaactgtcttggtgggtcaacggcaaagaggtgcacagcggcgtgtgtaccgacccccagccactgaaagaacagcccgccctgaacgacagccggtactgcctgagcagcagactgagagtgtccgccaccttctggcagaacccccggaaccacttcagatgccaggtgcagttctacggcctgagcgagaacgacgagtggacccaggacagagccaagcccgtgacccagatcgtgtctgccgaagcctggggcagagccgatgatgtgattaagatccactggcaggaaaagaagtccaacaccatcctgggcagccaggaaggcaacaccatgaagaccaacgacacctacatgaagttcagctggctgaccgtgcccgagaagtccctggacaaagaacacagatgcatcgtgcggcacgaaaacaacaagaacggcgtggaccaggaaatcatcttcccacccatcaagaccgatgtgattacaatggaccccaaggacaactgctccaaggacgccaacgataccctgctgctccagctgaccaacaccagcgcctactacatgtacttgttgctgctgctgaagtccgtggtgtacttcgccatcatcacatgctgcctgctgcggagaaccgccttctgctgcaacggcgagaagtct

SEQ ID NO: 7607 - DNA, 2577 bp, synthetic construct
  source 1..2577: mol_type = other DNA
atggccttaccagtgaccgccttgctcctgccgctggccttgctgctccacgccgccaggccggaagtgcagctggttgaatctggcggaggactggttcagcctggcggatctctgagactgtcttgtgccgccagcggcttcagcttcagcgacttttggatgagctgggtccgacaggcccctggcaaaggacttgaatgggtcgccacaatcagccaggccggcagcgagaaggactacgtggactctgtgaagggcagattcaccatcagccgggacaacgccaagaagtccctgtacctccagatgaacagcctgagagccgaggacaccgccgtgtactattgtgcctctggcgtgtacagcttcgactacagaggccagggcaccctggtcacagtctcttctggtaccggcggaggcggatctggcggcggaggtagcggtggcggaggatctgaattcgacatccagatgacccagagcccccctagcctgtctgcctctgtgggcggcaaagtgaccatcacatgcaaggccagccaggacatcgaccgctacatggcctggtatcaggacaagcccggcaagggacccaagctgctgatccacgataccagcaccctccagcccggcatccccagcagattttctggcagcggctccggcagagactacagcttcagcatcagcaacctggaacccgaggacattgccacctactactgcctccagtacgacaacctgtggaccttcggcggaggcaccaagctggaaatcaagagactcgagatccagaaccctgatcctgccgtgtaccagctgcgggatagcaagagcagcgacaagagcgtgtgtctgttcaccgacttcgacagccagaccaacgtgtcccagagcaaggactccgacgtgtacatcaccgataagtgcgtgctggacatgcggagcatggacttcaagagcaactccgccgtggcctggtccaacaagtccgatttcgcctgcgccaacgccttcaacaacagcattatccccgaggacacattcttcccaagccccgagagcagcgactccaccgaccacgtgaagcccaaagagacagagaacaccaagcagcccagcaagagctgccacaagcccaaggccatcgtgcacaccgagaaagtgaacatgatgagcctgaccgtgctgggcctgcggatgctgttcgccaaaaccgtggccgtgaacttcctgctgaccgccaagctgttcttcctccgcgccaagagaagcggatctggcgtgaagcagaccctgaatttcgacctgctgaagctggctggcgacgtggaatccaacccaggccctactagtatggactggatttggcgcatccttttccttgtcggcgctgctaccggcgcgcattccttcgaacaggtgcaactggtgcagagcggagccgagcttgtgaagcctggcgcttccgtgaagatgagctgcaaagccagcggctacatcttcaccaactacaacatccactgggtcaagaagtccccaggccagggcctggaatggatcggagccatctaccccggaaacggcgacgccccttacagccagaagttccaggacagagccaccctgaccgccgacaccagcagcagcaccacctacatggaactgagcagcctgaccagcgaggacagcgccgtgtactattgcgtgcgggccaactgggatgtggccttcgcctattggggccagggcacactggtgtccgtgtcctctacgcgtgaggacctgaagaacgtgttcccacctgaggtggccgtgttcgagcctagcgaggccgagatcagccacacccagaaagccaccctcgtgtgcctggctaccggcttctaccccgaccatgtggaactgtcttggtgggtcaacggcaaagaggtgcacagcggcgtgtgtaccgacccccagccactgaaagaacagcccgccctgaacgacagccggtactgcctgagcagcagactgagagtgtccgccaccttctggcagaacccccggaaccacttcagatgccaggtgcagttctacggcctgagcgagaacgacgagtggacccaggacagagccaagcccgtgacccagatcgtgtctgccgaagcctggggcagagccgatgatgtgattaagatccactggcaggaaaagaagtccaacaccatcctgggcagccaggaaggcaacaccatgaagaccaacgacacctacatgaagttcagctggctgaccgtgcccgagaagtccctggacaaagaacacagatgcatcgtgcggcacgaaaacaacaagaacggcgtggaccaggaaatcatcttcccacccatcaagaccgatgtgattacaatggaccccaaggacaactgctccaaggacgccaacgataccctgctgctccagctgaccaacaccagcgcctactacatgtacttgttgctgctgctgaagtccgtggtgtacttcgccatcatcacatgctgcctgctgcggagaaccgccttctgctgcaacggcgagaagtct

SEQ ID NO: 7608 - DNA, 2580 bp, synthetic construct
  source 1..2580: mol_type = other DNA
atggccttaccagtgaccgccttgctcctgccgctggccttgctgctccacgccgccaggccggaagtgcagctggttgaatctggcggaggactggttcagcctggcggatctctgagactgtcttgtgccgccagcggcttcagcttcagcgacttttggatgagctgggtccgacaggcccctggcaaaggacttgaatgggtcgccacaatcagccaggccggcagcgagaaggactacgtggactctgtgaagggcagattcaccatcagccgggacaacgccaagaagtccctgtacctccagatgaacagcctgagagccgaggacaccgccgtgtactattgtgcctctggcgtgtacagcttcgactacagaggccagggcaccctggtcacagtctcttctggtaccggcggaggcggatctggcggcggaggtagcggtggcggaggatctgaattcgacatccagatgacccagagccctgccagcctgtctgcctctgtgggcgagacagtgaccatcacctgtcgggtgtccggcaacatccacaactacctggcctggtatcagcagaagcagggcaagagcccccaactgctggtgtacaacgccaagaccctggccgatggcgtgcccagcagattttctggctctggcagcggcacccagtacagcctgaagatcaacagcctccagcccgaggacttcggcagctactactgccagcacttctggtccaacccctacaccttcggcggaggcaccaagctggaaatcaagctcgagatccagaaccctgatcctgccgtgtaccagctgcgggatagcaagagcagcgacaagagcgtgtgtctgttcaccgacttcgacagccagaccaacgtgtcccagagcaaggactccgacgtgtacatcaccgataagtgcgtgctggacatgcggagcatggacttcaagagcaactccgccgtggcctggtccaacaagtccgatttcgcctgcgccaacgccttcaacaacagcattatccccgaggacacattcttcccaagccccgagagcagcgactccaccgaccacgtgaagcccaaagagacagagaacaccaagcagcccagcaagagctgccacaagcccaaggccatcgtgcacaccgagaaagtgaacatgatgagcctgaccgtgctgggcctgcggatgctgttcgccaaaaccgtggccgtgaacttcctgctgaccgccaagctgttcttcctccgcgccaagagaagcggatctggcgtgaagcagaccctgaatttcgacctgctgaagctggctggcgacgtggaatccaacccaggccctactagtatggactggatttggcgcatccttttccttgtcggcgctgctaccggcgcgcattccttcgaacaggtgcaactccagcagtctggcgcttccgtgaaggtgtcctgcaaggccagcgaactcgtgcggcctggcacaggctacgccttcaccaattacctgatcgagtgggtcaagcagaggcccggacagggcctggaatggatcggagtgattaacccaggcagcggcggcaccaactacaacgagaagttcaagggcaaggccaccctgaccgccgacaagagcagcagcacagcctacatgcaactgagcagcctgaccagcgacgacagcgccgtgtacttctgcgcccggtacagaagctacgactggtacttcgacgtgtggggagccggcaccaccgtgacagtgtcatctacgcgtgaggacctgaagaacgtgttcccacctgaggtggccgtgttcgagcctagcgaggccgagatcagccacacccagaaagccaccctcgtgtgcctggctaccggcttctaccccgaccatgtggaactgtcttggtgggtcaacggcaaagaggtgcacagcggcgtgtgtaccgacccccagccactgaaagaacagcccgccctgaacgacagccggtactgcctgagcagcagactgagagtgtccgccaccttctggcagaacccccggaaccacttcagatgccaggtgcagttctacggcctgagcgagaacgacgagtggacccaggacagagccaagcccgtgacccagatcgtgtctgccgaagcctggggcagagccgatgatgtgattaagatccactggcaggaaaagaagtccaacaccatcctgggcagccaggaaggcaacaccatgaagaccaacgacacctacatgaagttcagctggctgaccgtgcccgagaagtccctggacaaagaacacagatgcatcgtgcggcacgaaaacaacaagaacggcgtggaccaggaaatcatcttcccacccatcaagaccgatgtgattacaatggaccccaaggacaactgctccaaggacgccaacgataccctgctgctccagctgaccaacaccagcgcctactacatgtacttgttgctgctgctgaagtccgtggtgtacttcgccatcatcacatgctgcctgctgcggagaaccgccttctgctgcaacggcgagaagtct

SEQ ID NO: 7609 - DNA, 2577 bp, synthetic construct
  source 1..2577: mol_type = other DNA
atggccttaccagtgaccgccttgctcctgccgctggccttgctgctccacgccgccaggccggaagtgcagctggttgaatctggcggaggactggttcagcctggcggatctctgagactgtcttgtgccgccagcggcttcagcttcagcgacttttggatgagctgggtccgacaggcccctggcaaaggacttgaatgggtcgccacaatcagccaggccggcagcgagaaggactacgtggactctgtgaagggcagattcaccatcagccgggacaacgccaagaagtccctgtacctccagatgaacagcctgagagccgaggacaccgccgtgtactattgtgcctctggcgtgtacagcttcgactacagaggccagggcaccctggtcacagtctcttctggtaccggcggaggcggatctggcggcggaggtagcggtggcggaggatctgaattcgacatccagatgacccagagcttcagcagcctgagcgccagcgtgggcgacagagtgaccatcacctgtagagccagccaggacatcagcaactacctgaactggtatcagcagaagcccggcaaggcccccaagctgctgatctactacaccagcagactgcacagcggcgtgcccagcagattttctggcagcggctccggcaccgactacaccctgacaatcagctccctgcagcccgaggacttcgctacctacttctgtcagcaaggcaacaccctgccctggacctttggcggaggcaccaagctggaaatcaagagactcgagatccagaaccctgatcctgccgtgtaccagctgcgggatagcaagagcagcgacaagagcgtgtgtctgttcaccgacttcgacagccagaccaacgtgtcccagagcaaggactccgacgtgtacatcaccgataagtgcgtgctggacatgcggagcatggacttcaagagcaactccgccgtggcctggtccaacaagtccgatttcgcctgcgccaacgccttcaacaacagcattatccccgaggacacattcttcccaagccccgagagcagcgactccaccgaccacgtgaagcccaaagagacagagaacaccaagcagcccagcaagagctgccacaagcccaaggccatcgtgcacaccgagaaagtgaacatgatgagcctgaccgtgctgggcctgcggatgctgttcgccaaaaccgtggccgtgaacttcctgctgaccgccaagctgttcttcctccgcgccaagagaagcggatctggcgtgaagcagaccctgaatttcgacctgctgaagctggctggcgacgtggaatccaacccaggccctactagtatggactggatttggcgcatccttttccttgtcggcgctgctaccggcgcgcattccttcgaagaagtgcaactggtgcagtccggcggagggctggtgcagagcggaggatctctgagactgagctgcagagccagcggctacaccttcacccggtactggatgctgtgggtgcgccagaggccaggcaagggactggaatgggtggccgagatcaacccccggaacgaccggaccaactacaacgagaagttcaagacccggttcaccatcagcgtggacagaagcaagaacaccctgtacctgcagatggacagcctgcgggccgaggataccgccgtgtacttttgtgctctgggaggcggctacgctatggactactggggccagggaacccttgtgaccgtgtcctctacgcgtgaggacctgaagaacgtgttcccacctgaggtggccgtgttcgagcctagcgaggccgagatcagccacacccagaaagccaccctcgtgtgcctggctaccggcttctaccccgaccatgtggaactgtcttggtgggtcaacggcaaagaggtgcacagcggcgtgtgtaccgacccccagccactgaaagaacagcccgccctgaacgacagccggtactgcctgagcagcagactgagagtgtccgccaccttctggcagaacccccggaaccacttcagatgccaggtgcagttctacggcctgagcgagaacgacgagtggacccaggacagagccaagcccgtgacccagatcgtgtctgccgaagcctggggcagagccgatgatgtgattaagatccactggcaggaaaagaagtccaacaccatcctgggcagccaggaaggcaacaccatgaagaccaacgacacctacatgaagttcagctggctgaccgtgcccgagaagtccctggacaaagaacacagatgcatcgtgcggcacgaaaacaacaagaacggcgtggaccaggaaatcatcttcccacccatcaagaccgatgtgattacaatggaccccaaggacaactgctccaaggacgccaacgataccctgctgctccagctgaccaacaccagcgcctactacatgtacttgttgctgctgctgaagtccgtggtgtacttcgccatcatcacatgctgcctgctgcggagaaccgccttctgctgcaacggcgagaagtct

SEQ ID NO: 7610 - DNA, 2580 bp, synthetic construct
  source 1..2580: mol_type = other DNA
atggccttaccagtgaccgccttgctcctgccgctggccttgctgctccacgccgccaggccggaagtgcagctggttgaatctggcggaggactggttcagcctggcggatctctgagactgtcttgtgccgccagcggcttcagcttcagcgacttttggatgagctgggtccgacaggcccctggcaaaggacttgaatgggtcgccacaatcagccaggccggcagcgagaaggactacgtggactctgtgaagggcagattcaccatcagccgggacaacgccaagaagtccctgtacctccagatgaacagcctgagagccgaggacaccgccgtgtactattgtgcctctggcgtgtacagcttcgactacagaggccagggcaccctggtcacagtctcttctggtaccggcggaggcggatctggcggcggaggtagcggtggcggaggatctgaattcgacatccagatgacacagtctccggcgtcactgtccgcctccgtgggggagactgtgactattatttgtagggcatcagttaacatctactcttatttggcctggtaccagcagaagcaaggcaagagtcctcagctgctggtgtataatgcgaagatcctggcagagggcgtgccgagccggttctccggcagcggctcaggtacccaattttccctcaagatcaattcactgcagccagaggactttggcagttactattgtcaacaccactacggcacattcactttcgggtccggtacaaaattggagattaagcgactcgagatccagaaccctgatcctgccgtgtaccagctgcgggatagcaagagcagcgacaagagcgtgtgtctgttcaccgacttcgacagccagaccaacgtgtcccagagcaaggactccgacgtgtacatcaccgataagtgcgtgctggacatgcggagcatggacttcaagagcaactccgccgtggcctggtccaacaagtccgatttcgcctgcgccaacgccttcaacaacagcattatccccgaggacacattcttcccaagccccgagagcagcgactccaccgaccacgtgaagcccaaagagacagagaacaccaagcagcccagcaagagctgccacaagcccaaggccatcgtgcacaccgagaaagtgaacatgatgagcctgaccgtgctgggcctgcggatgctgttcgccaaaaccgtggccgtgaacttcctgctgaccgccaagctgttcttcctccgcgccaagagaagcggatctggcgtgaagcagaccctgaatttcgacctgctgaagctggctggcgacgtggaatccaacccaggccctactagtatggactggatttggcgcatccttttccttgtcggcgctgctaccggcgcgcattccttcgaacaggtacagttgaaagaaagcgggcctggactggtagcgccttcccaatctctctccatcacgtgcaccatctctggcttctccctgacttcctatggagttcactgggtgaggcagccccccggcaagggactggaatggctggtcgtcatctggtccgacgggtccacaacctacaactccgctctgaaaagtcggctctctatttctaaagataatagcaagagccaggtgtttctgaaaatgaactctctgcagaccgatgatacggccatttactactgcgcttcacactatggctcaaccttggcattcgcttcctggggccacggaacactggtgaccgtttccgcagccacgcgtgaggacctgaagaacgtgttcccacctgaggtggccgtgttcgagcctagcgaggccgagatcagccacacccagaaagccaccctcgtgtgcctggctaccggcttctaccccgaccatgtggaactgtcttggtgggtcaacggcaaagaggtgcacagcggcgtgtgtaccgacccccagccactgaaagaacagcccgccctgaacgacagccggtactgcctgagcagcagactgagagtgtccgccaccttctggcagaacccccggaaccacttcagatgccaggtgcagttctacggcctgagcgagaacgacgagtggacccaggacagagccaagcccgtgacccagatcgtgtctgccgaagcctggggcagagccgatgatgtgattaagatccactggcaggaaaagaagtccaacaccatcctgggcagccaggaaggcaacaccatgaagaccaacgacacctacatgaagttcagctggctgaccgtgcccgagaagtccctggacaaagaacacagatgcatcgtgcggcacgaaaacaacaagaacggcgtggaccaggaaatcatcttcccacccatcaagaccgatgtgattacaatggaccccaaggacaactgctccaaggacgccaacgataccctgctgctccagctgaccaacaccagcgcctactacatgtacttgttgctgctgctgaagtccgtggtgtacttcgccatcatcacatgctgcctgctgcggagaaccgccttctgctgcaacggcgagaagtct

SEQ ID NO: 7611 - DNA, 2604 bp, synthetic construct
  source 1..2604: mol_type = other DNA
atggccttaccagtgaccgccttgctcctgccgctggccttgctgctccacgccgccaggccggaagtgcagctggttgaatctggcggaggactggttcagcctggcggatctctgagactgtcttgtgccgccagcggcttcagcttcagcgacttttggatgagctgggtccgacaggcccctggcaaaggacttgaatgggtcgccacaatcagccaggccggcagcgagaaggactacgtggactctgtgaagggcagattcaccatcagccgggacaacgccaagaagtccctgtacctccagatgaacagcctgagagccgaggacaccgccgtgtactattgtgcctctggcgtgtacagcttcgactacagaggccagggcaccctggtcacagtctcttctggtaccggcggaggcggatctggcggcggaggtagcggtggcggaggatctgaattcgacattgtgatgacccagtctcacaaattcatgtccacatcagtaggagacagggtcagcgtcacctgcaaggccagtcagaatgtgggtaataatgtagcctggtatcaacagaaaccagggcaatctcctaaagtactgatttactcggcatcctaccggtacagtggagtccctgatcgcttcacaggcagtggatctgggacagatttcactctcaccatcagtaatgtgcagtctgaagacttggcagagtatttctgtcagcaatataacacctatccattcacgttcggctcggggacaaagttggaaataaaactcgagatccagaaccctgatcctgccgtgtaccagctgcgggatagcaagagcagcgacaagagcgtgtgtctgttcaccgacttcgacagccagaccaacgtgtcccagagcaaggactccgacgtgtacatcaccgataagtgcgtgctggacatgcggagcatggacttcaagagcaactccgccgtggcctggtccaacaagtccgatttcgcctgcgccaacgccttcaacaacagcattatccccgaggacacattcttcccaagccccgagagcagcgactccaccgaccacgtgaagcccaaagagacagagaacaccaagcagcccagcaagagctgccacaagcccaaggccatcgtgcacaccgagaaagtgaacatgatgagcctgaccgtgctgggcctgcggatgctgttcgccaaaaccgtggccgtgaacttcctgctgaccgccaagctgttcttcctccgcgccaagagaagcggatctggcgtgaagcagaccctgaatttcgacctgctgaagctggctggcgacgtggaatccaacccaggccctactagtatggactggatttggcgcatccttttccttgtcggcgctgctaccggcgcgcattccttcgaagaggtacagctggaggaaagcggtggaggactggtgcaacctggagggtctatgaagctctcttgcgtagcttctgggttcacgttctccaattactggatgaactgggtgcggcagtcccccgagaaaggcctggaatgggtagcagaaattcggttcaagtcccataactatgctacacactttgccgagtctgtcaaaggccggttcactattagtcgagacgacagcaagtcttcagtctacctgcagatgaataacttgcgggcagaggacacaggtatctactactgcaccaggagaatcggcaactccgactatgactggtggtactttgacgtctggggagcaggcaccagcgtgacggtgagttcagcctcaacgcgtgaggacctgaagaacgtgttcccacctgaggtggccgtgttcgagcctagcgaggccgagatcagccacacccagaaagccaccctcgtgtgcctggctaccggcttctaccccgaccatgtggaactgtcttggtgggtcaacggcaaagaggtgcacagcggcgtgtgtaccgacccccagccactgaaagaacagcccgccctgaacgacagccggtactgcctgagcagcagactgagagtgtccgccaccttctggcagaacccccggaaccacttcagatgccaggtgcagttctacggcctgagcgagaacgacgagtggacccaggacagagccaagcccgtgacccagatcgtgtctgccgaagcctggggcagagccgatgatgtgattaagatccactggcaggaaaagaagtccaacaccatcctgggcagccaggaaggcaacaccatgaagaccaacgacacctacatgaagttcagctggctgaccgtgcccgagaagtccctggacaaagaacacagatgcatcgtgcggcacgaaaacaacaagaacggcgtggaccaggaaatcatcttcccacccatcaagaccgatgtgattacaatggaccccaaggacaactgctccaaggacgccaacgataccctgctgctccagctgaccaacaccagcgcctactacatgtacttgttgctgctgctgaagtccgtggtgtacttcgccatcatcacatgctgcctgctgcggagaaccgccttctgctgcaacggcgagaagtct

SEQ ID NO: 7612 - DNA, 2583 bp, synthetic construct
  source 1..2583: mol_type = other DNA
atggccttaccagtgaccgccttgctcctgccgctggccttgctgctccacgccgccaggccggaagtgcagctggttgaatctggcggaggactggttcagcctggcggatctctgagactgtcttgtgccgccagcggcttcagcttcagcgacttttggatgagctgggtccgacaggcccctggcaaaggacttgaatgggtcgccacaatcagccaggccggcagcgagaaggactacgtggactctgtgaagggcagattcaccatcagccgggacaacgccaagaagtccctgtacctccagatgaacagcctgagagccgaggacaccgccgtgtactattgtgcctctggcgtgtacagcttcgactacagaggccagggcaccctggtcacagtctcttctggtaccggcggaggcggatctggcggcggaggtagcggtggcggaggatctgaattcgaccagatcgtgctgacccagtcccccgctattatgtccgcatcaccgggcgaaaaagtgacgatctcctgtagcgcttcatctagcgtctcctacatgtattggtatcaacagaaacctgggtctagcccaaagccgtggatctacagaaccagtaaccttgccagtggggtgccagcccgcttcagcggtagtggcagtggaacttcctatagcctcacaataagcaacatggaggctgaagatgccgctgcctattactgccagcagtaccacagttacccaaccacgttcggcgggggaactaagctcgaagtaaaactcgagatccagaaccctgatcctgccgtgtaccagctgcgggatagcaagagcagcgacaagagcgtgtgtctgttcaccgacttcgacagccagaccaacgtgtcccagagcaaggactccgacgtgtacatcaccgataagtgcgtgctggacatgcggagcatggacttcaagagcaactccgccgtggcctggtccaacaagtccgatttcgcctgcgccaacgccttcaacaacagcattatccccgaggacacattcttcccaagccccgagagcagcgactccaccgaccacgtgaagcccaaagagacagagaacaccaagcagcccagcaagagctgccacaagcccaaggccatcgtgcacaccgagaaagtgaacatgatgagcctgaccgtgctgggcctgcggatgctgttcgccaaaaccgtggccgtgaacttcctgctgaccgccaagctgttcttcctccgcgccaagagaagcggatctggcgtgaagcagaccctgaatttcgacctgctgaagctggctggcgacgtggaatccaacccaggccctactagtatggactggatttggcgcatccttttccttgtcggcgctgctaccggcgcgcattccttcgaagaggtgcagctggtggaatctgggggcggcctggtccaacctaagggatcactcaagctctcttgtgcggccagcggattctctttcaatacctatgctatgaattgggtgagacaggcgcccggaaagggcctcgaatggatagcccatatccggtcaaaatcaaacaatttcgcaacctactatgcggactccgtgaaggaccgattttccatctcccgagatgcctccgagaatattctgttcctgcagatgaataacctcaagacagaggacaccgccatgtactactgtgtgcgccagggcggtgactttcccatggattactgggggcaggggaccagcgtgaccgtgagctctacgcgtgaggacctgaagaacgtgttcccacctgaggtggccgtgttcgagcctagcgaggccgagatcagccacacccagaaagccaccctcgtgtgcctggctaccggcttctaccccgaccatgtggaactgtcttggtgggtcaacggcaaagaggtgcacagcggcgtgtgtaccgacccccagccactgaaagaacagcccgccctgaacgacagccggtactgcctgagcagcagactgagagtgtccgccaccttctggcagaacccccggaaccacttcagatgccaggtgcagttctacggcctgagcgagaacgacgagtggacccaggacagagccaagcccgtgacccagatcgtgtctgccgaagcctggggcagagccgatgatgtgattaagatccactggcaggaaaagaagtccaacaccatcctgggcagccaggaaggcaacaccatgaagaccaacgacacctacatgaagttcagctggctgaccgtgcccgagaagtccctggacaaagaacacagatgcatcgtgcggcacgaaaacaacaagaacggcgtggaccaggaaatcatcttcccacccatcaagaccgatgtgattacaatggaccccaaggacaactgctccaaggacgccaacgataccctgctgctccagctgaccaacaccagcgcctactacatgtacttgttgctgctgctgaagtccgtggtgtacttcgccatcatcacatgctgcctgctgcggagaaccgccttctgctgcaacggcgagaagtct

SEQ ID NO: 7613 - DNA, 2580 bp, synthetic construct
  source 1..2580: mol_type = other DNA
atggccttaccagtgaccgccttgctcctgccgctggccttgctgctccacgccgccaggccggaagtgcagctggttgaatctggcggaggactggttcagcctggcggatctctgagactgtcttgtgccgccagcggcttcagcttcagcgacttttggatgagctgggtccgacaggcccctggcaaaggacttgaatgggtcgccacaatcagccaggccggcagcgagaaggactacgtggactctgtgaagggcagattcaccatcagccgggacaacgccaagaagtccctgtacctccagatgaacagcctgagagccgaggacaccgccgtgtactattgtgcctctggcgtgtacagcttcgactacagaggccagggcaccctggtcacagtctcttctggtaccggcggaggcggatctggcggcggaggtagcggtggcggaggatctgaattcgacgacatccagatgacccagagcagcagcagcttcagcgtgagcctgggcgacagagtgaccatcacctgcatggccagcgaggacatctacatcagactggcctggtaccagcagaagcccggcaacgcccccagactgctgatcagcgccgccaccagcctggagaccggcgtgcccagcagattcagcggcagcggcagcggcaaggactacaccctgagcatcaccagcctgcagaccgaggacgtgggcacctactactgccagcagtactggagcagcccctggaccttcggcggcggcaccaagctggagatcaacctcgagatccagaaccctgatcctgccgtgtaccagctgcgggatagcaagagcagcgacaagagcgtgtgtctgttcaccgacttcgacagccagaccaacgtgtcccagagcaaggactccgacgtgtacatcaccgataagtgcgtgctggacatgcggagcatggacttcaagagcaactccgccgtggcctggtccaacaagtccgatttcgcctgcgccaacgccttcaacaacagcattatccccgaggacacattcttcccaagccccgagagcagcgactccaccgaccacgtgaagcccaaagagacagagaacaccaagcagcccagcaagagctgccacaagcccaaggccatcgtgcacaccgagaaagtgaacatgatgagcctgaccgtgctgggcctgcggatgctgttcgccaaaaccgtggccgtgaacttcctgctgaccgccaagctgttcttcctccgcgccaagagaagcggatctggcgtgaagcagaccctgaatttcgacctgctgaagctggctggcgacgtggaatccaacccaggccctactagtatggactggatttggcgcatccttttccttgtcggcgctgctaccggcgcgcattccttcgaagacgtgcagctgcaggagagcggccccggcctggtgaagcccagccagagcctgagcctgacctgcaccgtgaccggctacagcatcaccagcgactacacctggaactggatcagacagttccccggcaacaagctggagtggatgggctacatcacctacagcggcagcaccagctacaaccccagcctgaagagcagaaacagcatcaccagagacaccagcaagaaccagttcttcctgcagctgaacagcgtgaccaccgaggacaccgccacctactactgcgccagactgggcagaagatacacaatggactactggggccagggcaccagcgtgaccgtgagcagcacgcgtgaggacctgaagaacgtgttcccacctgaggtggccgtgttcgagcctagcgaggccgagatcagccacacccagaaagccaccctcgtgtgcctggctaccggcttctaccccgaccatgtggaactgtcttggtgggtcaacggcaaagaggtgcacagcggcgtgtgtaccgacccccagccactgaaagaacagcccgccctgaacgacagccggtactgcctgagcagcagactgagagtgtccgccaccttctggcagaacccccggaaccacttcagatgccaggtgcagttctacggcctgagcgagaacgacgagtggacccaggacagagccaagcccgtgacccagatcgtgtctgccgaagcctggggcagagccgatgatgtgattaagatccactggcaggaaaagaagtccaacaccatcctgggcagccaggaaggcaacaccatgaagaccaacgacacctacatgaagttcagctggctgaccgtgcccgagaagtccctggacaaagaacacagatgcatcgtgcggcacgaaaacaacaagaacggcgtggaccaggaaatcatcttcccacccatcaagaccgatgtgattacaatggaccccaaggacaactgctccaaggacgccaacgataccctgctgctccagctgaccaacaccagcgcctactacatgtacttgttgctgctgctgaagtccgtggtgtacttcgccatcatcacatgctgcctgctgcggagaaccgccttctgctgcaacggcgagaagtct

SEQ ID NO: 7614 - DNA, 2589 bp, synthetic construct
  source 1..2589: mol_type = other DNA
atggccttaccagtgaccgccttgctcctgccgctggccttgctgctccacgccgccaggccggaagtgcagctggttgaatctggcggaggactggttcagcctggcggatctctgagactgtcttgtgccgccagcggcttcagcttcagcgacttttggatgagctgggtccgacaggcccctggcaaaggacttgaatgggtcgccacaatcagccaggccggcagcgagaaggactacgtggactctgtgaagggcagattcaccatcagccgggacaacgccaagaagtccctgtacctccagatgaacagcctgagagccgaggacaccgccgtgtactattgtgcctctggcgtgtacagcttcgactacagaggccagggcaccctggtcacagtctcttctggtaccggcggaggcggatctggcggcggaggtagcggtggcggaggatctgaattcgacgacatccagatgacccagagccccagcagcctgtctgccagcgtgggcgacagagtgaccatcacctgtagagccagccagagcatcagcagctacctgaactggtatcagcagaagcccggcaaggcccccaaactgctgatctacgacgccagcaacctggaaaccggcgtgcccagcagattttccggcagcggctctggcaccgacttcaccttcaccatcagctccctccagcccgaggacattgccacctactactgccagcagtacgacaacctgcccctgacctttggcggaggcaccaaggtggacatcaagagactcgagatccagaaccctgatcctgccgtgtaccagctgcgggatagcaagagcagcgacaagagcgtgtgtctgttcaccgacttcgacagccagaccaacgtgtcccagagcaaggactccgacgtgtacatcaccgataagtgcgtgctggacatgcggagcatggacttcaagagcaactccgccgtggcctggtccaacaagtccgatttcgcctgcgccaacgccttcaacaacagcattatccccgaggacacattcttcccaagccccgagagcagcgactccaccgaccacgtgaagcccaaagagacagagaacaccaagcagcccagcaagagctgccacaagcccaaggccatcgtgcacaccgagaaagtgaacatgatgagcctgaccgtgctgggcctgcggatgctgttcgccaaaaccgtggccgtgaacttcctgctgaccgccaagctgttcttcctccgcgccaagagaagcggatctggcgtgaagcagaccctgaatttcgacctgctgaagctggctggcgacgtggaatccaacccaggccctactagtatggactggatttggcgcatccttttccttgtcggcgctgctaccggcgcgcattccttcgaacaggtgcaactggtggaatctggcggcggagtggtgcagcctggcagaagcctgagactgagctgtgccgccagcggcttcacctttagcagctacgccatgcactgggtgcgccaggcccctggaaaaggcctggaatgggtggccgtgatctcctacgacggctccaacaagtattacgccgacagcgtgaagggccggttcaccatctccagagacaacagcaagaacaccctgtacctccagatgaacagcctgcgggccgaggacaccgccgtgtactattgtgccagggctcacaacagcagctcttggagcttcgactactggggccagggcaccctcgtgaccgtgtcatctacgcgtgaggacctgaagaacgtgttcccacctgaggtggccgtgttcgagcctagcgaggccgagatcagccacacccagaaagccaccctcgtgtgcctggctaccggcttctaccccgaccatgtggaactgtcttggtgggtcaacggcaaagaggtgcacagcggcgtgtgtaccgacccccagccactgaaagaacagcccgccctgaacgacagccggtactgcctgagcagcagactgagagtgtccgccaccttctggcagaacccccggaaccacttcagatgccaggtgcagttctacggcctgagcgagaacgacgagtggacccaggacagagccaagcccgtgacccagatcgtgtctgccgaagcctggggcagagccgatgatgtgattaagatccactggcaggaaaagaagtccaacaccatcctgggcagccaggaaggcaacaccatgaagaccaacgacacctacatgaagttcagctggctgaccgtgcccgagaagtccctggacaaagaacacagatgcatcgtgcggcacgaaaacaacaagaacggcgtggaccaggaaatcatcttcccacccatcaagaccgatgtgattacaatggaccccaaggacaactgctccaaggacgccaacgataccctgctgctccagctgaccaacaccagcgcctactacatgtacttgttgctgctgctgaagtccgtggtgtacttcgccatcatcacatgctgcctgctgcggagaaccgccttctgctgcaacggcgagaagtct

SEQ ID NO: 7615 - DNA, 2616 bp, synthetic construct
  source 1..2616: mol_type = other DNA
atggccttaccagtgaccgccttgctcctgccgctggccttgctgctccacgccgccaggccggaagtgcagctggttgaatctggcggaggactggttcagcctggcggatctctgagactgtcttgtgccgccagcggcttcagcttcagcgacttttggatgagctgggtccgacaggcccctggcaaaggacttgaatgggtcgccacaatcagccaggccggcagcgagaaggactacgtggactctgtgaagggcagattcaccatcagccgggacaacgccaagaagtccctgtacctccagatgaacagcctgagagccgaggacaccgccgtgtactattgtgcctctggcgtgtacagcttcgactacagaggccagggcaccctggtcacagtctcttctggtaccggcggaggcggatctggcggcggaggtagcggtggcggaggatctgaattcgacgacgtcgtgatgacccagagccctctgagcctgcctgtgtccctgggcgatcaggccagcatctcctgcagatccagccagagactggtgcacagcaacggcaacacctacctgcactggtatctgcagaagcccggccagagccccaagctgctgatctaccgggtgtccaacagattccccggcgtgcccgatagattcagcggctctggcagcggcaccgacttcaccctgaagatcagccgggtggaagccgaggacctgggcatctatttctgcagccagagcacccacgtgccctacacctttggcggaggcaccaagctggaaatcaagcggctcgagatccagaaccctgatcctgccgtgtaccagctgcgggatagcaagagcagcgacaagagcgtgtgtctgttcaccgacttcgacagccagaccaacgtgtcccagagcaaggactccgacgtgtacatcaccgataagtgcgtgctggacatgcggagcatggacttcaagagcaactccgccgtggcctggtccaacaagtccgatttcgcctgcgccaacgccttcaacaacagcattatccccgaggacacattcttcccaagccccgagagcagcgactccaccgaccacgtgaagcccaaagagacagagaacaccaagcagcccagcaagagctgccacaagcccaaggccatcgtgcacaccgagaaagtgaacatgatgagcctgaccgtgctgggcctgcggatgctgttcgccaaaaccgtggccgtgaacttcctgctgaccgccaagctgttcttcctccgcgccaagagaagcggatctggcgtgaagcagaccctgaatttcgacctgctgaagctggctggcgacgtggaatccaacccaggccctactagtatggactggatttggcgcatccttttccttgtcggcgctgctaccggcgcgcattccttcgaagaagtgcggctgcagcagtctggccccgacctgattaagcctggggccagcgtgaagatgagctgcaaggccagcggctacaccttcaccggctacgtgatgcactgggtcaagcagaggccaggccagggcctggaatggatcggcttcatcaacccctacaacgacgacatccagagcaacgagcggttccggggcaaggccaccctgaccagcgataagagcagcaccaccgcctacatggaactgagcagcctgacctccgaggacagcgccgtgtactactgtgctaggggagccggctacaacttcgacggggcctacagattcttcgacttttggggccagggcaccacactgaccgtgtcctctacgcgtgaggacctgaagaacgtgttcccacctgaggtggccgtgttcgagcctagcgaggccgagatcagccacacccagaaagccaccctcgtgtgcctggctaccggcttctaccccgaccatgtggaactgtcttggtgggtcaacggcaaagaggtgcacagcggcgtgtgtaccgacccccagccactgaaagaacagcccgccctgaacgacagccggtactgcctgagcagcagactgagagtgtccgccaccttctggcagaacccccggaaccacttcagatgccaggtgcagttctacggcctgagcgagaacgacgagtggacccaggacagagccaagcccgtgacccagatcgtgtctgccgaagcctggggcagagccgatgatgtgattaagatccactggcaggaaaagaagtccaacaccatcctgggcagccaggaaggcaacaccatgaagaccaacgacacctacatgaagttcagctggctgaccgtgcccgagaagtccctggacaaagaacacagatgcatcgtgcggcacgaaaacaacaagaacggcgtggaccaggaaatcatcttcccacccatcaagaccgatgtgattacaatggaccccaaggacaactgctccaaggacgccaacgataccctgctgctccagctgaccaacaccagcgcctactacatgtacttgttgctgctgctgaagtccgtggtgtacttcgccatcatcacatgctgcctgctgcggagaaccgccttctgctgcaacggcgagaagtct

SEQ ID NO: 7616 - DNA, 2589 bp, synthetic construct
  source 1..2589: mol_type = other DNA
atggccttaccagtgaccgccttgctcctgccgctggccttgctgctccacgccgccaggccggaagtgcagctggttgaatctggcggaggactggttcagcctggcggatctctgagactgtcttgtgccgccagcggcttcagcttcagcgacttttggatgagctgggtccgacaggcccctggcaaaggacttgaatgggtcgccacaatcagccaggccggcagcgagaaggactacgtggactctgtgaagggcagattcaccatcagccgggacaacgccaagaagtccctgtacctccagatgaacagcctgagagccgaggacaccgccgtgtactattgtgcctctggcgtgtacagcttcgactacagaggccagggcaccctggtcacagtctcttctggtaccggcggaggcggatctggcggcggaggtagcggtggcggaggatctgaattcgacagctacgagctgacccagcctcctagcgtgtccgtgtctcctggacagaccgccaccatctcttgcagcggcgatcaactgggcgggaagtacggccactggtatcagaagaagcccggccagagccccgtgctggtgctgtaccaggacagaaaacggcctgccggcatccccgagagattcagcggaagcagcagcggcaacaccatcaccctgaccatcagcggcacccaggccgtggatgaggccgactactactgccaggcttgggacaccaatctgggcggcgtgttcggcggaggcaccaaagtgacagtgctgggacagctcgagatccagaaccctgatcctgccgtgtaccagctgcgggatagcaagagcagcgacaagagcgtgtgtctgttcaccgacttcgacagccagaccaacgtgtcccagagcaaggactccgacgtgtacatcaccgataagtgcgtgctggacatgcggagcatggacttcaagagcaactccgccgtggcctggtccaacaagtccgatttcgcctgcgccaacgccttcaacaacagcattatccccgaggacacattcttcccaagccccgagagcagcgactccaccgaccacgtgaagcccaaagagacagagaacaccaagcagcccagcaagagctgccacaagcccaaggccatcgtgcacaccgagaaagtgaacatgatgagcctgaccgtgctgggcctgcggatgctgttcgccaaaaccgtggccgtgaacttcctgctgaccgccaagctgttcttcctccgcgccaagagaagcggatctggcgtgaagcagaccctgaatttcgacctgctgaagctggctggcgacgtggaatccaacccaggccctactagtatggactggatttggcgcatccttttccttgtcggcgctgctaccggcgcgcattccttcgaacaggtgcaactggtggaaagcggagccgaagtgaagaaacctggggccagcgtgaaggtgtcctgcaaggccagcggctacacctttaccggctactacatgcactgggtgcgccaggctccaggccagggactggaatggatgggccggatcaaccccaatagcggcggcaccaactacgcccagaaattccagggcagagtgaccatgaccagagacaccagcatcagcaccgcctacatggaactgagccggctgagaagcgacgacaccgccgtgtactactgcgccagccctagaggcagaggcagcgccttcgatatttggggccagggcacactcgtgaccgtgtcctctacgcgtgaggacctgaagaacgtgttcccacctgaggtggccgtgttcgagcctagcgaggccgagatcagccacacccagaaagccaccctcgtgtgcctggctaccggcttctaccccgaccatgtggaactgtcttggtgggtcaacggcaaagaggtgcacagcggcgtgtgtaccgacccccagccactgaaagaacagcccgccctgaacgacagccggtactgcctgagcagcagactgagagtgtccgccaccttctggcagaacccccggaaccacttcagatgccaggtgcagttctacggcctgagcgagaacgacgagtggacccaggacagagccaagcccgtgacccagatcgtgtctgccgaagcctggggcagagccgatgatgtgattaagatccactggcaggaaaagaagtccaacaccatcctgggcagccaggaaggcaacaccatgaagaccaacgacacctacatgaagttcagctggctgaccgtgcccgagaagtccctggacaaagaacacagatgcatcgtgcggcacgaaaacaacaagaacggcgtggaccaggaaatcatcttcccacccatcaagaccgatgtgattacaatggaccccaaggacaactgctccaaggacgccaacgataccctgctgctccagctgaccaacaccagcgcctactacatgtacttgttgctgctgctgaagtccgtggtgtacttcgccatcatcacatgctgcctgctgcggagaaccgccttctgctgcaacggcgagaagtct

SEQ ID NO: 7617 - DNA, 2598 bp, synthetic construct
  source 1..2598: mol_type = other DNA
atggccttaccagtgaccgccttgctcctgccgctggccttgctgctccacgccgccaggccggaagtgcagctggttgaatctggcggaggactggttcagcctggcggatctctgagactgtcttgtgccgccagcggcttcagcttcagcgacttttggatgagctgggtccgacaggcccctggcaaaggacttgaatgggtcgccacaatcagccaggccggcagcgagaaggactacgtggactctgtgaagggcagattcaccatcagccgggacaacgccaagaagtccctgtacctccagatgaacagcctgagagccgaggacaccgccgtgtactattgtgcctctggcgtgtacagcttcgactacagaggccagggcaccctggtcacagtctcttctggtaccggcggaggcggatctggcggcggaggtagcggtggcggaggatctgaattcgacaacttcatgctgacccagccccacagcgtgtccgagagccctggcaagaccgtgaccatctcctgcaccagaagcagcggctctatcgccagcaaatacgtgcagtggtatcagcagaggcccggcagcagccctaccaccgtgatctacgaggacaaccagaggcctagcggcgtgcccgatagattcagcggcagcatcgacaccagcagcaacagcgccagcctgaccatcagcggcctgagaacagaggacgaggccgactactactgccacagctacgacagcaacaaccactccgtgttcggcggaggcaccaaagtgacagtgctgggacagctcgagatccagaaccctgatcctgccgtgtaccagctgcgggatagcaagagcagcgacaagagcgtgtgtctgttcaccgacttcgacagccagaccaacgtgtcccagagcaaggactccgacgtgtacatcaccgataagtgcgtgctggacatgcggagcatggacttcaagagcaactccgccgtggcctggtccaacaagtccgatttcgcctgcgccaacgccttcaacaacagcattatccccgaggacacattcttcccaagccccgagagcagcgactccaccgaccacgtgaagcccaaagagacagagaacaccaagcagcccagcaagagctgccacaagcccaaggccatcgtgcacaccgagaaagtgaacatgatgagcctgaccgtgctgggcctgcggatgctgttcgccaaaaccgtggccgtgaacttcctgctgaccgccaagctgttcttcctccgcgccaagagaagcggatctggcgtgaagcagaccctgaatttcgacctgctgaagctggctggcgacgtggaatccaacccaggccctactagtatggactggatttggcgcatccttttccttgtcggcgctgctaccggcgcgcattccttcgaagaagtgcaactggtggaaagcgggggaggcgtggtgcagccaggcggatctctgagactgagctgtgccgccagcggcttcaccttcagcagctacgccatgagctgggtgcgccaggcccctggaaaaggcctggaatgggtgtccgccatctctggctctggcggcagcacctactacgccgatagcgtgaagggccggttcagcatcagccgggacaacagcaagaacaccctgtacctccagatgaacagcctgcgggccgaggacaccgccgtgtactactgtgccagaaccagaagctccggggccttcgacatctggggccagggaacactcgtgaccgtgtcctctacgcgtgaggacctgaagaacgtgttcccacctgaggtggccgtgttcgagcctagcgaggccgagatcagccacacccagaaagccaccctcgtgtgcctggctaccggcttctaccccgaccatgtggaactgtcttggtgggtcaacggcaaagaggtgcacagcggcgtgtgtaccgacccccagccactgaaagaacagcccgccctgaacgacagccggtactgcctgagcagcagactgagagtgtccgccaccttctggcagaacccccggaaccacttcagatgccaggtgcagttctacggcctgagcgagaacgacgagtggacccaggacagagccaagcccgtgacccagatcgtgtctgccgaagcctggggcagagccgatgatgtgattaagatccactggcaggaaaagaagtccaacaccatcctgggcagccaggaaggcaacaccatgaagaccaacgacacctacatgaagttcagctggctgaccgtgcccgagaagtccctggacaaagaacacagatgcatcgtgcggcacgaaaacaacaagaacggcgtggaccaggaaatcatcttcccacccatcaagaccgatgtgattacaatggaccccaaggacaactgctccaaggacgccaacgataccctgctgctccagctgaccaacaccagcgcctactacatgtacttgttgctgctgctgaagtccgtggtgtacttcgccatcatcacatgctgcctgctgcggagaaccgccttctgctgcaacggcgagaagtct

SEQ ID NO: 7618 - DNA, 2583 bp, synthetic construct
  source 1..2583: mol_type = other DNA
atggccttaccagtgaccgccttgctcctgccgctggccttgctgctccacgccgccaggccggaagtgcagctggttgaatctggcggaggactggttcagcctggcggatctctgagactgtcttgtgccgccagcggcttcagcttcagcgacttttggatgagctgggtccgacaggcccctggcaaaggacttgaatgggtcgccacaatcagccaggccggcagcgagaaggactacgtggactctgtgaagggcagattcaccatcagccgggacaacgccaagaagtccctgtacctccagatgaacagcctgagagccgaggacaccgccgtgtactattgtgcctctggcgtgtacagcttcgactacagaggccagggcaccctggtcacagtctcttctggtaccggcggaggcggatctggcggcggaggtagcggtggcggaggatctgaattcgacatccagatgaaccagagccccagcagcctgagcgccagcctgggcgataccatcaccatcacctgtcacgccagccagaacatcaacgtgtggctgagctggtatcagcagaagcccggcaacatccccaagctgctgatctacaaggccagcaacctgcacaccggcgtgcccagcagattttctggcagcggctctggcaccggcttcaccattaccatcagctccctccagcccgaggacattgccacctactactgccagcagggccagagctacccctggacatttggcggaggcaccaagctggaaatcaagagactcgagatccagaaccctgatcctgccgtgtaccagctgcgggatagcaagagcagcgacaagagcgtgtgtctgttcaccgacttcgacagccagaccaacgtgtcccagagcaaggactccgacgtgtacatcaccgataagtgcgtgctggacatgcggagcatggacttcaagagcaactccgccgtggcctggtccaacaagtccgatttcgcctgcgccaacgccttcaacaacagcattatccccgaggacacattcttcccaagccccgagagcagcgactccaccgaccacgtgaagcccaaagagacagagaacaccaagcagcccagcaagagctgccacaagcccaaggccatcgtgcacaccgagaaagtgaacatgatgagcctgaccgtgctgggcctgcggatgctgttcgccaaaaccgtggccgtgaacttcctgctgaccgccaagctgttcttcctccgcgccaagagaagcggatctggcgtgaagcagaccctgaatttcgacctgctgaagctggctggcgacgtggaatccaacccaggccctactagtatggactggatttggcgcatccttttccttgtcggcgctgctaccggcgcgcattccttcgaagaagtgcaactccagcagagcggcccagagcttgtgaagcctggcgcttccgtgaagattagctgcaaagccagcggctacagcttcaccggctacttcatgaactgggtcaagcagagccacggcaagagcctggagtacatcggcagattcaacccctacaacggcgagacactgtacaaccagaagttcaagggcaaggccaccctgaccgtggacaagagcagcagcaccgtgcacatggaactgctgagcgtgaccagcgaggacagcgccgtgtactactgtggcagaagcggcaacgacgacgctatggactattggggccagggcaccagcgtgaccgtgtctagtgctacgcgtgaggacctgaagaacgtgttcccacctgaggtggccgtgttcgagcctagcgaggccgagatcagccacacccagaaagccaccctcgtgtgcctggctaccggcttctaccccgaccatgtggaactgtcttggtgggtcaacggcaaagaggtgcacagcggcgtgtgtaccgacccccagccactgaaagaacagcccgccctgaacgacagccggtactgcctgagcagcagactgagagtgtccgccaccttctggcagaacccccggaaccacttcagatgccaggtgcagttctacggcctgagcgagaacgacgagtggacccaggacagagccaagcccgtgacccagatcgtgtctgccgaagcctggggcagagccgatgatgtgattaagatccactggcaggaaaagaagtccaacaccatcctgggcagccaggaaggcaacaccatgaagaccaacgacacctacatgaagttcagctggctgaccgtgcccgagaagtccctggacaaagaacacagatgcatcgtgcggcacgaaaacaacaagaacggcgtggaccaggaaatcatcttcccacccatcaagaccgatgtgattacaatggaccccaaggacaactgctccaaggacgccaacgataccctgctgctccagctgaccaacaccagcgcctactacatgtacttgttgctgctgctgaagtccgtggtgtacttcgccatcatcacatgctgcctgctgcggagaaccgccttctgctgcaacggcgagaagtct

SEQ ID NO: 7619 - DNA, 2586 bp, synthetic construct
  source 1..2586: mol_type = other DNA
atggccttaccagtgaccgccttgctcctgccgctggccttgctgctccacgccgccaggccggaagtgcagctggttgaatctggcggaggactggttcagcctggcggatctctgagactgtcttgtgccgccagcggcttcagcttcagcgacttttggatgagctgggtccgacaggcccctggcaaaggacttgaatgggtcgccacaatcagccaggccggcagcgagaaggactacgtggactctgtgaagggcagattcaccatcagccgggacaacgccaagaagtccctgtacctccagatgaacagcctgagagccgaggacaccgccgtgtactattgtgcctctggcgtgtacagcttcgactacagaggccagggcaccctggtcacagtctcttctggtaccggcggaggcggatctggcggcggaggtagcggtggcggaggatctgaattcgagatcgtgctgacacagagccctgccaccctgtctctgagccctggcgaaagagccaccctgagctgtagagccagccagagcgtgcggagctacctggcctggtatcagcagaagcctggacaggcccccagactgctgatctacgacgccagcaatcgggccacaggcatccccgccagattttctggctctggcagcggcaccgacttcaccctgacaatcagcagcctggaacccgaggacttcgccgtgtactactgccagcagcggagcaactggccccctacctttggacagggcaccaaggtggaaatcaagctcgagatccagaaccctgatcctgccgtgtaccagctgcgggatagcaagagcagcgacaagagcgtgtgtctgttcaccgacttcgacagccagaccaacgtgtcccagagcaaggactccgacgtgtacatcaccgataagtgcgtgctggacatgcggagcatggacttcaagagcaactccgccgtggcctggtccaacaagtccgatttcgcctgcgccaacgccttcaacaacagcattatccccgaggacacattcttcccaagccccgagagcagcgactccaccgaccacgtgaagcccaaagagacagagaacaccaagcagcccagcaagagctgccacaagcccaaggccatcgtgcacaccgagaaagtgaacatgatgagcctgaccgtgctgggcctgcggatgctgttcgccaaaaccgtggccgtgaacttcctgctgaccgccaagctgttcttcctccgcgccaagagaagcggatctggcgtgaagcagaccctgaatttcgacctgctgaagctggctggcgacgtggaatccaacccaggccctactagtatggactggatttggcgcatccttttccttgtcggcgctgctaccggcgcgcattccttcgaacaactccaggtgcaggaatctggccccggactcgtgaagcccagcgagacactgagcctgacctgtaccgtgtccggcggcagcatcagcaacagctacttctcctggggctggatcagacagccccctggcaagggcctggaatggatcggcagcttctactacggcgagaaaacctactacaaccccagcctgaagtccagagccaccatcagcatcgacaccagcaagagccagttctccctgaagctgagcagcgtgacagccgccgacaccgccgtgtattattgccccagaggccccaccatgatccggggcgtgatcgactcttggggccagggaacactcgtgaccgtgtcctctacgcgtgaggacctgaagaacgtgttcccacctgaggtggccgtgttcgagcctagcgaggccgagatcagccacacccagaaagccaccctcgtgtgcctggctaccggcttctaccccgaccatgtggaactgtcttggtgggtcaacggcaaagaggtgcacagcggcgtgtgtaccgacccccagccactgaaagaacagcccgccctgaacgacagccggtactgcctgagcagcagactgagagtgtccgccaccttctggcagaacccccggaaccacttcagatgccaggtgcagttctacggcctgagcgagaacgacgagtggacccaggacagagccaagcccgtgacccagatcgtgtctgccgaagcctggggcagagccgatgatgtgattaagatccactggcaggaaaagaagtccaacaccatcctgggcagccaggaaggcaacaccatgaagaccaacgacacctacatgaagttcagctggctgaccgtgcccgagaagtccctggacaaagaacacagatgcatcgtgcggcacgaaaacaacaagaacggcgtggaccaggaaatcatcttcccacccatcaagaccgatgtgattacaatggaccccaaggacaactgctccaaggacgccaacgataccctgctgctccagctgaccaacaccagcgcctactacatgtacttgttgctgctgctgaagtccgtggtgtacttcgccatcatcacatgctgcctgctgcggagaaccgccttctgctgcaacggcgagaagtct

SEQ ID NO: 7620 - DNA, 2613 bp, synthetic construct
  source 1..2613: mol_type = other DNA
atggccttaccagtgaccgccttgctcctgccgctggccttgctgctccacgccgccaggccggaagtgcagctggttgaatctggcggaggactggttcagcctggcggatctctgagactgtcttgtgccgccagcggcttcagcttcagcgacttttggatgagctgggtccgacaggcccctggcaaaggacttgaatgggtcgccacaatcagccaggccggcagcgagaaggactacgtggactctgtgaagggcagattcaccatcagccgggacaacgccaagaagtccctgtacctccagatgaacagcctgagagccgaggacaccgccgtgtactattgtgcctctggcgtgtacagcttcgactacagaggccagggcaccctggtcacagtctcttctggtaccggcggaggcggatctggcggcggaggtagcggtggcggaggatctgaattcgacatcgtgatgacccagacccccctgagcctgcctgtgacacctggcgagcctgccagcatctcctgcagaagcagcagaagcctgctggacagcgacgacggcaacacctacctggactggtatctgcagaaacccggccagagcccccaactgctgatctacaccctgagctacagagccagcggcgtgcccgatagattttccggctctggcagcggcaccgacttcaccctgaagatcagccgggtggaagccgaggacgtgggcgtgtactactgtatgcagcgggtggaatttcccatcaccttcggccagggcaccagactggaaatcaagagactcgagatccagaaccctgatcctgccgtgtaccagctgcgggatagcaagagcagcgacaagagcgtgtgtctgttcaccgacttcgacagccagaccaacgtgtcccagagcaaggactccgacgtgtacatcaccgataagtgcgtgctggacatgcggagcatggacttcaagagcaactccgccgtggcctggtccaacaagtccgatttcgcctgcgccaacgccttcaacaacagcattatccccgaggacacattcttcccaagccccgagagcagcgactccaccgaccacgtgaagcccaaagagacagagaacaccaagcagcccagcaagagctgccacaagcccaaggccatcgtgcacaccgagaaagtgaacatgatgagcctgaccgtgctgggcctgcggatgctgttcgccaaaaccgtggccgtgaacttcctgctgaccgccaagctgttcttcctccgcgccaagagaagcggatctggcgtgaagcagaccctgaatttcgacctgctgaagctggctggcgacgtggaatccaacccaggccctactagtatggactggatttggcgcatccttttccttgtcggcgctgctaccggcgcgcattccttcgaacaggtgcaactggtggaatctggcgggggagtggtgcagcctggcagatccctgagactgagctgtgccgccagcggcttcatcttcagcagatacggaatgcactgggtgcgccaggcccctggcaagggactgaaatgggtggccgtgatttggtacgacggcagcaacaagctgtacgccgacagcgtgaagggccggttcaccatcagcagagacaacagcaagaacaccctgtacctgcagatgaacagcctgcgggccgaggacaccgccgtgtactattgcgccagagactactacgacaacagccggcaccactggggcttcgactattggggccagggaacccttgtgaccgtgtcctctacgcgtgaggacctgaagaacgtgttcccacctgaggtggccgtgttcgagcctagcgaggccgagatcagccacacccagaaagccaccctcgtgtgcctggctaccggcttctaccccgaccatgtggaactgtcttggtgggtcaacggcaaagaggtgcacagcggcgtgtgtaccgacccccagccactgaaagaacagcccgccctgaacgacagccggtactgcctgagcagcagactgagagtgtccgccaccttctggcagaacccccggaaccacttcagatgccaggtgcagttctacggcctgagcgagaacgacgagtggacccaggacagagccaagcccgtgacccagatcgtgtctgccgaagcctggggcagagccgatgatgtgattaagatccactggcaggaaaagaagtccaacaccatcctgggcagccaggaaggcaacaccatgaagaccaacgacacctacatgaagttcagctggctgaccgtgcccgagaagtccctggacaaagaacacagatgcatcgtgcggcacgaaaacaacaagaacggcgtggaccaggaaatcatcttcccacccatcaagaccgatgtgattacaatggaccccaaggacaactgctccaaggacgccaacgataccctgctgctccagctgaccaacaccagcgcctactacatgtacttgttgctgctgctgaagtccgtggtgtacttcgccatcatcacatgctgcctgctgcggagaaccgccttctgctgcaacggcgagaagtct

SEQ ID NO: 7621 - DNA, 2583 bp, synthetic construct
  source 1..2583: mol_type = other DNA
atggccttaccagtgaccgccttgctcctgccgctggccttgctgctccacgccgccaggccggaagtgcagctggttgaatctggcggaggactggttcagcctggcggatctctgagactgtcttgtgccgccagcggcttcagcttcagcgacttttggatgagctgggtccgacaggcccctggcaaaggacttgaatgggtcgccacaatcagccaggccggcagcgagaaggactacgtggactctgtgaagggcagattcaccatcagccgggacaacgccaagaagtccctgtacctccagatgaacagcctgagagccgaggacaccgccgtgtactattgtgcctctggcgtgtacagcttcgactacagaggccagggcaccctggtcacagtctcttctggtaccggcggaggcggatctggcggcggaggtagcggtggcggaggatctgaattcgagatccagatgacccagagccccagcagcatgtctgccagcctgggcgacaccatcaccatcacatgccaggccacccaggacatcttcaagaacctgaactggtatcagcagaagcccggcaagccccccagcctgctgatctactatgccaccgaactggccgagggcgtgcccagcagattttctggcagcggcagcggctccgactacagcctgaccatcagcaacctggaaagcgaggacttcgccgcctactactgcctccagttcttcgagttcccattcaccttcggctccggcaccaagctggaaatgaagctcgagatccagaaccctgatcctgccgtgtaccagctgcgggatagcaagagcagcgacaagagcgtgtgtctgttcaccgacttcgacagccagaccaacgtgtcccagagcaaggactccgacgtgtacatcaccgataagtgcgtgctggacatgcggagcatggacttcaagagcaactccgccgtggcctggtccaacaagtccgatttcgcctgcgccaacgccttcaacaacagcattatccccgaggacacattcttcccaagccccgagagcagcgactccaccgaccacgtgaagcccaaagagacagagaacaccaagcagcccagcaagagctgccacaagcccaaggccatcgtgcacaccgagaaagtgaacatgatgagcctgaccgtgctgggcctgcggatgctgttcgccaaaaccgtggccgtgaacttcctgctgaccgccaagctgttcttcctccgcgccaagagaagcggatctggcgtgaagcagaccctgaatttcgacctgctgaagctggctggcgacgtggaatccaacccaggccctactagtatggactggatttggcgcatccttttccttgtcggcgctgctaccggcgcgcattccttcgaacaggtgcaactccagcagtctggcgctgagcttgtgcggcctggcacctctgtgaaggtgtcctgtaaagccagcggctacgtgttcaccaactactggatcgagtggatcaagcagcggccaggccagggcctggaatggatcggcgtgatgaatccaggcagcggcgagacaacctacaacgagaagttcaagggcaaggccaccctgaccgccgacaagagcagcagcacagcctacatgcaactgtcctccctgaccagcgtggacagcgccgtgtacttctgcgccagggaccacgaccgggactactacgctatggactactggggccagggcaccagcgtgaccgtgtcatctacgcgtgaggacctgaagaacgtgttcccacctgaggtggccgtgttcgagcctagcgaggccgagatcagccacacccagaaagccaccctcgtgtgcctggctaccggcttctaccccgaccatgtggaactgtcttggtgggtcaacggcaaagaggtgcacagcggcgtgtgtaccgacccccagccactgaaagaacagcccgccctgaacgacagccggtactgcctgagcagcagactgagagtgtccgccaccttctggcagaacccccggaaccacttcagatgccaggtgcagttctacggcctgagcgagaacgacgagtggacccaggacagagccaagcccgtgacccagatcgtgtctgccgaagcctggggcagagccgatgatgtgattaagatccactggcaggaaaagaagtccaacaccatcctgggcagccaggaaggcaacaccatgaagaccaacgacacctacatgaagttcagctggctgaccgtgcccgagaagtccctggacaaagaacacagatgcatcgtgcggcacgaaaacaacaagaacggcgtggaccaggaaatcatcttcccacccatcaagaccgatgtgattacaatggaccccaaggacaactgctccaaggacgccaacgataccctgctgctccagctgaccaacaccagcgcctactacatgtacttgttgctgctgctgaagtccgtggtgtacttcgccatcatcacatgctgcctgctgcggagaaccgccttctgctgcaacggcgagaagtct

SEQ ID NO: 7622 - DNA, 2574 bp, synthetic construct
  source 1..2574: mol_type = other DNA
atggccttaccagtgaccgccttgctcctgccgctggccttgctgctccacgccgccaggccggaagtgcagctggttgaatctggcggaggactggttcagcctggcggatctctgagactgtcttgtgccgccagcggcttcagcttcagcgacttttggatgagctgggtccgacaggcccctggcaaaggacttgaatgggtcgccacaatcagccaggccggcagcgagaaggactacgtggactctgtgaagggcagattcaccatcagccgggacaacgccaagaagtccctgtacctccagatgaacagcctgagagccgaggacaccgccgtgtactattgtgcctctggcgtgtacagcttcgactacagaggccagggcaccctggtcacagtctcttctggtaccggcggaggcggatctggcggcggaggtagcggtggcggaggatctgaattcgacatcctgctgacacagagccccgccatcctgtccgtgtctccaggcgagagagtgtcctttagctgccgggccagccagaacatcggcaccagcatccactggtatcagcagcggaccaacggcagccccagactgctgattaagtacgccagcgagtccgtgtccggcatccccagcagattttctggcagcggctccggcaccgacttcaccctgagcatcaacagcgtggaaagcgaggacattgccgactactactgccagcacaccaatagctggcccaccacctttggcggaggcaccaagctggaaatcaagagactcgagatccagaaccctgatcctgccgtgtaccagctgcgggatagcaagagcagcgacaagagcgtgtgtctgttcaccgacttcgacagccagaccaacgtgtcccagagcaaggactccgacgtgtacatcaccgataagtgcgtgctggacatgcggagcatggacttcaagagcaactccgccgtggcctggtccaacaagtccgatttcgcctgcgccaacgccttcaacaacagcattatccccgaggacacattcttcccaagccccgagagcagcgactccaccgaccacgtgaagcccaaagagacagagaacaccaagcagcccagcaagagctgccacaagcccaaggccatcgtgcacaccgagaaagtgaacatgatgagcctgaccgtgctgggcctgcggatgctgttcgccaaaaccgtggccgtgaacttcctgctgaccgccaagctgttcttcctccgcgccaagagaagcggatctggcgtgaagcagaccctgaatttcgacctgctgaagctggctggcgacgtggaatccaacccaggccctactagtatggactggatttggcgcatccttttccttgtcggcgctgctaccggcgcgcattccttcgaacaggtgcaactccagcagtccgacgccgagcttgtgaagcctggcgcttccgtgaagattagctgcaaggccagcggctacaccttcaccgaccacgccattcactgggtcaagcagaagcccgagcagggcctggaatggatcggctacttcagccccggcaacggcgacatcaagtacaacgagaagttcaagggcaaggccaccctgaccgccgacaagagcagcagcacagcctacatgcaactgaacagcctgaccagcgaggactccgccgtgtacttctgcaagcggagctacggcaactacgactactggggccagggcaccacactgaccgtgtctagtacgcgtgaggacctgaagaacgtgttcccacctgaggtggccgtgttcgagcctagcgaggccgagatcagccacacccagaaagccaccctcgtgtgcctggctaccggcttctaccccgaccatgtggaactgtcttggtgggtcaacggcaaagaggtgcacagcggcgtgtgtaccgacccccagccactgaaagaacagcccgccctgaacgacagccggtactgcctgagcagcagactgagagtgtccgccaccttctggcagaacccccggaaccacttcagatgccaggtgcagttctacggcctgagcgagaacgacgagtggacccaggacagagccaagcccgtgacccagatcgtgtctgccgaagcctggggcagagccgatgatgtgattaagatccactggcaggaaaagaagtccaacaccatcctgggcagccaggaaggcaacaccatgaagaccaacgacacctacatgaagttcagctggctgaccgtgcccgagaagtccctggacaaagaacacagatgcatcgtgcggcacgaaaacaacaagaacggcgtggaccaggaaatcatcttcccacccatcaagaccgatgtgattacaatggaccccaaggacaactgctccaaggacgccaacgataccctgctgctccagctgaccaacaccagcgcctactacatgtacttgttgctgctgctgaagtccgtggtgtacttcgccatcatcacatgctgcctgctgcggagaaccgccttctgctgcaacggcgagaagtct

SEQ ID NO: 7623 - DNA, 2589 bp, synthetic construct
  source 1..2589: mol_type = other DNA
atggccttaccagtgaccgccttgctcctgccgctggccttgctgctccacgccgccaggccggaagtgcagctggttgaatctggcggaggactggttcagcctggcggatctctgagactgtcttgtgccgccagcggcttcagcttcagcgacttttggatgagctgggtccgacaggcccctggcaaaggacttgaatgggtcgccacaatcagccaggccggcagcgagaaggactacgtggactctgtgaagggcagattcaccatcagccgggacaacgccaagaagtccctgtacctccagatgaacagcctgagagccgaggacaccgccgtgtactattgtgcctctggcgtgtacagcttcgactacagaggccagggcaccctggtcacagtctcttctggtaccggcggaggcggatctggcggcggaggtagcggtggcggaggatctgaattcgacatcgtgatgacccagagccccgatagcctggccgtgtctctgggagagagagccaccatcaactgcaagagcagccagagcctgctgaacagcggcgaccagaagaactacctgacctggtatcagcagaagcccggccagccccccaagctgctgatctactgggccagcaccagagaaagcggcgtgcccgatagattcagcggcagcggaagtggcaccgacttcaccctgaccatcagttctcttcaggccgaggacgtggccgtgtactactgccagaacgactacagctaccccctgaccttcggccagggcaccaaggtggaaatcaagctcgagatccagaaccctgatcctgccgtgtaccagctgcgggatagcaagagcagcgacaagagcgtgtgtctgttcaccgacttcgacagccagaccaacgtgtcccagagcaaggactccgacgtgtacatcaccgataagtgcgtgctggacatgcggagcatggacttcaagagcaactccgccgtggcctggtccaacaagtccgatttcgcctgcgccaacgccttcaacaacagcattatccccgaggacacattcttcccaagccccgagagcagcgactccaccgaccacgtgaagcccaaagagacagagaacaccaagcagcccagcaagagctgccacaagcccaaggccatcgtgcacaccgagaaagtgaacatgatgagcctgaccgtgctgggcctgcggatgctgttcgccaaaaccgtggccgtgaacttcctgctgaccgccaagctgttcttcctccgcgccaagagaagcggatctggcgtgaagcagaccctgaatttcgacctgctgaagctggctggcgacgtggaatccaacccaggccctactagtatggactggatttggcgcatccttttccttgtcggcgctgctaccggcgcgcattccttcgaacaggtgcagctggtgcagtctggggccgaagtgaagaaaaccggcagcagcgtgaaggtgtcctgcaaggccagcggctacacctttaccgaccacgccattcacgtgtggcggcaggctccaggacaggccctggaatggatgggccacttcagccccggcaacaccgacatcaagtacaacgacaagttcaagggcagagtgaccctgaccgtggaccgcagcatgagcaccgcctacatggaactgagcagcctgcggagcgaggacaccgccatgtactattgcaagaccagcaccttctttttcgactactggggccagggaacaatggtcaccgtgtccagcacgcgtgaggacctgaagaacgtgttcccacctgaggtggccgtgttcgagcctagcgaggccgagatcagccacacccagaaagccaccctcgtgtgcctggctaccggcttctaccccgaccatgtggaactgtcttggtgggtcaacggcaaagaggtgcacagcggcgtgtgtaccgacccccagccactgaaagaacagcccgccctgaacgacagccggtactgcctgagcagcagactgagagtgtccgccaccttctggcagaacccccggaaccacttcagatgccaggtgcagttctacggcctgagcgagaacgacgagtggacccaggacagagccaagcccgtgacccagatcgtgtctgccgaagcctggggcagagccgatgatgtgattaagatccactggcaggaaaagaagtccaacaccatcctgggcagccaggaaggcaacaccatgaagaccaacgacacctacatgaagttcagctggctgaccgtgcccgagaagtccctggacaaagaacacagatgcatcgtgcggcacgaaaacaacaagaacggcgtggaccaggaaatcatcttcccacccatcaagaccgatgtgattacaatggaccccaaggacaactgctccaaggacgccaacgataccctgctgctccagctgaccaacaccagcgcctactacatgtacttgttgctgctgctgaagtccgtggtgtacttcgccatcatcacatgctgcctgctgcggagaaccgccttctgctgcaacggcgagaagtct

SEQ ID NO: 7624 - DNA, 2586 bp, synthetic construct
  source 1..2586: mol_type = other DNA
atggccttaccagtgaccgccttgctcctgccgctggccttgctgctccacgccgccaggccggaagtgcagctggttgaatctggcggaggactggttcagcctggcggatctctgagactgtcttgtgccgccagcggcttcagcttcagcgacttttggatgagctgggtccgacaggcccctggcaaaggacttgaatgggtcgccacaatcagccaggccggcagcgagaaggactacgtggactctgtgaagggcagattcaccatcagccgggacaacgccaagaagtccctgtacctccagatgaacagcctgagagccgaggacaccgccgtgtactattgtgcctctggcgtgtacagcttcgactacagaggccagggcaccctggtcacagtctcttctggtaccggcggaggcggatctggcggcggaggtagcggtggcggaggatctgaattcgacatccagatgacccagagccccagcagcctgtctgccagcgtgggcgacagagtgaccatcacatgcaaggccagccaggacgtgtccattgccgtggcctggtatcagcagaagcccggcaaggcccccaaggtgctgatctacagcgccagctacagatacaccggcgtgcccgacagattcagcggctctggcagcggcaccgacttcaccttcaccatcagctccctccagcccgaggatattgccgtgtactactgccagcagcactacatcacccccctgacctttggcggaggcaccaaggtggaaatcaagctcgagatccagaaccctgatcctgccgtgtaccagctgcgggatagcaagagcagcgacaagagcgtgtgtctgttcaccgacttcgacagccagaccaacgtgtcccagagcaaggactccgacgtgtacatcaccgataagtgcgtgctggacatgcggagcatggacttcaagagcaactccgccgtggcctggtccaacaagtccgatttcgcctgcgccaacgccttcaacaacagcattatccccgaggacacattcttcccaagccccgagagcagcgactccaccgaccacgtgaagcccaaagagacagagaacaccaagcagcccagcaagagctgccacaagcccaaggccatcgtgcacaccgagaaagtgaacatgatgagcctgaccgtgctgggcctgcggatgctgttcgccaaaaccgtggccgtgaacttcctgctgaccgccaagctgttcttcctccgcgccaagagaagcggatctggcgtgaagcagaccctgaatttcgacctgctgaagctggctggcgacgtggaatccaacccaggccctactagtatggactggatttggcgcatccttttccttgtcggcgctgctaccggcgcgcattccttcgaacagatccaactggtgcagagcggccacgaagtgaagaaacctggggccagcgtgaaggtgtcctgcaaagccagcggctacacctttaccaactacggcatgaactgggtgcgccaggcccctggacagggcctggaatggatgggctggatcaacaccaagaccggcgagcccacctacgccgaagagttcaagggcagattcgtgttcagcctggaaaccagcgcctccaccgcctacctccagatcagctctctgaaggccgaggacaccgccatgtacttttgcggcagaggcggctacggcagcagctactggtacttcgatgtgtggggccagggcaccaccgtgaccgtgtcatctacgcgtgaggacctgaagaacgtgttcccacctgaggtggccgtgttcgagcctagcgaggccgagatcagccacacccagaaagccaccctcgtgtgcctggctaccggcttctaccccgaccatgtggaactgtcttggtgggtcaacggcaaagaggtgcacagcggcgtgtgtaccgacccccagccactgaaagaacagcccgccctgaacgacagccggtactgcctgagcagcagactgagagtgtccgccaccttctggcagaacccccggaaccacttcagatgccaggtgcagttctacggcctgagcgagaacgacgagtggacccaggacagagccaagcccgtgacccagatcgtgtctgccgaagcctggggcagagccgatgatgtgattaagatccactggcaggaaaagaagtccaacaccatcctgggcagccaggaaggcaacaccatgaagaccaacgacacctacatgaagttcagctggctgaccgtgcccgagaagtccctggacaaagaacacagatgcatcgtgcggcacgaaaacaacaagaacggcgtggaccaggaaatcatcttcccacccatcaagaccgatgtgattacaatggaccccaaggacaactgctccaaggacgccaacgataccctgctgctccagctgaccaacaccagcgcctactacatgtacttgttgctgctgctgaagtccgtggtgtacttcgccatcatcacatgctgcctgctgcggagaaccgccttctgctgcaacggcgagaagtct

SEQ ID NO: 7625 - DNA, 2592 bp, synthetic construct
  source 1..2592: mol_type = other DNA
atggccttaccagtgaccgccttgctcctgccgctggccttgctgctccacgccgccaggccggaagtgcagctggttgaatctggcggaggactggttcagcctggcggatctctgagactgtcttgtgccgccagcggcttcagcttcagcgacttttggatgagctgggtccgacaggcccctggcaaaggacttgaatgggtcgccacaatcagccaggccggcagcgagaaggactacgtggactctgtgaagggcagattcaccatcagccgggacaacgccaagaagtccctgtacctccagatgaacagcctgagagccgaggacaccgccgtgtactattgtgcctctggcgtgtacagcttcgactacagaggccagggcaccctggtcacagtctcttctggtaccggcggaggcggatctggcggcggaggtagcggtggcggaggatctgaattcgacatcgtgatgacccagagccccgatagcctggccgtgtctctgggagagagagccaccatcaactgccgggccagcaagagcgtgtccaccagcggctacagctacatgcactggtatcagcagaagcccggccagccccccaagctgctgatctacctggcctccaacctggaaagcggcgtgcccgatagattcagcggcagcggctctggcaccgacttcaccctgaccatcagttctcttcaggccgaggacgtggccgtgtactactgccagcacagcagagagctgccctacaccttcggccagggcaccaagctggaaatcaagctcgagatccagaaccctgatcctgccgtgtaccagctgcgggatagcaagagcagcgacaagagcgtgtgtctgttcaccgacttcgacagccagaccaacgtgtcccagagcaaggactccgacgtgtacatcaccgataagtgcgtgctggacatgcggagcatggacttcaagagcaactccgccgtggcctggtccaacaagtccgatttcgcctgcgccaacgccttcaacaacagcattatccccgaggacacattcttcccaagccccgagagcagcgactccaccgaccacgtgaagcccaaagagacagagaacaccaagcagcccagcaagagctgccacaagcccaaggccatcgtgcacaccgagaaagtgaacatgatgagcctgaccgtgctgggcctgcggatgctgttcgccaaaaccgtggccgtgaacttcctgctgaccgccaagctgttcttcctccgcgccaagagaagcggatctggcgtgaagcagaccctgaatttcgacctgctgaagctggctggcgacgtggaatccaacccaggccctactagtatggactggatttggcgcatccttttccttgtcggcgctgctaccggcgcgcattccttcgaacaggtgcaactccaggaatctggccctggccttgtgaagcccagcgagacactgagcctgacctgtaccgtgtccggcggcagcatcagctcttacggcgtgcactggattcggcagcctccaggcaagggcctggaatggatcggcgtgatctggacctccggcgtgaccgactacaacagcgccctgatgggcagagtgaccatctccgtggacaccagcaagaaccagttcagcctgaagctgagcagcgtgacagccgccgataccgccgtgtattattgcgccagagatggcgactacgaccgctacacaatggactactggggccagggaacccttgtgaccgtgtcctctacgcgtgaggacctgaagaacgtgttcccacctgaggtggccgtgttcgagcctagcgaggccgagatcagccacacccagaaagccaccctcgtgtgcctggctaccggcttctaccccgaccatgtggaactgtcttggtgggtcaacggcaaagaggtgcacagcggcgtgtgtaccgacccccagccactgaaagaacagcccgccctgaacgacagccggtactgcctgagcagcagactgagagtgtccgccaccttctggcagaacccccggaaccacttcagatgccaggtgcagttctacggcctgagcgagaacgacgagtggacccaggacagagccaagcccgtgacccagatcgtgtctgccgaagcctggggcagagccgatgatgtgattaagatccactggcaggaaaagaagtccaacaccatcctgggcagccaggaaggcaacaccatgaagaccaacgacacctacatgaagttcagctggctgaccgtgcccgagaagtccctggacaaagaacacagatgcatcgtgcggcacgaaaacaacaagaacggcgtggaccaggaaatcatcttcccacccatcaagaccgatgtgattacaatggaccccaaggacaactgctccaaggacgccaacgataccctgctgctccagctgaccaacaccagcgcctactacatgtacttgttgctgctgctgaagtccgtggtgtacttcgccatcatcacatgctgcctgctgcggagaaccgccttctgctgcaacggcgagaagtct

SEQ ID NO: 7626 - DNA, 2592 bp, synthetic construct
  source 1..2592: mol_type = other DNA
atggccttaccagtgaccgccttgctcctgccgctggccttgctgctccacgccgccaggccggaagtgcagctggttgaatctggcggaggactggttcagcctggcggatctctgagactgtcttgtgccgccagcggcttcagcttcagcgacttttggatgagctgggtccgacaggcccctggcaaaggacttgaatgggtcgccacaatcagccaggccggcagcgagaaggactacgtggactctgtgaagggcagattcaccatcagccgggacaacgccaagaagtccctgtacctccagatgaacagcctgagagccgaggacaccgccgtgtactattgtgcctctggcgtgtacagcttcgactacagaggccagggcaccctggtcacagtctcttctggtaccggcggaggcggatctggcggcggaggtagcggtggcggaggatctgaattcgacatccagatgacccagagccccagcagcctgtctgccagcgtgggcgacagagtgaccatcacctgtagagccagccagagcatcggcaccagcctgcactggtatcagcagaagcctggcaaggcccccaagctgctgattaagttcgccagcagactgcagagcggcgtgcccagcagattttctggcagcggctccggcaccgacttcaccctgacaatcagctccctgcagcccgaggacttcgccacctactactgccagcagagccccggcttccctccaacctttggacagggcaccaagctggaaatcaagcggctcgagatccagaaccctgatcctgccgtgtaccagctgcgggatagcaagagcagcgacaagagcgtgtgtctgttcaccgacttcgacagccagaccaacgtgtcccagagcaaggactccgacgtgtacatcaccgataagtgcgtgctggacatgcggagcatggacttcaagagcaactccgccgtggcctggtccaacaagtccgatttcgcctgcgccaacgccttcaacaacagcattatccccgaggacacattcttcccaagccccgagagcagcgactccaccgaccacgtgaagcccaaagagacagagaacaccaagcagcccagcaagagctgccacaagcccaaggccatcgtgcacaccgagaaagtgaacatgatgagcctgaccgtgctgggcctgcggatgctgttcgccaaaaccgtggccgtgaacttcctgctgaccgccaagctgttcttcctccgcgccaagagaagcggatctggcgtgaagcagaccctgaatttcgacctgctgaagctggctggcgacgtggaatccaacccaggccctactagtatggactggatttggcgcatccttttccttgtcggcgctgctaccggcgcgcattccttcgaacaggtgcaactggtggaatctggcggcggacttgtgaagccaggcggcagcctgagactgagctgtgccgccagcggcttcagcatcaccaccagcggctactactggacctggatcagacagttccccggcaagggcctggaatggatgggctacatcggctacaacagcaagacctactacaaccccgccctgaagtcccggatcaccatcagcagagacaacgccaagaacagcctgtacctgcagatgaactccctgagagccgaggataccgccgtgtactactgcgccagatccctgtacggcggctacaaggacgccttcgatagctggggccagggaacccttgtgaccgtgtctagcacgcgtgaggacctgaagaacgtgttcccacctgaggtggccgtgttcgagcctagcgaggccgagatcagccacacccagaaagccaccctcgtgtgcctggctaccggcttctaccccgaccatgtggaactgtcttggtgggtcaacggcaaagaggtgcacagcggcgtgtgtaccgacccccagccactgaaagaacagcccgccctgaacgacagccggtactgcctgagcagcagactgagagtgtccgccaccttctggcagaacccccggaaccacttcagatgccaggtgcagttctacggcctgagcgagaacgacgagtggacccaggacagagccaagcccgtgacccagatcgtgtctgccgaagcctggggcagagccgatgatgtgattaagatccactggcaggaaaagaagtccaacaccatcctgggcagccaggaaggcaacaccatgaagaccaacgacacctacatgaagttcagctggctgaccgtgcccgagaagtccctggacaaagaacacagatgcatcgtgcggcacgaaaacaacaagaacggcgtggaccaggaaatcatcttcccacccatcaagaccgatgtgattacaatggaccccaaggacaactgctccaaggacgccaacgataccctgctgctccagctgaccaacaccagcgcctactacatgtacttgttgctgctgctgaagtccgtggtgtacttcgccatcatcacatgctgcctgctgcggagaaccgccttctgctgcaacggcgagaagtct

SEQ ID NO: 7627 - DNA, 2607 bp, synthetic construct
  source 1..2607: mol_type = other DNA
atggccttaccagtgaccgccttgctcctgccgctggccttgctgctccacgccgccaggccggaagtgcagctggttgaatctggcggaggactggttcagcctggcggatctctgagactgtcttgtgccgccagcggcttcagcttcagcgacttttggatgagctgggtccgacaggcccctggcaaaggacttgaatgggtcgccacaatcagccaggccggcagcgagaaggactacgtggactctgtgaagggcagattcaccatcagccgggacaacgccaagaagtccctgtacctccagatgaacagcctgagagccgaggacaccgccgtgtactattgtgcctctggcgtgtacagcttcgactacagaggccagggcaccctggtcacagtctcttctggtaccggcggaggcggatctggcggcggaggtagcggtggcggaggatctgaattcgacgagatcgtgctgacccagagccctctgagcctgcctgtgacacctggcgagcctgccagcatctcctgtagaagcagccagagcctgctgcacagcatcggctacaactacctggactggtatctccagaagcccggccagagcccccaactgctgatctacctgggcagcaacagagccagcggcgtgcccgatagattttccggcagcggctccggcaccgacttcaccctgaagatcagccgggtggaagccgaggacgtgggcgtgtactactgtatgcaggccctccagacccccctgacctttggcggaggcaccaaggtggaaatcaagcggctcgagatccagaaccctgatcctgccgtgtaccagctgcgggatagcaagagcagcgacaagagcgtgtgtctgttcaccgacttcgacagccagaccaacgtgtcccagagcaaggactccgacgtgtacatcaccgataagtgcgtgctggacatgcggagcatggacttcaagagcaactccgccgtggcctggtccaacaagtccgatttcgcctgcgccaacgccttcaacaacagcattatccccgaggacacattcttcccaagccccgagagcagcgactccaccgaccacgtgaagcccaaagagacagagaacaccaagcagcccagcaagagctgccacaagcccaaggccatcgtgcacaccgagaaagtgaacatgatgagcctgaccgtgctgggcctgcggatgctgttcgccaaaaccgtggccgtgaacttcctgctgaccgccaagctgttcttcctccgcgccaagagaagcggatctggcgtgaagcagaccctgaatttcgacctgctgaagctggctggcgacgtggaatccaacccaggccctactagtatggactggatttggcgcatccttttccttgtcggcgctgctaccggcgcgcattccttcgaagaagtgcaactggtggaaagcggaggcggcgtggtgcagcctggaagaagcctgagactgagctgtgccgccagcggcttcaccttccggtcctacggaatgcactgggtgcgccaggcccctggcaaaggactggaatgggtggccgtgatctcctacgacggctccaacaagtactacaccgacagcgtgaacggcagattcaccatcagcagagacaacagcaagaacaccctgtacctccagatgaacagcctgcgggccgaggacaccgccgtgtactattgtgctagaggcggaggctactacgagacaagcggccctgattactggggccagggcacactcgtgaccgtgtctagtacgcgtgaggacctgaagaacgtgttcccacctgaggtggccgtgttcgagcctagcgaggccgagatcagccacacccagaaagccaccctcgtgtgcctggctaccggcttctaccccgaccatgtggaactgtcttggtgggtcaacggcaaagaggtgcacagcggcgtgtgtaccgacccccagccactgaaagaacagcccgccctgaacgacagccggtactgcctgagcagcagactgagagtgtccgccaccttctggcagaacccccggaaccacttcagatgccaggtgcagttctacggcctgagcgagaacgacgagtggacccaggacagagccaagcccgtgacccagatcgtgtctgccgaagcctggggcagagccgatgatgtgattaagatccactggcaggaaaagaagtccaacaccatcctgggcagccaggaaggcaacaccatgaagaccaacgacacctacatgaagttcagctggctgaccgtgcccgagaagtccctggacaaagaacacagatgcatcgtgcggcacgaaaacaacaagaacggcgtggaccaggaaatcatcttcccacccatcaagaccgatgtgattacaatggaccccaaggacaactgctccaaggacgccaacgataccctgctgctccagctgaccaacaccagcgcctactacatgtacttgttgctgctgctgaagtccgtggtgtacttcgccatcatcacatgctgcctgctgcggagaaccgccttctgctgcaacggcgagaagtct

SEQ ID NO: 7628 - DNA, 2601 bp, synthetic construct
  source 1..2601: mol_type = other DNA
atggccttaccagtgaccgccttgctcctgccgctggccttgctgctccacgccgccaggccggaagtgcagctggttgaatctggcggaggactggttcagcctggcggatctctgagactgtcttgtgccgccagcggcttcagcttcagcgacttttggatgagctgggtccgacaggcccctggcaaaggacttgaatgggtcgccacaatcagccaggccggcagcgagaaggactacgtggactctgtgaagggcagattcaccatcagccgggacaacgccaagaagtccctgtacctccagatgaacagcctgagagccgaggacaccgccgtgtactattgtgcctctggcgtgtacagcttcgactacagaggccagggcaccctggtcacagtctcttctggtaccggcggaggcggatctggcggcggaggtagcggtggcggaggatctgaattcgacgacgtcgtgatgacccagagccctctgagcctgcctgtgacacctggcgagcctgccagcatctcctgtagaagcagccagagcctgctgcacagcatcggctacaactacctgcactggtttctccagaagcccggccagagcccccaactgctgatctacctgggcagcaacagagccagcggcgtgcccgatagattttccggcagcggctccggcaccgacttcaccctgaagatcagccgggtggaagccgaggacgtgggcgtgtactactgtatgcaggccctccagacccctcccacctttggacagggcaccagactggaaatcaagcggctcgagatccagaaccctgatcctgccgtgtaccagctgcgggatagcaagagcagcgacaagagcgtgtgtctgttcaccgacttcgacagccagaccaacgtgtcccagagcaaggactccgacgtgtacatcaccgataagtgcgtgctggacatgcggagcatggacttcaagagcaactccgccgtggcctggtccaacaagtccgatttcgcctgcgccaacgccttcaacaacagcattatccccgaggacacattcttcccaagccccgagagcagcgactccaccgaccacgtgaagcccaaagagacagagaacaccaagcagcccagcaagagctgccacaagcccaaggccatcgtgcacaccgagaaagtgaacatgatgagcctgaccgtgctgggcctgcggatgctgttcgccaaaaccgtggccgtgaacttcctgctgaccgccaagctgttcttcctccgcgccaagagaagcggatctggcgtgaagcagaccctgaatttcgacctgctgaagctggctggcgacgtggaatccaacccaggccctactagtatggactggatttggcgcatccttttccttgtcggcgctgctaccggcgcgcattccttcgaacaactccaactccaggaaagcggccctggcctcgtgaagcctagcggcacactgagcctgacatgtgccgtgtctggcggcagcatcagcagcagcaactggtggtcttgggtgcgccagcctcctggcaagggcctggaatggatcggcgaaatctaccacagcggcagcaccaactacaaccccagcctgaagtccagagtgaccatcagcgtggacaagagcaagaaccagttctccctgaagctgagcagcgtgacagccgccgataccgccgtgtactattgcgtgggcagcccctacggcgactacgtgctggattattggggccagggcaccctcgtgaccgtgtctagtacgcgtgaggacctgaagaacgtgttcccacctgaggtggccgtgttcgagcctagcgaggccgagatcagccacacccagaaagccaccctcgtgtgcctggctaccggcttctaccccgaccatgtggaactgtcttggtgggtcaacggcaaagaggtgcacagcggcgtgtgtaccgacccccagccactgaaagaacagcccgccctgaacgacagccggtactgcctgagcagcagactgagagtgtccgccaccttctggcagaacccccggaaccacttcagatgccaggtgcagttctacggcctgagcgagaacgacgagtggacccaggacagagccaagcccgtgacccagatcgtgtctgccgaagcctggggcagagccgatgatgtgattaagatccactggcaggaaaagaagtccaacaccatcctgggcagccaggaaggcaacaccatgaagaccaacgacacctacatgaagttcagctggctgaccgtgcccgagaagtccctggacaaagaacacagatgcatcgtgcggcacgaaaacaacaagaacggcgtggaccaggaaatcatcttcccacccatcaagaccgatgtgattacaatggaccccaaggacaactgctccaaggacgccaacgataccctgctgctccagctgaccaacaccagcgcctactacatgtacttgttgctgctgctgaagtccgtggtgtacttcgccatcatcacatgctgcctgctgcggagaaccgccttctgctgcaacggcgagaagtct

SEQ ID NO: 7629 - DNA, 2595 bp, synthetic construct
  source 1..2595: mol_type = other DNA
atggccttaccagtgaccgccttgctcctgccgctggccttgctgctccacgccgccaggccggaagtgcagctggttgaatctggcggaggactggttcagcctggcggatctctgagactgtcttgtgccgccagcggcttcagcttcagcgacttttggatgagctgggtccgacaggcccctggcaaaggacttgaatgggtcgccacaatcagccaggccggcagcgagaaggactacgtggactctgtgaagggcagattcaccatcagccgggacaacgccaagaagtccctgtacctccagatgaacagcctgagagccgaggacaccgccgtgtactattgtgcctctggcgtgtacagcttcgactacagaggccagggcaccctggtcacagtctcttctggtaccggcggaggcggatctggcggcggaggtagcggtggcggaggatctgaattcgacgagatcgtgctgacacagagccctggcaccctgagcctgtctctgggagagagagccacactgagctgtcgggccagccagtctatcagcagcagcttcctggcctggtatcagcagaagcccggccaggcccctaagctgctgatctacgccgccagcacaagagccaccggcatccccgatagattcagcggctctggcagcggcaccgacttcaccctgaccatcagcagactggaacccgaggacttcgccgtgtactactgccagcagtacggcagaagcctgagcttcggcggaggcaccaaggtggaagtgaagctcgagatccagaaccctgatcctgccgtgtaccagctgcgggatagcaagagcagcgacaagagcgtgtgtctgttcaccgacttcgacagccagaccaacgtgtcccagagcaaggactccgacgtgtacatcaccgataagtgcgtgctggacatgcggagcatggacttcaagagcaactccgccgtggcctggtccaacaagtccgatttcgcctgcgccaacgccttcaacaacagcattatccccgaggacacattcttcccaagccccgagagcagcgactccaccgaccacgtgaagcccaaagagacagagaacaccaagcagcccagcaagagctgccacaagcccaaggccatcgtgcacaccgagaaagtgaacatgatgagcctgaccgtgctgggcctgcggatgctgttcgccaaaaccgtggccgtgaacttcctgctgaccgccaagctgttcttcctccgcgccaagagaagcggatctggcgtgaagcagaccctgaatttcgacctgctgaagctggctggcgacgtggaatccaacccaggccctactagtatggactggatttggcgcatccttttccttgtcggcgctgctaccggcgcgcattccttcgaacaggtgcaactccagcagtctggccccggactcgtgaagcctagccagacactgagcctgacctgcgccatcagcggcgatagcgtgtccggcaatagcgccacctggaactggatcagacagagcccatctcggggcctggaatggctgggccggacctactaccgcagcaagtggaaccacgactacgccgagagcgtgaagtcccggatcaccatcaaccccgacaccagcaagaaccagttctccttgcaactgaacagcgtgacccccgaggacacagccgtgtattattgcgccagaggcgacagcagctcttggtacgccttcgactattggggccagggcaccctcgtgaccgtgtctagtacgcgtgaggacctgaagaacgtgttcccacctgaggtggccgtgttcgagcctagcgaggccgagatcagccacacccagaaagccaccctcgtgtgcctggctaccggcttctaccccgaccatgtggaactgtcttggtgggtcaacggcaaagaggtgcacagcggcgtgtgtaccgacccccagccactgaaagaacagcccgccctgaacgacagccggtactgcctgagcagcagactgagagtgtccgccaccttctggcagaacccccggaaccacttcagatgccaggtgcagttctacggcctgagcgagaacgacgagtggacccaggacagagccaagcccgtgacccagatcgtgtctgccgaagcctggggcagagccgatgatgtgattaagatccactggcaggaaaagaagtccaacaccatcctgggcagccaggaaggcaacaccatgaagaccaacgacacctacatgaagttcagctggctgaccgtgcccgagaagtccctggacaaagaacacagatgcatcgtgcggcacgaaaacaacaagaacggcgtggaccaggaaatcatcttcccacccatcaagaccgatgtgattacaatggaccccaaggacaactgctccaaggacgccaacgataccctgctgctccagctgaccaacaccagcgcctactacatgtacttgttgctgctgctgaagtccgtggtgtacttcgccatcatcacatgctgcctgctgcggagaaccgccttctgctgcaacggcgagaagtct

SEQ ID NO: 7630 - DNA, 2592 bp, synthetic construct
  source 1..2592: mol_type = other DNA
atggccttaccagtgaccgccttgctcctgccgctggccttgctgctccacgccgccaggccggaagtgcagctggttgaatctggcggaggactggttcagcctggcggatctctgagactgtcttgtgccgccagcggcttcagcttcagcgacttttggatgagctgggtccgacaggcccctggcaaaggacttgaatgggtcgccacaatcagccaggccggcagcgagaaggactacgtggactctgtgaagggcagattcaccatcagccgggacaacgccaagaagtccctgtacctccagatgaacagcctgagagccgaggacaccgccgtgtactattgtgcctctggcgtgtacagcttcgactacagaggccagggcaccctggtcacagtctcttctggtaccggcggaggcggatctggcggcggaggtagcggtggcggaggatctgaattcgaccagagcgtcgtgacacagcctcctagcgtgtcagtggcccctggcaagaccgccagaatcacctgtggccggaacaacatcggcagcaagagcgtgcactggtatcagcagaagcccggccaggctcctgtgctggtggtgtacgacgacagcgacagacccagcggcatccccgagagattcagcggcagcaactccggcaataccgccaccctgaccatcagcagagtggaagccggcgacgaggccgactactactgccaagtgtgggacagcagcagcgatcacgtggtgtttggcggaggcaccaagctgacagtgctgggtctcgagatccagaaccctgatcctgccgtgtaccagctgcgggatagcaagagcagcgacaagagcgtgtgtctgttcaccgacttcgacagccagaccaacgtgtcccagagcaaggactccgacgtgtacatcaccgataagtgcgtgctggacatgcggagcatggacttcaagagcaactccgccgtggcctggtccaacaagtccgatttcgcctgcgccaacgccttcaacaacagcattatccccgaggacacattcttcccaagccccgagagcagcgactccaccgaccacgtgaagcccaaagagacagagaacaccaagcagcccagcaagagctgccacaagcccaaggccatcgtgcacaccgagaaagtgaacatgatgagcctgaccgtgctgggcctgcggatgctgttcgccaaaaccgtggccgtgaacttcctgctgaccgccaagctgttcttcctccgcgccaagagaagcggatctggcgtgaagcagaccctgaatttcgacctgctgaagctggctggcgacgtggaatccaacccaggccctactagtatggactggatttggcgcatccttttccttgtcggcgctgctaccggcgcgcattccttcgaagtgcaactggtgcagtctggcggaggggtcatgcggcctggcggatctctgagactgtcttgtgccgccagcggcttcaccttcgacgactacggcatgagctgggtgcgccaggcccctggaaaaggcctggaatgggtgtccggcatcaactggaatggcggcagcaccggctacgccgattctgtgcggggcagattcaccatcagccgggacaacgccaagaacagcctgtacctgcagatgaactccctgcgggccgaggacaccgccctgtactattgcgccagagagcggggctacggctaccacgaccctcacgattattggggccagggcacccttgttaccgtgtcctctacgcgtgaggacctgaagaacgtgttcccacctgaggtggccgtgttcgagcctagcgaggccgagatcagccacacccagaaagccaccctcgtgtgcctggctaccggcttctaccccgaccatgtggaactgtcttggtgggtcaacggcaaagaggtgcacagcggcgtgtgtaccgacccccagccactgaaagaacagcccgccctgaacgacagccggtactgcctgagcagcagactgagagtgtccgccaccttctggcagaacccccggaaccacttcagatgccaggtgcagttctacggcctgagcgagaacgacgagtggacccaggacagagccaagcccgtgacccagatcgtgtctgccgaagcctggggcagagccgatgatgtgattaagatccactggcaggaaaagaagtccaacaccatcctgggcagccaggaaggcaacaccatgaagaccaacgacacctacatgaagttcagctggctgaccgtgcccgagaagtccctggacaaagaacacagatgcatcgtgcggcacgaaaacaacaagaacggcgtggaccaggaaatcatcttcccacccatcaagaccgatgtgattacaatggaccccaaggacaactgctccaaggacgccaacgataccctgctgctccagctgaccaacaccagcgcctactacatgtacttgttgctgctgctgaagtccgtggtgtacttcgccatcatcacatgctgcctgctgcggagaaccgccttctgctgcaacggcgagaagtct

SEQ ID NO: 7631 - DNA, 2631 bp, synthetic construct
  source 1..2631: mol_type = other DNA
atggccttaccagtgaccgccttgctcctgccgctggccttgctgctccacgccgccaggccggaagtgcagctggttgaatctggcggaggactggttcagcctggcggatctctgagactgtcttgtgccgccagcggcttcagcttcagcgacttttggatgagctgggtccgacaggcccctggcaaaggacttgaatgggtcgccacaatcagccaggccggcagcgagaaggactacgtggactctgtgaagggcagattcaccatcagccgggacaacgccaagaagtccctgtacctccagatgaacagcctgagagccgaggacaccgccgtgtactattgtgcctctggcgtgtacagcttcgactacagaggccagggcaccctggtcacagtctcttctggtaccggcggaggcggatctggcggcggaggtagcggtggcggaggatctgaattcgaacagaaactcatcagtgaagaagacctggaattccaggctgtcgtgacacagcctcctagcgcctctggcacaccaggccagagagtgaccatctcctgtagcggcagcagcagcaacatcggcagcaacaccgtgaactggtatcagcaggtgcccggcaccgctcccaagctgctgatctacagcaacaaccagcggcccagcggcgtgcccgatagattttctggcagcaagagcggcaccagcgccagcctggctatctctggactccagtccgaggacgaggccgactactattgcgccgcctgggacgatagcctgaacggctgggtgttcggcggaggcaccaagctgacagtgctgctcgagatccagaaccctgatcctgccgtgtaccagctgcgggatagcaagagcagcgacaagagcgtgtgtctgttcaccgacttcgacagccagaccaacgtgtcccagagcaaggactccgacgtgtacatcaccgataagtgcgtgctggacatgcggagcatggacttcaagagcaactccgccgtggcctggtccaacaagtccgatttcgcctgcgccaacgccttcaacaacagcattatccccgaggacacattcttcccaagccccgagagcagcgactccaccgaccacgtgaagcccaaagagacagagaacaccaagcagcccagcaagagctgccacaagcccaaggccatcgtgcacaccgagaaagtgaacatgatgagcctgaccgtgctgggcctgcggatgctgttcgccaaaaccgtggccgtgaacttcctgctgaccgccaagctgttcttcctccgcgccaagagaagcggatctggcgtgaagcagaccctgaatttcgacctgctgaagctggctggcgacgtggaatccaacccaggccctactagtatggactggatttggcgcatccttttccttgtcggcgctgctaccggcgcgcattccttcgaacagatgcaactggtgcagagcggagccgaagtgaaagagcctggcgagagcctgcggatctcctgcaagggcagcggctacagcttcaccaatttctggatctcttgggtgcgccagatgcccggcaagggcctggaatggatgggcagagtggaccccggctactcctacagcacctacagccctagcttccagggccacgtgaccatcagcgccgacaagagcaccagcaccgcctacctccagtggaacagcctgaaggccagcgacaccgccatgtactactgcgccagagtgcagtacagcggctattacgattggttcgacccctggggccagggcacactcgtgacagtgtcaagcacgcgtgaggacctgaagaacgtgttcccacctgaggtggccgtgttcgagcctagcgaggccgagatcagccacacccagaaagccaccctcgtgtgcctggctaccggcttctaccccgaccatgtggaactgtcttggtgggtcaacggcaaagaggtgcacagcggcgtgtgtaccgacccccagccactgaaagaacagcccgccctgaacgacagccggtactgcctgagcagcagactgagagtgtccgccaccttctggcagaacccccggaaccacttcagatgccaggtgcagttctacggcctgagcgagaacgacgagtggacccaggacagagccaagcccgtgacccagatcgtgtctgccgaagcctggggcagagccgatgatgtgattaagatccactggcaggaaaagaagtccaacaccatcctgggcagccaggaaggcaacaccatgaagaccaacgacacctacatgaagttcagctggctgaccgtgcccgagaagtccctggacaaagaacacagatgcatcgtgcggcacgaaaacaacaagaacggcgtggaccaggaaatcatcttcccacccatcaagaccgatgtgattacaatggaccccaaggacaactgctccaaggacgccaacgataccctgctgctccagctgaccaacaccagcgcctactacatgtacttgttgctgctgctgaagtccgtggtgtacttcgccatcatcacatgctgcctgctgcggagaaccgccttctgctgcaacggcgagaagtct

SEQ ID NO: 7632 - DNA, 2613 bp, synthetic construct
  source 1..2613: mol_type = other DNA
atggccttaccagtgaccgccttgctcctgccgctggccttgctgctccacgccgccaggccggaagtgcagctggttgaatctggcggaggactggttcagcctggcggatctctgagactgtcttgtgccgccagcggcttcagcttcagcgacttttggatgagctgggtccgacaggcccctggcaaaggacttgaatgggtcgccacaatcagccaggccggcagcgagaaggactacgtggactctgtgaagggcagattcaccatcagccgggacaacgccaagaagtccctgtacctccagatgaacagcctgagagccgaggacaccgccgtgtactattgtgcctctggcgtgtacagcttcgactacagaggccagggcaccctggtcacagtctcttctggtaccggcggaggcggatctggcggcggaggtagcggtggcggaggatctgaattcgaacagaaactcatcagtgaagaagacctggaattcgacatccagatgacccagagccccagcacactgagcgccagcgtgggcgacagagtgaccatcacctgtcgggccagccagaacatcaacaagtggctggcctggtatcagcagaggcccggaaaagccccccagctgctgatctacaaggccagcagcctggaaagcggcgtgcccagcagattttctggcagcggctctggcaccgagtacaccctgaccatcagctccctccagcccgacgacttcgccacctactactgccagcagtacaacagctacgccaccttcggccagggcaccaaggtggaaatcaagagactcgagatccagaaccctgatcctgccgtgtaccagctgcgggatagcaagagcagcgacaagagcgtgtgtctgttcaccgacttcgacagccagaccaacgtgtcccagagcaaggactccgacgtgtacatcaccgataagtgcgtgctggacatgcggagcatggacttcaagagcaactccgccgtggcctggtccaacaagtccgatttcgcctgcgccaacgccttcaacaacagcattatccccgaggacacattcttcccaagccccgagagcagcgactccaccgaccacgtgaagcccaaagagacagagaacaccaagcagcccagcaagagctgccacaagcccaaggccatcgtgcacaccgagaaagtgaacatgatgagcctgaccgtgctgggcctgcggatgctgttcgccaaaaccgtggccgtgaacttcctgctgaccgccaagctgttcttcctccgcgccaagagaagcggatctggcgtgaagcagaccctgaatttcgacctgctgaagctggctggcgacgtggaatccaacccaggccctactagtatggactggatttggcgcatccttttccttgtcggcgctgctaccggcgcgcattccttcgaacaggtgcagctggtgcagtctggggccgaagtgaagaagcctggcgagagcctgaagatcagctgcaagggctccggctacaacttctctaacaagtggatcggctgggtgcgccagctgcctggcagaggactggaatggatcgccatcatctaccccggctacagcgacatcacctacagccccagcttccagggccgcgtgacaatcagcgccgacaccagcatcaacaccgcctacctgcactggcacagcctgaaggccagcgacaccgccatgtactactgcgtgcggcatacagccctggctggcttcgattattggggcctgggcaccctcgtgaccgtgtctagtacgcgtgaggacctgaagaacgtgttcccacctgaggtggccgtgttcgagcctagcgaggccgagatcagccacacccagaaagccaccctcgtgtgcctggctaccggcttctaccccgaccatgtggaactgtcttggtgggtcaacggcaaagaggtgcacagcggcgtgtgtaccgacccccagccactgaaagaacagcccgccctgaacgacagccggtactgcctgagcagcagactgagagtgtccgccaccttctggcagaacccccggaaccacttcagatgccaggtgcagttctacggcctgagcgagaacgacgagtggacccaggacagagccaagcccgtgacccagatcgtgtctgccgaagcctggggcagagccgatgatgtgattaagatccactggcaggaaaagaagtccaacaccatcctgggcagccaggaaggcaacaccatgaagaccaacgacacctacatgaagttcagctggctgaccgtgcccgagaagtccctggacaaagaacacagatgcatcgtgcggcacgaaaacaacaagaacggcgtggaccaggaaatcatcttcccacccatcaagaccgatgtgattacaatggaccccaaggacaactgctccaaggacgccaacgataccctgctgctccagctgaccaacaccagcgcctactacatgtacttgttgctgctgctgaagtccgtggtgtacttcgccatcatcacatgctgcctgctgcggagaaccgccttctgctgcaacggcgagaagtct

SEQ ID NO: 7633 - DNA, 2589 bp, synthetic construct
  source 1..2589: mol_type = other DNA
atggccttaccagtgaccgccttgctcctgccgctggccttgctgctccacgccgccaggccggaagtgcagctggttgaatctggcggaggactggttcagcctggcggatctctgagactgtcttgtgccgccagcggcttcagcttcagcgacttttggatgagctgggtccgacaggcccctggcaaaggacttgaatgggtcgccacaatcagccaggccggcagcgagaaggactacgtggactctgtgaagggcagattcaccatcagccgggacaacgccaagaagtccctgtacctccagatgaacagcctgagagccgaggacaccgccgtgtactattgtgcctctggcgtgtacagcttcgactacagaggccagggcaccctggtcacagtctcttctggtaccggcggaggcggatctggcggcggaggtagcggtggcggaggatctgaattcgacatcgtgctgacacagagccctgcttctctggccgtgtctctgggacagagagccaccatcagctgtagagccagcgagagcgtggacaactacggcaacaccttcatgcactggtatcagcagaagcccggccagcctcctaagctgctgatctacagagccagcaacctggaaagcggcatccccgccagattttctggcagcggcagcagaaccgacttcaccctgaccatcaatcccgtggaagccgacgacgtggcaacctactactgccagcagagcaacgaggaccctcctacatttggagccggcaccaagctggaactgaaactcgagatccagaaccctgatcctgccgtgtaccagctgcgggatagcaagagcagcgacaagagcgtgtgtctgttcaccgacttcgacagccagaccaacgtgtcccagagcaaggactccgacgtgtacatcaccgataagtgcgtgctggacatgcggagcatggacttcaagagcaactccgccgtggcctggtccaacaagtccgatttcgcctgcgccaacgccttcaacaacagcattatccccgaggacacattcttcccaagccccgagagcagcgactccaccgaccacgtgaagcccaaagagacagagaacaccaagcagcccagcaagagctgccacaagcccaaggccatcgtgcacaccgagaaagtgaacatgatgagcctgaccgtgctgggcctgcggatgctgttcgccaaaaccgtggccgtgaacttcctgctgaccgccaagctgttcttcctccgcgccaagagaagcggatctggcgtgaagcagaccctgaatttcgacctgctgaagctggctggcgacgtggaatccaacccaggccctactagtatggactggatttggcgcatccttttccttgtcggcgctgctaccggcgcgcattccttcgaacagattcagctggtgcagtctggccccgagctgaagaaacctggcgagacagtgaagatcagctgcaaggccagcggctacatcttcaccaattacggcatgaactgggtcaagcaggcccctggcaagagcttcaagtggatgggctggatcaacacctacaccggcgagagcacatacagcgccgacttcaagggcagattcgccttcagcctggaaaccagcgccagcacagcctacctgcacatcaacgacctgaagaacgaggacaccgccacctacttttgcgccagaagcggcggctacgaccctatggattattggggccagggcaccagcgtgaccgtttcttctacgcgtgaggacctgaagaacgtgttcccacctgaggtggccgtgttcgagcctagcgaggccgagatcagccacacccagaaagccaccctcgtgtgcctggctaccggcttctaccccgaccatgtggaactgtcttggtgggtcaacggcaaagaggtgcacagcggcgtgtgtaccgacccccagccactgaaagaacagcccgccctgaacgacagccggtactgcctgagcagcagactgagagtgtccgccaccttctggcagaacccccggaaccacttcagatgccaggtgcagttctacggcctgagcgagaacgacgagtggacccaggacagagccaagcccgtgacccagatcgtgtctgccgaagcctggggcagagccgatgatgtgattaagatccactggcaggaaaagaagtccaacaccatcctgggcagccaggaaggcaacaccatgaagaccaacgacacctacatgaagttcagctggctgaccgtgcccgagaagtccctggacaaagaacacagatgcatcgtgcggcacgaaaacaacaagaacggcgtggaccaggaaatcatcttcccacccatcaagaccgatgtgattacaatggaccccaaggacaactgctccaaggacgccaacgataccctgctgctccagctgaccaacaccagcgcctactacatgtacttgttgctgctgctgaagtccgtggtgtacttcgccatcatcacatgctgcctgctgcggagaaccgccttctgctgcaacggcgagaagtct

SEQ ID NO: 7634 - DNA, 2586 bp, synthetic construct
  source 1..2586: mol_type = other DNA
atggccttaccagtgaccgccttgctcctgccgctggccttgctgctccacgccgccaggccggaagtgcagctggttgaatctggcggaggactggttcagcctggcggatctctgagactgtcttgtgccgccagcggcttcagcttcagcgacttttggatgagctgggtccgacaggcccctggcaaaggacttgaatgggtcgccacaatcagccaggccggcagcgagaaggactacgtggactctgtgaagggcagattcaccatcagccgggacaacgccaagaagtccctgtacctccagatgaacagcctgagagccgaggacaccgccgtgtactattgtgcctctggcgtgtacagcttcgactacagaggccagggcaccctggtcacagtctcttctggtaccggcggaggcggatctggcggcggaggtagcggtggcggaggatctgaattcgacgagatcgtgctgacacagagccctggcaccctgagcctgtctccaggcgaaagagccacactgagctgtcgggccagccagagcgtgtccaatacctacctggcctggtatcaccagaggcccggacaggctccccggctgctgatctatggcgcttctagcagagccaccggcatccccgatagattcagcggctctggcagcggcaccgacttcgccctgacaatcagctccctggaacccgaggacttcgccgtgtactactgccagcagtacagcaactcctggaccttcggccagggcaccaaggtggaaatcaagagactcgagatccagaaccctgatcctgccgtgtaccagctgcgggatagcaagagcagcgacaagagcgtgtgtctgttcaccgacttcgacagccagaccaacgtgtcccagagcaaggactccgacgtgtacatcaccgataagtgcgtgctggacatgcggagcatggacttcaagagcaactccgccgtggcctggtccaacaagtccgatttcgcctgcgccaacgccttcaacaacagcattatccccgaggacacattcttcccaagccccgagagcagcgactccaccgaccacgtgaagcccaaagagacagagaacaccaagcagcccagcaagagctgccacaagcccaaggccatcgtgcacaccgagaaagtgaacatgatgagcctgaccgtgctgggcctgcggatgctgttcgccaaaaccgtggccgtgaacttcctgctgaccgccaagctgttcttcctccgcgccaagagaagcggatctggcgtgaagcagaccctgaatttcgacctgctgaagctggctggcgacgtggaatccaacccaggccctactagtatggactggatttggcgcatccttttccttgtcggcgctgctaccggcgcgcattccttcgaacaggtgcaactggtggaatctggcgggggagtggtgcagcctggcagaagcctgagactgtcttgtgccgccagcggcttcaccttcagcagctacgacatgcactgggtgcgccaggcccctggcaaaggactggaatgggtggccgtgatctcctacgacggcaccaacgagtattacgccgacagcgtgaagggccggttcaccatctccagagacaccagcaagaacaccctgtacctccagatgaacagcctgcgggccgaggacacagccgtgtattattgcgccagagagcggtacttcgactggtccttcgactactggggccagggaaccctggtgtccgtgtctagtacgcgtgaggacctgaagaacgtgttcccacctgaggtggccgtgttcgagcctagcgaggccgagatcagccacacccagaaagccaccctcgtgtgcctggctaccggcttctaccccgaccatgtggaactgtcttggtgggtcaacggcaaagaggtgcacagcggcgtgtgtaccgacccccagccactgaaagaacagcccgccctgaacgacagccggtactgcctgagcagcagactgagagtgtccgccaccttctggcagaacccccggaaccacttcagatgccaggtgcagttctacggcctgagcgagaacgacgagtggacccaggacagagccaagcccgtgacccagatcgtgtctgccgaagcctggggcagagccgatgatgtgattaagatccactggcaggaaaagaagtccaacaccatcctgggcagccaggaaggcaacaccatgaagaccaacgacacctacatgaagttcagctggctgaccgtgcccgagaagtccctggacaaagaacacagatgcatcgtgcggcacgaaaacaacaagaacggcgtggaccaggaaatcatcttcccacccatcaagaccgatgtgattacaatggaccccaaggacaactgctccaaggacgccaacgataccctgctgctccagctgaccaacaccagcgcctactacatgtacttgttgctgctgctgaagtccgtggtgtacttcgccatcatcacatgctgcctgctgcggagaaccgccttctgctgcaacggcgagaagtct

SEQ ID NO: 7635 - DNA, 2583 bp, synthetic construct
  source 1..2583: mol_type = other DNA
atggccttaccagtgaccgccttgctcctgccgctggccttgctgctccacgccgccaggccggaagtgcagctggttgaatctggcggaggactggttcagcctggcggatctctgagactgtcttgtgccgccagcggcttcagcttcagcgacttttggatgagctgggtccgacaggcccctggcaaaggacttgaatgggtcgccacaatcagccaggccggcagcgagaaggactacgtggactctgtgaagggcagattcaccatcagccgggacaacgccaagaagtccctgtacctccagatgaacagcctgagagccgaggacaccgccgtgtactattgtgcctctggcgtgtacagcttcgactacagaggccagggcaccctggtcacagtctcttctggtaccggcggaggcggatctggcggcggaggtagcggtggcggaggatctgaattcgacgagctgacacaggaccctgctgtgtctgttgccctgggccagacagtgcggattacctgtcaaggcgacagcctgagaagcaactacgccaactggtatcagcagaagcccggacaggctcccgtgctggttatctacggccagaacaacagacccagcggcatccccgatagattcagcggctctagctctggcaataccgccagcctgacaatcactggcgctcaggctgccgatgaggccgactactactgcgatagcagagtgtccaccggcaatcacgtggtgtttggcggcggaacaaagctgacagtgctcggacaactcgagatccagaaccctgatcctgccgtgtaccagctgcgggatagcaagagcagcgacaagagcgtgtgtctgttcaccgacttcgacagccagaccaacgtgtcccagagcaaggactccgacgtgtacatcaccgataagtgcgtgctggacatgcggagcatggacttcaagagcaactccgccgtggcctggtccaacaagtccgatttcgcctgcgccaacgccttcaacaacagcattatccccgaggacacattcttcccaagccccgagagcagcgactccaccgaccacgtgaagcccaaagagacagagaacaccaagcagcccagcaagagctgccacaagcccaaggccatcgtgcacaccgagaaagtgaacatgatgagcctgaccgtgctgggcctgcggatgctgttcgccaaaaccgtggccgtgaacttcctgctgaccgccaagctgttcttcctccgcgccaagagaagcggatctggcgtgaagcagaccctgaatttcgacctgctgaagctggctggcgacgtggaatccaacccaggccctactagtatggactggatttggcgcatccttttccttgtcggcgctgctaccggcgcgcattccttcgaagaagttcagctggtgcagagcggagccgaagtgaagaaacctggggcctctgtgaaggtgtcctgcaaggcttccggctacacctttaccagctacgccatgcactgggtccgacaggcacctggacaacggcttgaatggatgggctggatcaacgccggcaacggcaacaccaagtacagccagaaattccagggccgcgtgaccatcaccagagatacaagcgccagcaccgcctacatggaactgtctagcctgagatccgaggacaccgccgtgtactactgtgccagagacatcagctacggcagcttcgactattggggccagggcacactggtcaccgttagctctacgcgtgaggacctgaagaacgtgttcccacctgaggtggccgtgttcgagcctagcgaggccgagatcagccacacccagaaagccaccctcgtgtgcctggctaccggcttctaccccgaccatgtggaactgtcttggtgggtcaacggcaaagaggtgcacagcggcgtgtgtaccgacccccagccactgaaagaacagcccgccctgaacgacagccggtactgcctgagcagcagactgagagtgtccgccaccttctggcagaacccccggaaccacttcagatgccaggtgcagttctacggcctgagcgagaacgacgagtggacccaggacagagccaagcccgtgacccagatcgtgtctgccgaagcctggggcagagccgatgatgtgattaagatccactggcaggaaaagaagtccaacaccatcctgggcagccaggaaggcaacaccatgaagaccaacgacacctacatgaagttcagctggctgaccgtgcccgagaagtccctggacaaagaacacagatgcatcgtgcggcacgaaaacaacaagaacggcgtggaccaggaaatcatcttcccacccatcaagaccgatgtgattacaatggaccccaaggacaactgctccaaggacgccaacgataccctgctgctccagctgaccaacaccagcgcctactacatgtacttgttgctgctgctgaagtccgtggtgtacttcgccatcatcacatgctgcctgctgcggagaaccgccttctgctgcaacggcgagaagtct

SEQ ID NO: 7636 - DNA, 2589 bp, synthetic construct
  source 1..2589: mol_type = other DNA
atggccttaccagtgaccgccttgctcctgccgctggccttgctgctccacgccgccaggccggaagtgcagctggttgaatctggcggaggactggttcagcctggcggatctctgagactgtcttgtgccgccagcggcttcagcttcagcgacttttggatgagctgggtccgacaggcccctggcaaaggacttgaatgggtcgccacaatcagccaggccggcagcgagaaggactacgtggactctgtgaagggcagattcaccatcagccgggacaacgccaagaagtccctgtacctccagatgaacagcctgagagccgaggacaccgccgtgtactattgtgcctctggcgtgtacagcttcgactacagaggccagggcaccctggtcacagtctcttctggtaccggcggaggcggatctggcggcggaggtagcggtggcggaggatctgaattcgacgacatcgtgctgacacagacaccagccacactgagcgtgacacctggcgattctgtgtccctgagctgtagagccagccagagcatcagcaacaacctgcactggtatcagcagaagtcccacgagagccccagactgctgattaagaacgccagccagtctatcagcggcatccccagcaagtttagcggctctggcagcggcaccgacttcaccctgagaatcaacagcgtggaaaccgaggacttcgggatgtacttctgccagcagagcaatagctggccctacacatttggctccggcaccaagctggaaatcaaactcgagatccagaaccctgatcctgccgtgtaccagctgcgggatagcaagagcagcgacaagagcgtgtgtctgttcaccgacttcgacagccagaccaacgtgtcccagagcaaggactccgacgtgtacatcaccgataagtgcgtgctggacatgcggagcatggacttcaagagcaactccgccgtggcctggtccaacaagtccgatttcgcctgcgccaacgccttcaacaacagcattatccccgaggacacattcttcccaagccccgagagcagcgactccaccgaccacgtgaagcccaaagagacagagaacaccaagcagcccagcaagagctgccacaagcccaaggccatcgtgcacaccgagaaagtgaacatgatgagcctgaccgtgctgggcctgcggatgctgttcgccaaaaccgtggccgtgaacttcctgctgaccgccaagctgttcttcctccgcgccaagagaagcggatctggcgtgaagcagaccctgaatttcgacctgctgaagctggctggcgacgtggaatccaacccaggccctactagtatggactggatttggcgcatccttttccttgtcggcgctgctaccggcgcgcattccttcgaacaagtgaagctgcaacagagcggacccgagctggttaagccaggcgcttccgtgaagattagctgcaaggccagcggctacagcttcaccggctactacatgcactgggtcaagcagagccacggcaacatcctggactggatcggctacatctacccctacaacggcgtgtccagctacaaccagaagttcaagggcaaagccactctgaccgtggacaagagcagcagcaccgcctacatggaactgagaagcctgaccagcgaggacagcgccgtgtactattgtgccagagagcggggcctgtaccagctcagagcaatggattattggggccagggcaccagcgtgaccgtttcttctacgcgtgaggacctgaagaacgtgttcccacctgaggtggccgtgttcgagcctagcgaggccgagatcagccacacccagaaagccaccctcgtgtgcctggctaccggcttctaccccgaccatgtggaactgtcttggtgggtcaacggcaaagaggtgcacagcggcgtgtgtaccgacccccagccactgaaagaacagcccgccctgaacgacagccggtactgcctgagcagcagactgagagtgtccgccaccttctggcagaacccccggaaccacttcagatgccaggtgcagttctacggcctgagcgagaacgacgagtggacccaggacagagccaagcccgtgacccagatcgtgtctgccgaagcctggggcagagccgatgatgtgattaagatccactggcaggaaaagaagtccaacaccatcctgggcagccaggaaggcaacaccatgaagaccaacgacacctacatgaagttcagctggctgaccgtgcccgagaagtccctggacaaagaacacagatgcatcgtgcggcacgaaaacaacaagaacggcgtggaccaggaaatcatcttcccacccatcaagaccgatgtgattacaatggaccccaaggacaactgctccaaggacgccaacgataccctgctgctccagctgaccaacaccagcgcctactacatgtacttgttgctgctgctgaagtccgtggtgtacttcgccatcatcacatgctgcctgctgcggagaaccgccttctgctgcaacggcgagaagtct

SEQ ID NO: 7637 - DNA, 2562 bp, synthetic construct
  source 1..2562: mol_type = other DNA
atggccttaccagtgaccgccttgctcctgccgctggccttgctgctccacgccgccaggccggaagtgcagctggttgaatctggcggaggactggttcagcctggcggatctctgagactgtcttgtgccgccagcggcttcagcttcagcgacttttggatgagctgggtccgacaggcccctggcaaaggacttgaatgggtcgccacaatcagccaggccggcagcgagaaggactacgtggactctgtgaagggcagattcaccatcagccgggacaacgccaagaagtccctgtacctccagatgaacagcctgagagccgaggacaccgccgtgtactattgtgcctctggcgtgtacagcttcgactacagaggccagggcaccctggtcacagtctcttctggtaccggcggaggcggatctggcggcggaggtagcggtggcggaggatctgaattcgacgacatcgtgatgacacagacccctgccatcatgagcgcctctccaggccagaaagtgaccatcacatgtagcgccagcagcagcgtgaactacatgcactggtatcagcagaagctgggcagcagccccaagctgtggatctacgataccagcaaactggcccctggcgtgccagccagattttctggttctggcagcggcaccagctacagcctgacaatcagcagcatggaagccgaggatgccgccagctacttctgccatcagtggtctagctacccctacacctttggctccggcaccaagctggaaatcaaactcgagatccagaaccctgatcctgccgtgtaccagctgcgggatagcaagagcagcgacaagagcgtgtgtctgttcaccgacttcgacagccagaccaacgtgtcccagagcaaggactccgacgtgtacatcaccgataagtgcgtgctggacatgcggagcatggacttcaagagcaactccgccgtggcctggtccaacaagtccgatttcgcctgcgccaacgccttcaacaacagcattatccccgaggacacattcttcccaagccccgagagcagcgactccaccgaccacgtgaagcccaaagagacagagaacaccaagcagcccagcaagagctgccacaagcccaaggccatcgtgcacaccgagaaagtgaacatgatgagcctgaccgtgctgggcctgcggatgctgttcgccaaaaccgtggccgtgaacttcctgctgaccgccaagctgttcttcctccgcgccaagagaagcggatctggcgtgaagcagaccctgaatttcgacctgctgaagctggctggcgacgtggaatccaacccaggccctactagtatggactggatttggcgcatccttttccttgtcggcgctgctaccggcgcgcattccttcgaagaagttcagctccaagagtctggccccgacctggtcaagcctagccaaagcctgagcctgacctgtaccgtgaccggctacagcatcacaagcggctatggatggcactggatcagacagttccccggcaacaaactggaatggatgggctacatccactacagcggcagcaccacctacaatcccagcctgaagtcccggatcagcatcagcagagacaccagcaagaaccagttcttcctgcaactgaacagcgtgaccaccgaggacaccgccacctactattgtgctcggagcctgagatattggggccagggcacaaccctgaccgtgtcatctacgcgtgaggacctgaagaacgtgttcccacctgaggtggccgtgttcgagcctagcgaggccgagatcagccacacccagaaagccaccctcgtgtgcctggctaccggcttctaccccgaccatgtggaactgtcttggtgggtcaacggcaaagaggtgcacagcggcgtgtgtaccgacccccagccactgaaagaacagcccgccctgaacgacagccggtactgcctgagcagcagactgagagtgtccgccaccttctggcagaacccccggaaccacttcagatgccaggtgcagttctacggcctgagcgagaacgacgagtggacccaggacagagccaagcccgtgacccagatcgtgtctgccgaagcctggggcagagccgatgatgtgattaagatccactggcaggaaaagaagtccaacaccatcctgggcagccaggaaggcaacaccatgaagaccaacgacacctacatgaagttcagctggctgaccgtgcccgagaagtccctggacaaagaacacagatgcatcgtgcggcacgaaaacaacaagaacggcgtggaccaggaaatcatcttcccacccatcaagaccgatgtgattacaatggaccccaaggacaactgctccaaggacgccaacgataccctgctgctccagctgaccaacaccagcgcctactacatgtacttgttgctgctgctgaagtccgtggtgtacttcgccatcatcacatgctgcctgctgcggagaaccgccttctgctgcaacggcgagaagtct

SEQ ID NO: 7638 - DNA, 2571 bp, synthetic construct
  source 1..2571: mol_type = other DNA
atggccttaccagtgaccgccttgctcctgccgctggccttgctgctccacgccgccaggccggaagtgcagctggttgaatctggcggaggactggttcagcctggcggatctctgagactgtcttgtgccgccagcggcttcagcttcagcgacttttggatgagctgggtccgacaggcccctggcaaaggacttgaatgggtcgccacaatcagccaggccggcagcgagaaggactacgtggactctgtgaagggcagattcaccatcagccgggacaacgccaagaagtccctgtacctccagatgaacagcctgagagccgaggacaccgccgtgtactattgtgcctctggcgtgtacagcttcgactacagaggccagggcaccctggtcacagtctcttctggtaccggcggaggcggatctggcggcggaggtagcggtggcggaggatctgaattcgacgacatccagatgacacagagccctagcagcctgtctgccagcgtgggagacagagtgaccatcacctgtagcgccaccagcagcatcagctacatgcactggtatcagcagaagcccggcaaggcccctaaaggctggatctacgataccagcaaactggcccacggcgtgcccagcagattttctggttctggcagcggcaccgacttcaccctgacaatatctagcctccagcctgaggacttcgccacctactactgccaccagagaagaagctaccccttcaccttcggccagggcaccaaggtggaaatcaaactcgagatccagaaccctgatcctgccgtgtaccagctgcgggatagcaagagcagcgacaagagcgtgtgtctgttcaccgacttcgacagccagaccaacgtgtcccagagcaaggactccgacgtgtacatcaccgataagtgcgtgctggacatgcggagcatggacttcaagagcaactccgccgtggcctggtccaacaagtccgatttcgcctgcgccaacgccttcaacaacagcattatccccgaggacacattcttcccaagccccgagagcagcgactccaccgaccacgtgaagcccaaagagacagagaacaccaagcagcccagcaagagctgccacaagcccaaggccatcgtgcacaccgagaaagtgaacatgatgagcctgaccgtgctgggcctgcggatgctgttcgccaaaaccgtggccgtgaacttcctgctgaccgccaagctgttcttcctccgcgccaagagaagcggatctggcgtgaagcagaccctgaatttcgacctgctgaagctggctggcgacgtggaatccaacccaggccctactagtatggactggatttggcgcatccttttccttgtcggcgctgctaccggcgcgcattccttcgaagaagtgcaactggttcagagcggagccgaagtgaagaaacctggggcctctgtgaaggtgtcctgcaaggcttccggctacacctttaccaatttctggattcactgggtccgacaggctccaggccaaggactggaatggatcggagagatcgaccccagcgacagctacaccaactacaaccagaaattcaaaggccgggtcaccatcaccagagacaccagcacaagcaccgcctacctggaactgagcagcctgagaagcgaggacaccgccgtgtactactgcgccagggaaatcaccaccgtggattattggggccagggaaccctggtcaccgtgtcatctacgcgtgaggacctgaagaacgtgttcccacctgaggtggccgtgttcgagcctagcgaggccgagatcagccacacccagaaagccaccctcgtgtgcctggctaccggcttctaccccgaccatgtggaactgtcttggtgggtcaacggcaaagaggtgcacagcggcgtgtgtaccgacccccagccactgaaagaacagcccgccctgaacgacagccggtactgcctgagcagcagactgagagtgtccgccaccttctggcagaacccccggaaccacttcagatgccaggtgcagttctacggcctgagcgagaacgacgagtggacccaggacagagccaagcccgtgacccagatcgtgtctgccgaagcctggggcagagccgatgatgtgattaagatccactggcaggaaaagaagtccaacaccatcctgggcagccaggaaggcaacaccatgaagaccaacgacacctacatgaagttcagctggctgaccgtgcccgagaagtccctggacaaagaacacagatgcatcgtgcggcacgaaaacaacaagaacggcgtggaccaggaaatcatcttcccacccatcaagaccgatgtgattacaatggaccccaaggacaactgctccaaggacgccaacgataccctgctgctccagctgaccaacaccagcgcctactacatgtacttgttgctgctgctgaagtccgtggtgtacttcgccatcatcacatgctgcctgctgcggagaaccgccttctgctgcaacggcgagaagtct

SEQ ID NO: 7639 - DNA, 2592 bp, synthetic construct
  source 1..2592: mol_type = other DNA
atggccttaccagtgaccgccttgctcctgccgctggccttgctgctccacgccgccaggccggaagtgcagctggttgaatctggcggaggactggttcagcctggcggatctctgagactgtcttgtgccgccagcggcttcagcttcagcgacttttggatgagctgggtccgacaggcccctggcaaaggacttgaatgggtcgccacaatcagccaggccggcagcgagaaggactacgtggactctgtgaagggcagattcaccatcagccgggacaacgccaagaagtccctgtacctccagatgaacagcctgagagccgaggacaccgccgtgtactattgtgcctctggcgtgtacagcttcgactacagaggccagggcaccctggtcacagtctcttctggtaccggcggaggcggatctggcggcggaggtagcggtggcggaggatctgaattcgacgacatccagatgacacagagccctagcagcctgtctgccagcgtgggagacagagtgaccatcacatgcaaggccagccagggcttcaacaaatacgtggcctggtatcagcagaagcccggcaaggctcctaagctgctgatctactacaccagcacactccagcctggcgtgcccagcagattttctggctctggcagcggcagagactacaccctgacaatatccagcctccagccagaggacttcgccacctactactgtctccagtacggcaacctgctgtacgcctttggacagggcaccaaggtggaaatcaagagactcgagatccagaaccctgatcctgccgtgtaccagctgcgggatagcaagagcagcgacaagagcgtgtgtctgttcaccgacttcgacagccagaccaacgtgtcccagagcaaggactccgacgtgtacatcaccgataagtgcgtgctggacatgcggagcatggacttcaagagcaactccgccgtggcctggtccaacaagtccgatttcgcctgcgccaacgccttcaacaacagcattatccccgaggacacattcttcccaagccccgagagcagcgactccaccgaccacgtgaagcccaaagagacagagaacaccaagcagcccagcaagagctgccacaagcccaaggccatcgtgcacaccgagaaagtgaacatgatgagcctgaccgtgctgggcctgcggatgctgttcgccaaaaccgtggccgtgaacttcctgctgaccgccaagctgttcttcctccgcgccaagagaagcggatctggcgtgaagcagaccctgaatttcgacctgctgaagctggctggcgacgtggaatccaacccaggccctactagtatggactggatttggcgcatccttttccttgtcggcgctgctaccggcgcgcattccttcgaagaagttcagcttgtgcagagcggagccgaagtgaagaaacctggggcctctgtgaaggtgtcctgcaaagccagcggctacacctttaccagctactggatcggctgggtccgacaggctcctggacaaggactggaatggatcggcgacatctatcccggcggaggctacaccaactacaacgagaagttcaagggccgcgtgacaatcaccagagacacctctacaagcaccgcctacctggaactgagcagcctgagaagcgaggacaccgccgtgtactactgcgccagactggatggcagcagctacagaggcgctatggattcttggggccagggcacactggtcaccgtttcttctacgcgtgaggacctgaagaacgtgttcccacctgaggtggccgtgttcgagcctagcgaggccgagatcagccacacccagaaagccaccctcgtgtgcctggctaccggcttctaccccgaccatgtggaactgtcttggtgggtcaacggcaaagaggtgcacagcggcgtgtgtaccgacccccagccactgaaagaacagcccgccctgaacgacagccggtactgcctgagcagcagactgagagtgtccgccaccttctggcagaacccccggaaccacttcagatgccaggtgcagttctacggcctgagcgagaacgacgagtggacccaggacagagccaagcccgtgacccagatcgtgtctgccgaagcctggggcagagccgatgatgtgattaagatccactggcaggaaaagaagtccaacaccatcctgggcagccaggaaggcaacaccatgaagaccaacgacacctacatgaagttcagctggctgaccgtgcccgagaagtccctggacaaagaacacagatgcatcgtgcggcacgaaaacaacaagaacggcgtggaccaggaaatcatcttcccacccatcaagaccgatgtgattacaatggaccccaaggacaactgctccaaggacgccaacgataccctgctgctccagctgaccaacaccagcgcctactacatgtacttgttgctgctgctgaagtccgtggtgtacttcgccatcatcacatgctgcctgctgcggagaaccgccttctgctgcaacggcgagaagtct

SEQ ID NO: 7640 - DNA, 2580 bp, synthetic construct
  source 1..2580: mol_type = other DNA
atggccttaccagtgaccgccttgctcctgccgctggccttgctgctccacgccgccaggccggaagtgcagctggttgaatctggcggaggactggttcagcctggcggatctctgagactgtcttgtgccgccagcggcttcagcttcagcgacttttggatgagctgggtccgacaggcccctggcaaaggacttgaatgggtcgccacaatcagccaggccggcagcgagaaggactacgtggactctgtgaagggcagattcaccatcagccgggacaacgccaagaagtccctgtacctccagatgaacagcctgagagccgaggacaccgccgtgtactattgtgcctctggcgtgtacagcttcgactacagaggccagggcaccctggtcacagtctcttctggtaccggcggaggcggatctggcggcggaggtagcggtggcggaggatctgaattcgacgacatccagatgacacagagccctagcagcctgtctgccagcgtgggagacagagtgaccatcacctgtagagccagccaggacatccggtactacctgaactggtatcagcagaagcccggcaaggcccctaagctgctgatctatgtggcctccagcctccagagcggagtgccttctagattttctggcagcggctccggcaccgagtttaccctgacagtgtctagcttgcagcccgaggacttcgccacctactactgcctgcaagtgtacagcacccctcggacctttggacagggcaccaaggtggaaatcaaactcgagatccagaaccctgatcctgccgtgtaccagctgcgggatagcaagagcagcgacaagagcgtgtgtctgttcaccgacttcgacagccagaccaacgtgtcccagagcaaggactccgacgtgtacatcaccgataagtgcgtgctggacatgcggagcatggacttcaagagcaactccgccgtggcctggtccaacaagtccgatttcgcctgcgccaacgccttcaacaacagcattatccccgaggacacattcttcccaagccccgagagcagcgactccaccgaccacgtgaagcccaaagagacagagaacaccaagcagcccagcaagagctgccacaagcccaaggccatcgtgcacaccgagaaagtgaacatgatgagcctgaccgtgctgggcctgcggatgctgttcgccaaaaccgtggccgtgaacttcctgctgaccgccaagctgttcttcctccgcgccaagagaagcggatctggcgtgaagcagaccctgaatttcgacctgctgaagctggctggcgacgtggaatccaacccaggccctactagtatggactggatttggcgcatccttttccttgtcggcgctgctaccggcgcgcattccttcgaagaagtgcagcttgttgaatctggcggcggactggctaagcctggcggatctctgagactgtcttgtgccgccagcggcttccggttcaccttcaacaactactacatggactgggtccgacaggcccctggacaaggacttgaatgggtgtccagaatcagcagcagcggcgaccctacttggtacgccgattctgtgaagggcagattcaccatcagcagagagaacgccaagaacaccctgttcctccagatgaactccctgagagccgaggacaccgccgtgtactattgtgcctctctgaccaccggcagcgattcttggggacagggcgtgctggttaccgtgtcatctacgcgtgaggacctgaagaacgtgttcccacctgaggtggccgtgttcgagcctagcgaggccgagatcagccacacccagaaagccaccctcgtgtgcctggctaccggcttctaccccgaccatgtggaactgtcttggtgggtcaacggcaaagaggtgcacagcggcgtgtgtaccgacccccagccactgaaagaacagcccgccctgaacgacagccggtactgcctgagcagcagactgagagtgtccgccaccttctggcagaacccccggaaccacttcagatgccaggtgcagttctacggcctgagcgagaacgacgagtggacccaggacagagccaagcccgtgacccagatcgtgtctgccgaagcctggggcagagccgatgatgtgattaagatccactggcaggaaaagaagtccaacaccatcctgggcagccaggaaggcaacaccatgaagaccaacgacacctacatgaagttcagctggctgaccgtgcccgagaagtccctggacaaagaacacagatgcatcgtgcggcacgaaaacaacaagaacggcgtggaccaggaaatcatcttcccacccatcaagaccgatgtgattacaatggaccccaaggacaactgctccaaggacgccaacgataccctgctgctccagctgaccaacaccagcgcctactacatgtacttgttgctgctgctgaagtccgtggtgtacttcgccatcatcacatgctgcctgctgcggagaaccgccttctgctgcaacggcgagaagtct

SEQ ID NO: 7641 - DNA, 2580 bp, synthetic construct
  source 1..2580: mol_type = other DNA
atggccttaccagtgaccgccttgctcctgccgctggccttgctgctccacgccgccaggccggaagtgcagctggttgaatctggcggaggactggttcagcctggcggatctctgagactgtcttgtgccgccagcggcttcagcttcagcgacttttggatgagctgggtccgacaggcccctggcaaaggacttgaatgggtcgccacaatcagccaggccggcagcgagaaggactacgtggactctgtgaagggcagattcaccatcagccgggacaacgccaagaagtccctgtacctccagatgaacagcctgagagccgaggacaccgccgtgtactattgtgcctctggcgtgtacagcttcgactacagaggccagggcaccctggtcacagtctcttctggtaccggcggaggcggatctggcggcggaggtagcggtggcggaggatctgaattcgagatcgtgatgacacagagccccgccacactgagtgtgtctccaggcgaaagagccacactgtcctgtagagccagccagagcgtgtccagaaacctggcctggtatcagcagaagcctggacaggctccccggctgttgatctacggcgcttctacaagagccaccggcattcccgccagattttctggctctggcagcggcaccgagttcaccctgacaatcggaagcctccagagcgaggacttcgccgtgtactactgccagcagtacaagacctggcctcggacctttggacagggcaccaacgtggaaatcaaactcgagatccagaaccctgatcctgccgtgtaccagctgcgggatagcaagagcagcgacaagagcgtgtgtctgttcaccgacttcgacagccagaccaacgtgtcccagagcaaggactccgacgtgtacatcaccgataagtgcgtgctggacatgcggagcatggacttcaagagcaactccgccgtggcctggtccaacaagtccgatttcgcctgcgccaacgccttcaacaacagcattatccccgaggacacattcttcccaagccccgagagcagcgactccaccgaccacgtgaagcccaaagagacagagaacaccaagcagcccagcaagagctgccacaagcccaaggccatcgtgcacaccgagaaagtgaacatgatgagcctgaccgtgctgggcctgcggatgctgttcgccaaaaccgtggccgtgaacttcctgctgaccgccaagctgttcttcctccgcgccaagagaagcggatctggcgtgaagcagaccctgaatttcgacctgctgaagctggctggcgacgtggaatccaacccaggccctactagtatggactggatttggcgcatccttttccttgtcggcgctgctaccggcgcgcattccttcgaacaagttcagctgcaacaatggggagccggcctgctgaagcctagcgaaacactgtctctgacctgcgccgtgttcggcggctctttcagcggctactactggtcctggatcagacagcctcctggcaaaggactggaatggatcggcgagatcaaccaccggggcaacaccaacgacaaccccagcctgaaaagcagagtgaccatcagcgtggacaccagcaagaaccagttcgccctgaagctgagcagcgtgacagccgctgataccgccgtgtattattgcgccagagagcggggctacacctacggcaatttcgatcactggggccagggcaccctggtcacagtttcttctacgcgtgaggacctgaagaacgtgttcccacctgaggtggccgtgttcgagcctagcgaggccgagatcagccacacccagaaagccaccctcgtgtgcctggctaccggcttctaccccgaccatgtggaactgtcttggtgggtcaacggcaaagaggtgcacagcggcgtgtgtaccgacccccagccactgaaagaacagcccgccctgaacgacagccggtactgcctgagcagcagactgagagtgtccgccaccttctggcagaacccccggaaccacttcagatgccaggtgcagttctacggcctgagcgagaacgacgagtggacccaggacagagccaagcccgtgacccagatcgtgtctgccgaagcctggggcagagccgatgatgtgattaagatccactggcaggaaaagaagtccaacaccatcctgggcagccaggaaggcaacaccatgaagaccaacgacacctacatgaagttcagctggctgaccgtgcccgagaagtccctggacaaagaacacagatgcatcgtgcggcacgaaaacaacaagaacggcgtggaccaggaaatcatcttcccacccatcaagaccgatgtgattacaatggaccccaaggacaactgctccaaggacgccaacgataccctgctgctccagctgaccaacaccagcgcctactacatgtacttgttgctgctgctgaagtccgtggtgtacttcgccatcatcacatgctgcctgctgcggagaaccgccttctgctgcaacggcgagaagtct

SEQ ID NO: 7642 - DNA, 2583 bp, synthetic construct
  source 1..2583: mol_type = other DNA
atggccttaccagtgaccgccttgctcctgccgctggccttgctgctccacgccgccaggccggaagtgcagctggttgaatctggcggaggactggttcagcctggcggatctctgagactgtcttgtgccgccagcggcttcagcttcagcgacttttggatgagctgggtccgacaggcccctggcaaaggacttgaatgggtcgccacaatcagccaggccggcagcgagaaggactacgtggactctgtgaagggcagattcaccatcagccgggacaacgccaagaagtccctgtacctccagatgaacagcctgagagccgaggacaccgccgtgtactattgtgcctctggcgtgtacagcttcgactacagaggccagggcaccctggtcacagtctcttctggtaccggcggaggcggatctggcggcggaggtagcggtggcggaggatctgaattcgagatcgtgatgacccctagcagcgccacactgagtgtgtctccaggcgaaagagccacactgtcctgtagagccagccagagcgtgtccagaaacctggcctggtatcagcagaagcctggacaggctccccggctgttgatctacggcgcttctacaagagccaccggcattcccgccagattttctggctctggcagcggcaccgagttcaccctgacaatctctagcctccagagcgaggacttcgccgtgtactactgccaccagtacagcaactggatgtgcagcttcggccagggcaccaagctggaaatcaaactcgagatccagaaccctgatcctgccgtgtaccagctgcgggatagcaagagcagcgacaagagcgtgtgtctgttcaccgacttcgacagccagaccaacgtgtcccagagcaaggactccgacgtgtacatcaccgataagtgcgtgctggacatgcggagcatggacttcaagagcaactccgccgtggcctggtccaacaagtccgatttcgcctgcgccaacgccttcaacaacagcattatccccgaggacacattcttcccaagccccgagagcagcgactccaccgaccacgtgaagcccaaagagacagagaacaccaagcagcccagcaagagctgccacaagcccaaggccatcgtgcacaccgagaaagtgaacatgatgagcctgaccgtgctgggcctgcggatgctgttcgccaaaaccgtggccgtgaacttcctgctgaccgccaagctgttcttcctccgcgccaagagaagcggatctggcgtgaagcagaccctgaatttcgacctgctgaagctggctggcgacgtggaatccaacccaggccctactagtatggactggatttggcgcatccttttccttgtcggcgctgctaccggcgcgcattccttcgaagaagttcagctccttgagtcaggtggcggcctggttcaacctggcggatctctgagactgagctgtgccgccagcggcttcacctttagcagatacgccatgaactgggtccgacaggcccctggcaaaggactggaatgggtgtccggcatctctggaagcggcggcagaacctactacgccgattctgtgaagggcagattcaccatcagccgggacaacagcaagaacaccctgtacctccagatgaacagcctgagagccgaggacacagccgtgtattattgcgccaaggaccgggacttttggagcggcccttttgactattggggccagggaaccctggtcaccgttagctctacgcgtgaggacctgaagaacgtgttcccacctgaggtggccgtgttcgagcctagcgaggccgagatcagccacacccagaaagccaccctcgtgtgcctggctaccggcttctaccccgaccatgtggaactgtcttggtgggtcaacggcaaagaggtgcacagcggcgtgtgtaccgacccccagccactgaaagaacagcccgccctgaacgacagccggtactgcctgagcagcagactgagagtgtccgccaccttctggcagaacccccggaaccacttcagatgccaggtgcagttctacggcctgagcgagaacgacgagtggacccaggacagagccaagcccgtgacccagatcgtgtctgccgaagcctggggcagagccgatgatgtgattaagatccactggcaggaaaagaagtccaacaccatcctgggcagccaggaaggcaacaccatgaagaccaacgacacctacatgaagttcagctggctgaccgtgcccgagaagtccctggacaaagaacacagatgcatcgtgcggcacgaaaacaacaagaacggcgtggaccaggaaatcatcttcccacccatcaagaccgatgtgattacaatggaccccaaggacaactgctccaaggacgccaacgataccctgctgctccagctgaccaacaccagcgcctactacatgtacttgttgctgctgctgaagtccgtggtgtacttcgccatcatcacatgctgcctgctgcggagaaccgccttctgctgcaacggcgagaagtct

SEQ ID NO: 7643 - DNA, 2598 bp, synthetic construct
  source 1..2598: mol_type = other DNA
atggccttaccagtgaccgccttgctcctgccgctggccttgctgctccacgccgccaggccggaagtgcagctggttgaatctggcggaggactggttcagcctggcggatctctgagactgtcttgtgccgccagcggcttcagcttcagcgacttttggatgagctgggtccgacaggcccctggcaaaggacttgaatgggtcgccacaatcagccaggccggcagcgagaaggactacgtggactctgtgaagggcagattcaccatcagccgggacaacgccaagaagtccctgtacctccagatgaacagcctgagagccgaggacaccgccgtgtactattgtgcctctggcgtgtacagcttcgactacagaggccagggcaccctggtcacagtctcttctggtaccggcggaggcggatctggcggcggaggtagcggtggcggaggatctgaattcgacatccagatgacccagagccccagcagcctgtctgccagcgtgggcgacagagtgaccatcacatgcaaggccagcaagaacatcagaagctacctggcctggtatcagcagaagcccggcaaggcccccaagctgctgatctacagcggcagcacactgcacagcggcgtgcccagcagattttccggctctggcagcggcaccgacttcaccctgaccatctctagcctccagcccgaggacttcgccacctactactgccagcagcaccacgagtaccccctgacattcggccagggcaccaaggtggaaatcaagagactcgagatccagaaccctgatcctgccgtgtaccagctgcgggatagcaagagcagcgacaagagcgtgtgtctgttcaccgacttcgacagccagaccaacgtgtcccagagcaaggactccgacgtgtacatcaccgataagtgcgtgctggacatgcggagcatggacttcaagagcaactccgccgtggcctggtccaacaagtccgatttcgcctgcgccaacgccttcaacaacagcattatccccgaggacacattcttcccaagccccgagagcagcgactccaccgaccacgtgaagcccaaagagacagagaacaccaagcagcccagcaagagctgccacaagcccaaggccatcgtgcacaccgagaaagtgaacatgatgagcctgaccgtgctgggcctgcggatgctgttcgccaaaaccgtggccgtgaacttcctgctgaccgccaagctgttcttcctccgcgccaagagaagcggatctggcgtgaagcagaccctgaatttcgacctgctgaagctggctggcgacgtggaatccaacccaggccctactagtatggactggatttggcgcatccttttccttgtcggcgctgctaccggcgcgcattccttcgaacaggtgcaactccaggaatctggccccggactcgtgaagcccagcgagacactgagcctgacctgtaccgtgtccggctacaccatcaccagcggctacgactggtcctggatcagacagcctcctggcaagggcctggaatggatcggctacatcaactacggcggctccaccaactacaagcccagcctgggaagccgcgtgacaatcagcgtggacacctccaagaaccagttcagcctgaagctgagcagcgtgacagccgccgataccgccgtgtactactgcgcccggtacaacgagtacaagagctacatctacgattggtacttcgacttctggggccagggaaccctcgtgaccgtgtctagtacgcgtgaggacctgaagaacgtgttcccacctgaggtggccgtgttcgagcctagcgaggccgagatcagccacacccagaaagccaccctcgtgtgcctggctaccggcttctaccccgaccatgtggaactgtcttggtgggtcaacggcaaagaggtgcacagcggcgtgtgtaccgacccccagccactgaaagaacagcccgccctgaacgacagccggtactgcctgagcagcagactgagagtgtccgccaccttctggcagaacccccggaaccacttcagatgccaggtgcagttctacggcctgagcgagaacgacgagtggacccaggacagagccaagcccgtgacccagatcgtgtctgccgaagcctggggcagagccgatgatgtgattaagatccactggcaggaaaagaagtccaacaccatcctgggcagccaggaaggcaacaccatgaagaccaacgacacctacatgaagttcagctggctgaccgtgcccgagaagtccctggacaaagaacacagatgcatcgtgcggcacgaaaacaacaagaacggcgtggaccaggaaatcatcttcccacccatcaagaccgatgtgattacaatggaccccaaggacaactgctccaaggacgccaacgataccctgctgctccagctgaccaacaccagcgcctactacatgtacttgttgctgctgctgaagtccgtggtgtacttcgccatcatcacatgctgcctgctgcggagaaccgccttctgctgcaacggcgagaagtct

SEQ ID NO: 7644 - DNA, 2604 bp, synthetic construct
  source 1..2604: mol_type = other DNA
atggccttaccagtgaccgccttgctcctgccgctggccttgctgctccacgccgccaggccggaagtgcagctggttgaatctggcggaggactggttcagcctggcggatctctgagactgtcttgtgccgccagcggcttcagcttcagcgacttttggatgagctgggtccgacaggcccctggcaaaggacttgaatgggtcgccacaatcagccaggccggcagcgagaaggactacgtggactctgtgaagggcagattcaccatcagccgggacaacgccaagaagtccctgtacctccagatgaacagcctgagagccgaggacaccgccgtgtactattgtgcctctggcgtgtacagcttcgactacagaggccagggcaccctggtcacagtctcttctggtaccggcggaggcggatctggcggcggaggtagcggtggcggaggatctgaattccagtctgtggtcacacagcctccatccgtgtctgctgcccctggacagaaagtgaccatctcctgtagcggcagcagcagcaacatcggcaacaactacgtgtcctggtatcagcagctccccggcacagctcccaaactgctgatctacgacaacaacaagcggcccagcggcatccccgatagattttctggcagcaagagcggcaccagcgccacactgggaattaccggacttcagacaggcgacgaggccgactactactgtggcacatgggatggcagcctgtacaccatgcttttcggcggaggcaccaagctgacagtgcttctcgagatccagaaccctgatcctgccgtgtaccagctgcgggatagcaagagcagcgacaagagcgtgtgtctgttcaccgacttcgacagccagaccaacgtgtcccagagcaaggactccgacgtgtacatcaccgataagtgcgtgctggacatgcggagcatggacttcaagagcaactccgccgtggcctggtccaacaagtccgatttcgcctgcgccaacgccttcaacaacagcattatccccgaggacacattcttcccaagccccgagagcagcgactccaccgaccacgtgaagcccaaagagacagagaacaccaagcagcccagcaagagctgccacaagcccaaggccatcgtgcacaccgagaaagtgaacatgatgagcctgaccgtgctgggcctgcggatgctgttcgccaaaaccgtggccgtgaacttcctgctgaccgccaagctgttcttcctccgcgccaagagaagcggatctggcgtgaagcagaccctgaatttcgacctgctgaagctggctggcgacgtggaatccaacccaggccctactagtatggactggatttggcgcatccttttccttgtcggcgctgctaccggcgcgcattccttcgaagaagtgcaactggtggaatctggcggcggactggttaagcctggcggatctctgagactgtcttgtgccgccagcggcttcaccttcagcaatgcctggatgagctgggttcgacaggcccctggaaaaggactggaatgggtcggattcatccggtccaaagcctacggcggcaccacagaatatgccgcctctgtgaagggcagattcaccatcagccgggacgacagcaagtctatcgcctacctccagatgaacaacctgaaaaccgaggacaccgccgtgtactactgcgccagagatggcctgtacagcagctcttggtacgacagcgattactggggccagggcacactggtcacagtgtcatctacgcgtgaggacctgaagaacgtgttcccacctgaggtggccgtgttcgagcctagcgaggccgagatcagccacacccagaaagccaccctcgtgtgcctggctaccggcttctaccccgaccatgtggaactgtcttggtgggtcaacggcaaagaggtgcacagcggcgtgtgtaccgacccccagccactgaaagaacagcccgccctgaacgacagccggtactgcctgagcagcagactgagagtgtccgccaccttctggcagaacccccggaaccacttcagatgccaggtgcagttctacggcctgagcgagaacgacgagtggacccaggacagagccaagcccgtgacccagatcgtgtctgccgaagcctggggcagagccgatgatgtgattaagatccactggcaggaaaagaagtccaacaccatcctgggcagccaggaaggcaacaccatgaagaccaacgacacctacatgaagttcagctggctgaccgtgcccgagaagtccctggacaaagaacacagatgcatcgtgcggcacgaaaacaacaagaacggcgtggaccaggaaatcatcttcccacccatcaagaccgatgtgattacaatggaccccaaggacaactgctccaaggacgccaacgataccctgctgctccagctgaccaacaccagcgcctactacatgtacttgttgctgctgctgaagtccgtggtgtacttcgccatcatcacatgctgcctgctgcggagaaccgccttctgctgcaacggcgagaagtct

SEQ ID NO: 7645 - DNA, 2619 bp, synthetic construct
  source 1..2619: mol_type = other DNA
atggccttaccagtgaccgccttgctcctgccgctggccttgctgctccacgccgccaggccggaagtgcagctggttgaatctggcggaggactggttcagcctggcggatctctgagactgtcttgtgccgccagcggcttcagcttcagcgacttttggatgagctgggtccgacaggcccctggcaaaggacttgaatgggtcgccacaatcagccaggccggcagcgagaaggactacgtggactctgtgaagggcagattcaccatcagccgggacaacgccaagaagtccctgtacctccagatgaacagcctgagagccgaggacaccgccgtgtactattgtgcctctggcgtgtacagcttcgactacagaggccagggcaccctggtcacagtctcttctggtaccggcggaggcggatctggcggcggaggtagcggtggcggaggatctgaattccagtctgtgctgacacagcctcctagtgtgtctggcgctcctggacagagagtgaccatctcttgtaccggcagcagcagcaatatcggagccggctatgacgtgcactggtatcagcagctccctggcacagcccctaaactgctgatcttcggcaacagcaacagacccagcggcgtgcccgatagattcagcggctttaagagcggcacaagcgccagcctggctatcactggactgcaagccgaggacgaggccgactacttctgccagagctacgatagcagcctgagcggcagcggagtgtttggcacaggcaccaaagtgacagtgcttggcctcgagatccagaaccctgatcctgccgtgtaccagctgcgggatagcaagagcagcgacaagagcgtgtgtctgttcaccgacttcgacagccagaccaacgtgtcccagagcaaggactccgacgtgtacatcaccgataagtgcgtgctggacatgcggagcatggacttcaagagcaactccgccgtggcctggtccaacaagtccgatttcgcctgcgccaacgccttcaacaacagcattatccccgaggacacattcttcccaagccccgagagcagcgactccaccgaccacgtgaagcccaaagagacagagaacaccaagcagcccagcaagagctgccacaagcccaaggccatcgtgcacaccgagaaagtgaacatgatgagcctgaccgtgctgggcctgcggatgctgttcgccaaaaccgtggccgtgaacttcctgctgaccgccaagctgttcttcctccgcgccaagagaagcggatctggcgtgaagcagaccctgaatttcgacctgctgaagctggctggcgacgtggaatccaacccaggccctactagtatggactggatttggcgcatccttttccttgtcggcgctgctaccggcgcgcattccttcgaacaaatgcaactggttcaaagcggcggtggcctggtgcaacctggaagaagtctgagactgagctgtgccgccagcggcttcaccttcgatgattacgccatgcactgggtccgacaggcccctggaaaaggactggaatgggtgtccggcatctcctggaatagcggctctatcggctacgccgacagcgtgaagggcagattcaccatcagccgggacaacgccaagaacagcctgtacctccagatgaactccctgagagccgaggatacagccctgtactactgcgccaaggacatccacagcggcagctactacggcctgctgtactacgctatggacgtgtggggccagggcacaaccgtgacagtttcttctacgcgtgaggacctgaagaacgtgttcccacctgaggtggccgtgttcgagcctagcgaggccgagatcagccacacccagaaagccaccctcgtgtgcctggctaccggcttctaccccgaccatgtggaactgtcttggtgggtcaacggcaaagaggtgcacagcggcgtgtgtaccgacccccagccactgaaagaacagcccgccctgaacgacagccggtactgcctgagcagcagactgagagtgtccgccaccttctggcagaacccccggaaccacttcagatgccaggtgcagttctacggcctgagcgagaacgacgagtggacccaggacagagccaagcccgtgacccagatcgtgtctgccgaagcctggggcagagccgatgatgtgattaagatccactggcaggaaaagaagtccaacaccatcctgggcagccaggaaggcaacaccatgaagaccaacgacacctacatgaagttcagctggctgaccgtgcccgagaagtccctggacaaagaacacagatgcatcgtgcggcacgaaaacaacaagaacggcgtggaccaggaaatcatcttcccacccatcaagaccgatgtgattacaatggaccccaaggacaactgctccaaggacgccaacgataccctgctgctccagctgaccaacaccagcgcctactacatgtacttgttgctgctgctgaagtccgtggtgtacttcgccatcatcacatgctgcctgctgcggagaaccgccttctgctgcaacggcgagaagtct

SEQ ID NO: 7646 - DNA, 2619 bp, synthetic construct
  source 1..2619: mol_type = other DNA
atggccttaccagtgaccgccttgctcctgccgctggccttgctgctccacgccgccaggccggaagtgcagctggttgaatctggcggaggactggttcagcctggcggatctctgagactgtcttgtgccgccagcggcttcagcttcagcgacttttggatgagctgggtccgacaggcccctggcaaaggacttgaatgggtcgccacaatcagccaggccggcagcgagaaggactacgtggactctgtgaagggcagattcaccatcagccgggacaacgccaagaagtccctgtacctccagatgaacagcctgagagccgaggacaccgccgtgtactattgtgcctctggcgtgtacagcttcgactacagaggccagggcaccctggtcacagtctcttctggtaccggcggaggcggatctggcggcggaggtagcggtggcggaggatctgaattcctgcctgttctgacacagcctccatctgcctctggcacacctggacagagagtgaccatcagctgtagcggcagaagcagcaacatcggcagcaacagcgtgaactggtacagacagcttcctggcgctgcccctaagctgctgatctacagcaacaaccagcggcctcctggcgtgccagtcagattttctggcagcaagagcggcacaagcgccagcctggctatttctggactccagtctgaggacgaggccacctactactgtgccacctgggacgacaacctgaacgtgcactacgtgttcggcaccggcaccaaagtgacagtgcttggaagtagactcgagatccagaaccctgatcctgccgtgtaccagctgcgggatagcaagagcagcgacaagagcgtgtgtctgttcaccgacttcgacagccagaccaacgtgtcccagagcaaggactccgacgtgtacatcaccgataagtgcgtgctggacatgcggagcatggacttcaagagcaactccgccgtggcctggtccaacaagtccgatttcgcctgcgccaacgccttcaacaacagcattatccccgaggacacattcttcccaagccccgagagcagcgactccaccgaccacgtgaagcccaaagagacagagaacaccaagcagcccagcaagagctgccacaagcccaaggccatcgtgcacaccgagaaagtgaacatgatgagcctgaccgtgctgggcctgcggatgctgttcgccaaaaccgtggccgtgaacttcctgctgaccgccaagctgttcttcctccgcgccaagagaagcggatctggcgtgaagcagaccctgaatttcgacctgctgaagctggctggcgacgtggaatccaacccaggccctactagtatggactggatttggcgcatccttttccttgtcggcgctgctaccggcgcgcattccttcgaacttgaaatggctcaggtgcagctggtgcagagcggagccgaagtgaagaaacctggcagcagcgtgaaggtgtcctgcaaagcttctggcggcaccttcagcagctacgccatctcttgggttcgacaggcccctggacaaggactggaatggatgggcagaatcatccccatcctgggaatcgccaactacgcccagaaattccagggcagagtgacaatcaccgccgacaagagcaccagcaccgcctacatggaactgagcagcctgagaagcgaggacaccgccgtgtactattgtgcaagaggcggctactacagccacgacatgtggagcgaagattggggccagggcacactggtcacagtgtcatctacgcgtgaggacctgaagaacgtgttcccacctgaggtggccgtgttcgagcctagcgaggccgagatcagccacacccagaaagccaccctcgtgtgcctggctaccggcttctaccccgaccatgtggaactgtcttggtgggtcaacggcaaagaggtgcacagcggcgtgtgtaccgacccccagccactgaaagaacagcccgccctgaacgacagccggtactgcctgagcagcagactgagagtgtccgccaccttctggcagaacccccggaaccacttcagatgccaggtgcagttctacggcctgagcgagaacgacgagtggacccaggacagagccaagcccgtgacccagatcgtgtctgccgaagcctggggcagagccgatgatgtgattaagatccactggcaggaaaagaagtccaacaccatcctgggcagccaggaaggcaacaccatgaagaccaacgacacctacatgaagttcagctggctgaccgtgcccgagaagtccctggacaaagaacacagatgcatcgtgcggcacgaaaacaacaagaacggcgtggaccaggaaatcatcttcccacccatcaagaccgatgtgattacaatggaccccaaggacaactgctccaaggacgccaacgataccctgctgctccagctgaccaacaccagcgcctactacatgtacttgttgctgctgctgaagtccgtggtgtacttcgccatcatcacatgctgcctgctgcggagaaccgccttctgctgcaacggcgagaagtct

SEQ ID NO: 7647 - DNA, 2601 bp, synthetic construct
  source 1..2601: mol_type = other DNA
atggccttaccagtgaccgccttgctcctgccgctggccttgctgctccacgccgccaggccggaagtgcagctggttgaatctggcggaggactggttcagcctggcggatctctgagactgtcttgtgccgccagcggcttcagcttcagcgacttttggatgagctgggtccgacaggcccctggcaaaggacttgaatgggtcgccacaatcagccaggccggcagcgagaaggactacgtggactctgtgaagggcagattcaccatcagccgggacaacgccaagaagtccctgtacctccagatgaacagcctgagagccgaggacaccgccgtgtactattgtgcctctggcgtgtacagcttcgactacagaggccagggcaccctggtcacagtctcttctggtaccggcggaggcggatctggcggcggaggtagcggtggcggaggatctgaattcgacttcgtgatgacacagagccctgatagcctggccgtgtctctcggcgagcgagtgaccatgagctgcaagtctagccagagcctgctgaacagcggcaaccagaagaactacctgacctggtatcagcagaagcccggccagcctcctaagctgctgatctactgggccagcaccagagaaagcggcgtgcccgatagattttctggctctggcagcggcaccgacttcaccctgacaatttctagcctgcaagccgaggacgtggccgtgtactactgccagaacgactacagctacccctacaccttcggccagggcaccaagctggaaatcaaactcgagatccagaaccctgatcctgccgtgtaccagctgcgggatagcaagagcagcgacaagagcgtgtgtctgttcaccgacttcgacagccagaccaacgtgtcccagagcaaggactccgacgtgtacatcaccgataagtgcgtgctggacatgcggagcatggacttcaagagcaactccgccgtggcctggtccaacaagtccgatttcgcctgcgccaacgccttcaacaacagcattatccccgaggacacattcttcccaagccccgagagcagcgactccaccgaccacgtgaagcccaaagagacagagaacaccaagcagcccagcaagagctgccacaagcccaaggccatcgtgcacaccgagaaagtgaacatgatgagcctgaccgtgctgggcctgcggatgctgttcgccaaaaccgtggccgtgaacttcctgctgaccgccaagctgttcttcctccgcgccaagagaagcggatctggcgtgaagcagaccctgaatttcgacctgctgaagctggctggcgacgtggaatccaacccaggccctactagtatggactggatttggcgcatccttttccttgtcggcgctgctaccggcgcgcattccttcgaagaagtgcaactggttcagagcggagccgagctgaagaaacctggggccagcgtgaaggtgtcctgtaaagccagcggctacacctttaccgactactacatgaaatgggtccgacaggccccaggccagggactcgaatggatcggcgatattatccccagcaacggggccaccttctacaaccagaaattcaagggccgcgtgaccatcaccgtggacaagagcacaagcaccgcctacatggaactgagcagcctgagaagcgaggacaccgccgtgtattattgcgccagaagccatctgctgcgggccagttggttcgcctattggggacagggaaccctggtcaccgttagctctacgcgtgaggacctgaagaacgtgttcccacctgaggtggccgtgttcgagcctagcgaggccgagatcagccacacccagaaagccaccctcgtgtgcctggctaccggcttctaccccgaccatgtggaactgtcttggtgggtcaacggcaaagaggtgcacagcggcgtgtgtaccgacccccagccactgaaagaacagcccgccctgaacgacagccggtactgcctgagcagcagactgagagtgtccgccaccttctggcagaacccccggaaccacttcagatgccaggtgcagttctacggcctgagcgagaacgacgagtggacccaggacagagccaagcccgtgacccagatcgtgtctgccgaagcctggggcagagccgatgatgtgattaagatccactggcaggaaaagaagtccaacaccatcctgggcagccaggaaggcaacaccatgaagaccaacgacacctacatgaagttcagctggctgaccgtgcccgagaagtccctggacaaagaacacagatgcatcgtgcggcacgaaaacaacaagaacggcgtggaccaggaaatcatcttcccacccatcaagaccgatgtgattacaatggaccccaaggacaactgctccaaggacgccaacgataccctgctgctccagctgaccaacaccagcgcctactacatgtacttgttgctgctgctgaagtccgtggtgtacttcgccatcatcacatgctgcctgctgcggagaaccgccttctgctgcaacggcgagaagtct

SEQ ID NO: 7648 - DNA, 2601 bp, synthetic construct
  source 1..2601: mol_type = other DNA
atggccttaccagtgaccgccttgctcctgccgctggccttgctgctccacgccgccaggccggaagtgcagctggttgaatctggcggaggactggttcagcctggcggatctctgagactgtcttgtgccgccagcggcttcagcttcagcgacttttggatgagctgggtccgacaggcccctggcaaaggacttgaatgggtcgccacaatcagccaggccggcagcgagaaggactacgtggactctgtgaagggcagattcaccatcagccgggacaacgccaagaagtccctgtacctccagatgaacagcctgagagccgaggacaccgccgtgtactattgtgcctctggcgtgtacagcttcgactacagaggccagggcaccctggtcacagtctcttctggtaccggcggaggcggatctggcggcggaggtagcggtggcggaggatctgaattcgacttcgtgatgacacagagccctgatagcctggccgtgtctctcggcgagcgagtgaccatgagctgcaagtctagccagagcctgctgaacagcggcaaccagaagaactacctgacctggtatcagcagaagcccggccagcctcctaagctgctgatctactgggccagcaccagagaaagcggcgtgcccgatagattttctggctctggcagcggcaccgacttcaccctgacaatttctagcctgcaagccgaggacgtggccgtgtactactgccagaacgactacagctacccctacaccttcggccagggcaccaagctggaaatcaaactcgagatccagaaccctgatcctgccgtgtaccagctgcgggatagcaagagcagcgacaagagcgtgtgtctgttcaccgacttcgacagccagaccaacgtgtcccagagcaaggactccgacgtgtacatcaccgataagtgcgtgctggacatgcggagcatggacttcaagagcaactccgccgtggcctggtccaacaagtccgatttcgcctgcgccaacgccttcaacaacagcattatccccgaggacacattcttcccaagccccgagagcagcgactccaccgaccacgtgaagcccaaagagacagagaacaccaagcagcccagcaagagctgccacaagcccaaggccatcgtgcacaccgagaaagtgaacatgatgagcctgaccgtgctgggcctgcggatgctgttcgccaaaaccgtggccgtgaacttcctgctgaccgccaagctgttcttcctccgcgccaagagaagcggatctggcgtgaagcagaccctgaatttcgacctgctgaagctggctggcgacgtggaatccaacccaggccctactagtatggactggatttggcgcatccttttccttgtcggcgctgctaccggcgcgcattccttcgaacaagtgcaactggttcagagcggagccgagctgaagaaacctggggccagcgtgaaggtgtcctgtaaagccagcggctacacctttaccgactactacatgaaatgggtccgacaggccccaggccagggactcgaatggatcggcgatattatccccagcaacggggccaccttctacaaccagaaattcaagggccgcgtgaccatcaccgtggacaagagcacaagcaccgcctacatggaactgagcagcctgagaagcgaggacaccgccgtgtattattgcgccagaagccatctgctgcgggccagttggttcgcctattggggacagggaaccctggtcaccgttagctctacgcgtgaggacctgaagaacgtgttcccacctgaggtggccgtgttcgagcctagcgaggccgagatcagccacacccagaaagccaccctcgtgtgcctggctaccggcttctaccccgaccatgtggaactgtcttggtgggtcaacggcaaagaggtgcacagcggcgtgtgtaccgacccccagccactgaaagaacagcccgccctgaacgacagccggtactgcctgagcagcagactgagagtgtccgccaccttctggcagaacccccggaaccacttcagatgccaggtgcagttctacggcctgagcgagaacgacgagtggacccaggacagagccaagcccgtgacccagatcgtgtctgccgaagcctggggcagagccgatgatgtgattaagatccactggcaggaaaagaagtccaacaccatcctgggcagccaggaaggcaacaccatgaagaccaacgacacctacatgaagttcagctggctgaccgtgcccgagaagtccctggacaaagaacacagatgcatcgtgcggcacgaaaacaacaagaacggcgtggaccaggaaatcatcttcccacccatcaagaccgatgtgattacaatggaccccaaggacaactgctccaaggacgccaacgataccctgctgctccagctgaccaacaccagcgcctactacatgtacttgttgctgctgctgaagtccgtggtgtacttcgccatcatcacatgctgcctgctgcggagaaccgccttctgctgcaacggcgagaagtct

SEQ ID NO: 7649 - DNA, 2571 bp, synthetic construct
  source 1..2571: mol_type = other DNA
atggccttaccagtgaccgccttgctcctgccgctggccttgctgctccacgccgccaggccggaagtgcagctggttgaatctggcggaggactggttcagcctggcggatctctgagactgtcttgtgccgccagcggcttcagcttcagcgacttttggatgagctgggtccgacaggcccctggcaaaggacttgaatgggtcgccacaatcagccaggccggcagcgagaaggactacgtggactctgtgaagggcagattcaccatcagccgggacaacgccaagaagtccctgtacctccagatgaacagcctgagagccgaggacaccgccgtgtactattgtgcctctggcgtgtacagcttcgactacagaggccagggcaccctggtcacagtctcttctggtaccggcggaggcggatctggcggcggaggtagcggtggcggaggatctgaattcgacgtgcagatcacacagagccctagctacctggctgcctctcctggcgagacaatcaccatcaactgtcgggccagcaagagcatcagcaaggacctggcctggtatcaagagaagcccggcaagaccaacaagctgctgatctacagcggcagcacactccagtctggcatccccagcagattttccggctctggcagcggcaccgatttcaccctgaccataagcagcctggaacctgaggacttcgccatgtactactgccagcagcacaacaagtacccctacacctttggcggaggcaccaagctggaaatcaagagactcgagatccagaaccctgatcctgccgtgtaccagctgcgggatagcaagagcagcgacaagagcgtgtgtctgttcaccgacttcgacagccagaccaacgtgtcccagagcaaggactccgacgtgtacatcaccgataagtgcgtgctggacatgcggagcatggacttcaagagcaactccgccgtggcctggtccaacaagtccgatttcgcctgcgccaacgccttcaacaacagcattatccccgaggacacattcttcccaagccccgagagcagcgactccaccgaccacgtgaagcccaaagagacagagaacaccaagcagcccagcaagagctgccacaagcccaaggccatcgtgcacaccgagaaagtgaacatgatgagcctgaccgtgctgggcctgcggatgctgttcgccaaaaccgtggccgtgaacttcctgctgaccgccaagctgttcttcctccgcgccaagagaagcggatctggcgtgaagcagaccctgaatttcgacctgctgaagctggctggcgacgtggaatccaacccaggccctactagtatggactggatttggcgcatccttttccttgtcggcgctgctaccggcgcgcattccttcgaacaagttcaactgcaacagcctggggccgagcttgttagacctggcgcttctgtgaagctgagctgcaaggccagcggctacaccttcaccagctactggatgaactgggtcaagcagcggcctgaccagggcctcgaatggatcggcagaatcgacccctacgacagcgagacacactacaaccagaagttcaaggacaaggccatcctgaccgtggacaagagcagctccaccgcctacatgcaactgagcagcctgacctctgaggatagcgccgtgtactattgcgccagaggcaactgggacgactattggggccagggcacaaccctgacagtgtctagtacgcgtgaggacctgaagaacgtgttcccacctgaggtggccgtgttcgagcctagcgaggccgagatcagccacacccagaaagccaccctcgtgtgcctggctaccggcttctaccccgaccatgtggaactgtcttggtgggtcaacggcaaagaggtgcacagcggcgtgtgtaccgacccccagccactgaaagaacagcccgccctgaacgacagccggtactgcctgagcagcagactgagagtgtccgccaccttctggcagaacccccggaaccacttcagatgccaggtgcagttctacggcctgagcgagaacgacgagtggacccaggacagagccaagcccgtgacccagatcgtgtctgccgaagcctggggcagagccgatgatgtgattaagatccactggcaggaaaagaagtccaacaccatcctgggcagccaggaaggcaacaccatgaagaccaacgacacctacatgaagttcagctggctgaccgtgcccgagaagtccctggacaaagaacacagatgcatcgtgcggcacgaaaacaacaagaacggcgtggaccaggaaatcatcttcccacccatcaagaccgatgtgattacaatggaccccaaggacaactgctccaaggacgccaacgataccctgctgctccagctgaccaacaccagcgcctactacatgtacttgttgctgctgctgaagtccgtggtgtacttcgccatcatcacatgctgcctgctgcggagaaccgccttctgctgcaacggcgagaagtct

SEQ ID NO: 7650 - DNA, 2577 bp, synthetic construct
  source 1..2577: mol_type = other DNA
atggccttaccagtgaccgccttgctcctgccgctggccttgctgctccacgccgccaggccggaagtgcagctggttgaatctggcggaggactggttcagcctggcggatctctgagactgtcttgtgccgccagcggcttcagcttcagcgacttttggatgagctgggtccgacaggcccctggcaaaggacttgaatgggtcgccacaatcagccaggccggcagcgagaaggactacgtggactctgtgaagggcagattcaccatcagccgggacaacgccaagaagtccctgtacctccagatgaacagcctgagagccgaggacaccgccgtgtactattgtgcctctggcgtgtacagcttcgactacagaggccagggcaccctggtcacagtctcttctggtaccggcggaggcggatctggcggcggaggtagcggtggcggaggatctgaattcgagatcgtgctgacacagagccctaccagcatgacagcctctccaggcgagcaagtgaccatcacctgtagagccagcagcagcatcaactacatgcactggtatcagcagaagcctggcgcaagccccagaccttggatctacgagacaagcaagctggcctccggcgtgcccgatagattttctggatctgccagcggcaccagctacagcctgaccatcaacaacatggaagccgaggacgccgccacctactactgccagcagtggaattacccctcctggacctttggcggaggcaccaagctggaacttaaactcgagatccagaaccctgatcctgccgtgtaccagctgcgggatagcaagagcagcgacaagagcgtgtgtctgttcaccgacttcgacagccagaccaacgtgtcccagagcaaggactccgacgtgtacatcaccgataagtgcgtgctggacatgcggagcatggacttcaagagcaactccgccgtggcctggtccaacaagtccgatttcgcctgcgccaacgccttcaacaacagcattatccccgaggacacattcttcccaagccccgagagcagcgactccaccgaccacgtgaagcccaaagagacagagaacaccaagcagcccagcaagagctgccacaagcccaaggccatcgtgcacaccgagaaagtgaacatgatgagcctgaccgtgctgggcctgcggatgctgttcgccaaaaccgtggccgtgaacttcctgctgaccgccaagctgttcttcctccgcgccaagagaagcggatctggcgtgaagcagaccctgaatttcgacctgctgaagctggctggcgacgtggaatccaacccaggccctactagtatggactggatttggcgcatccttttccttgtcggcgctgctaccggcgcgcattccttcgaagaagtgcagctcgttgagtctggtggcggactggttcagcctggaagaagcctgaagctgagctgtgccgccagcggcttcaccttcagcgactacaatatggcctgggtccgacaggcccctaagaaaggactggaatgggtcgccaccatcctgtacgatggcggcagaacctactaccggggcagcgtgaagggcagattcaccatcagcagagacaacgccaagagcaccctgtacctgcggatggactctctgagaagcgaggataccgccacatattactgtgccacacacagccggggcaccgactactttgattattggggccagggcgtgatggttaccgtgtctagtacgcgtgaggacctgaagaacgtgttcccacctgaggtggccgtgttcgagcctagcgaggccgagatcagccacacccagaaagccaccctcgtgtgcctggctaccggcttctaccccgaccatgtggaactgtcttggtgggtcaacggcaaagaggtgcacagcggcgtgtgtaccgacccccagccactgaaagaacagcccgccctgaacgacagccggtactgcctgagcagcagactgagagtgtccgccaccttctggcagaacccccggaaccacttcagatgccaggtgcagttctacggcctgagcgagaacgacgagtggacccaggacagagccaagcccgtgacccagatcgtgtctgccgaagcctggggcagagccgatgatgtgattaagatccactggcaggaaaagaagtccaacaccatcctgggcagccaggaaggcaacaccatgaagaccaacgacacctacatgaagttcagctggctgaccgtgcccgagaagtccctggacaaagaacacagatgcatcgtgcggcacgaaaacaacaagaacggcgtggaccaggaaatcatcttcccacccatcaagaccgatgtgattacaatggaccccaaggacaactgctccaaggacgccaacgataccctgctgctccagctgaccaacaccagcgcctactacatgtacttgttgctgctgctgaagtccgtggtgtacttcgccatcatcacatgctgcctgctgcggagaaccgccttctgctgcaacggcgagaagtct

SEQ ID NO: 7651 - DNA, 2604 bp, synthetic construct
  source 1..2604: mol_type = other DNA
atggccttaccagtgaccgccttgctcctgccgctggccttgctgctccacgccgccaggccggaagtgcagctggttgaatctggcggaggactggttcagcctggcggatctctgagactgtcttgtgccgccagcggcttcagcttcagcgacttttggatgagctgggtccgacaggcccctggcaaaggacttgaatgggtcgccacaatcagccaggccggcagcgagaaggactacgtggactctgtgaagggcagattcaccatcagccgggacaacgccaagaagtccctgtacctccagatgaacagcctgagagccgaggacaccgccgtgtactattgtgcctctggcgtgtacagcttcgactacagaggccagggcaccctggtcacagtctcttctggtaccggcggaggcggatctggcggcggaggtagcggtggcggaggatctgaattcgacatcgtgatgacacagagcccttctagcctggccgtgtctgagggcgagacagtgaccatcaactgcaagagcagccagagcttcctgtctagcggcgacggcaagaattacgtggcctggtatcagtacaagcccggacagagccccaagctgctgatctactgggccagcacaagacagagcggcgtgcccgatagattcatcggctctggcagcggcaccgacttcaccctgacaatctctacagtgcaggccgaggacctggctatctactactgccagcagtattacgacacccctctgacctttggctccggcaccaagctggaaatcaaactcgagatccagaaccctgatcctgccgtgtaccagctgcgggatagcaagagcagcgacaagagcgtgtgtctgttcaccgacttcgacagccagaccaacgtgtcccagagcaaggactccgacgtgtacatcaccgataagtgcgtgctggacatgcggagcatggacttcaagagcaactccgccgtggcctggtccaacaagtccgatttcgcctgcgccaacgccttcaacaacagcattatccccgaggacacattcttcccaagccccgagagcagcgactccaccgaccacgtgaagcccaaagagacagagaacaccaagcagcccagcaagagctgccacaagcccaaggccatcgtgcacaccgagaaagtgaacatgatgagcctgaccgtgctgggcctgcggatgctgttcgccaaaaccgtggccgtgaacttcctgctgaccgccaagctgttcttcctccgcgccaagagaagcggatctggcgtgaagcagaccctgaatttcgacctgctgaagctggctggcgacgtggaatccaacccaggccctactagtatggactggatttggcgcatccttttccttgtcggcgctgctaccggcgcgcattccttcgaagaagtgaagctgcaagagtctggccccagcctggtgcagagtagccaaacactgagcctgacctgtaccgtgtccggctttagcctgaccagctaccacatccactgggtccgacagacccctggcaaaggactggaatggatgggcgtgatgtggagcgacggcgacaccagctataacagcgccctgaagtcccggctgagcatcagcagagatacaagccagagccaggtgttcctgaagatgaacagcctccagaccgaggacaccgccacctactattgtgccagaggctactacagcagctacctgtacctttggttcgcctattggggccagggcaccctggttacagtcagctctacgcgtgaggacctgaagaacgtgttcccacctgaggtggccgtgttcgagcctagcgaggccgagatcagccacacccagaaagccaccctcgtgtgcctggctaccggcttctaccccgaccatgtggaactgtcttggtgggtcaacggcaaagaggtgcacagcggcgtgtgtaccgacccccagccactgaaagaacagcccgccctgaacgacagccggtactgcctgagcagcagactgagagtgtccgccaccttctggcagaacccccggaaccacttcagatgccaggtgcagttctacggcctgagcgagaacgacgagtggacccaggacagagccaagcccgtgacccagatcgtgtctgccgaagcctggggcagagccgatgatgtgattaagatccactggcaggaaaagaagtccaacaccatcctgggcagccaggaaggcaacaccatgaagaccaacgacacctacatgaagttcagctggctgaccgtgcccgagaagtccctggacaaagaacacagatgcatcgtgcggcacgaaaacaacaagaacggcgtggaccaggaaatcatcttcccacccatcaagaccgatgtgattacaatggaccccaaggacaactgctccaaggacgccaacgataccctgctgctccagctgaccaacaccagcgcctactacatgtacttgttgctgctgctgaagtccgtggtgtacttcgccatcatcacatgctgcctgctgcggagaaccgccttctgctgcaacggcgagaagtct

SEQ ID NO: 7652 - DNA, 2616 bp, synthetic construct
  source 1..2616: mol_type = other DNA
atggccttaccagtgaccgccttgctcctgccgctggccttgctgctccacgccgccaggccggaagtgcagctggttgaatctggcggaggactggttcagcctggcggatctctgagactgtcttgtgccgccagcggcttcagcttcagcgacttttggatgagctgggtccgacaggcccctggcaaaggacttgaatgggtcgccacaatcagccaggccggcagcgagaaggactacgtggactctgtgaagggcagattcaccatcagccgggacaacgccaagaagtccctgtacctccagatgaacagcctgagagccgaggacaccgccgtgtactattgtgcctctggcgtgtacagcttcgactacagaggccagggcaccctggtcacagtctcttctggtaccggcggaggcggatctggcggcggaggtagcggtggcggaggatctgaattcgacgtgctgatgacccagacacctgtgtctctgccagtgtctctcggaggccaggtgtccatctcctgtagaagcagccagagcctggtgcactccgacggcgatacctacctgcactggtatctccagaagcctggacagagccctcagctcctgatctaccgggtgtccaacagattcagcggcgtgcccgatagattttccggcagcggctctggcaccgacttcaccctgaagatcagcagagtggaacccgaggacctgggcctgtactactgtctccagaccacacacttcccaccttggacctttggcggaggcaccaagctggaaatgaaactcgagatccagaaccctgatcctgccgtgtaccagctgcgggatagcaagagcagcgacaagagcgtgtgtctgttcaccgacttcgacagccagaccaacgtgtcccagagcaaggactccgacgtgtacatcaccgataagtgcgtgctggacatgcggagcatggacttcaagagcaactccgccgtggcctggtccaacaagtccgatttcgcctgcgccaacgccttcaacaacagcattatccccgaggacacattcttcccaagccccgagagcagcgactccaccgaccacgtgaagcccaaagagacagagaacaccaagcagcccagcaagagctgccacaagcccaaggccatcgtgcacaccgagaaagtgaacatgatgagcctgaccgtgctgggcctgcggatgctgttcgccaaaaccgtggccgtgaacttcctgctgaccgccaagctgttcttcctccgcgccaagagaagcggatctggcgtgaagcagaccctgaatttcgacctgctgaagctggctggcgacgtggaatccaacccaggccctactagtatggactggatttggcgcatccttttccttgtcggcgctgctaccggcgcgcattccttcgaacaggttcagctccagcagtctggacccgagcttagaaggccaggatctagcgtcagactgagctgcaaggccagcggctaccggatcaaggacttcctgatccactggattaagaacagacccgagcacggcctggaatggatcggatggattgaccctgaggacggcgagactaagtacgcccagaagttccagaccaaggccacactgaccgccgacacctctagcaacaccgcctacatgcaactgagcagcctgaccagcgaggacaccgccacctacttttgtgctagatggggcgacgtgtactacggcctgatgagaggccatgtgatggatgcctggggccagggaacaagcgtgacagtctcttctacgcgtgaggacctgaagaacgtgttcccacctgaggtggccgtgttcgagcctagcgaggccgagatcagccacacccagaaagccaccctcgtgtgcctggctaccggcttctaccccgaccatgtggaactgtcttggtgggtcaacggcaaagaggtgcacagcggcgtgtgtaccgacccccagccactgaaagaacagcccgccctgaacgacagccggtactgcctgagcagcagactgagagtgtccgccaccttctggcagaacccccggaaccacttcagatgccaggtgcagttctacggcctgagcgagaacgacgagtggacccaggacagagccaagcccgtgacccagatcgtgtctgccgaagcctggggcagagccgatgatgtgattaagatccactggcaggaaaagaagtccaacaccatcctgggcagccaggaaggcaacaccatgaagaccaacgacacctacatgaagttcagctggctgaccgtgcccgagaagtccctggacaaagaacacagatgcatcgtgcggcacgaaaacaacaagaacggcgtggaccaggaaatcatcttcccacccatcaagaccgatgtgattacaatggaccccaaggacaactgctccaaggacgccaacgataccctgctgctccagctgaccaacaccagcgcctactacatgtacttgttgctgctgctgaagtccgtggtgtacttcgccatcatcacatgctgcctgctgcggagaaccgccttctgctgcaacggcgagaagtct

SEQ ID NO: 7653 - DNA, 2601 bp, synthetic construct
  source 1..2601: mol_type = other DNA
atggccttaccagtgaccgccttgctcctgccgctggccttgctgctccacgccgccaggccggaagtgcagctggttgaatctggcggaggactggttcagcctggcggatctctgagactgtcttgtgccgccagcggcttcagcttcagcgacttttggatgagctgggtccgacaggcccctggcaaaggacttgaatgggtcgccacaatcagccaggccggcagcgagaaggactacgtggactctgtgaagggcagattcaccatcagccgggacaacgccaagaagtccctgtacctccagatgaacagcctgagagccgaggacaccgccgtgtactattgtgcctctggcgtgtacagcttcgactacagaggccagggcaccctggtcacagtctcttctggtaccggcggaggcggatctggcggcggaggtagcggtggcggaggatctgaattcgacatcgtgatgacacagagccccgccacactgtcactgtctccaggcgaaagagccacactgagctgtcggagcagcaagagcctccagaacgtgaacggcaacacctacctgtactggttccagcagaagcccggccagtctcctcagctcctgatctacagaatgagcaacctgaacagcggcgtgcccgacagattttctggcagcggaagcggcaccgagttcaccctgaccataagcagcctggaacctgaggacttcgccgtgtactactgtatgcagcacctggaataccccatcaccttcggagccggcaccaagctggaaatcaaactcgagatccagaaccctgatcctgccgtgtaccagctgcgggatagcaagagcagcgacaagagcgtgtgtctgttcaccgacttcgacagccagaccaacgtgtcccagagcaaggactccgacgtgtacatcaccgataagtgcgtgctggacatgcggagcatggacttcaagagcaactccgccgtggcctggtccaacaagtccgatttcgcctgcgccaacgccttcaacaacagcattatccccgaggacacattcttcccaagccccgagagcagcgactccaccgaccacgtgaagcccaaagagacagagaacaccaagcagcccagcaagagctgccacaagcccaaggccatcgtgcacaccgagaaagtgaacatgatgagcctgaccgtgctgggcctgcggatgctgttcgccaaaaccgtggccgtgaacttcctgctgaccgccaagctgttcttcctccgcgccaagagaagcggatctggcgtgaagcagaccctgaatttcgacctgctgaagctggctggcgacgtggaatccaacccaggccctactagtatggactggatttggcgcatccttttccttgtcggcgctgctaccggcgcgcattccttcgaagaagtgcaactggttgaatctggcggcggactggttaagcctggcggatctctgaagctgagctgtgccgccagcggctacacctttaccagctacgtgatgcactgggtccgacaggcccctggcaaaggacttgagtggatcggctacatcaacccctacaacgatggcaccaagtacaacgagaagttccagggcagagtgaccatcagctccgacaagagcatcagcaccgcctacatggaactgagcagcctgagaagcgaggataccgccatgtactattgcgccagaggcacctactactacggcaccagagtgttcgactactggggccagggaaccctggtcacagtctcttctacgcgtgaggacctgaagaacgtgttcccacctgaggtggccgtgttcgagcctagcgaggccgagatcagccacacccagaaagccaccctcgtgtgcctggctaccggcttctaccccgaccatgtggaactgtcttggtgggtcaacggcaaagaggtgcacagcggcgtgtgtaccgacccccagccactgaaagaacagcccgccctgaacgacagccggtactgcctgagcagcagactgagagtgtccgccaccttctggcagaacccccggaaccacttcagatgccaggtgcagttctacggcctgagcgagaacgacgagtggacccaggacagagccaagcccgtgacccagatcgtgtctgccgaagcctggggcagagccgatgatgtgattaagatccactggcaggaaaagaagtccaacaccatcctgggcagccaggaaggcaacaccatgaagaccaacgacacctacatgaagttcagctggctgaccgtgcccgagaagtccctggacaaagaacacagatgcatcgtgcggcacgaaaacaacaagaacggcgtggaccaggaaatcatcttcccacccatcaagaccgatgtgattacaatggaccccaaggacaactgctccaaggacgccaacgataccctgctgctccagctgaccaacaccagcgcctactacatgtacttgttgctgctgctgaagtccgtggtgtacttcgccatcatcacatgctgcctgctgcggagaaccgccttctgctgcaacggcgagaagtct

SEQ ID NO: 7654 - DNA, 2589 bp, synthetic construct
  source 1..2589: mol_type = other DNA
atggccttaccagtgaccgccttgctcctgccgctggccttgctgctccacgccgccaggccggaagtgcagctggttgaatctggcggaggactggttcagcctggcggatctctgagactgtcttgtgccgccagcggcttcagcttcagcgacttttggatgagctgggtccgacaggcccctggcaaaggacttgaatgggtcgccacaatcagccaggccggcagcgagaaggactacgtggactctgtgaagggcagattcaccatcagccgggacaacgccaagaagtccctgtacctccagatgaacagcctgagagccgaggacaccgccgtgtactattgtgcctctggcgtgtacagcttcgactacagaggccagggcaccctggtcacagtctcttctggtaccggcggaggcggatctggcggcggaggtagcggtggcggaggatctgaattcgacatccagatgacacagagccctagcagcctgtctgccagcgtgggagacagagtgaccatcacatgcaaggccagcgaccacatcaacaactggctggcctggtatcagcagaagcctggacaggcccctaagctgctgatctacggcgctaccacactggaaacaggcgtgcccagcagattttctggcagcggctctggcaccgactacaccctgacaatatccagcctccagcctgaggacttcgccacctactactgtcagcagagctggaacaccccttggacattcggccagggcaccaagctggaaatcaagagactcgagatccagaaccctgatcctgccgtgtaccagctgcgggatagcaagagcagcgacaagagcgtgtgtctgttcaccgacttcgacagccagaccaacgtgtcccagagcaaggactccgacgtgtacatcaccgataagtgcgtgctggacatgcggagcatggacttcaagagcaactccgccgtggcctggtccaacaagtccgatttcgcctgcgccaacgccttcaacaacagcattatccccgaggacacattcttcccaagccccgagagcagcgactccaccgaccacgtgaagcccaaagagacagagaacaccaagcagcccagcaagagctgccacaagcccaaggccatcgtgcacaccgagaaagtgaacatgatgagcctgaccgtgctgggcctgcggatgctgttcgccaaaaccgtggccgtgaacttcctgctgaccgccaagctgttcttcctccgcgccaagagaagcggatctggcgtgaagcagaccctgaatttcgacctgctgaagctggctggcgacgtggaatccaacccaggccctactagtatggactggatttggcgcatccttttccttgtcggcgctgctaccggcgcgcattccttcgaacaagttcagcttcaacagcctggcgctgagctggtcaaacctggcgcttctgtgaagatgagctgcaaagccagcggctacgccttcagcagctactggatcaactggatgaagcagaaacccggccagggactcgaatggatcggccaaatctatcccggcgacggcgacaccaactacaacggcaagttcaagggcagagccacactgaccgccgatacctctagcagcacagcctacatgcagctgagcagcctgaccagcgaagatagcgccgtgtacttctgtgcccggtccatcacaacagtcgtgggctgcgctatggactattggggccagggaacaagcgtgaccgtgtctagtacgcgtgaggacctgaagaacgtgttcccacctgaggtggccgtgttcgagcctagcgaggccgagatcagccacacccagaaagccaccctcgtgtgcctggctaccggcttctaccccgaccatgtggaactgtcttggtgggtcaacggcaaagaggtgcacagcggcgtgtgtaccgacccccagccactgaaagaacagcccgccctgaacgacagccggtactgcctgagcagcagactgagagtgtccgccaccttctggcagaacccccggaaccacttcagatgccaggtgcagttctacggcctgagcgagaacgacgagtggacccaggacagagccaagcccgtgacccagatcgtgtctgccgaagcctggggcagagccgatgatgtgattaagatccactggcaggaaaagaagtccaacaccatcctgggcagccaggaaggcaacaccatgaagaccaacgacacctacatgaagttcagctggctgaccgtgcccgagaagtccctggacaaagaacacagatgcatcgtgcggcacgaaaacaacaagaacggcgtggaccaggaaatcatcttcccacccatcaagaccgatgtgattacaatggaccccaaggacaactgctccaaggacgccaacgataccctgctgctccagctgaccaacaccagcgcctactacatgtacttgttgctgctgctgaagtccgtggtgtacttcgccatcatcacatgctgcctgctgcggagaaccgccttctgctgcaacggcgagaagtct

SEQ ID NO: 7655 - DNA, 2595 bp, synthetic construct
  source 1..2595: mol_type = other DNA
atggccttaccagtgaccgccttgctcctgccgctggccttgctgctccacgccgccaggccggaagtgcagctggttgaatctggcggaggactggttcagcctggcggatctctgagactgtcttgtgccgccagcggcttcagcttcagcgacttttggatgagctgggtccgacaggcccctggcaaaggacttgaatgggtcgccacaatcagccaggccggcagcgagaaggactacgtggactctgtgaagggcagattcaccatcagccgggacaacgccaagaagtccctgtacctccagatgaacagcctgagagccgaggacaccgccgtgtactattgtgcctctggcgtgtacagcttcgactacagaggccagggcaccctggtcacagtctcttctggtaccggcggaggcggatctggcggcggaggtagcggtggcggaggatctgaattccagatcgtgctgtctcagtctcctgccatcctgagcgcttccccaggcgagaaagtgaccatgacctgtagagccagcagcagcgtgtcctacatgcactggtatcagcagaagcccggcagcagccctaagccttggatctacgccaccagcaatctggcctctggcgtgccagccagattttctggctctggcagcggcaccagctacagcttcacaatcagcagagtggaagccgaggacgccgccacctactattgtcagcagtggaccttcaatcctcctaccttcggcggaggcacccggctggaaatcaaaagaacagtggctgctctcgagatccagaaccctgatcctgccgtgtaccagctgcgggatagcaagagcagcgacaagagcgtgtgtctgttcaccgacttcgacagccagaccaacgtgtcccagagcaaggactccgacgtgtacatcaccgataagtgcgtgctggacatgcggagcatggacttcaagagcaactccgccgtggcctggtccaacaagtccgatttcgcctgcgccaacgccttcaacaacagcattatccccgaggacacattcttcccaagccccgagagcagcgactccaccgaccacgtgaagcccaaagagacagagaacaccaagcagcccagcaagagctgccacaagcccaaggccatcgtgcacaccgagaaagtgaacatgatgagcctgaccgtgctgggcctgcggatgctgttcgccaaaaccgtggccgtgaacttcctgctgaccgccaagctgttcttcctccgcgccaagagaagcggatctggcgtgaagcagaccctgaatttcgacctgctgaagctggctggcgacgtggaatccaacccaggccctactagtatggactggatttggcgcatccttttccttgtcggcgctgctaccggcgcgcattccttcgaacaggcttatctgcaacagagcggagccgaactcgtcagacctggcgcttctgtgaagatgagctgcaaggccagcggctacaccttcaccagctataatatgcactgggtcaagcagacccctcggcagggactcgaatggatcggcggaatctatcccggcaacggcgacacctcctacaaccagaagttcaagggcaaagccacactgaccgtgggcaagagcagcagcaccgcctatatgcagctcagcagcctgaccagcgaggacagcgccgtgtacttctgcgccagatacgactacaactacgctatggactactggggccagggcaccagcgtgacagttagctctgccagcacgcgtgaggacctgaagaacgtgttcccacctgaggtggccgtgttcgagcctagcgaggccgagatcagccacacccagaaagccaccctcgtgtgcctggctaccggcttctaccccgaccatgtggaactgtcttggtgggtcaacggcaaagaggtgcacagcggcgtgtgtaccgacccccagccactgaaagaacagcccgccctgaacgacagccggtactgcctgagcagcagactgagagtgtccgccaccttctggcagaacccccggaaccacttcagatgccaggtgcagttctacggcctgagcgagaacgacgagtggacccaggacagagccaagcccgtgacccagatcgtgtctgccgaagcctggggcagagccgatgatgtgattaagatccactggcaggaaaagaagtccaacaccatcctgggcagccaggaaggcaacaccatgaagaccaacgacacctacatgaagttcagctggctgaccgtgcccgagaagtccctggacaaagaacacagatgcatcgtgcggcacgaaaacaacaagaacggcgtggaccaggaaatcatcttcccacccatcaagaccgatgtgattacaatggaccccaaggacaactgctccaaggacgccaacgataccctgctgctccagctgaccaacaccagcgcctactacatgtacttgttgctgctgctgaagtccgtggtgtacttcgccatcatcacatgctgcctgctgcggagaaccgccttctgctgcaacggcgagaagtct

SEQ ID NO: 7656 - DNA, 2589 bp, synthetic construct
  source 1..2589: mol_type = other DNA
atggccttaccagtgaccgccttgctcctgccgctggccttgctgctccacgccgccaggccggaagtgcagctggttgaatctggcggaggactggttcagcctggcggatctctgagactgtcttgtgccgccagcggcttcagcttcagcgacttttggatgagctgggtccgacaggcccctggcaaaggacttgaatgggtcgccacaatcagccaggccggcagcgagaaggactacgtggactctgtgaagggcagattcaccatcagccgggacaacgccaagaagtccctgtacctccagatgaacagcctgagagccgaggacaccgccgtgtactattgtgcctctggcgtgtacagcttcgactacagaggccagggcaccctggtcacagtctcttctggtaccggcggaggcggatctggcggcggaggtagcggtggcggaggatctgaattcgagatcgtgctgacacagagccctgccaccctgtctctgagccctggcgaaagagccaccctgagctgtagagccagccagagcgtgtccagctacctggcctggtatcagcagaagcccggccaggctccccggctgctgatctacgatgccagcaatagagccaccggcatccccgccagattttccggctctggcagcggcaccgacttcaccctgaccatcagctccctggaacccgaggacttcgccgtgtactactgccagcagcggagcaactggcccatcacattcggccagggcacccggctggaaatcaaactcgagatccagaaccctgatcctgccgtgtaccagctgcgggatagcaagagcagcgacaagagcgtgtgtctgttcaccgacttcgacagccagaccaacgtgtcccagagcaaggactccgacgtgtacatcaccgataagtgcgtgctggacatgcggagcatggacttcaagagcaactccgccgtggcctggtccaacaagtccgatttcgcctgcgccaacgccttcaacaacagcattatccccgaggacacattcttcccaagccccgagagcagcgactccaccgaccacgtgaagcccaaagagacagagaacaccaagcagcccagcaagagctgccacaagcccaaggccatcgtgcacaccgagaaagtgaacatgatgagcctgaccgtgctgggcctgcggatgctgttcgccaaaaccgtggccgtgaacttcctgctgaccgccaagctgttcttcctccgcgccaagagaagcggatctggcgtgaagcagaccctgaatttcgacctgctgaagctggctggcgacgtggaatccaacccaggccctactagtatggactggatttggcgcatccttttccttgtcggcgctgctaccggcgcgcattccttcgaagaggtgcagcttgttgagtctggcggaggactggtgcagcccgatagaagcctgagactgtcttgtgccgccagcggcttcaccttccacgattatgccatgcactgggtccgacaggcccctggcaaaggacttgaatgggtgtccaccatctcttggaacagcggcacaatcggctacgccgactctgtgaagggcagattcaccatcagccgggacaacgccaagaacagcctgtacctccagatgaactccctgagagccgaggacacagccctgtactactgcgccaaggacatccagtacggcaactactactacggcatggacgtgtggggccagggcacaacagtgacagtctcttctacgcgtgaggacctgaagaacgtgttcccacctgaggtggccgtgttcgagcctagcgaggccgagatcagccacacccagaaagccaccctcgtgtgcctggctaccggcttctaccccgaccatgtggaactgtcttggtgggtcaacggcaaagaggtgcacagcggcgtgtgtaccgacccccagccactgaaagaacagcccgccctgaacgacagccggtactgcctgagcagcagactgagagtgtccgccaccttctggcagaacccccggaaccacttcagatgccaggtgcagttctacggcctgagcgagaacgacgagtggacccaggacagagccaagcccgtgacccagatcgtgtctgccgaagcctggggcagagccgatgatgtgattaagatccactggcaggaaaagaagtccaacaccatcctgggcagccaggaaggcaacaccatgaagaccaacgacacctacatgaagttcagctggctgaccgtgcccgagaagtccctggacaaagaacacagatgcatcgtgcggcacgaaaacaacaagaacggcgtggaccaggaaatcatcttcccacccatcaagaccgatgtgattacaatggaccccaaggacaactgctccaaggacgccaacgataccctgctgctccagctgaccaacaccagcgcctactacatgtacttgttgctgctgctgaagtccgtggtgtacttcgccatcatcacatgctgcctgctgcggagaaccgccttctgctgcaacggcgagaagtct

SEQ ID NO: 7657 - DNA, 2574 bp, synthetic construct
  source 1..2574: mol_type = other DNA
atggccttaccagtgaccgccttgctcctgccgctggccttgctgctccacgccgccaggccggaagtgcagctggttgaatctggcggaggactggttcagcctggcggatctctgagactgtcttgtgccgccagcggcttcagcttcagcgacttttggatgagctgggtccgacaggcccctggcaaaggacttgaatgggtcgccacaatcagccaggccggcagcgagaaggactacgtggactctgtgaagggcagattcaccatcagccgggacaacgccaagaagtccctgtacctccagatgaacagcctgagagccgaggacaccgccgtgtactattgtgcctctggcgtgtacagcttcgactacagaggccagggcaccctggtcacagtctcttctggtaccggcggaggcggatctggcggcggaggtagcggtggcggaggatctgaattcgacatccagatgacacagagccctagcagcctgtctgccagcgtgggagatagagtgaccatcaactgcaaggccagccaggacatcaacagctacctgagctggttccagcagaagcctggcaaggcccctaagacactgatctaccgggccaacagactggtggatggcgtgccaagcagattttctggcagcggcagcggccaggattacaccctgacaatatccagcctccagcctgaggacttcgccacctactactgcctccagtacgacgagttccctctgacctttggcggaggcaccaaggtggaaatcaaactcgagatccagaaccctgatcctgccgtgtaccagctgcgggatagcaagagcagcgacaagagcgtgtgtctgttcaccgacttcgacagccagaccaacgtgtcccagagcaaggactccgacgtgtacatcaccgataagtgcgtgctggacatgcggagcatggacttcaagagcaactccgccgtggcctggtccaacaagtccgatttcgcctgcgccaacgccttcaacaacagcattatccccgaggacacattcttcccaagccccgagagcagcgactccaccgaccacgtgaagcccaaagagacagagaacaccaagcagcccagcaagagctgccacaagcccaaggccatcgtgcacaccgagaaagtgaacatgatgagcctgaccgtgctgggcctgcggatgctgttcgccaaaaccgtggccgtgaacttcctgctgaccgccaagctgttcttcctccgcgccaagagaagcggatctggcgtgaagcagaccctgaatttcgacctgctgaagctggctggcgacgtggaatccaacccaggccctactagtatggactggatttggcgcatccttttccttgtcggcgctgctaccggcgcgcattccttcgaacaggtgcaactggtgcagtctggggccgaagtgaagaaacctggggcctctgtgaaggtgtcctgcaaagccagcggctacacctttaccaactacgacatcaactgggtccgacaggctccaggccaaggactggaatggatcggctggatctatcctggcgacggcagcaccaagtacaacgagaagttcaaggccaaggccacactgaccgccgataccagcacaagcaccgcctacatggaactgcggagcctgagaagcgacgacaccgccgtgtactattgtgcctccggctacgaggacgctatggactattggggccagggcaccaccgtgacagtgtctagtacgcgtgaggacctgaagaacgtgttcccacctgaggtggccgtgttcgagcctagcgaggccgagatcagccacacccagaaagccaccctcgtgtgcctggctaccggcttctaccccgaccatgtggaactgtcttggtgggtcaacggcaaagaggtgcacagcggcgtgtgtaccgacccccagccactgaaagaacagcccgccctgaacgacagccggtactgcctgagcagcagactgagagtgtccgccaccttctggcagaacccccggaaccacttcagatgccaggtgcagttctacggcctgagcgagaacgacgagtggacccaggacagagccaagcccgtgacccagatcgtgtctgccgaagcctggggcagagccgatgatgtgattaagatccactggcaggaaaagaagtccaacaccatcctgggcagccaggaaggcaacaccatgaagaccaacgacacctacatgaagttcagctggctgaccgtgcccgagaagtccctggacaaagaacacagatgcatcgtgcggcacgaaaacaacaagaacggcgtggaccaggaaatcatcttcccacccatcaagaccgatgtgattacaatggaccccaaggacaactgctccaaggacgccaacgataccctgctgctccagctgaccaacaccagcgcctactacatgtacttgttgctgctgctgaagtccgtggtgtacttcgccatcatcacatgctgcctgctgcggagaaccgccttctgctgcaacggcgagaagtct

SEQ ID NO: 7658 - DNA, 2580 bp, synthetic construct
  source 1..2580: mol_type = other DNA
atggccttaccagtgaccgccttgctcctgccgctggccttgctgctccacgccgccaggccggaagtgcagctggttgaatctggcggaggactggttcagcctggcggatctctgagactgtcttgtgccgccagcggcttcagcttcagcgacttttggatgagctgggtccgacaggcccctggcaaaggacttgaatgggtcgccacaatcagccaggccggcagcgagaaggactacgtggactctgtgaagggcagattcaccatcagccgggacaacgccaagaagtccctgtacctccagatgaacagcctgagagccgaggacaccgccgtgtactattgtgcctctggcgtgtacagcttcgactacagaggccagggcaccctggtcacagtctcttctggtaccggcggaggcggatctggcggcggaggtagcggtggcggaggatctgaattcgacatcgtgatgacccagacacctctgagcctgagcgtgacacctggacagcctgccagcattagctgcaagagcagccagtctctgctggacggcgacggcaagacctacctgaattggctgctccagaagcctggacagagccctcagcggctgatctacctggtgtccaagctggatagcggcgtgcccgatagattttctggcagcggctctggcaccgacttcaccctgaagatcagcagagtggaagccgaggacgtgggcgtgtactactgttggcagggcacacacttccccagaacattcggccagggcacaaagctggaaatcaaactcgagatccagaaccctgatcctgccgtgtaccagctgcgggatagcaagagcagcgacaagagcgtgtgtctgttcaccgacttcgacagccagaccaacgtgtcccagagcaaggactccgacgtgtacatcaccgataagtgcgtgctggacatgcggagcatggacttcaagagcaactccgccgtggcctggtccaacaagtccgatttcgcctgcgccaacgccttcaacaacagcattatccccgaggacacattcttcccaagccccgagagcagcgactccaccgaccacgtgaagcccaaagagacagagaacaccaagcagcccagcaagagctgccacaagcccaaggccatcgtgcacaccgagaaagtgaacatgatgagcctgaccgtgctgggcctgcggatgctgttcgccaaaaccgtggccgtgaacttcctgctgaccgccaagctgttcttcctccgcgccaagagaagcggatctggcgtgaagcagaccctgaatttcgacctgctgaagctggctggcgacgtggaatccaacccaggccctactagtatggactggatttggcgcatccttttccttgtcggcgctgctaccggcgcgcattccttcgaacaagtgcaactggttcagagcggagccgaagtgaagaaacctggggcctctgtgaaggtgtcctgcaaggccagcggctacaccttcaaggacacctacatccactgggtccgacaggcccctggacaaggacttgagtggatgggcagaatcgaccccgccaacggcaacaccaaatacgaccccaagttccagggcagagtgaccatgaccagagacaccagcatcagcaccgcctacatggaactgagccggctgagatccgatgacaccgccgtgtactattgcgctagaagaggcggagtggattggggccagggaacactggttaccgtgtctagtacgcgtgaggacctgaagaacgtgttcccacctgaggtggccgtgttcgagcctagcgaggccgagatcagccacacccagaaagccaccctcgtgtgcctggctaccggcttctaccccgaccatgtggaactgtcttggtgggtcaacggcaaagaggtgcacagcggcgtgtgtaccgacccccagccactgaaagaacagcccgccctgaacgacagccggtactgcctgagcagcagactgagagtgtccgccaccttctggcagaacccccggaaccacttcagatgccaggtgcagttctacggcctgagcgagaacgacgagtggacccaggacagagccaagcccgtgacccagatcgtgtctgccgaagcctggggcagagccgatgatgtgattaagatccactggcaggaaaagaagtccaacaccatcctgggcagccaggaaggcaacaccatgaagaccaacgacacctacatgaagttcagctggctgaccgtgcccgagaagtccctggacaaagaacacagatgcatcgtgcggcacgaaaacaacaagaacggcgtggaccaggaaatcatcttcccacccatcaagaccgatgtgattacaatggaccccaaggacaactgctccaaggacgccaacgataccctgctgctccagctgaccaacaccagcgcctactacatgtacttgttgctgctgctgaagtccgtggtgtacttcgccatcatcacatgctgcctgctgcggagaaccgccttctgctgcaacggcgagaagtct

SEQ ID NO: 7659 - DNA, 2583 bp, synthetic construct
  source 1..2583: mol_type = other DNA
atggccttaccagtgaccgccttgctcctgccgctggccttgctgctccacgccgccaggccggaagtgcagctggttgaatctggcggaggactggttcagcctggcggatctctgagactgtcttgtgccgccagcggcttcagcttcagcgacttttggatgagctgggtccgacaggcccctggcaaaggacttgaatgggtcgccacaatcagccaggccggcagcgagaaggactacgtggactctgtgaagggcagattcaccatcagccgggacaacgccaagaagtccctgtacctccagatgaacagcctgagagccgaggacaccgccgtgtactattgtgcctctggcgtgtacagcttcgactacagaggccagggcaccctggtcacagtctcttctggtaccggcggaggcggatctggcggcggaggtagcggtggcggaggatctgaattcgacatccagatgacacagagccctagcagcctgtctgccagcgtgggagacagagtgaccatcacatgcaaggccagccaggatgtgtctacagccgtggcctggttccagcagaagcctggaaaagcccctaagctgctgatctacagccccagctacagatacaccggcgtgcccagcagattttctggcagcggctctggcaccgacttcaccctgacaatatccagcctccagcctgaggacttcacctactactgccagcagctctacagcaccccttacacattcggccagggcaccaaggtggaaatcaaactcgagatccagaaccctgatcctgccgtgtaccagctgcgggatagcaagagcagcgacaagagcgtgtgtctgttcaccgacttcgacagccagaccaacgtgtcccagagcaaggactccgacgtgtacatcaccgataagtgcgtgctggacatgcggagcatggacttcaagagcaactccgccgtggcctggtccaacaagtccgatttcgcctgcgccaacgccttcaacaacagcattatccccgaggacacattcttcccaagccccgagagcagcgactccaccgaccacgtgaagcccaaagagacagagaacaccaagcagcccagcaagagctgccacaagcccaaggccatcgtgcacaccgagaaagtgaacatgatgagcctgaccgtgctgggcctgcggatgctgttcgccaaaaccgtggccgtgaacttcctgctgaccgccaagctgttcttcctccgcgccaagagaagcggatctggcgtgaagcagaccctgaatttcgacctgctgaagctggctggcgacgtggaatccaacccaggccctactagtatggactggatttggcgcatccttttccttgtcggcgctgctaccggcgcgcattccttcgaagaagtgcaactggttcagagcggagccgaagtgaagaaacctggggcctctgtgaaggtgtcctgcaaagccagcggctacacctttaccgactactacctggacgtggtcgtgcggcaagctcctggacaaggactggaatggatcggcagagtgaacccctacaacggcggcaccatctacaaccagaaattcaagggaagagtgaccctgaccagagacaccagcacctccacagcctacctggaactgagcagcctgagaagcgaagataccgccgtgtactactgcgccagggaccactacagatatgaccctctgctggactactggggccagggaaccctggttacagtgtctagtacgcgtgaggacctgaagaacgtgttcccacctgaggtggccgtgttcgagcctagcgaggccgagatcagccacacccagaaagccaccctcgtgtgcctggctaccggcttctaccccgaccatgtggaactgtcttggtgggtcaacggcaaagaggtgcacagcggcgtgtgtaccgacccccagccactgaaagaacagcccgccctgaacgacagccggtactgcctgagcagcagactgagagtgtccgccaccttctggcagaacccccggaaccacttcagatgccaggtgcagttctacggcctgagcgagaacgacgagtggacccaggacagagccaagcccgtgacccagatcgtgtctgccgaagcctggggcagagccgatgatgtgattaagatccactggcaggaaaagaagtccaacaccatcctgggcagccaggaaggcaacaccatgaagaccaacgacacctacatgaagttcagctggctgaccgtgcccgagaagtccctggacaaagaacacagatgcatcgtgcggcacgaaaacaacaagaacggcgtggaccaggaaatcatcttcccacccatcaagaccgatgtgattacaatggaccccaaggacaactgctccaaggacgccaacgataccctgctgctccagctgaccaacaccagcgcctactacatgtacttgttgctgctgctgaagtccgtggtgtacttcgccatcatcacatgctgcctgctgcggagaaccgccttctgctgcaacggcgagaagtct

SEQ ID NO: 7660 - DNA, 2601 bp, synthetic construct
  source 1..2601: mol_type = other DNA
atggccttaccagtgaccgccttgctcctgccgctggccttgctgctccacgccgccaggccggaagtgcagctggttgaatctggcggaggactggttcagcctggcggatctctgagactgtcttgtgccgccagcggcttcagcttcagcgacttttggatgagctgggtccgacaggcccctggcaaaggacttgaatgggtcgccacaatcagccaggccggcagcgagaaggactacgtggactctgtgaagggcagattcaccatcagccgggacaacgccaagaagtccctgtacctccagatgaacagcctgagagccgaggacaccgccgtgtactattgtgcctctggcgtgtacagcttcgactacagaggccagggcaccctggtcacagtctcttctggtaccggcggaggcggatctggcggcggaggtagcggtggcggaggatctgaattcgacatccagatgacacagagccctagcagcctgtctgccagcgtgggagacagagtgaccatcacctgtagagccagccagagcgtgtccaccagcagctacaactacatgcactggtatcagcagaagcccggcaagcctcctaagctgctgattaagtacgccagcaacctggaaagcggcgtgcccagcagattttctggcagcggctctggcaccgacttcaccctgacaatatccagcctccagcctgaggacttcgccacctactactgtcagcactcctgggagatccctctgacattcggccagggcaccaaggtggaaatcaaactcgagatccagaaccctgatcctgccgtgtaccagctgcgggatagcaagagcagcgacaagagcgtgtgtctgttcaccgacttcgacagccagaccaacgtgtcccagagcaaggactccgacgtgtacatcaccgataagtgcgtgctggacatgcggagcatggacttcaagagcaactccgccgtggcctggtccaacaagtccgatttcgcctgcgccaacgccttcaacaacagcattatccccgaggacacattcttcccaagccccgagagcagcgactccaccgaccacgtgaagcccaaagagacagagaacaccaagcagcccagcaagagctgccacaagcccaaggccatcgtgcacaccgagaaagtgaacatgatgagcctgaccgtgctgggcctgcggatgctgttcgccaaaaccgtggccgtgaacttcctgctgaccgccaagctgttcttcctccgcgccaagagaagcggatctggcgtgaagcagaccctgaatttcgacctgctgaagctggctggcgacgtggaatccaacccaggccctactagtatggactggatttggcgcatccttttccttgtcggcgctgctaccggcgcgcattccttcgaagaagtgcaactggttcagagcggagccgaagtgaagaaacctggggcctctgtgaaggtgtcctgcaaggccagcggctacagcttcaccgactattatatgcactgggtccgacaggctccaggccagggacttgagtggatcggcagaatcaacccctacaacggcgctgccttctacagccagaacttcaaggatagagtgaccctgaccgtggacaccagcaccagcacagcctacctggaactgagcagcctgagaagcgaggacaccgccgtgtactactgcgccattgagagaggcgctgacctggaaggctacgctatggattattggggccagggaaccctggtcaccgtgtcatctacgcgtgaggacctgaagaacgtgttcccacctgaggtggccgtgttcgagcctagcgaggccgagatcagccacacccagaaagccaccctcgtgtgcctggctaccggcttctaccccgaccatgtggaactgtcttggtgggtcaacggcaaagaggtgcacagcggcgtgtgtaccgacccccagccactgaaagaacagcccgccctgaacgacagccggtactgcctgagcagcagactgagagtgtccgccaccttctggcagaacccccggaaccacttcagatgccaggtgcagttctacggcctgagcgagaacgacgagtggacccaggacagagccaagcccgtgacccagatcgtgtctgccgaagcctggggcagagccgatgatgtgattaagatccactggcaggaaaagaagtccaacaccatcctgggcagccaggaaggcaacaccatgaagaccaacgacacctacatgaagttcagctggctgaccgtgcccgagaagtccctggacaaagaacacagatgcatcgtgcggcacgaaaacaacaagaacggcgtggaccaggaaatcatcttcccacccatcaagaccgatgtgattacaatggaccccaaggacaactgctccaaggacgccaacgataccctgctgctccagctgaccaacaccagcgcctactacatgtacttgttgctgctgctgaagtccgtggtgtacttcgccatcatcacatgctgcctgctgcggagaaccgccttctgctgcaacggcgagaagtct

SEQ ID NO: 7661 - DNA, 2595 bp, synthetic construct
  source 1..2595: mol_type = other DNA
atggccttaccagtgaccgccttgctcctgccgctggccttgctgctccacgccgccaggccggaagtgcagctggttgaatctggcggaggactggttcagcctggcggatctctgagactgtcttgtgccgccagcggcttcagcttcagcgacttttggatgagctgggtccgacaggcccctggcaaaggacttgaatgggtcgccacaatcagccaggccggcagcgagaaggactacgtggactctgtgaagggcagattcaccatcagccgggacaacgccaagaagtccctgtacctccagatgaacagcctgagagccgaggacaccgccgtgtactattgtgcctctggcgtgtacagcttcgactacagaggccagggcaccctggtcacagtctcttctggtaccggcggaggcggatctggcggcggaggtagcggtggcggaggatctgaattcgagatcgtgctgacacagtctccagccacactgagcgcttctccaggcgagagagtgaccctgacctgtagagccagcagcaacgtgatctccagctacgtgcactggtatcagcagaagcctggcagcagccccagactgtttctgtacagcaccagcaatctggcctccggcgtgccaagcagattttctggctctggcagcggcaccgacttcacctttaccatctctagcctggaagccgaggacgccgccacctactactgtcagcagtacagcggctaccctctgaccttcggccagggcacaagactggaaatcaaactcgagatccagaaccctgatcctgccgtgtaccagctgcgggatagcaagagcagcgacaagagcgtgtgtctgttcaccgacttcgacagccagaccaacgtgtcccagagcaaggactccgacgtgtacatcaccgataagtgcgtgctggacatgcggagcatggacttcaagagcaactccgccgtggcctggtccaacaagtccgatttcgcctgcgccaacgccttcaacaacagcattatccccgaggacacattcttcccaagccccgagagcagcgactccaccgaccacgtgaagcccaaagagacagagaacaccaagcagcccagcaagagctgccacaagcccaaggccatcgtgcacaccgagaaagtgaacatgatgagcctgaccgtgctgggcctgcggatgctgttcgccaaaaccgtggccgtgaacttcctgctgaccgccaagctgttcttcctccgcgccaagagaagcggatctggcgtgaagcagaccctgaatttcgacctgctgaagctggctggcgacgtggaatccaacccaggccctactagtatggactggatttggcgcatccttttccttgtcggcgctgctaccggcgcgcattccttcgaacaagttcagctgcaagagtctggccctggcctggtcaagcctagcgaaacactgagcctgacctgcgccgtgtctggctactctatcaccagcgcctactattggaactggatcagacagcctcctggcaaaggactggaatggatcggctacatcagctacgacggcagaaacaactacaaccccagcctgaagaaccggatcaccatcaatcccgacaccagcaagaaccagttcagcctccagctgaacagcgtgacccctgaggataccgccgtgtactactgtgccagagaaggcgactacgacgtgggcaactactacgctatggactactggggccagggaaccctggtcacagtctcttctacgcgtgaggacctgaagaacgtgttcccacctgaggtggccgtgttcgagcctagcgaggccgagatcagccacacccagaaagccaccctcgtgtgcctggctaccggcttctaccccgaccatgtggaactgtcttggtgggtcaacggcaaagaggtgcacagcggcgtgtgtaccgacccccagccactgaaagaacagcccgccctgaacgacagccggtactgcctgagcagcagactgagagtgtccgccaccttctggcagaacccccggaaccacttcagatgccaggtgcagttctacggcctgagcgagaacgacgagtggacccaggacagagccaagcccgtgacccagatcgtgtctgccgaagcctggggcagagccgatgatgtgattaagatccactggcaggaaaagaagtccaacaccatcctgggcagccaggaaggcaacaccatgaagaccaacgacacctacatgaagttcagctggctgaccgtgcccgagaagtccctggacaaagaacacagatgcatcgtgcggcacgaaaacaacaagaacggcgtggaccaggaaatcatcttcccacccatcaagaccgatgtgattacaatggaccccaaggacaactgctccaaggacgccaacgataccctgctgctccagctgaccaacaccagcgcctactacatgtacttgttgctgctgctgaagtccgtggtgtacttcgccatcatcacatgctgcctgctgcggagaaccgccttctgctgcaacggcgagaagtct

SEQ ID NO: 7662 - DNA, 2595 bp, synthetic construct
  source 1..2595: mol_type = other DNA
atggccttaccagtgaccgccttgctcctgccgctggccttgctgctccacgccgccaggccggaagtgcagctggttgaatctggcggaggactggttcagcctggcggatctctgagactgtcttgtgccgccagcggcttcagcttcagcgacttttggatgagctgggtccgacaggcccctggcaaaggacttgaatgggtcgccacaatcagccaggccggcagcgagaaggactacgtggactctgtgaagggcagattcaccatcagccgggacaacgccaagaagtccctgtacctccagatgaacagcctgagagccgaggacaccgccgtgtactattgtgcctctggcgtgtacagcttcgactacagaggccagggcaccctggtcacagtctcttctggtaccggcggaggcggatctggcggcggaggtagcggtggcggaggatctgaattcgagatcgtgctgacacagtctcccgccacactgtcactgtctccaggcgaaagagccacactgagctgtagagccagcagcaacgtgatctccagctacgtgcactggtatcagcagaagcctggacaggcccctcggctgctgatctacagcacaagcaatctggcctctggcatccccgccagattttctggctctggaagcggcaccgacttcaccctgaccataagcagcctggaacctgaggacttcgccgtgtactactgccagcagtatagcggctaccctctgaccttcggccagggcacaagactggaaatcaaactcgagatccagaaccctgatcctgccgtgtaccagctgcgggatagcaagagcagcgacaagagcgtgtgtctgttcaccgacttcgacagccagaccaacgtgtcccagagcaaggactccgacgtgtacatcaccgataagtgcgtgctggacatgcggagcatggacttcaagagcaactccgccgtggcctggtccaacaagtccgatttcgcctgcgccaacgccttcaacaacagcattatccccgaggacacattcttcccaagccccgagagcagcgactccaccgaccacgtgaagcccaaagagacagagaacaccaagcagcccagcaagagctgccacaagcccaaggccatcgtgcacaccgagaaagtgaacatgatgagcctgaccgtgctgggcctgcggatgctgttcgccaaaaccgtggccgtgaacttcctgctgaccgccaagctgttcttcctccgcgccaagagaagcggatctggcgtgaagcagaccctgaatttcgacctgctgaagctggctggcgacgtggaatccaacccaggccctactagtatggactggatttggcgcatccttttccttgtcggcgctgctaccggcgcgcattccttcgaagaagtgcaactggtggaaagtggcggcggactggtgcaacctggaagaagcctgagactgtcctgtgccgccagcggctactctatcacaagcgcctactactggaactgggtccgacaggctcctggcaaaggactggaatgggtgtcctacatcagctacgacggcagaaacaactacaaccccagcctgaagaaccgcttcaccatcagccgggacaacgccaagaagtccctgtacctccagatgaacagcctgagagccgaggacacagccctgtactattgcgccaaagagggcgactacgacgtcggcaactactacgctatggactactggggccagggaaccaccgtgactgtctcttctacgcgtgaggacctgaagaacgtgttcccacctgaggtggccgtgttcgagcctagcgaggccgagatcagccacacccagaaagccaccctcgtgtgcctggctaccggcttctaccccgaccatgtggaactgtcttggtgggtcaacggcaaagaggtgcacagcggcgtgtgtaccgacccccagccactgaaagaacagcccgccctgaacgacagccggtactgcctgagcagcagactgagagtgtccgccaccttctggcagaacccccggaaccacttcagatgccaggtgcagttctacggcctgagcgagaacgacgagtggacccaggacagagccaagcccgtgacccagatcgtgtctgccgaagcctggggcagagccgatgatgtgattaagatccactggcaggaaaagaagtccaacaccatcctgggcagccaggaaggcaacaccatgaagaccaacgacacctacatgaagttcagctggctgaccgtgcccgagaagtccctggacaaagaacacagatgcatcgtgcggcacgaaaacaacaagaacggcgtggaccaggaaatcatcttcccacccatcaagaccgatgtgattacaatggaccccaaggacaactgctccaaggacgccaacgataccctgctgctccagctgaccaacaccagcgcctactacatgtacttgttgctgctgctgaagtccgtggtgtacttcgccatcatcacatgctgcctgctgcggagaaccgccttctgctgcaacggcgagaagtct

SEQ ID NO: 7663 - DNA, 2592 bp, synthetic construct
  source 1..2592: mol_type = other DNA
atggccttaccagtgaccgccttgctcctgccgctggccttgctgctccacgccgccaggccggaagtgcagctggttgaatctggcggaggactggttcagcctggcggatctctgagactgtcttgtgccgccagcggcttcagcttcagcgacttttggatgagctgggtccgacaggcccctggcaaaggacttgaatgggtcgccacaatcagccaggccggcagcgagaaggactacgtggactctgtgaagggcagattcaccatcagccgggacaacgccaagaagtccctgtacctccagatgaacagcctgagagccgaggacaccgccgtgtactattgtgcctctggcgtgtacagcttcgactacagaggccagggcaccctggtcacagtctcttctggtaccggcggaggcggatctggcggcggaggtagcggtggcggaggatctgaattcgacgtggtcatgacacagaccccactgagcctgcctgtgtctctgggagatcaggccagcatctcctgtagaagcagccagagcctggtgcacagcaacggcaacacctacctgcggtggtatctccagaagcctggacagagccccaaggtgctgatctacaaggtgtccaacagagtgtccggcgtgcccgatagattttctggcagcggctctggcaccgacttcaccctgaagatcaatagagtggaagccgaggacctgggcgtgtacttctgtagccagagcacccatgtgccttggacctttggcggaggcaccaagctggaaatcaagctcgagatccagaaccctgatcctgccgtgtaccagctgcgggatagcaagagcagcgacaagagcgtgtgtctgttcaccgacttcgacagccagaccaacgtgtcccagagcaaggactccgacgtgtacatcaccgataagtgcgtgctggacatgcggagcatggacttcaagagcaactccgccgtggcctggtccaacaagtccgatttcgcctgcgccaacgccttcaacaacagcattatccccgaggacacattcttcccaagccccgagagcagcgactccaccgaccacgtgaagcccaaagagacagagaacaccaagcagcccagcaagagctgccacaagcccaaggccatcgtgcacaccgagaaagtgaacatgatgagcctgaccgtgctgggcctgcggatgctgttcgccaaaaccgtggccgtgaacttcctgctgaccgccaagctgttcttcctccgcgccaagagaagcggatctggcgtgaagcagaccctgaatttcgacctgctgaagctggctggcgacgtggaatccaacccaggccctactagtatggactggatttggcgcatccttttccttgtcggcgctgctaccggcgcgcattccttcgaaggcgtgaagctggacgagacaggcggaggacttgttcaacctggcggagccatgaagctgagctgtgtgaccagcggctttaccttcggccactactggatgaactgggtccgacagtcccctgagaaaggactggaatgggtcgcccagttcagaaacaagccctacaactacgaaacctactacagcgacagcgtgaagggcagattcaccatcagccgggacgacagcaagtccagcgtgtacctccagatgaacaacctgcgcgtggaagataccggcatctactactgtaccggggccagctacggcatggaatatctcggccagggcaccagcgtgaccgtgtctacaacgcgtgaggacctgaagaacgtgttcccacctgaggtggccgtgttcgagcctagcgaggccgagatcagccacacccagaaagccaccctcgtgtgcctggctaccggcttctaccccgaccatgtggaactgtcttggtgggtcaacggcaaagaggtgcacagcggcgtgtgtaccgacccccagccactgaaagaacagcccgccctgaacgacagccggtactgcctgagcagcagactgagagtgtccgccaccttctggcagaacccccggaaccacttcagatgccaggtgcagttctacggcctgagcgagaacgacgagtggacccaggacagagccaagcccgtgacccagatcgtgtctgccgaagcctggggcagagccgatgatgtgattaagatccactggcaggaaaagaagtccaacaccatcctgggcagccaggaaggcaacaccatgaagaccaacgacacctacatgaagttcagctggctgaccgtgcccgagaagtccctggacaaagaacacagatgcatcgtgcggcacgaaaacaacaagaacggcgtggaccaggaaatcatcttcccacccatcaagaccgatgtgattacaatggaccccaaggacaactgctccaaggacgccaacgataccctgctgctccagctgaccaacaccagcgcctactacatgtacttgttgctgctgctgaagtccgtggtgtacttcgccatcatcacatgctgcctgctgcggagaaccgccttctgctgcaacggcgagaagtct

SEQ ID NO: 7664 - DNA, 2610 bp, synthetic construct
  source 1..2610: mol_type = other DNA
atggccttaccagtgaccgccttgctcctgccgctggccttgctgctccacgccgccaggccggaagtgcagctggttgaatctggcggaggactggttcagcctggcggatctctgagactgtcttgtgccgccagcggcttcagcttcagcgacttttggatgagctgggtccgacaggcccctggcaaaggacttgaatgggtcgccacaatcagccaggccggcagcgagaaggactacgtggactctgtgaagggcagattcaccatcagccgggacaacgccaagaagtccctgtacctccagatgaacagcctgagagccgaggacaccgccgtgtactattgtgcctctggcgtgtacagcttcgactacagaggccagggcaccctggtcacagtctcttctggtaccggcggaggcggatctggcggcggaggtagcggtggcggaggatctgaattccaggtgcaactggtggaatctggcggcaatctggttcagcctggcggctctctgagactgtcttgtgccgccagcggcttcaccttcggcagcttttctatgagctgggtccgacaagctcctggcggaggacttgaatgggtggcaggactgtctgccagaagcagcctgacacactacgccgactctgtgaagggcagattcaccatcagccgggacaacgccaagaacagcgtgtacctccagatgaacagcctgagagtggaagataccgccgtgtactactgcgccagaagaagctacgacagcagcggctactggggccacttctacagctacatggatgtgtggggccagggcaccctggttacagtttctctcgagatccagaaccctgatcctgccgtgtaccagctgcgggatagcaagagcagcgacaagagcgtgtgtctgttcaccgacttcgacagccagaccaacgtgtcccagagcaaggactccgacgtgtacatcaccgataagtgcgtgctggacatgcggagcatggacttcaagagcaactccgccgtggcctggtccaacaagtccgatttcgcctgcgccaacgccttcaacaacagcattatccccgaggacacattcttcccaagccccgagagcagcgactccaccgaccacgtgaagcccaaagagacagagaacaccaagcagcccagcaagagctgccacaagcccaaggccatcgtgcacaccgagaaagtgaacatgatgagcctgaccgtgctgggcctgcggatgctgttcgccaaaaccgtggccgtgaacttcctgctgaccgccaagctgttcttcctccgcgccaagagaagcggatctggcgtgaagcagaccctgaatttcgacctgctgaagctggctggcgacgtggaatccaacccaggccctactagtatggactggatttggcgcatccttttccttgtcggcgctgctaccggcgcgcattccttcgaatctgtgctgacccagcctagctccgtgtctgctgctcctggacagaaagtgaccatctcctgtagcggcagcaccagcaacatcggcaacaactacgtgtcctggtatcagcagcaccccggcaaggcccctaagctgatgatctacgacgtgtccaagaggcccagcggcgtgccagatagattttccggcagcaagagcggcaacagcgccagcctggatattagcggactccagtctgaggacgaggccgactactattgcgccgcctgggatgatagcctgagcgagtttctgtttggcaccggcaccaagctgacagtgcttggaacgcgtgaggacctgaagaacgtgttcccacctgaggtggccgtgttcgagcctagcgaggccgagatcagccacacccagaaagccaccctcgtgtgcctggctaccggcttctaccccgaccatgtggaactgtcttggtgggtcaacggcaaagaggtgcacagcggcgtgtgtaccgacccccagccactgaaagaacagcccgccctgaacgacagccggtactgcctgagcagcagactgagagtgtccgccaccttctggcagaacccccggaaccacttcagatgccaggtgcagttctacggcctgagcgagaacgacgagtggacccaggacagagccaagcccgtgacccagatcgtgtctgccgaagcctggggcagagccgatgatgtgattaagatccactggcaggaaaagaagtccaacaccatcctgggcagccaggaaggcaacaccatgaagaccaacgacacctacatgaagttcagctggctgaccgtgcccgagaagtccctggacaaagaacacagatgcatcgtgcggcacgaaaacaacaagaacggcgtggaccaggaaatcatcttcccacccatcaagaccgatgtgattacaatggaccccaaggacaactgctccaaggacgccaacgataccctgctgctccagctgaccaacaccagcgcctactacatgtacttgttgctgctgctgaagtccgtggtgtacttcgccatcatcacatgctgcctgctgcggagaaccgccttctgctgcaacggcgagaagtct

SEQ ID NO: 7665 - DNA, 2595 bp, synthetic construct
  source 1..2595: mol_type = other DNA
atggccttaccagtgaccgccttgctcctgccgctggccttgctgctccacgccgccaggccggaagtgcagctggttgaatctggcggaggactggttcagcctggcggatctctgagactgtcttgtgccgccagcggcttcagcttcagcgacttttggatgagctgggtccgacaggcccctggcaaaggacttgaatgggtcgccacaatcagccaggccggcagcgagaaggactacgtggactctgtgaagggcagattcaccatcagccgggacaacgccaagaagtccctgtacctccagatgaacagcctgagagccgaggacaccgccgtgtactattgtgcctctggcgtgtacagcttcgactacagaggccagggcaccctggtcacagtctcttctggtaccggcggaggcggatctggcggcggaggtagcggtggcggaggatctgaattcgacgtggtcatgacacagagcccttctagcctgtctgccagcgtgggcgacagagtgacaatcacctgtcagagcagcctggacatcagccactacctgaactggtatcagcagaagcccggcaaggcccctaagctgctgatctacgacgccagcaatctggaaaccggcgtgcccagcagattttctggcagcggaagcggcacccacttcaccttcacaatatccagcctccagcctgaggacttcgccacctactactgccagcagtacgacaacctgcctctgacctttggcggaggcaccaagctggaaatcaagagactcgagatccagaaccctgatcctgccgtgtaccagctgcgggatagcaagagcagcgacaagagcgtgtgtctgttcaccgacttcgacagccagaccaacgtgtcccagagcaaggactccgacgtgtacatcaccgataagtgcgtgctggacatgcggagcatggacttcaagagcaactccgccgtggcctggtccaacaagtccgatttcgcctgcgccaacgccttcaacaacagcattatccccgaggacacattcttcccaagccccgagagcagcgactccaccgaccacgtgaagcccaaagagacagagaacaccaagcagcccagcaagagctgccacaagcccaaggccatcgtgcacaccgagaaagtgaacatgatgagcctgaccgtgctgggcctgcggatgctgttcgccaaaaccgtggccgtgaacttcctgctgaccgccaagctgttcttcctccgcgccaagagaagcggatctggcgtgaagcagaccctgaatttcgacctgctgaagctggctggcgacgtggaatccaacccaggccctactagtatggactggatttggcgcatccttttccttgtcggcgctgctaccggcgcgcattccttcgaacaagttcaactggttcaatcaggcggaggcgtggtgcaacctggtggctctctgagagtgtcttgtgctgcctctggcgtgaccctgagcgactatggaatgcactgggtccgacaggcccctggcaaaggacttgagtgggtcgccttcatcagaaacgacggcagcgacaagtattacgccgacagcgtgaagggcagattcaccatcagccgggacaacagcgagaaaaccgtgtctctccagatgtctagcctgagagccgaggacaccgccgtgtactactgtgccaagaatggcgagagcggccctctggactactggtatctggatctgtggggcagaggcaccctggtcacagtctcttctacgcgtgaggacctgaagaacgtgttcccacctgaggtggccgtgttcgagcctagcgaggccgagatcagccacacccagaaagccaccctcgtgtgcctggctaccggcttctaccccgaccatgtggaactgtcttggtgggtcaacggcaaagaggtgcacagcggcgtgtgtaccgacccccagccactgaaagaacagcccgccctgaacgacagccggtactgcctgagcagcagactgagagtgtccgccaccttctggcagaacccccggaaccacttcagatgccaggtgcagttctacggcctgagcgagaacgacgagtggacccaggacagagccaagcccgtgacccagatcgtgtctgccgaagcctggggcagagccgatgatgtgattaagatccactggcaggaaaagaagtccaacaccatcctgggcagccaggaaggcaacaccatgaagaccaacgacacctacatgaagttcagctggctgaccgtgcccgagaagtccctggacaaagaacacagatgcatcgtgcggcacgaaaacaacaagaacggcgtggaccaggaaatcatcttcccacccatcaagaccgatgtgattacaatggaccccaaggacaactgctccaaggacgccaacgataccctgctgctccagctgaccaacaccagcgcctactacatgtacttgttgctgctgctgaagtccgtggtgtacttcgccatcatcacatgctgcctgctgcggagaaccgccttctgctgcaacggcgagaagtct

SEQ ID NO: 7666 - DNA, 2607 bp, synthetic construct
  source 1..2607: mol_type = other DNA
atggccttaccagtgaccgccttgctcctgccgctggccttgctgctccacgccgccaggccggaagtgcagctggttgaatctggcggaggactggttcagcctggcggatctctgagactgtcttgtgccgccagcggcttcagcttcagcgacttttggatgagctgggtccgacaggcccctggcaaaggacttgaatgggtcgccacaatcagccaggccggcagcgagaaggactacgtggactctgtgaagggcagattcaccatcagccgggacaacgccaagaagtccctgtacctccagatgaacagcctgagagccgaggacaccgccgtgtactattgtgcctctggcgtgtacagcttcgactacagaggccagggcaccctggtcacagtctcttctggtaccggcggaggcggatctggcggcggaggtagcggtggcggaggatctgaattcagctacgagctgacacagcctccatccgtgtctggcacacctggacagagagtggctatctcctgtagcggcagcagcagcaacatcggcaccagaatggtcacctggtatcagcacgtgccaggcacagcccctaagctgctgatcttcaacaacaaccagcggcctagcggcgtgcccgatagattttctgccagcaagagcggcacaagcgccagcctggctatcatcggactccagtctgacgacgaggccgactactactgtgccacctgggacgacaacgtgaagtcctacgtgttcggcaccggcaccaaagtgacagtgcttggaagtagactcgagatccagaaccctgatcctgccgtgtaccagctgcgggatagcaagagcagcgacaagagcgtgtgtctgttcaccgacttcgacagccagaccaacgtgtcccagagcaaggactccgacgtgtacatcaccgataagtgcgtgctggacatgcggagcatggacttcaagagcaactccgccgtggcctggtccaacaagtccgatttcgcctgcgccaacgccttcaacaacagcattatccccgaggacacattcttcccaagccccgagagcagcgactccaccgaccacgtgaagcccaaagagacagagaacaccaagcagcccagcaagagctgccacaagcccaaggccatcgtgcacaccgagaaagtgaacatgatgagcctgaccgtgctgggcctgcggatgctgttcgccaaaaccgtggccgtgaacttcctgctgaccgccaagctgttcttcctccgcgccaagagaagcggatctggcgtgaagcagaccctgaatttcgacctgctgaagctggctggcgacgtggaatccaacccaggccctactagtatggactggatttggcgcatccttttccttgtcggcgctgctaccggcgcgcattccttcgaacttgaaatggcccaggttcagctccagcagtggggagctggactgctgaagcctagcgagacactgagcctgacctgtgctgtgtacggcggcagcttcagcggctactactggtcctggatcagacagcctcctggcaaaggactggaatggatcggcgagatcaaccacagcggctccaccaactacaaccccagcctgaagtccagagtgaccatcagcgtggacaccagcaagaaccagttctccctgaagctgagcagcgtgacagccgctgataccgccgtgtactattgcgctagagcccctcagtcttggtacgtgggagatgtgtggggccagggcacactggttacagtgtcatctacgcgtgaggacctgaagaacgtgttcccacctgaggtggccgtgttcgagcctagcgaggccgagatcagccacacccagaaagccaccctcgtgtgcctggctaccggcttctaccccgaccatgtggaactgtcttggtgggtcaacggcaaagaggtgcacagcggcgtgtgtaccgacccccagccactgaaagaacagcccgccctgaacgacagccggtactgcctgagcagcagactgagagtgtccgccaccttctggcagaacccccggaaccacttcagatgccaggtgcagttctacggcctgagcgagaacgacgagtggacccaggacagagccaagcccgtgacccagatcgtgtctgccgaagcctggggcagagccgatgatgtgattaagatccactggcaggaaaagaagtccaacaccatcctgggcagccaggaaggcaacaccatgaagaccaacgacacctacatgaagttcagctggctgaccgtgcccgagaagtccctggacaaagaacacagatgcatcgtgcggcacgaaaacaacaagaacggcgtggaccaggaaatcatcttcccacccatcaagaccgatgtgattacaatggaccccaaggacaactgctccaaggacgccaacgataccctgctgctccagctgaccaacaccagcgcctactacatgtacttgttgctgctgctgaagtccgtggtgtacttcgccatcatcacatgctgcctgctgcggagaaccgccttctgctgcaacggcgagaagtct

SEQ ID NO: 7667 - DNA, 2598 bp, synthetic construct
  source 1..2598: mol_type = other DNA
atggccttaccagtgaccgccttgctcctgccgctggccttgctgctccacgccgccaggccggaagtgcagctggttgaatctggcggaggactggttcagcctggcggatctctgagactgtcttgtgccgccagcggcttcagcttcagcgacttttggatgagctgggtccgacaggcccctggcaaaggacttgaatgggtcgccacaatcagccaggccggcagcgagaaggactacgtggactctgtgaagggcagattcaccatcagccgggacaacgccaagaagtccctgtacctccagatgaacagcctgagagccgaggacaccgccgtgtactattgtgcctctggcgtgtacagcttcgactacagaggccagggcaccctggtcacagtctcttctggtaccggcggaggcggatctggcggcggaggtagcggtggcggaggatctgaattccagtctgtgctgacacagcctcctagcctgtctgtggcccctggaaagacagccagcatcacatgcggcggcaacaacatcggcatgaagtccgtgcactggtatcagcagaggccaggacaggctcctgtgctggtcatctactacgacagcgacagaccctctggcatccccggcagattttccggcagcaactctggcaataccgccacactgaccatctccagagtggaagctggcgacgaggccgactactactgccaagtgtgggataccaccggcgatcaccctggctatgtgtttggcaccggcaccaaagtgacagtgcttctcgagatccagaaccctgatcctgccgtgtaccagctgcgggatagcaagagcagcgacaagagcgtgtgtctgttcaccgacttcgacagccagaccaacgtgtcccagagcaaggactccgacgtgtacatcaccgataagtgcgtgctggacatgcggagcatggacttcaagagcaactccgccgtggcctggtccaacaagtccgatttcgcctgcgccaacgccttcaacaacagcattatccccgaggacacattcttcccaagccccgagagcagcgactccaccgaccacgtgaagcccaaagagacagagaacaccaagcagcccagcaagagctgccacaagcccaaggccatcgtgcacaccgagaaagtgaacatgatgagcctgaccgtgctgggcctgcggatgctgttcgccaaaaccgtggccgtgaacttcctgctgaccgccaagctgttcttcctccgcgccaagagaagcggatctggcgtgaagcagaccctgaatttcgacctgctgaagctggctggcgacgtggaatccaacccaggccctactagtatggactggatttggcgcatccttttccttgtcggcgctgctaccggcgcgcattccttcgaacaagttcaactggttcagagcggagccgaagtgaagaaacctggcagcagcgtgaaggtgtcctgcaaagcaagcggcggcacctttagcagctacgccatctcttgggtccgacaggcacctggacaaggactggaatggatgggcggcatcatccccatcttcggcacagccaattacgcccagaaattccagggcagagtgaccatcaccgccgacgagtctacaagcaccgcctacatggaactgagcagcctgagaagcgaggacaccgccgtgtactattgtgccagaggcgtgtacggctacagcggctctgccccttatgatgagtggggccagggaaccctggtcaccgtttcttctacgcgtgaggacctgaagaacgtgttcccacctgaggtggccgtgttcgagcctagcgaggccgagatcagccacacccagaaagccaccctcgtgtgcctggctaccggcttctaccccgaccatgtggaactgtcttggtgggtcaacggcaaagaggtgcacagcggcgtgtgtaccgacccccagccactgaaagaacagcccgccctgaacgacagccggtactgcctgagcagcagactgagagtgtccgccaccttctggcagaacccccggaaccacttcagatgccaggtgcagttctacggcctgagcgagaacgacgagtggacccaggacagagccaagcccgtgacccagatcgtgtctgccgaagcctggggcagagccgatgatgtgattaagatccactggcaggaaaagaagtccaacaccatcctgggcagccaggaaggcaacaccatgaagaccaacgacacctacatgaagttcagctggctgaccgtgcccgagaagtccctggacaaagaacacagatgcatcgtgcggcacgaaaacaacaagaacggcgtggaccaggaaatcatcttcccacccatcaagaccgatgtgattacaatggaccccaaggacaactgctccaaggacgccaacgataccctgctgctccagctgaccaacaccagcgcctactacatgtacttgttgctgctgctgaagtccgtggtgtacttcgccatcatcacatgctgcctgctgcggagaaccgccttctgctgcaacggcgagaagtct

SEQ ID NO: 7668 - DNA, 2592 bp, synthetic construct
  source 1..2592: mol_type = other DNA
atggccttaccagtgaccgccttgctcctgccgctggccttgctgctccacgccgccaggccggaagtgcagctggttgaatctggcggaggactggttcagcctggcggatctctgagactgtcttgtgccgccagcggcttcagcttcagcgacttttggatgagctgggtccgacaggcccctggcaaaggacttgaatgggtcgccacaatcagccaggccggcagcgagaaggactacgtggactctgtgaagggcagattcaccatcagccgggacaacgccaagaagtccctgtacctccagatgaacagcctgagagccgaggacaccgccgtgtactattgtgcctctggcgtgtacagcttcgactacagaggccagggcaccctggtcacagtctcttctggtaccggcggaggcggatctggcggcggaggtagcggtggcggaggatctgaattcgaggtgcaactggttgagtctggcggaggactggtgcagcctggaagaagcctgagactgtcttgtgccgccagcggcttcaccttcgacgattatgccatgcactgggtccgacaggcccctggcaaaggacttgaatgggtgtccggcatctcctggaacagcggctctatcggctacgccgattccgtgaagggcagattcaccatcagccgggacaacgccaagaacagcctgtacctccagatgaactccctgagagccgaggacacagccctgtactactgcgccaaagacaaaggcggaggctactacgacttttggagcggcagcgattattggggccagggcacactggtcacagtgtctagcctcgagatccagaaccctgatcctgccgtgtaccagctgcgggatagcaagagcagcgacaagagcgtgtgtctgttcaccgacttcgacagccagaccaacgtgtcccagagcaaggactccgacgtgtacatcaccgataagtgcgtgctggacatgcggagcatggacttcaagagcaactccgccgtggcctggtccaacaagtccgatttcgcctgcgccaacgccttcaacaacagcattatccccgaggacacattcttcccaagccccgagagcagcgactccaccgaccacgtgaagcccaaagagacagagaacaccaagcagcccagcaagagctgccacaagcccaaggccatcgtgcacaccgagaaagtgaacatgatgagcctgaccgtgctgggcctgcggatgctgttcgccaaaaccgtggccgtgaacttcctgctgaccgccaagctgttcttcctccgcgccaagagaagcggatctggcgtgaagcagaccctgaatttcgacctgctgaagctggctggcgacgtggaatccaacccaggccctactagtatggactggatttggcgcatccttttccttgtcggcgctgctaccggcgcgcattccttcgaatcttctgagctgacacaggaccctgccgtgtctgttgctctgggccagacagtgcggattacctgtcagggcgatagcctgagaagctactacgcctcctggtatcagcagaagccaggccaggctcctgtgctggtcatctacggcaagaacaacagacccagcggcatccccgatagattcagcggaagcagctctggcaataccgccagcctgacaattactggcgctcaggccgaggacgaggccgactactactgcaacagcagagatagcagcggctgggttttcggcggaggcacaaaactgacagtgctgacgcgtgaggacctgaagaacgtgttcccacctgaggtggccgtgttcgagcctagcgaggccgagatcagccacacccagaaagccaccctcgtgtgcctggctaccggcttctaccccgaccatgtggaactgtcttggtgggtcaacggcaaagaggtgcacagcggcgtgtgtaccgacccccagccactgaaagaacagcccgccctgaacgacagccggtactgcctgagcagcagactgagagtgtccgccaccttctggcagaacccccggaaccacttcagatgccaggtgcagttctacggcctgagcgagaacgacgagtggacccaggacagagccaagcccgtgacccagatcgtgtctgccgaagcctggggcagagccgatgatgtgattaagatccactggcaggaaaagaagtccaacaccatcctgggcagccaggaaggcaacaccatgaagaccaacgacacctacatgaagttcagctggctgaccgtgcccgagaagtccctggacaaagaacacagatgcatcgtgcggcacgaaaacaacaagaacggcgtggaccaggaaatcatcttcccacccatcaagaccgatgtgattacaatggaccccaaggacaactgctccaaggacgccaacgataccctgctgctccagctgaccaacaccagcgcctactacatgtacttgttgctgctgctgaagtccgtggtgtacttcgccatcatcacatgctgcctgctgcggagaaccgccttctgctgcaacggcgagaagtct

SEQ ID NO: 7669 - DNA, 2619 bp, synthetic construct
  source 1..2619: mol_type = other DNA
atggccttaccagtgaccgccttgctcctgccgctggccttgctgctccacgccgccaggccggaagtgcagctggttgaatctggcggaggactggttcagcctggcggatctctgagactgtcttgtgccgccagcggcttcagcttcagcgacttttggatgagctgggtccgacaggcccctggcaaaggacttgaatgggtcgccacaatcagccaggccggcagcgagaaggactacgtggactctgtgaagggcagattcaccatcagccgggacaacgccaagaagtccctgtacctccagatgaacagcctgagagccgaggacaccgccgtgtactattgtgcctctggcgtgtacagcttcgactacagaggccagggcaccctggtcacagtctcttctggtaccggcggaggcggatctggcggcggaggtagcggtggcggaggatctgaattcgaagtgcagctccagcagtctggacctggcctggttaagcctagccagacactgagcctgacctgtgccatcagcggcgatagcgtgctgagcaacagcgacacctggaactggatcagacagagccctagcagaggactggaatggctgggcagaacctaccacagaagcacttggtacgacgactacgccagctctgtgcggggcagagtgtccatcaatgtggacaccagcaagaaccagtacagcctgcaactgaacgccgtgacacctgaggataccggcgtgtactactgcgccagagacagactccaggacggcaactcttggagcgacgcctttgatgtgtggggccagggcacaatggtcaccgtttctagcctcgagatccagaaccctgatcctgccgtgtaccagctgcgggatagcaagagcagcgacaagagcgtgtgtctgttcaccgacttcgacagccagaccaacgtgtcccagagcaaggactccgacgtgtacatcaccgataagtgcgtgctggacatgcggagcatggacttcaagagcaactccgccgtggcctggtccaacaagtccgatttcgcctgcgccaacgccttcaacaacagcattatccccgaggacacattcttcccaagccccgagagcagcgactccaccgaccacgtgaagcccaaagagacagagaacaccaagcagcccagcaagagctgccacaagcccaaggccatcgtgcacaccgagaaagtgaacatgatgagcctgaccgtgctgggcctgcggatgctgttcgccaaaaccgtggccgtgaacttcctgctgaccgccaagctgttcttcctccgcgccaagagaagcggatctggcgtgaagcagaccctgaatttcgacctgctgaagctggctggcgacgtggaatccaacccaggccctactagtatggactggatttggcgcatccttttccttgtcggcgctgctaccggcgcgcattccttcgaacaatctgctctgacacagcctgccagcgtgtcaggatctcctggacagagcatcaccatctcttgcaccggcaccagctctgatgtcggcggctacaattacgtgtcctggtatcagcagcaccccggcaaggcccctaagctgatgatctacgacgtgtccaacagacccagcggcgtgtccaatagattctccggcagcaagagcggcaacaccgccagcctgacaatttctggactgcaagccgaggacgaggccgactactactgtagcagctacaccagcagcagcacactggtgtacgtgttcggcacaggcaccaaagtgaccgtgcttacgcgtgaggacctgaagaacgtgttcccacctgaggtggccgtgttcgagcctagcgaggccgagatcagccacacccagaaagccaccctcgtgtgcctggctaccggcttctaccccgaccatgtggaactgtcttggtgggtcaacggcaaagaggtgcacagcggcgtgtgtaccgacccccagccactgaaagaacagcccgccctgaacgacagccggtactgcctgagcagcagactgagagtgtccgccaccttctggcagaacccccggaaccacttcagatgccaggtgcagttctacggcctgagcgagaacgacgagtggacccaggacagagccaagcccgtgacccagatcgtgtctgccgaagcctggggcagagccgatgatgtgattaagatccactggcaggaaaagaagtccaacaccatcctgggcagccaggaaggcaacaccatgaagaccaacgacacctacatgaagttcagctggctgaccgtgcccgagaagtccctggacaaagaacacagatgcatcgtgcggcacgaaaacaacaagaacggcgtggaccaggaaatcatcttcccacccatcaagaccgatgtgattacaatggaccccaaggacaactgctccaaggacgccaacgataccctgctgctccagctgaccaacaccagcgcctactacatgtacttgttgctgctgctgaagtccgtggtgtacttcgccatcatcacatgctgcctgctgcggagaaccgccttctgctgcaacggcgagaagtct

SEQ ID NO: 7670 - DNA, 2553 bp, synthetic construct
  source 1..2553: mol_type = other DNA
atggccttaccagtgaccgccttgctcctgccgctggccttgctgctccacgccgccaggccggaagtgcagctggttgaatctggcggaggactggttcagcctggcggatctctgagactgtcttgtgccgccagcggcttcagcttcagcgacttttggatgagctgggtccgacaggcccctggcaaaggacttgaatgggtcgccacaatcagccaggccggcagcgagaaggactacgtggactctgtgaagggcagattcaccatcagccgggacaacgccaagaagtccctgtacctccagatgaacagcctgagagccgaggacaccgccgtgtactattgtgcctctggcgtgtacagcttcgactacagaggccagggcaccctggtcacagtctcttctggtaccggcggaggcggatctggcggcggaggtagcggtggcggaggatctgaattccaggtgcaactggttcagtctggggccgaagtgaagaaacctggggcctctgtgaaggtgtcctgcaaggcttccggctacacctttaccagctacgacatcaactgggtccgacaggccacaggccaaggactggaatggatgggctggatgaaccccaacagcggcaataccggctacgcccagaaattccagggcagagtgaccatgaccagaaacaccagcatcagcaccgcctacatggaactgagcagcctgagaagcgaggacaccgccgtgtactattgcgccagaggcgacagcaccaaggtggaaatcaaactcgagatccagaaccctgatcctgccgtgtaccagctgcgggatagcaagagcagcgacaagagcgtgtgtctgttcaccgacttcgacagccagaccaacgtgtcccagagcaaggactccgacgtgtacatcaccgataagtgcgtgctggacatgcggagcatggacttcaagagcaactccgccgtggcctggtccaacaagtccgatttcgcctgcgccaacgccttcaacaacagcattatccccgaggacacattcttcccaagccccgagagcagcgactccaccgaccacgtgaagcccaaagagacagagaacaccaagcagcccagcaagagctgccacaagcccaaggccatcgtgcacaccgagaaagtgaacatgatgagcctgaccgtgctgggcctgcggatgctgttcgccaaaaccgtggccgtgaacttcctgctgaccgccaagctgttcttcctccgcgccaagagaagcggatctggcgtgaagcagaccctgaatttcgacctgctgaagctggctggcgacgtggaatccaacccaggccctactagtatggactggatttggcgcatccttttccttgtcggcgctgctaccggcgcgcattccttcgaacaatctgtgctgacccagcctagatccgtgtctggctctcctggacagagcgtgaccatctcttgtaccggcaccagctctgatgtcggcggctacaattacgtgtcctggtatcagcagcaccccggcgaagcccctaagctgattatctacgacgccgacaagcggcccagcggcatcagcaatagattcagctctggcaagagcggcaacaccgccagcctgacaatcagcggactccaggtggaagatgaggccgactactactgctgctcctatgccggcggaagcacctgggttttcggaggcggtacaaaagtgaccgtgctgacgcgtgaggacctgaagaacgtgttcccacctgaggtggccgtgttcgagcctagcgaggccgagatcagccacacccagaaagccaccctcgtgtgcctggctaccggcttctaccccgaccatgtggaactgtcttggtgggtcaacggcaaagaggtgcacagcggcgtgtgtaccgacccccagccactgaaagaacagcccgccctgaacgacagccggtactgcctgagcagcagactgagagtgtccgccaccttctggcagaacccccggaaccacttcagatgccaggtgcagttctacggcctgagcgagaacgacgagtggacccaggacagagccaagcccgtgacccagatcgtgtctgccgaagcctggggcagagccgatgatgtgattaagatccactggcaggaaaagaagtccaacaccatcctgggcagccaggaaggcaacaccatgaagaccaacgacacctacatgaagttcagctggctgaccgtgcccgagaagtccctggacaaagaacacagatgcatcgtgcggcacgaaaacaacaagaacggcgtggaccaggaaatcatcttcccacccatcaagaccgatgtgattacaatggaccccaaggacaactgctccaaggacgccaacgataccctgctgctccagctgaccaacaccagcgcctactacatgtacttgttgctgctgctgaagtccgtggtgtacttcgccatcatcacatgctgcctgctgcggagaaccgccttctgctgcaacggcgagaagtct

SEQ ID NO: 7671 - DNA, 2619 bp, synthetic construct
  source 1..2619: mol_type = other DNA
atggccttaccagtgaccgccttgctcctgccgctggccttgctgctccacgccgccaggccggaagtgcagctggttgaatctggcggaggactggttcagcctggcggatctctgagactgtcttgtgccgccagcggcttcagcttcagcgacttttggatgagctgggtccgacaggcccctggcaaaggacttgaatgggtcgccacaatcagccaggccggcagcgagaaggactacgtggactctgtgaagggcagattcaccatcagccgggacaacgccaagaagtccctgtacctccagatgaacagcctgagagccgaggacaccgccgtgtactattgtgcctctggcgtgtacagcttcgactacagaggccagggcaccctggtcacagtctcttctggtaccggcggaggcggatctggcggcggaggtagcggtggcggaggatctgaattcgaagtgcagctccagcagtctggacctggcctggttaagcctagccagacactgagcctgacctgtgccatcagcggcgatagcgtgtcctctaatagcgccgcctggaactggatcagacagagccctagcagaggactggaatggctgggcagaacctactaccgcagcaagtggtacagcgactacgccgtgtccgtgaagtcccggatcaccatcaatcccgacaccagcaagaaccagttcagcctgcaactgaacagcgtgacccctgaggataccgccgtgtactactgcgccagagatccctacgacttttggagcggctaccccgacgcctttgacatctggggacagggcacaatggtcaccgtttctagcctcgagatccagaaccctgatcctgccgtgtaccagctgcgggatagcaagagcagcgacaagagcgtgtgtctgttcaccgacttcgacagccagaccaacgtgtcccagagcaaggactccgacgtgtacatcaccgataagtgcgtgctggacatgcggagcatggacttcaagagcaactccgccgtggcctggtccaacaagtccgatttcgcctgcgccaacgccttcaacaacagcattatccccgaggacacattcttcccaagccccgagagcagcgactccaccgaccacgtgaagcccaaagagacagagaacaccaagcagcccagcaagagctgccacaagcccaaggccatcgtgcacaccgagaaagtgaacatgatgagcctgaccgtgctgggcctgcggatgctgttcgccaaaaccgtggccgtgaacttcctgctgaccgccaagctgttcttcctccgcgccaagagaagcggatctggcgtgaagcagaccctgaatttcgacctgctgaagctggctggcgacgtggaatccaacccaggccctactagtatggactggatttggcgcatccttttccttgtcggcgctgctaccggcgcgcattccttcgaacaatctgctctgacacagcctgccagcgtgtcaggatctcctggacagagcatcaccatctcttgcaccggcaccagctctgatgtcggcggctacaattacgtgtcctggtatcagcagcaccccggcaaggcccctaaagtgattatcagcgaagtgaacaacagacccagcggcgtgtcccacagattcagcggctctaagtctggcaacaccgccagcctgacaatctctggactgcaagccgaggacgaggccgactacttctgtagcagctacaccagcggcagaaccctgtacgtgttcggcacaggcagcaaagtgacagtgctgggaacgcgtgaggacctgaagaacgtgttcccacctgaggtggccgtgttcgagcctagcgaggccgagatcagccacacccagaaagccaccctcgtgtgcctggctaccggcttctaccccgaccatgtggaactgtcttggtgggtcaacggcaaagaggtgcacagcggcgtgtgtaccgacccccagccactgaaagaacagcccgccctgaacgacagccggtactgcctgagcagcagactgagagtgtccgccaccttctggcagaacccccggaaccacttcagatgccaggtgcagttctacggcctgagcgagaacgacgagtggacccaggacagagccaagcccgtgacccagatcgtgtctgccgaagcctggggcagagccgatgatgtgattaagatccactggcaggaaaagaagtccaacaccatcctgggcagccaggaaggcaacaccatgaagaccaacgacacctacatgaagttcagctggctgaccgtgcccgagaagtccctggacaaagaacacagatgcatcgtgcggcacgaaaacaacaagaacggcgtggaccaggaaatcatcttcccacccatcaagaccgatgtgattacaatggaccccaaggacaactgctccaaggacgccaacgataccctgctgctccagctgaccaacaccagcgcctactacatgtacttgttgctgctgctgaagtccgtggtgtacttcgccatcatcacatgctgcctgctgcggagaaccgccttctgctgcaacggcgagaagtct

SEQ ID NO: 7672 - DNA, 2616 bp, synthetic construct
  source 1..2616: mol_type = other DNA
atggccttaccagtgaccgccttgctcctgccgctggccttgctgctccacgccgccaggccggaagtgcagctggttgaatctggcggaggactggttcagcctggcggatctctgagactgtcttgtgccgccagcggcttcagcttcagcgacttttggatgagctgggtccgacaggcccctggcaaaggacttgaatgggtcgccacaatcagccaggccggcagcgagaaggactacgtggactctgtgaagggcagattcaccatcagccgggacaacgccaagaagtccctgtacctccagatgaacagcctgagagccgaggacaccgccgtgtactattgtgcctctggcgtgtacagcttcgactacagaggccagggcaccctggtcacagtctcttctggtaccggcggaggcggatctggcggcggaggtagcggtggcggaggatctgaattccaatctgctctgacacagcctgccagcgcctctggatctcctggacagagcgtgaccatctcctgtaccggcacctcttctgatgtcggcggctacaactacgtgtcctggtatcagcagcaccccggcaaggcccctaagctgatgatctacgacgtgtccaacagacccagcggcgtgtccaatagattctccggcagcaagagcggcaacaccgccagcctgacaatttctggactgcaagccgaggacgaggccgactactactgtagcagctacaccagcagcagcacactgtacgtgttcggcacaggcacccagctcacagttcttctcgagatccagaaccctgatcctgccgtgtaccagctgcgggatagcaagagcagcgacaagagcgtgtgtctgttcaccgacttcgacagccagaccaacgtgtcccagagcaaggactccgacgtgtacatcaccgataagtgcgtgctggacatgcggagcatggacttcaagagcaactccgccgtggcctggtccaacaagtccgatttcgcctgcgccaacgccttcaacaacagcattatccccgaggacacattcttcccaagccccgagagcagcgactccaccgaccacgtgaagcccaaagagacagagaacaccaagcagcccagcaagagctgccacaagcccaaggccatcgtgcacaccgagaaagtgaacatgatgagcctgaccgtgctgggcctgcggatgctgttcgccaaaaccgtggccgtgaacttcctgctgaccgccaagctgttcttcctccgcgccaagagaagcggatctggcgtgaagcagaccctgaatttcgacctgctgaagctggctggcgacgtggaatccaacccaggccctactagtatggactggatttggcgcatccttttccttgtcggcgctgctaccggcgcgcattccttcgaagaagtgcagctccagcagtctggacctggcctggttaagcctagccagacactgagcctgacctgtgccatcagcggcgattccatgctgagcaacagcgacacctggaactggatcagacagagccccagcagaggcctggaatggctgggcagaacataccacagaagcacttggtacgacgactacgccagctctgtgcggggcagagtgtccatcaatgtggacaccagcaagaaccagtacagcctgcaactgaacgccgtgacacctgaggataccggcgtgtactactgtgccagagtgcggctccaggacggcaattcttggagcgacgcctttgatgtgtggggccagggcacaatggtcaccgtttctagcacgcgtgaggacctgaagaacgtgttcccacctgaggtggccgtgttcgagcctagcgaggccgagatcagccacacccagaaagccaccctcgtgtgcctggctaccggcttctaccccgaccatgtggaactgtcttggtgggtcaacggcaaagaggtgcacagcggcgtgtgtaccgacccccagccactgaaagaacagcccgccctgaacgacagccggtactgcctgagcagcagactgagagtgtccgccaccttctggcagaacccccggaaccacttcagatgccaggtgcagttctacggcctgagcgagaacgacgagtggacccaggacagagccaagcccgtgacccagatcgtgtctgccgaagcctggggcagagccgatgatgtgattaagatccactggcaggaaaagaagtccaacaccatcctgggcagccaggaaggcaacaccatgaagaccaacgacacctacatgaagttcagctggctgaccgtgcccgagaagtccctggacaaagaacacagatgcatcgtgcggcacgaaaacaacaagaacggcgtggaccaggaaatcatcttcccacccatcaagaccgatgtgattacaatggaccccaaggacaactgctccaaggacgccaacgataccctgctgctccagctgaccaacaccagcgcctactacatgtacttgttgctgctgctgaagtccgtggtgtacttcgccatcatcacatgctgcctgctgcggagaaccgccttctgctgcaacggcgagaagtct

SEQ ID NO: 7673 - DNA, 2616 bp, synthetic construct
  source 1..2616: mol_type = other DNA
atggccttaccagtgaccgccttgctcctgccgctggccttgctgctccacgccgccaggccggaagtgcagctggttgaatctggcggaggactggttcagcctggcggatctctgagactgtcttgtgccgccagcggcttcagcttcagcgacttttggatgagctgggtccgacaggcccctggcaaaggacttgaatgggtcgccacaatcagccaggccggcagcgagaaggactacgtggactctgtgaagggcagattcaccatcagccgggacaacgccaagaagtccctgtacctccagatgaacagcctgagagccgaggacaccgccgtgtactattgtgcctctggcgtgtacagcttcgactacagaggccagggcaccctggtcacagtctcttctggtaccggcggaggcggatctggcggcggaggtagcggtggcggaggatctgaattcgacgtgatgctgacccagacaccactgagcctgcctgtgtctctgggcgatcaggccagcatctcctgtagaagcagccagagcatcctgcacagcaccggcgatacctacctggaatggtatctccagaagcctggacagagccccaagctgctgattaacaaggtgtccaaccggctgagcggcgtgcccgatagattttctggcagcggctctggcaccgacttcaccctgaagatcagcagagtggaagccgaggacctgggcgtgtactactgcttccaaggcagccatgttccttggacctttggcggaggcaccaagctggaaatcaagagagctgacgccgctcctaccgtgtccatctttcctctcgagatccagaaccctgatcctgccgtgtaccagctgcgggatagcaagagcagcgacaagagcgtgtgtctgttcaccgacttcgacagccagaccaacgtgtcccagagcaaggactccgacgtgtacatcaccgataagtgcgtgctggacatgcggagcatggacttcaagagcaactccgccgtggcctggtccaacaagtccgatttcgcctgcgccaacgccttcaacaacagcattatccccgaggacacattcttcccaagccccgagagcagcgactccaccgaccacgtgaagcccaaagagacagagaacaccaagcagcccagcaagagctgccacaagcccaaggccatcgtgcacaccgagaaagtgaacatgatgagcctgaccgtgctgggcctgcggatgctgttcgccaaaaccgtggccgtgaacttcctgctgaccgccaagctgttcttcctccgcgccaagagaagcggatctggcgtgaagcagaccctgaatttcgacctgctgaagctggctggcgacgtggaatccaacccaggccctactagtatggactggatttggcgcatccttttccttgtcggcgctgctaccggcgcgcattccttcgaacaagtgaagctccagcagagcggccctagccttgtgaaacctggcgcttccgtgaagatgagctgcaaggccagcggctacaccttcaccgatttctacatgaaatgggtcaagcagagccacggcaagtctctggaatggatcggcgacatcaaccccaacatcggagacaccttctacaaccagaagttcaagggcaaagccacactgaccgtggacaagagcagcagcaccgcctacatgcagctcaacagcctgaccagcgaggacagcgccgtgtacttttgttccgtgggctacttcgacgtgtggggagccggaacaaccgtgacagtctcttctacgcgtgaggacctgaagaacgtgttcccacctgaggtggccgtgttcgagcctagcgaggccgagatcagccacacccagaaagccaccctcgtgtgcctggctaccggcttctaccccgaccatgtggaactgtcttggtgggtcaacggcaaagaggtgcacagcggcgtgtgtaccgacccccagccactgaaagaacagcccgccctgaacgacagccggtactgcctgagcagcagactgagagtgtccgccaccttctggcagaacccccggaaccacttcagatgccaggtgcagttctacggcctgagcgagaacgacgagtggacccaggacagagccaagcccgtgacccagatcgtgtctgccgaagcctggggcagagccgatgatgtgattaagatccactggcaggaaaagaagtccaacaccatcctgggcagccaggaaggcaacaccatgaagaccaacgacacctacatgaagttcagctggctgaccgtgcccgagaagtccctggacaaagaacacagatgcatcgtgcggcacgaaaacaacaagaacggcgtggaccaggaaatcatcttcccacccatcaagaccgatgtgattacaatggaccccaaggacaactgctccaaggacgccaacgataccctgctgctccagctgaccaacaccagcgcctactacatgtacttgttgctgctgctgaagtccgtggtgtacttcgccatcatcacatgctgcctgctgcggagaaccgccttctgctgcaacggcgagaagtct

SEQ ID NO: 7674 - DNA, 2604 bp, synthetic construct
  source 1..2604: mol_type = other DNA
atggccttaccagtgaccgccttgctcctgccgctggccttgctgctccacgccgccaggccggaagtgcagctggttgaatctggcggaggactggttcagcctggcggatctctgagactgtcttgtgccgccagcggcttcagcttcagcgacttttggatgagctgggtccgacaggcccctggcaaaggacttgaatgggtcgccacaatcagccaggccggcagcgagaaggactacgtggactctgtgaagggcagattcaccatcagccgggacaacgccaagaagtccctgtacctccagatgaacagcctgagagccgaggacaccgccgtgtactattgtgcctctggcgtgtacagcttcgactacagaggccagggcaccctggtcacagtctcttctggtaccggcggaggcggatctggcggcggaggtagcggtggcggaggatctgaattcgagatcgtgctgacacagtctcccgccacactgtcactgtctccaggcgaaagagccacactgagctgtagagccagccagagcgtgtccatctacctggcctggtatcagcagaagcctggacaggctccccggctgctgatctacgatgccagcaatagagccacaggcatccccgccagattttctggctctggcagcggcaccgatttcaccctgaccataagcagcctggaacctgaggacttcgccgtgtactactgccagcagagaagcaactggcctcctttcacattcggccctggcaccaaggtggacatcaaactcgagatccagaaccctgatcctgccgtgtaccagctgcgggatagcaagagcagcgacaagagcgtgtgtctgttcaccgacttcgacagccagaccaacgtgtcccagagcaaggactccgacgtgtacatcaccgataagtgcgtgctggacatgcggagcatggacttcaagagcaactccgccgtggcctggtccaacaagtccgatttcgcctgcgccaacgccttcaacaacagcattatccccgaggacacattcttcccaagccccgagagcagcgactccaccgaccacgtgaagcccaaagagacagagaacaccaagcagcccagcaagagctgccacaagcccaaggccatcgtgcacaccgagaaagtgaacatgatgagcctgaccgtgctgggcctgcggatgctgttcgccaaaaccgtggccgtgaacttcctgctgaccgccaagctgttcttcctccgcgccaagagaagcggatctggcgtgaagcagaccctgaatttcgacctgctgaagctggctggcgacgtggaatccaacccaggccctactagtatggactggatttggcgcatccttttccttgtcggcgctgctaccggcgcgcattccttcgaacaggtgcagcttgttgaaagcggaggcggagttgtgcagcctggcagaagtctgagactgtcttgtgccgccagcggcttcaccttcagcagctatggaatgcactgggtccgacaggcccctggcaaaggacttgaatgggttgccgtgatctgggacgacggcagcaacaagtattacgtggacagcgtgaagggcagattcaccatcagccgggacaacagcaagaacaccctgtacctccagatgaacagcctgagagccgaggacacagccgtgtattattgcgccagagatgactactacggcagcggctccttcaacagctactatggcacagacgtgtggggccagggcacaacagttaccgttagctctacgcgtgaggacctgaagaacgtgttcccacctgaggtggccgtgttcgagcctagcgaggccgagatcagccacacccagaaagccaccctcgtgtgcctggctaccggcttctaccccgaccatgtggaactgtcttggtgggtcaacggcaaagaggtgcacagcggcgtgtgtaccgacccccagccactgaaagaacagcccgccctgaacgacagccggtactgcctgagcagcagactgagagtgtccgccaccttctggcagaacccccggaaccacttcagatgccaggtgcagttctacggcctgagcgagaacgacgagtggacccaggacagagccaagcccgtgacccagatcgtgtctgccgaagcctggggcagagccgatgatgtgattaagatccactggcaggaaaagaagtccaacaccatcctgggcagccaggaaggcaacaccatgaagaccaacgacacctacatgaagttcagctggctgaccgtgcccgagaagtccctggacaaagaacacagatgcatcgtgcggcacgaaaacaacaagaacggcgtggaccaggaaatcatcttcccacccatcaagaccgatgtgattacaatggaccccaaggacaactgctccaaggacgccaacgataccctgctgctccagctgaccaacaccagcgcctactacatgtacttgttgctgctgctgaagtccgtggtgtacttcgccatcatcacatgctgcctgctgcggagaaccgccttctgctgcaacggcgagaagtct

SEQ ID NO: 7675 - DNA, 2559 bp, synthetic construct
  source 1..2559: mol_type = other DNA
atggccttaccagtgaccgccttgctcctgccgctggccttgctgctccacgccgccaggccggaagtgcagctggttgaatctggcggaggactggttcagcctggcggatctctgagactgtcttgtgccgccagcggcttcagcttcagcgacttttggatgagctgggtccgacaggcccctggcaaaggacttgaatgggtcgccacaatcagccaggccggcagcgagaaggactacgtggactctgtgaagggcagattcaccatcagccgggacaacgccaagaagtccctgtacctccagatgaacagcctgagagccgaggacaccgccgtgtactattgtgcctctggcgtgtacagcttcgactacagaggccagggcaccctggtcacagtctcttctggtaccggcggaggcggatctggcggcggaggtagcggtggcggaggatctgaattcgacatccagatgacacagagccctagcagcctgtctgccagcgtgggagacagagtgaccatcacctgtagagccagccagggcatctcttcttggctggcctggtatcagcagaagcccgagaaggcccctaagagcctgatctatgccgccagctctctccagagcggagtgcctagcagattttctggcagcggctccggcaccgatttcaccctgacaatatccagcctccagcctgaggacttcgccacctactactgccagcagtacaacagctacccctacaccttcggccagggcaccaagctggaaatcaaactcgagatccagaaccctgatcctgccgtgtaccagctgcgggatagcaagagcagcgacaagagcgtgtgtctgttcaccgacttcgacagccagaccaacgtgtcccagagcaaggactccgacgtgtacatcaccgataagtgcgtgctggacatgcggagcatggacttcaagagcaactccgccgtggcctggtccaacaagtccgatttcgcctgcgccaacgccttcaacaacagcattatccccgaggacacattcttcccaagccccgagagcagcgactccaccgaccacgtgaagcccaaagagacagagaacaccaagcagcccagcaagagctgccacaagcccaaggccatcgtgcacaccgagaaagtgaacatgatgagcctgaccgtgctgggcctgcggatgctgttcgccaaaaccgtggccgtgaacttcctgctgaccgccaagctgttcttcctccgcgccaagagaagcggatctggcgtgaagcagaccctgaatttcgacctgctgaagctggctggcgacgtggaatccaacccaggccctactagtatggactggatttggcgcatccttttccttgtcggcgctgctaccggcgcgcattccttcgaagaagtgcaactggttcaatctggcggcggactggttcatccaggcggttctctgagactgagctgtgccggctctggcttcaccttcagcacctacctgatgtactgggtccgacaggcccctggcaagacactggaatgggtgtccgctattggcagcggaggcgatacctactacgccgactctgtgaagggcagattcaccatcagccgggacaacgccaagaacagcctgtacctccagatgaactccctgagagccgaggacatggccgtgtactactgtgccagaggactcggctattggggccagggaacactggtcacagtgtcctctacgcgtgaggacctgaagaacgtgttcccacctgaggtggccgtgttcgagcctagcgaggccgagatcagccacacccagaaagccaccctcgtgtgcctggctaccggcttctaccccgaccatgtggaactgtcttggtgggtcaacggcaaagaggtgcacagcggcgtgtgtaccgacccccagccactgaaagaacagcccgccctgaacgacagccggtactgcctgagcagcagactgagagtgtccgccaccttctggcagaacccccggaaccacttcagatgccaggtgcagttctacggcctgagcgagaacgacgagtggacccaggacagagccaagcccgtgacccagatcgtgtctgccgaagcctggggcagagccgatgatgtgattaagatccactggcaggaaaagaagtccaacaccatcctgggcagccaggaaggcaacaccatgaagaccaacgacacctacatgaagttcagctggctgaccgtgcccgagaagtccctggacaaagaacacagatgcatcgtgcggcacgaaaacaacaagaacggcgtggaccaggaaatcatcttcccacccatcaagaccgatgtgattacaatggaccccaaggacaactgctccaaggacgccaacgataccctgctgctccagctgaccaacaccagcgcctactacatgtacttgttgctgctgctgaagtccgtggtgtacttcgccatcatcacatgctgcctgctgcggagaaccgccttctgctgcaacggcgagaagtct

SEQ ID NO: 7676 - DNA, 2616 bp, synthetic construct
  source 1..2616: mol_type = other DNA
atggccttaccagtgaccgccttgctcctgccgctggccttgctgctccacgccgccaggccggaagtgcagctggttgaatctggcggaggactggttcagcctggcggatctctgagactgtcttgtgccgccagcggcttcagcttcagcgacttttggatgagctgggtccgacaggcccctggcaaaggacttgaatgggtcgccacaatcagccaggccggcagcgagaaggactacgtggactctgtgaagggcagattcaccatcagccgggacaacgccaagaagtccctgtacctccagatgaacagcctgagagccgaggacaccgccgtgtactattgtgcctctggcgtgtacagcttcgactacagaggccagggcaccctggtcacagtctcttctggtaccggcggaggcggatctggcggcggaggtagcggtggcggaggatctgaattcctgcctgttctgacacagcctccatccgtgtctgtggcccctggaaagaccgccagaatcacatgcggcggcaacaacatcggcagcaagagcgtgcactggtatcagcagaagcctggacaggctcctgtgctggtggtgtacgacgacagcgatagacctagcggcatccccgagagattcagcggcagcaattccggcaataccgccacactgaccatcagcagagtggaagctggcgacgaggccgactactactgccaagtgtgggacagcagcagcgactacgtggtgtttggcggcggaacaaagctgacagtgcttctcgagatccagaaccctgatcctgccgtgtaccagctgcgggatagcaagagcagcgacaagagcgtgtgtctgttcaccgacttcgacagccagaccaacgtgtcccagagcaaggactccgacgtgtacatcaccgataagtgcgtgctggacatgcggagcatggacttcaagagcaactccgccgtggcctggtccaacaagtccgatttcgcctgcgccaacgccttcaacaacagcattatccccgaggacacattcttcccaagccccgagagcagcgactccaccgaccacgtgaagcccaaagagacagagaacaccaagcagcccagcaagagctgccacaagcccaaggccatcgtgcacaccgagaaagtgaacatgatgagcctgaccgtgctgggcctgcggatgctgttcgccaaaaccgtggccgtgaacttcctgctgaccgccaagctgttcttcctccgcgccaagagaagcggatctggcgtgaagcagaccctgaatttcgacctgctgaagctggctggcgacgtggaatccaacccaggccctactagtatggactggatttggcgcatccttttccttgtcggcgctgctaccggcgcgcattccttcgaagaagttcaactggtgcagagcggagccgaagtgaagaagccaggcgagagcctgaagattagctgcaaaggcagcggctacagcttcaccagctactggatcggctgggtccgacagatgcctggcaaaggactggaatggatgggcatcatctaccccggcgacagcgacaccagatacagccctagctttcagggccaagtgaccatctccgccgacaagagcatcagcacagcctacctccagtggtcctctctgaaggccagcgataccgccatgtactactgcgccagacaagtctggggatggcaaggcggcatgtaccccaggtctaactggtggtacaacctggactcttggggccagggcacactggtcacagtctcttctacgcgtgaggacctgaagaacgtgttcccacctgaggtggccgtgttcgagcctagcgaggccgagatcagccacacccagaaagccaccctcgtgtgcctggctaccggcttctaccccgaccatgtggaactgtcttggtgggtcaacggcaaagaggtgcacagcggcgtgtgtaccgacccccagccactgaaagaacagcccgccctgaacgacagccggtactgcctgagcagcagactgagagtgtccgccaccttctggcagaacccccggaaccacttcagatgccaggtgcagttctacggcctgagcgagaacgacgagtggacccaggacagagccaagcccgtgacccagatcgtgtctgccgaagcctggggcagagccgatgatgtgattaagatccactggcaggaaaagaagtccaacaccatcctgggcagccaggaaggcaacaccatgaagaccaacgacacctacatgaagttcagctggctgaccgtgcccgagaagtccctggacaaagaacacagatgcatcgtgcggcacgaaaacaacaagaacggcgtggaccaggaaatcatcttcccacccatcaagaccgatgtgattacaatggaccccaaggacaactgctccaaggacgccaacgataccctgctgctccagctgaccaacaccagcgcctactacatgtacttgttgctgctgctgaagtccgtggtgtacttcgccatcatcacatgctgcctgctgcggagaaccgccttctgctgcaacggcgagaagtct

SEQ ID NO: 7677 - DNA, 2595 bp, synthetic construct
  source 1..2595: mol_type = other DNA
atggccttaccagtgaccgccttgctcctgccgctggccttgctgctccacgccgccaggccggaagtgcagctggttgaatctggcggaggactggttcagcctggcggatctctgagactgtcttgtgccgccagcggcttcagcttcagcgacttttggatgagctgggtccgacaggcccctggcaaaggacttgaatgggtcgccacaatcagccaggccggcagcgagaaggactacgtggactctgtgaagggcagattcaccatcagccgggacaacgccaagaagtccctgtacctccagatgaacagcctgagagccgaggacaccgccgtgtactattgtgcctctggcgtgtacagcttcgactacagaggccagggcaccctggtcacagtctcttctggtaccggcggaggcggatctggcggcggaggtagcggtggcggaggatctgaattcgagctggtcatgacacagagccctgcttctctggccgtgtcactgggacagagagccaccatctcttgcagagccagcgagagcgtggacagctacggcaagagcttcatgcactggtatcagctcaagcccggccagcctcctaagctgctgatctacagagcctccaacctggaaagcggcgtgccagccagattttctggcagcggcagcagaaccgacttcaccctgaccattgatcccgtggaagccgatgatgccgccacctactactgccagcagaacaacgaggacccctggacatttggcggaggcaccaagctggaaatcaaactcgagatccagaaccctgatcctgccgtgtaccagctgcgggatagcaagagcagcgacaagagcgtgtgtctgttcaccgacttcgacagccagaccaacgtgtcccagagcaaggactccgacgtgtacatcaccgataagtgcgtgctggacatgcggagcatggacttcaagagcaactccgccgtggcctggtccaacaagtccgatttcgcctgcgccaacgccttcaacaacagcattatccccgaggacacattcttcccaagccccgagagcagcgactccaccgaccacgtgaagcccaaagagacagagaacaccaagcagcccagcaagagctgccacaagcccaaggccatcgtgcacaccgagaaagtgaacatgatgagcctgaccgtgctgggcctgcggatgctgttcgccaaaaccgtggccgtgaacttcctgctgaccgccaagctgttcttcctccgcgccaagagaagcggatctggcgtgaagcagaccctgaatttcgacctgctgaagctggctggcgacgtggaatccaacccaggccctactagtatggactggatttggcgcatccttttccttgtcggcgctgctaccggcgcgcattccttcgaagaagtgcagctcgaacagtctggccccgagcttgtgaaacctggcgcttccgtgaagatgagctgcaaggccagcggctacaccttcaccaactactacatgaaatgggtcaagcagagccacggcaagtccctggaatggatcggcgatctgaaccccaacaacggcgacaccttctacaaccagaagttcaagggcaaagccacactgaccgtggacaagagcagcaacaccgcctacatgcagctcaactccctgaccagcgaggacagcgccgtgtactactgtgccagaaccggcagatacgaagagaacgctatggactactggggccagggcacaagcgtgacagtctcttctacgcgtgaggacctgaagaacgtgttcccacctgaggtggccgtgttcgagcctagcgaggccgagatcagccacacccagaaagccaccctcgtgtgcctggctaccggcttctaccccgaccatgtggaactgtcttggtgggtcaacggcaaagaggtgcacagcggcgtgtgtaccgacccccagccactgaaagaacagcccgccctgaacgacagccggtactgcctgagcagcagactgagagtgtccgccaccttctggcagaacccccggaaccacttcagatgccaggtgcagttctacggcctgagcgagaacgacgagtggacccaggacagagccaagcccgtgacccagatcgtgtctgccgaagcctggggcagagccgatgatgtgattaagatccactggcaggaaaagaagtccaacaccatcctgggcagccaggaaggcaacaccatgaagaccaacgacacctacatgaagttcagctggctgaccgtgcccgagaagtccctggacaaagaacacagatgcatcgtgcggcacgaaaacaacaagaacggcgtggaccaggaaatcatcttcccacccatcaagaccgatgtgattacaatggaccccaaggacaactgctccaaggacgccaacgataccctgctgctccagctgaccaacaccagcgcctactacatgtacttgttgctgctgctgaagtccgtggtgtacttcgccatcatcacatgctgcctgctgcggagaaccgccttctgctgcaacggcgagaagtct

SEQ ID NO: 7678 - DNA, 2577 bp, synthetic construct
  source 1..2577: mol_type = other DNA
atggccttaccagtgaccgccttgctcctgccgctggccttgctgctccacgccgccaggccggaagtgcagctggttgaatctggcggaggactggttcagcctggcggatctctgagactgtcttgtgccgccagcggcttcagcttcagcgacttttggatgagctgggtccgacaggcccctggcaaaggacttgaatgggtcgccacaatcagccaggccggcagcgagaaggactacgtggactctgtgaagggcagattcaccatcagccgggacaacgccaagaagtccctgtacctccagatgaacagcctgagagccgaggacaccgccgtgtactattgtgcctctggcgtgtacagcttcgactacagaggccagggcaccctggtcacagtctcttctggtaccggcggaggcggatctggcggcggaggtagcggtggcggaggatctgaattcgacgtggtcatgacacagagcccttctagcctgtctgccagcgtgggcgacagagtgaccatcacctgtatggcctccgaggacatctacatccggctggcctggtatcagcagaagcctggaaacgcccctaagctgctgatctacgccgccacctctctggaaacaggcgtgccaagcagattttccggcagcggctctggcaccgatttcaccctgacaatatccagcctccagcctgaggacttcgccacctactactgccagcagtattggagcagcccctggacatttggcggaggcaccaaggtggaaatcaaactcgagatccagaaccctgatcctgccgtgtaccagctgcgggatagcaagagcagcgacaagagcgtgtgtctgttcaccgacttcgacagccagaccaacgtgtcccagagcaaggactccgacgtgtacatcaccgataagtgcgtgctggacatgcggagcatggacttcaagagcaactccgccgtggcctggtccaacaagtccgatttcgcctgcgccaacgccttcaacaacagcattatccccgaggacacattcttcccaagccccgagagcagcgactccaccgaccacgtgaagcccaaagagacagagaacaccaagcagcccagcaagagctgccacaagcccaaggccatcgtgcacaccgagaaagtgaacatgatgagcctgaccgtgctgggcctgcggatgctgttcgccaaaaccgtggccgtgaacttcctgctgaccgccaagctgttcttcctccgcgccaagagaagcggatctggcgtgaagcagaccctgaatttcgacctgctgaagctggctggcgacgtggaatccaacccaggccctactagtatggactggatttggcgcatccttttccttgtcggcgctgctaccggcgcgcattccttcgaacaggttcagctgcaagagtctggccccggactggtcaagcctagccaaacactgagcctgacctgtaccgtgtccggctacagcatcaccagcgactacacctggaactggatcagacagcctcctggcaacggactggaatggatcggctacatcacctacagcggcagcaccagctacaaccccagcctgaaaagccgggtgctgatctccgtggacaccagcaagaatcaggtgtccctgaagctgagcagcgtgacagccgctgataccgccgtgtactactgtgccagactggggagaagatacacaatggactactggggccagggcaccaccgtgacagtttcttctacgcgtgaggacctgaagaacgtgttcccacctgaggtggccgtgttcgagcctagcgaggccgagatcagccacacccagaaagccaccctcgtgtgcctggctaccggcttctaccccgaccatgtggaactgtcttggtgggtcaacggcaaagaggtgcacagcggcgtgtgtaccgacccccagccactgaaagaacagcccgccctgaacgacagccggtactgcctgagcagcagactgagagtgtccgccaccttctggcagaacccccggaaccacttcagatgccaggtgcagttctacggcctgagcgagaacgacgagtggacccaggacagagccaagcccgtgacccagatcgtgtctgccgaagcctggggcagagccgatgatgtgattaagatccactggcaggaaaagaagtccaacaccatcctgggcagccaggaaggcaacaccatgaagaccaacgacacctacatgaagttcagctggctgaccgtgcccgagaagtccctggacaaagaacacagatgcatcgtgcggcacgaaaacaacaagaacggcgtggaccaggaaatcatcttcccacccatcaagaccgatgtgattacaatggaccccaaggacaactgctccaaggacgccaacgataccctgctgctccagctgaccaacaccagcgcctactacatgtacttgttgctgctgctgaagtccgtggtgtacttcgccatcatcacatgctgcctgctgcggagaaccgccttctgctgcaacggcgagaagtct

SEQ ID NO: 7679 - DNA, 2589 bp, synthetic construct
  source 1..2589: mol_type = other DNA
atggccttaccagtgaccgccttgctcctgccgctggccttgctgctccacgccgccaggccggaagtgcagctggttgaatctggcggaggactggttcagcctggcggatctctgagactgtcttgtgccgccagcggcttcagcttcagcgacttttggatgagctgggtccgacaggcccctggcaaaggacttgaatgggtcgccacaatcagccaggccggcagcgagaaggactacgtggactctgtgaagggcagattcaccatcagccgggacaacgccaagaagtccctgtacctccagatgaacagcctgagagccgaggacaccgccgtgtactattgtgcctctggcgtgtacagcttcgactacagaggccagggcaccctggtcacagtctcttctggtaccggcggaggcggatctggcggcggaggtagcggtggcggaggatctgaattcgatattgtgctgactcagagccctgccactctgagccttagtccaggcgacagagctaccatctcctgtagggcctctgaatccgtgaccattctgggctctcatctcatatattggtatcaacaaaagccgggccagcctccacggctgctcattcaactggcctctaacgtgcagaccggcgtgccagctagattttctggctctggctcccggaccgactttacactgacaatcagctccgtggaacccgaagattttgccgtctattattgcctccagtccaggaccattcctcggacattcggccagggaacaaaactcgaaatcaagcggctcgagatccagaaccctgatcctgccgtgtaccagctgcgggatagcaagagcagcgacaagagcgtgtgtctgttcaccgacttcgacagccagaccaacgtgtcccagagcaaggactccgacgtgtacatcaccgataagtgcgtgctggacatgcggagcatggacttcaagagcaactccgccgtggcctggtccaacaagtccgatttcgcctgcgccaacgccttcaacaacagcattatccccgaggacacattcttcccaagccccgagagcagcgactccaccgaccacgtgaagcccaaagagacagagaacaccaagcagcccagcaagagctgccacaagcccaaggccatcgtgcacaccgagaaagtgaacatgatgagcctgaccgtgctgggcctgcggatgctgttcgccaaaaccgtggccgtgaacttcctgctgaccgccaagctgttcttcctccgcgccaagagaagcggatctggcgtgaagcagaccctgaatttcgacctgctgaagctggctggcgacgtggaatccaacccaggccctactagtatggactggatttggcgcatccttttccttgtcggcgctgctaccggcgcgcattccttcgaacaggtgcagctcgttcagagtggccccgaagtgaaaaagccaggcgagtccgtgaagatttcctgcaaagcctccggctacacattccggcactactctatgaattgggtcaagcaggccccaggccagggccttaagtggatgggacgcatcaataccgagtccggcgtgccaatctacgccgatgacttcaaaggccggttcagcttcaccgtggatacctctgcctccaccgcctacctggaaatcagcagcctgaccagcgaggatacagctgtgtacttctgtagcaacgattacctctacagcctggatttctggggacagggaaccacactgaccgtgtctagcacgcgtgaggacctgaagaacgtgttcccacctgaggtggccgtgttcgagcctagcgaggccgagatcagccacacccagaaagccaccctcgtgtgcctggctaccggcttctaccccgaccatgtggaactgtcttggtgggtcaacggcaaagaggtgcacagcggcgtgtgtaccgacccccagccactgaaagaacagcccgccctgaacgacagccggtactgcctgagcagcagactgagagtgtccgccaccttctggcagaacccccggaaccacttcagatgccaggtgcagttctacggcctgagcgagaacgacgagtggacccaggacagagccaagcccgtgacccagatcgtgtctgccgaagcctggggcagagccgatgatgtgattaagatccactggcaggaaaagaagtccaacaccatcctgggcagccaggaaggcaacaccatgaagaccaacgacacctacatgaagttcagctggctgaccgtgcccgagaagtccctggacaaagaacacagatgcatcgtgcggcacgaaaacaacaagaacggcgtggaccaggaaatcatcttcccacccatcaagaccgatgtgattacaatggaccccaaggacaactgctccaaggacgccaacgataccctgctgctccagctgaccaacaccagcgcctactacatgtacttgttgctgctgctgaagtccgtggtgtacttcgccatcatcacatgctgcctgctgcggagaaccgccttctgctgcaacggcgagaagtct

SEQ ID NO: 7680 - DNA, 2589 bp, synthetic construct
  source 1..2589: mol_type = other DNA
atggccttaccagtgaccgccttgctcctgccgctggccttgctgctccacgccgccaggccggaagtgcagctggttgaatctggcggaggactggttcagcctggcggatctctgagactgtcttgtgccgccagcggcttcagcttcagcgacttttggatgagctgggtccgacaggcccctggcaaaggacttgaatgggtcgccacaatcagccaggccggcagcgagaaggactacgtggactctgtgaagggcagattcaccatcagccgggacaacgccaagaagtccctgtacctccagatgaacagcctgagagccgaggacaccgccgtgtactattgtgcctctggcgtgtacagcttcgactacagaggccagggcaccctggtcacagtctcttctggtaccggcggaggcggatctggcggcggaggtagcggtggcggaggatctgaattcgacatcgtgctgacacagtctcccgccacactgtcactgagccctggcgatagagccacactgagctgtagagccagcgagagcgtgacaatcctgggcagccacctgatctactggtatcagcagaagcccggacaggcccctagactgctgattcagctcgccagcaatgtgcagacaggcatccctgccagattttccggcagcggcagcagaaccgatttcaccctgaccataagcagcctggaacctgaggacttcgccgtgtactactgcctccagagccggacaatccccagaacctttggacagggcaccaagctggaaatcaagagactcgagatccagaaccctgatcctgccgtgtaccagctgcgggatagcaagagcagcgacaagagcgtgtgtctgttcaccgacttcgacagccagaccaacgtgtcccagagcaaggactccgacgtgtacatcaccgataagtgcgtgctggacatgcggagcatggacttcaagagcaactccgccgtggcctggtccaacaagtccgatttcgcctgcgccaacgccttcaacaacagcattatccccgaggacacattcttcccaagccccgagagcagcgactccaccgaccacgtgaagcccaaagagacagagaacaccaagcagcccagcaagagctgccacaagcccaaggccatcgtgcacaccgagaaagtgaacatgatgagcctgaccgtgctgggcctgcggatgctgttcgccaaaaccgtggccgtgaacttcctgctgaccgccaagctgttcttcctccgcgccaagagaagcggatctggcgtgaagcagaccctgaatttcgacctgctgaagctggctggcgacgtggaatccaacccaggccctactagtatggactggatttggcgcatccttttccttgtcggcgctgctaccggcgcgcattccttcgaacaggttcagctggtgcagtctggcagcgagctgaagaaacctggcgagagcgtgaagatcagctgcaaggccagcggctacaccttcacacactacagcatgaactgggtccgacaggcccctggacaaggactggaatggatgggcagaatcaacaccgagacaggcgagcccctgtacgccgacgatttcaagggcagattcgtgttcagcctggacaccagcgccagcacagcctatctccagatcagctctctgaaggccgaggacaccgccgtgtactactgctccaacgactacctgtactccctggactattggggccagggcacactggtcacagtgtctagtacgcgtgaggacctgaagaacgtgttcccacctgaggtggccgtgttcgagcctagcgaggccgagatcagccacacccagaaagccaccctcgtgtgcctggctaccggcttctaccccgaccatgtggaactgtcttggtgggtcaacggcaaagaggtgcacagcggcgtgtgtaccgacccccagccactgaaagaacagcccgccctgaacgacagccggtactgcctgagcagcagactgagagtgtccgccaccttctggcagaacccccggaaccacttcagatgccaggtgcagttctacggcctgagcgagaacgacgagtggacccaggacagagccaagcccgtgacccagatcgtgtctgccgaagcctggggcagagccgatgatgtgattaagatccactggcaggaaaagaagtccaacaccatcctgggcagccaggaaggcaacaccatgaagaccaacgacacctacatgaagttcagctggctgaccgtgcccgagaagtccctggacaaagaacacagatgcatcgtgcggcacgaaaacaacaagaacggcgtggaccaggaaatcatcttcccacccatcaagaccgatgtgattacaatggaccccaaggacaactgctccaaggacgccaacgataccctgctgctccagctgaccaacaccagcgcctactacatgtacttgttgctgctgctgaagtccgtggtgtacttcgccatcatcacatgctgcctgctgcggagaaccgccttctgctgcaacggcgagaagtct

SEQ ID NO: 7681 - DNA, 2592 bp, synthetic construct
  source 1..2592: mol_type = other DNA
atggccttaccagtgaccgccttgctcctgccgctggccttgctgctccacgccgccaggccggaagtgcagctggttgaatctggcggaggactggttcagcctggcggatctctgagactgtcttgtgccgccagcggcttcagcttcagcgacttttggatgagctgggtccgacaggcccctggcaaaggacttgaatgggtcgccacaatcagccaggccggcagcgagaaggactacgtggactctgtgaagggcagattcaccatcagccgggacaacgccaagaagtccctgtacctccagatgaacagcctgagagccgaggacaccgccgtgtactattgtgcctctggcgtgtacagcttcgactacagaggccagggcaccctggtcacagtctcttctggtaccggcggaggcggatctggcggcggaggtagcggtggcggaggatctgaattcgacatccagctgactcagagccctagctttctgagcgccagcgtgggcgacagagtgaccattacatgtagagccagccagggcatcagcaccgacctgaactggtatcagcagaagcctggcaaggcccctaagctgctgatctacgccgccagcaatctggaaagcggcgtgccaagcagattttccggctctggcagcggcaccgagttcaccctgacaatatctagcctccagcctgaggacttcgccacctactactgccagcagagctacaactggccctacacctttggcggaggcaccaaggtggaaatcaagagactcgagatccagaaccctgatcctgccgtgtaccagctgcgggatagcaagagcagcgacaagagcgtgtgtctgttcaccgacttcgacagccagaccaacgtgtcccagagcaaggactccgacgtgtacatcaccgataagtgcgtgctggacatgcggagcatggacttcaagagcaactccgccgtggcctggtccaacaagtccgatttcgcctgcgccaacgccttcaacaacagcattatccccgaggacacattcttcccaagccccgagagcagcgactccaccgaccacgtgaagcccaaagagacagagaacaccaagcagcccagcaagagctgccacaagcccaaggccatcgtgcacaccgagaaagtgaacatgatgagcctgaccgtgctgggcctgcggatgctgttcgccaaaaccgtggccgtgaacttcctgctgaccgccaagctgttcttcctccgcgccaagagaagcggatctggcgtgaagcagaccctgaatttcgacctgctgaagctggctggcgacgtggaatccaacccaggccctactagtatggactggatttggcgcatccttttccttgtcggcgctgctaccggcgcgcattccttcgaagaagttcagctggttgaatcaggcggaggactcgtgaaacctggcggctctctgagactgtcttgtgccgccagcggcttcaccttcagcaacttcgagatgaactgggtccgacaggccccaggcaaaggactggaatgggtgtccggcatcagctccaatggccggtacatcaactacgccgacagcgtgaagggcagattcaccatcagccgggacaacgccaagaacagcctgtacctccagatgaactccctgagagccgaggacaccgccgtgtactattgtgccagagtggtggacttcgaccaggactacaacggcttcgactattggggccagggcaccctggttaccgttagctctacgcgtgaggacctgaagaacgtgttcccacctgaggtggccgtgttcgagcctagcgaggccgagatcagccacacccagaaagccaccctcgtgtgcctggctaccggcttctaccccgaccatgtggaactgtcttggtgggtcaacggcaaagaggtgcacagcggcgtgtgtaccgacccccagccactgaaagaacagcccgccctgaacgacagccggtactgcctgagcagcagactgagagtgtccgccaccttctggcagaacccccggaaccacttcagatgccaggtgcagttctacggcctgagcgagaacgacgagtggacccaggacagagccaagcccgtgacccagatcgtgtctgccgaagcctggggcagagccgatgatgtgattaagatccactggcaggaaaagaagtccaacaccatcctgggcagccaggaaggcaacaccatgaagaccaacgacacctacatgaagttcagctggctgaccgtgcccgagaagtccctggacaaagaacacagatgcatcgtgcggcacgaaaacaacaagaacggcgtggaccaggaaatcatcttcccacccatcaagaccgatgtgattacaatggaccccaaggacaactgctccaaggacgccaacgataccctgctgctccagctgaccaacaccagcgcctactacatgtacttgttgctgctgctgaagtccgtggtgtacttcgccatcatcacatgctgcctgctgcggagaaccgccttctgctgcaacggcgagaagtct

SEQ ID NO: 7682 - DNA, 2586 bp, synthetic construct
  source 1..2586: mol_type = other DNA
atggccttaccagtgaccgccttgctcctgccgctggccttgctgctccacgccgccaggccggaagtgcagctggttgaatctggcggaggactggttcagcctggcggatctctgagactgtcttgtgccgccagcggcttcagcttcagcgacttttggatgagctgggtccgacaggcccctggcaaaggacttgaatgggtcgccacaatcagccaggccggcagcgagaaggactacgtggactctgtgaagggcagattcaccatcagccgggacaacgccaagaagtccctgtacctccagatgaacagcctgagagccgaggacaccgccgtgtactattgtgcctctggcgtgtacagcttcgactacagaggccagggcaccctggtcacagtctcttctggtaccggcggaggcggatctggcggcggaggtagcggtggcggaggatctgaattcgacatccaactgactcagagccccagctttctgagcgcctctgtgggcgacagagtgaccatcacatgtagtctcagcctgggcatcagcacatggcgggattggtttccgccgaggcttggcaggggccttgagccgctgacctacgccgccagcacactgcaaagcggagtgcctagcagattttccggcagcggctctggcaccgagttcaccctgacaatatccagcctccagcctgaggacttcgccacctactactgccagcagctcaacagctaccctctgacctttggcggaggcaccaaggtggaaatcaagagactcgagatccagaaccctgatcctgccgtgtaccagctgcgggatagcaagagcagcgacaagagcgtgtgtctgttcaccgacttcgacagccagaccaacgtgtcccagagcaaggactccgacgtgtacatcaccgataagtgcgtgctggacatgcggagcatggacttcaagagcaactccgccgtggcctggtccaacaagtccgatttcgcctgcgccaacgccttcaacaacagcattatccccgaggacacattcttcccaagccccgagagcagcgactccaccgaccacgtgaagcccaaagagacagagaacaccaagcagcccagcaagagctgccacaagcccaaggccatcgtgcacaccgagaaagtgaacatgatgagcctgaccgtgctgggcctgcggatgctgttcgccaaaaccgtggccgtgaacttcctgctgaccgccaagctgttcttcctccgcgccaagagaagcggatctggcgtgaagcagaccctgaatttcgacctgctgaagctggctggcgacgtggaatccaacccaggccctactagtatggactggatttggcgcatccttttccttgtcggcgctgctaccggcgcgcattccttcgaagaagttcaactggttgagtctggtggcggcctggttaagcctggcggatctctgagactgagctgtgccgccagcggcttcacctttagcacatacggcatgagctgggtccgacaggcccctggaaaaggacttgagtgggtcgcctacatcaacaacggctccggctacatctactacgccgacagcgtgaagggcagattcaccatcagccgggacaacgccaagaacagcctgtacctccagatgaactccctgagagccgaggacaccgccgtgtactattgtgccagaggacagtggtggagcggcggagactttgattattggggccagggcaccctggtcaccgtttcttctacgcgtgaggacctgaagaacgtgttcccacctgaggtggccgtgttcgagcctagcgaggccgagatcagccacacccagaaagccaccctcgtgtgcctggctaccggcttctaccccgaccatgtggaactgtcttggtgggtcaacggcaaagaggtgcacagcggcgtgtgtaccgacccccagccactgaaagaacagcccgccctgaacgacagccggtactgcctgagcagcagactgagagtgtccgccaccttctggcagaacccccggaaccacttcagatgccaggtgcagttctacggcctgagcgagaacgacgagtggacccaggacagagccaagcccgtgacccagatcgtgtctgccgaagcctggggcagagccgatgatgtgattaagatccactggcaggaaaagaagtccaacaccatcctgggcagccaggaaggcaacaccatgaagaccaacgacacctacatgaagttcagctggctgaccgtgcccgagaagtccctggacaaagaacacagatgcatcgtgcggcacgaaaacaacaagaacggcgtggaccaggaaatcatcttcccacccatcaagaccgatgtgattacaatggaccccaaggacaactgctccaaggacgccaacgataccctgctgctccagctgaccaacaccagcgcctactacatgtacttgttgctgctgctgaagtccgtggtgtacttcgccatcatcacatgctgcctgctgcggagaaccgccttctgctgcaacggcgagaagtct

SEQ ID NO: 7683 - DNA, 2589 bp, synthetic construct
  source 1..2589: mol_type = other DNA
atggccttaccagtgaccgccttgctcctgccgctggccttgctgctccacgccgccaggccggaagtgcagctggttgaatctggcggaggactggttcagcctggcggatctctgagactgtcttgtgccgccagcggcttcagcttcagcgacttttggatgagctgggtccgacaggcccctggcaaaggacttgaatgggtcgccacaatcagccaggccggcagcgagaaggactacgtggactctgtgaagggcagattcaccatcagccgggacaacgccaagaagtccctgtacctccagatgaacagcctgagagccgaggacaccgccgtgtactattgtgcctctggcgtgtacagcttcgactacagaggccagggcaccctggtcacagtctcttctggtaccggcggaggcggatctggcggcggaggtagcggtggcggaggatctgaattcgagatcgtgctgacacagtctcccgccacactgtcactgtctccaggcgaaagagccacactgagctgtagcgccagcagcagcgtgtcctacatgtactggtatcagcagaagcccggacaggcccctagactgctgatctacagaaccagcaacctggcctctggcatccccgccagattttctggctctggcagcggcaccgatttcaccctgaccataagcagcctggaacctgaggacttcgccgtgtactactgccagcagtaccacagctaccccaccacctttggacagggcaccaaggtggaaatcaagcggacagttctcgagatccagaaccctgatcctgccgtgtaccagctgcgggatagcaagagcagcgacaagagcgtgtgtctgttcaccgacttcgacagccagaccaacgtgtcccagagcaaggactccgacgtgtacatcaccgataagtgcgtgctggacatgcggagcatggacttcaagagcaactccgccgtggcctggtccaacaagtccgatttcgcctgcgccaacgccttcaacaacagcattatccccgaggacacattcttcccaagccccgagagcagcgactccaccgaccacgtgaagcccaaagagacagagaacaccaagcagcccagcaagagctgccacaagcccaaggccatcgtgcacaccgagaaagtgaacatgatgagcctgaccgtgctgggcctgcggatgctgttcgccaaaaccgtggccgtgaacttcctgctgaccgccaagctgttcttcctccgcgccaagagaagcggatctggcgtgaagcagaccctgaatttcgacctgctgaagctggctggcgacgtggaatccaacccaggccctactagtatggactggatttggcgcatccttttccttgtcggcgctgctaccggcgcgcattccttcgaagaagtgcagctggttgaatcaggtggcggcctggttcaacctggcggatctctgagactgtcttgtgccgccagcggcttcagcttcaacacctacgccatgaactgggtccgacaggctcctggcaaaggactggaatgggtgtcccacatcagaagcaagagcaacaacttcgccacctactacgccgacagcgtgaaggacagattcaccatcagccgggacaacgccaagaacagcctgtacctccagatgaactccctgagagccgaggacaccgccgtgtattattgcgccagacaaggcggcgacttccctatggattattggggccagggcaccctggtcaccgtttcttctacgcgtgaggacctgaagaacgtgttcccacctgaggtggccgtgttcgagcctagcgaggccgagatcagccacacccagaaagccaccctcgtgtgcctggctaccggcttctaccccgaccatgtggaactgtcttggtgggtcaacggcaaagaggtgcacagcggcgtgtgtaccgacccccagccactgaaagaacagcccgccctgaacgacagccggtactgcctgagcagcagactgagagtgtccgccaccttctggcagaacccccggaaccacttcagatgccaggtgcagttctacggcctgagcgagaacgacgagtggacccaggacagagccaagcccgtgacccagatcgtgtctgccgaagcctggggcagagccgatgatgtgattaagatccactggcaggaaaagaagtccaacaccatcctgggcagccaggaaggcaacaccatgaagaccaacgacacctacatgaagttcagctggctgaccgtgcccgagaagtccctggacaaagaacacagatgcatcgtgcggcacgaaaacaacaagaacggcgtggaccaggaaatcatcttcccacccatcaagaccgatgtgattacaatggaccccaaggacaactgctccaaggacgccaacgataccctgctgctccagctgaccaacaccagcgcctactacatgtacttgttgctgctgctgaagtccgtggtgtacttcgccatcatcacatgctgcctgctgcggagaaccgccttctgctgcaacggcgagaagtct

SEQ ID NO: 7684 - DNA, 2577 bp, synthetic construct
  source 1..2577: mol_type = other DNA
atggccttaccagtgaccgccttgctcctgccgctggccttgctgctccacgccgccaggccggaagtgcagctggttgaatctggcggaggactggttcagcctggcggatctctgagactgtcttgtgccgccagcggcttcagcttcagcgacttttggatgagctgggtccgacaggcccctggcaaaggacttgaatgggtcgccacaatcagccaggccggcagcgagaaggactacgtggactctgtgaagggcagattcaccatcagccgggacaacgccaagaagtccctgtacctccagatgaacagcctgagagccgaggacaccgccgtgtactattgtgcctctggcgtgtacagcttcgactacagaggccagggcaccctggtcacagtctcttctggtaccggcggaggcggatctggcggcggaggtagcggtggcggaggatctgaattcgacgtggtcatgacacagagcccttctagcctgtctgccagcgtgggcgacagagtgaccatcacctgtaaagccagcgaggacatctacatccggctggcctggtatcagcagaagcctggaaaggcccctaagctgctgatctacgccgccacctctctggaaacaggcgtgccaagcagattttccggcagcggctctggcaccgatttcaccctgacaatatccagcctccagcctgaggacttcgccacctactactgccagcagtattggaccacaccttggacctttggcggaggcaccaaggtggaaatcaaactcgagatccagaaccctgatcctgccgtgtaccagctgcgggatagcaagagcagcgacaagagcgtgtgtctgttcaccgacttcgacagccagaccaacgtgtcccagagcaaggactccgacgtgtacatcaccgataagtgcgtgctggacatgcggagcatggacttcaagagcaactccgccgtggcctggtccaacaagtccgatttcgcctgcgccaacgccttcaacaacagcattatccccgaggacacattcttcccaagccccgagagcagcgactccaccgaccacgtgaagcccaaagagacagagaacaccaagcagcccagcaagagctgccacaagcccaaggccatcgtgcacaccgagaaagtgaacatgatgagcctgaccgtgctgggcctgcggatgctgttcgccaaaaccgtggccgtgaacttcctgctgaccgccaagctgttcttcctccgcgccaagagaagcggatctggcgtgaagcagaccctgaatttcgacctgctgaagctggctggcgacgtggaatccaacccaggccctactagtatggactggatttggcgcatccttttccttgtcggcgctgctaccggcgcgcattccttcgaacaggtgcagctccaagagtctggccctggactggtcaagcctagccagacactgagcctgacctgtaccgtgtccggctacagcatcaccatcgactacacctggaactggatcagacagcctcctggcaaaggactggaatggatcggctacatcacctacagcggcagcaccgactacaaccccagcctgaaaagccgggtgctgatctccgtggacaccagcaagaatcaggtgtccctgaagctgagcagcgtgacagccgctgataccgccgtgtactactgtgccagactgggcagaagatacgccctggattattggggccagggcaccaccgtgacagtgtcatctacgcgtgaggacctgaagaacgtgttcccacctgaggtggccgtgttcgagcctagcgaggccgagatcagccacacccagaaagccaccctcgtgtgcctggctaccggcttctaccccgaccatgtggaactgtcttggtgggtcaacggcaaagaggtgcacagcggcgtgtgtaccgacccccagccactgaaagaacagcccgccctgaacgacagccggtactgcctgagcagcagactgagagtgtccgccaccttctggcagaacccccggaaccacttcagatgccaggtgcagttctacggcctgagcgagaacgacgagtggacccaggacagagccaagcccgtgacccagatcgtgtctgccgaagcctggggcagagccgatgatgtgattaagatccactggcaggaaaagaagtccaacaccatcctgggcagccaggaaggcaacaccatgaagaccaacgacacctacatgaagttcagctggctgaccgtgcccgagaagtccctggacaaagaacacagatgcatcgtgcggcacgaaaacaacaagaacggcgtggaccaggaaatcatcttcccacccatcaagaccgatgtgattacaatggaccccaaggacaactgctccaaggacgccaacgataccctgctgctccagctgaccaacaccagcgcctactacatgtacttgttgctgctgctgaagtccgtggtgtacttcgccatcatcacatgctgcctgctgcggagaaccgccttctgctgcaacggcgagaagtct

SEQ ID NO: 7685 - DNA, 2589 bp, synthetic construct
  source 1..2589: mol_type = other DNA
atggccttaccagtgaccgccttgctcctgccgctggccttgctgctccacgccgccaggccggaagtgcagctggttgaatctggcggaggactggttcagcctggcggatctctgagactgtcttgtgccgccagcggcttcagcttcagcgacttttggatgagctgggtccgacaggcccctggcaaaggacttgaatgggtcgccacaatcagccaggccggcagcgagaaggactacgtggactctgtgaagggcagattcaccatcagccgggacaacgccaagaagtccctgtacctccagatgaacagcctgagagccgaggacaccgccgtgtactattgtgcctctggcgtgtacagcttcgactacagaggccagggcaccctggtcacagtctcttctggtaccggcggaggcggatctggcggcggaggtagcggtggcggaggatctgaattcgacatccagatgacccagaccacaagcagcctgtctgccagcctgggcgacagagtgaccatctcttgtagagccagccaggacatcagcaactacctgaactggtatcagcagaaacccgacggcaccgtgaagctgctgatctactacaccagcatcctgcacagcggcgtgcccagcagattttctggctctggcagcggcaccgactacagcctgaccatcagcaatctggaacaagaggacttcgctacctacttctgccagcaaggcaacaccctgccttggacatttggcggaggcaccaagctggaaatcaaagctctcgagatccagaaccctgatcctgccgtgtaccagctgcgggatagcaagagcagcgacaagagcgtgtgtctgttcaccgacttcgacagccagaccaacgtgtcccagagcaaggactccgacgtgtacatcaccgataagtgcgtgctggacatgcggagcatggacttcaagagcaactccgccgtggcctggtccaacaagtccgatttcgcctgcgccaacgccttcaacaacagcattatccccgaggacacattcttcccaagccccgagagcagcgactccaccgaccacgtgaagcccaaagagacagagaacaccaagcagcccagcaagagctgccacaagcccaaggccatcgtgcacaccgagaaagtgaacatgatgagcctgaccgtgctgggcctgcggatgctgttcgccaaaaccgtggccgtgaacttcctgctgaccgccaagctgttcttcctccgcgccaagagaagcggatctggcgtgaagcagaccctgaatttcgacctgctgaagctggctggcgacgtggaatccaacccaggccctactagtatggactggatttggcgcatccttttccttgtcggcgctgctaccggcgcgcattccttcgaagtgcaactggttgaatctggcggcggactggttaagcctggcggatctctgaagctgagctgtgccgcctctggcttcgccttcagcatctacgatatgagctgggtccgacagacccctgagaagagactggaatgggtcgcctacatctctagcggcggagggacctactatcccgacacagtgaagggcagattcaccatctccagagacaacgccaagaacaccctgtacctccagatgagcagcctgaagtccgaggacaccgccatgtactactgcgccagacacagcggctatggcacacattggggagtgctgtttgcctactggggccagggaacactggtcacagtttctgctacgcgtgaggacctgaagaacgtgttcccacctgaggtggccgtgttcgagcctagcgaggccgagatcagccacacccagaaagccaccctcgtgtgcctggctaccggcttctaccccgaccatgtggaactgtcttggtgggtcaacggcaaagaggtgcacagcggcgtgtgtaccgacccccagccactgaaagaacagcccgccctgaacgacagccggtactgcctgagcagcagactgagagtgtccgccaccttctggcagaacccccggaaccacttcagatgccaggtgcagttctacggcctgagcgagaacgacgagtggacccaggacagagccaagcccgtgacccagatcgtgtctgccgaagcctggggcagagccgatgatgtgattaagatccactggcaggaaaagaagtccaacaccatcctgggcagccaggaaggcaacaccatgaagaccaacgacacctacatgaagttcagctggctgaccgtgcccgagaagtccctggacaaagaacacagatgcatcgtgcggcacgaaaacaacaagaacggcgtggaccaggaaatcatcttcccacccatcaagaccgatgtgattacaatggaccccaaggacaactgctccaaggacgccaacgataccctgctgctccagctgaccaacaccagcgcctactacatgtacttgttgctgctgctgaagtccgtggtgtacttcgccatcatcacatgctgcctgctgcggagaaccgccttctgctgcaacggcgagaagtct

SEQ ID NO: 7686 - DNA, 2622 bp, synthetic construct
  source 1..2622: mol_type = other DNA
atggccttaccagtgaccgccttgctcctgccgctggccttgctgctccacgccgccaggccggaagtgcagctggttgaatctggcggaggactggttcagcctggcggatctctgagactgtcttgtgccgccagcggcttcagcttcagcgacttttggatgagctgggtccgacaggcccctggcaaaggacttgaatgggtcgccacaatcagccaggccggcagcgagaaggactacgtggactctgtgaagggcagattcaccatcagccgggacaacgccaagaagtccctgtacctccagatgaacagcctgagagccgaggacaccgccgtgtactattgtgcctctggcgtgtacagcttcgactacagaggccagggcaccctggtcacagtctcttctggtaccggcggaggcggatctggcggcggaggtagcggtggcggaggatctgaattcgacatcgtgatgacacagagccctgatagcctggccgtgtctctgggagagagagccaccatcaactgcaagagcagccagagcctgctgtacagaagcaaccagaagaactacctggcctggtatcagcagaagcccggccagcctcctaagctgctgatctactgggccagcaccagagaaagcggcgtgcccgatagattttctggctctggcagcggcaccgacttcaccctgacaatttctagcctgcaagccgaggacgtggccgtgtactactgccagcagtattacaactaccccagaaccttcggccagggcaccaaggtggaaatcaagagaacagttctcgagatccagaaccctgatcctgccgtgtaccagctgcgggatagcaagagcagcgacaagagcgtgtgtctgttcaccgacttcgacagccagaccaacgtgtcccagagcaaggactccgacgtgtacatcaccgataagtgcgtgctggacatgcggagcatggacttcaagagcaactccgccgtggcctggtccaacaagtccgatttcgcctgcgccaacgccttcaacaacagcattatccccgaggacacattcttcccaagccccgagagcagcgactccaccgaccacgtgaagcccaaagagacagagaacaccaagcagcccagcaagagctgccacaagcccaaggccatcgtgcacaccgagaaagtgaacatgatgagcctgaccgtgctgggcctgcggatgctgttcgccaaaaccgtggccgtgaacttcctgctgaccgccaagctgttcttcctccgcgccaagagaagcggatctggcgtgaagcagaccctgaatttcgacctgctgaagctggctggcgacgtggaatccaacccaggccctactagtatggactggatttggcgcatccttttccttgtcggcgctgctaccggcgcgcattccttcgaagaagttcagctgcttgaatcaggcggcggactggttcaacctggcggatctctgagactgagctgtgccgccagcggctacagcatcacaagcgactatgcctggaactgggtccgacaggcccctggcaaaggactggaatgggtgtcctacatcagcaacagcggcagcaccagctacaaccccagcctgaagtcccggttcaccatcagcagagacaacagcaagaacaccctgtacctccagatgaacagcctgagagctgaggacaccgccgtgtattattgcgccaaagagcggaactacgactacgacgattactactacgctatggactactggggccagggaaccctggtcacagtctcttctacgcgtgaggacctgaagaacgtgttcccacctgaggtggccgtgttcgagcctagcgaggccgagatcagccacacccagaaagccaccctcgtgtgcctggctaccggcttctaccccgaccatgtggaactgtcttggtgggtcaacggcaaagaggtgcacagcggcgtgtgtaccgacccccagccactgaaagaacagcccgccctgaacgacagccggtactgcctgagcagcagactgagagtgtccgccaccttctggcagaacccccggaaccacttcagatgccaggtgcagttctacggcctgagcgagaacgacgagtggacccaggacagagccaagcccgtgacccagatcgtgtctgccgaagcctggggcagagccgatgatgtgattaagatccactggcaggaaaagaagtccaacaccatcctgggcagccaggaaggcaacaccatgaagaccaacgacacctacatgaagttcagctggctgaccgtgcccgagaagtccctggacaaagaacacagatgcatcgtgcggcacgaaaacaacaagaacggcgtggaccaggaaatcatcttcccacccatcaagaccgatgtgattacaatggaccccaaggacaactgctccaaggacgccaacgataccctgctgctccagctgaccaacaccagcgcctactacatgtacttgttgctgctgctgaagtccgtggtgtacttcgccatcatcacatgctgcctgctgcggagaaccgccttctgctgcaacggcgagaagtct

SEQ ID NO: 7687 - DNA, 2601 bp, synthetic construct
  source 1..2601: mol_type = other DNA
atggccttaccagtgaccgccttgctcctgccgctggccttgctgctccacgccgccaggccggaagtgcagctggttgaatctggcggaggactggttcagcctggcggatctctgagactgtcttgtgccgccagcggcttcagcttcagcgacttttggatgagctgggtccgacaggcccctggcaaaggacttgaatgggtcgccacaatcagccaggccggcagcgagaaggactacgtggactctgtgaagggcagattcaccatcagccgggacaacgccaagaagtccctgtacctccagatgaacagcctgagagccgaggacaccgccgtgtactattgtgcctctggcgtgtacagcttcgactacagaggccagggcaccctggtcacagtctcttctggtaccggcggaggcggatctggcggcggaggtagcggtggcggaggatctgaattcgacgtggtcatgacacagagccctctgagcctgcctgtgacacttggacagcctgccagcatcagctgtagaagcagccagagcctgctgcacagcagcggcaatacctacctggaatggtatcagcagaggcccggacagagccccagacctctgatctacaagatcagcacccggttcagcggcgtgcccgatagattttctggctctggcagcggcaccgacttcaccctgaagattagcagagtggaagccgaggacgtgggcgtgtactactgcttccaaggcagccacgtgccatacacctttggcggcggaacaaaggtggaaatcaagagactcgagatccagaaccctgatcctgccgtgtaccagctgcgggatagcaagagcagcgacaagagcgtgtgtctgttcaccgacttcgacagccagaccaacgtgtcccagagcaaggactccgacgtgtacatcaccgataagtgcgtgctggacatgcggagcatggacttcaagagcaactccgccgtggcctggtccaacaagtccgatttcgcctgcgccaacgccttcaacaacagcattatccccgaggacacattcttcccaagccccgagagcagcgactccaccgaccacgtgaagcccaaagagacagagaacaccaagcagcccagcaagagctgccacaagcccaaggccatcgtgcacaccgagaaagtgaacatgatgagcctgaccgtgctgggcctgcggatgctgttcgccaaaaccgtggccgtgaacttcctgctgaccgccaagctgttcttcctccgcgccaagagaagcggatctggcgtgaagcagaccctgaatttcgacctgctgaagctggctggcgacgtggaatccaacccaggccctactagtatggactggatttggcgcatccttttccttgtcggcgctgctaccggcgcgcattccttcgaacaagttcagctggttcagagcggagccgaagtgaagaaacctggggcctctgtgaaggtgtcctgcaaagcctctggcctgaccatcgaggactactacatgcactgggtccgacaggcccctggacaaggacttgaatggatgggctggatcgaccccgagaacggcgatacagagtacggccctaagttccagggcagagtgaccatgaccagagacaccagcatcaacaccgcctacatggaactgagccggctgagatccgatgacaccgccgtgtactattgcgccgtgcacaatgcccactacggcacttggtttgcctattggggccagggcacactggtcaccgttagctctacgcgtgaggacctgaagaacgtgttcccacctgaggtggccgtgttcgagcctagcgaggccgagatcagccacacccagaaagccaccctcgtgtgcctggctaccggcttctaccccgaccatgtggaactgtcttggtgggtcaacggcaaagaggtgcacagcggcgtgtgtaccgacccccagccactgaaagaacagcccgccctgaacgacagccggtactgcctgagcagcagactgagagtgtccgccaccttctggcagaacccccggaaccacttcagatgccaggtgcagttctacggcctgagcgagaacgacgagtggacccaggacagagccaagcccgtgacccagatcgtgtctgccgaagcctggggcagagccgatgatgtgattaagatccactggcaggaaaagaagtccaacaccatcctgggcagccaggaaggcaacaccatgaagaccaacgacacctacatgaagttcagctggctgaccgtgcccgagaagtccctggacaaagaacacagatgcatcgtgcggcacgaaaacaacaagaacggcgtggaccaggaaatcatcttcccacccatcaagaccgatgtgattacaatggaccccaaggacaactgctccaaggacgccaacgataccctgctgctccagctgaccaacaccagcgcctactacatgtacttgttgctgctgctgaagtccgtggtgtacttcgccatcatcacatgctgcctgctgcggagaaccgccttctgctgcaacggcgagaagtct

SEQ ID NO: 7688 - DNA, 2577 bp, synthetic construct
  source 1..2577: mol_type = other DNA
atggccttaccagtgaccgccttgctcctgccgctggccttgctgctccacgccgccaggccggaagtgcagctggttgaatctggcggaggactggttcagcctggcggatctctgagactgtcttgtgccgccagcggcttcagcttcagcgacttttggatgagctgggtccgacaggcccctggcaaaggacttgaatgggtcgccacaatcagccaggccggcagcgagaaggactacgtggactctgtgaagggcagattcaccatcagccgggacaacgccaagaagtccctgtacctccagatgaacagcctgagagccgaggacaccgccgtgtactattgtgcctctggcgtgtacagcttcgactacagaggccagggcaccctggtcacagtctcttctggtaccggcggaggcggatctggcggcggaggtagcggtggcggaggatctgaattcgacatccagatgacacagagccctagcagcctgtctgccagcgtgggagacagagtgaccatcacctgtagagccagcgagaacatctacagcaacctggcctggtatcagcagaagcctggcaaggcccctaagctgctgatctacgccgccaccaatctggctgatggcgtgccaagcagattttccggctctggcagcggcaccgatttcaccctgacaatatccagcctccagcctgaggacttcgccacctactactgccagcacttttggggcacccctacattcggccagggcaccaaggtggaaatcaagagaacagttctcgagatccagaaccctgatcctgccgtgtaccagctgcgggatagcaagagcagcgacaagagcgtgtgtctgttcaccgacttcgacagccagaccaacgtgtcccagagcaaggactccgacgtgtacatcaccgataagtgcgtgctggacatgcggagcatggacttcaagagcaactccgccgtggcctggtccaacaagtccgatttcgcctgcgccaacgccttcaacaacagcattatccccgaggacacattcttcccaagccccgagagcagcgactccaccgaccacgtgaagcccaaagagacagagaacaccaagcagcccagcaagagctgccacaagcccaaggccatcgtgcacaccgagaaagtgaacatgatgagcctgaccgtgctgggcctgcggatgctgttcgccaaaaccgtggccgtgaacttcctgctgaccgccaagctgttcttcctccgcgccaagagaagcggatctggcgtgaagcagaccctgaatttcgacctgctgaagctggctggcgacgtggaatccaacccaggccctactagtatggactggatttggcgcatccttttccttgtcggcgctgctaccggcgcgcattccttcgaagaagtgcagctggttgaatcaggtggcggcctggttcaacctggcggatctctgagactgagctgtgccgcctctggcttcagcctgacaaattacggcgtgcactgggtccgacaggcccctggaaaaggactggaatgggtgtccgtgatttggagcggcggcagcaccgattacaacgccgccttcatcagccggttcaccatcagcgccgacaccagcaagaataccgcctacctccagatgaactccctgagagccgaggacaccgccgtgtactattgcgccagagaactgatccacgctatggacaactggggccagggaaccctggtcacagtctcttctacgcgtgaggacctgaagaacgtgttcccacctgaggtggccgtgttcgagcctagcgaggccgagatcagccacacccagaaagccaccctcgtgtgcctggctaccggcttctaccccgaccatgtggaactgtcttggtgggtcaacggcaaagaggtgcacagcggcgtgtgtaccgacccccagccactgaaagaacagcccgccctgaacgacagccggtactgcctgagcagcagactgagagtgtccgccaccttctggcagaacccccggaaccacttcagatgccaggtgcagttctacggcctgagcgagaacgacgagtggacccaggacagagccaagcccgtgacccagatcgtgtctgccgaagcctggggcagagccgatgatgtgattaagatccactggcaggaaaagaagtccaacaccatcctgggcagccaggaaggcaacaccatgaagaccaacgacacctacatgaagttcagctggctgaccgtgcccgagaagtccctggacaaagaacacagatgcatcgtgcggcacgaaaacaacaagaacggcgtggaccaggaaatcatcttcccacccatcaagaccgatgtgattacaatggaccccaaggacaactgctccaaggacgccaacgataccctgctgctccagctgaccaacaccagcgcctactacatgtacttgttgctgctgctgaagtccgtggtgtacttcgccatcatcacatgctgcctgctgcggagaaccgccttctgctgcaacggcgagaagtct

SEQ ID NO: 7689 - DNA, 2598 bp, synthetic construct
  source 1..2598: mol_type = other DNA
atggccttaccagtgaccgccttgctcctgccgctggccttgctgctccacgccgccaggccggaagtgcagctggttgaatctggcggaggactggttcagcctggcggatctctgagactgtcttgtgccgccagcggcttcagcttcagcgacttttggatgagctgggtccgacaggcccctggcaaaggacttgaatgggtcgccacaatcagccaggccggcagcgagaaggactacgtggactctgtgaagggcagattcaccatcagccgggacaacgccaagaagtccctgtacctccagatgaacagcctgagagccgaggacaccgccgtgtactattgtgcctctggcgtgtacagcttcgactacagaggccagggcaccctggtcacagtctcttctggtaccggcggaggcggatctggcggcggaggtagcggtggcggaggatctgaattcgacttcgtgatgacacagagccctctgagcctgcctgtgacacctggcgaacctgccagcatcagctgtagaagcagccagagcatcgtgcacagcaacggcaacacctacctggaatggtatctccagaagcctggacagagcccacagctgctgatctacaaggtgtccaacagattcagcggcgtgcccgacagattttctggcagcggctctggcaccgacttcaccctgaagattagcagagtggaagccgaggacgtgggcgtgtactactgcttccaaggctctcacgtgcccctgacctttggacagggcaccaagctggaaatcaagagactcgagatccagaaccctgatcctgccgtgtaccagctgcgggatagcaagagcagcgacaagagcgtgtgtctgttcaccgacttcgacagccagaccaacgtgtcccagagcaaggactccgacgtgtacatcaccgataagtgcgtgctggacatgcggagcatggacttcaagagcaactccgccgtggcctggtccaacaagtccgatttcgcctgcgccaacgccttcaacaacagcattatccccgaggacacattcttcccaagccccgagagcagcgactccaccgaccacgtgaagcccaaagagacagagaacaccaagcagcccagcaagagctgccacaagcccaaggccatcgtgcacaccgagaaagtgaacatgatgagcctgaccgtgctgggcctgcggatgctgttcgccaaaaccgtggccgtgaacttcctgctgaccgccaagctgttcttcctccgcgccaagagaagcggatctggcgtgaagcagaccctgaatttcgacctgctgaagctggctggcgacgtggaatccaacccaggccctactagtatggactggatttggcgcatccttttccttgtcggcgctgctaccggcgcgcattccttcgaagaagtgcagctggttgaaagcggagccgaagtgaagaaacctggggcctctgtgaaggtgtcctgcaaggccagcggctacacctttaccagctactggattcactgggtccgacaggcccctggacaaggacttgagtggatgggcgagaacgacccctccaacggcaggaccaactacaacgagaagttcaagaaccgcgtgaccctgaccgtggacaccagcatctctaccgcctacatggaactgagccggctgagatccgatgacaccgccgtgtactattgcgccagaggacccaactacttttacagcatggactactggggccagggcacaatggtcaccgttagctctacgcgtgaggacctgaagaacgtgttcccacctgaggtggccgtgttcgagcctagcgaggccgagatcagccacacccagaaagccaccctcgtgtgcctggctaccggcttctaccccgaccatgtggaactgtcttggtgggtcaacggcaaagaggtgcacagcggcgtgtgtaccgacccccagccactgaaagaacagcccgccctgaacgacagccggtactgcctgagcagcagactgagagtgtccgccaccttctggcagaacccccggaaccacttcagatgccaggtgcagttctacggcctgagcgagaacgacgagtggacccaggacagagccaagcccgtgacccagatcgtgtctgccgaagcctggggcagagccgatgatgtgattaagatccactggcaggaaaagaagtccaacaccatcctgggcagccaggaaggcaacaccatgaagaccaacgacacctacatgaagttcagctggctgaccgtgcccgagaagtccctggacaaagaacacagatgcatcgtgcggcacgaaaacaacaagaacggcgtggaccaggaaatcatcttcccacccatcaagaccgatgtgattacaatggaccccaaggacaactgctccaaggacgccaacgataccctgctgctccagctgaccaacaccagcgcctactacatgtacttgttgctgctgctgaagtccgtggtgtacttcgccatcatcacatgctgcctgctgcggagaaccgccttctgctgcaacggcgagaagtct

SEQ ID NO: 7690 - DNA, 2577 bp, synthetic construct
  source 1..2577: mol_type = other DNA
atggccttaccagtgaccgccttgctcctgccgctggccttgctgctccacgccgccaggccggaagtgcagctggttgaatctggcggaggactggttcagcctggcggatctctgagactgtcttgtgccgccagcggcttcagcttcagcgacttttggatgagctgggtccgacaggcccctggcaaaggacttgaatgggtcgccacaatcagccaggccggcagcgagaaggactacgtggactctgtgaagggcagattcaccatcagccgggacaacgccaagaagtccctgtacctccagatgaacagcctgagagccgaggacaccgccgtgtactattgtgcctctggcgtgtacagcttcgactacagaggccagggcaccctggtcacagtctcttctggtaccggcggaggcggatctggcggcggaggtagcggtggcggaggatctgaattcgacatccagctgactcagagccctagctttctgagcgccagcgtgggcgacagagtgaccatcacatgtagcgccagatccagcatcagcttcatgtactggtatcagcagaagcccggcaaggcccctaagctgctgatctacgacaccagcaatctggcctctggcgtgcccagcagattttctggaagcggcagcggcaccgagttcaccctgacaatctctagcctggaagccgaggatgccgccacctactattgccagcagtggtccagctatcccctgacatttggacagggcaccaagctggaaatcaaactcgagatccagaaccctgatcctgccgtgtaccagctgcgggatagcaagagcagcgacaagagcgtgtgtctgttcaccgacttcgacagccagaccaacgtgtcccagagcaaggactccgacgtgtacatcaccgataagtgcgtgctggacatgcggagcatggacttcaagagcaactccgccgtggcctggtccaacaagtccgatttcgcctgcgccaacgccttcaacaacagcattatccccgaggacacattcttcccaagccccgagagcagcgactccaccgaccacgtgaagcccaaagagacagagaacaccaagcagcccagcaagagctgccacaagcccaaggccatcgtgcacaccgagaaagtgaacatgatgagcctgaccgtgctgggcctgcggatgctgttcgccaaaaccgtggccgtgaacttcctgctgaccgccaagctgttcttcctccgcgccaagagaagcggatctggcgtgaagcagaccctgaatttcgacctgctgaagctggctggcgacgtggaatccaacccaggccctactagtatggactggatttggcgcatccttttccttgtcggcgctgctaccggcgcgcattccttcgaacaggttcagctggttcagtctggggccgaagtgaagaaacctggggcctctgtgaaggtgtcctgcaaggcttccggctacacctttaccggctcttggatgaactgggtccgacaggctcctggacagggactcgaatggatcggcagaatctatcctggcgacggcgagacaaactacaacggcaagttcaaggaccgcgtgacaatcaccgccgacaagagcacaagcaccgcctacatggaactgagcagcctgcggagcgaagataccgccgtgtactactgcgcccggatctacggcaacaacgtgtacttcgatgtgtggggccagggcacaaccgtgacagtctcttctacgcgtgaggacctgaagaacgtgttcccacctgaggtggccgtgttcgagcctagcgaggccgagatcagccacacccagaaagccaccctcgtgtgcctggctaccggcttctaccccgaccatgtggaactgtcttggtgggtcaacggcaaagaggtgcacagcggcgtgtgtaccgacccccagccactgaaagaacagcccgccctgaacgacagccggtactgcctgagcagcagactgagagtgtccgccaccttctggcagaacccccggaaccacttcagatgccaggtgcagttctacggcctgagcgagaacgacgagtggacccaggacagagccaagcccgtgacccagatcgtgtctgccgaagcctggggcagagccgatgatgtgattaagatccactggcaggaaaagaagtccaacaccatcctgggcagccaggaaggcaacaccatgaagaccaacgacacctacatgaagttcagctggctgaccgtgcccgagaagtccctggacaaagaacacagatgcatcgtgcggcacgaaaacaacaagaacggcgtggaccaggaaatcatcttcccacccatcaagaccgatgtgattacaatggaccccaaggacaactgctccaaggacgccaacgataccctgctgctccagctgaccaacaccagcgcctactacatgtacttgttgctgctgctgaagtccgtggtgtacttcgccatcatcacatgctgcctgctgcggagaaccgccttctgctgcaacggcgagaagtct
